United States Patent Application Publication US 2021/0260178 A1 - sequence listing, part 13

SEQ ID NO: 21208 - RNA, 2021 nt, Artificial Sequence
  mRNA product Design a-2 (hSL-A64-N5) comprising derived and/or modified sequence from LASV(ISTH2010-NIG-2012;Clade II)__AIT17483__SP-IgE_NP(2-569) (opt5)
aggagaguccgcucagccagguugcagaagcggcuuagcguguguccuaaucuucucucugcguguagguaggccugugccgcaaacaagcuuaccauggacuggaccuggauccuguuccucguggccgcugccacaagaguccacagcagcgccuccaaggaggugaaaucuuuccuguggacccagagccucagacgggaacuguccggcuacugcucuaacaucaaacuucaagucguuaaggacgcucaggcccugcuccacgggcuggauuuuagcgagguguccaaugugcagcgccuuaugagaaagcagaaacgggacgauucugaccugaagcgccucagagaucugaaccaagcggucaauaaccugguggaacucaagagcacacagcagaaauccauucugcggguuggaacgcuuaccagcgacgaucugcucacacuggcugccgaccuugagaagcugaaaucuaaggugauccgcaccgaaagaccccucuccagcggcgucuauauggggaaucugucuacacagcaacuggagcagcggcgcgcccuccugaaccuuauuggaauggugggcggggcucagggaacccagccuggcagagauggcguugugcgggucugggacgugaaaaauccggaucugcucaacaaucaauucgggacaaugcccucccugacccuugccugucugacgaagcagggacagguggaccucaacgaugcuguccuggcccugaccgaccucggccugaucuacacagcgaaguauccuaauagcucugaccuugaucgccugucccaaagccaucccauucucaacaugguugacaccaaaaaguccucucugaauaucagcggguuuaacuucucccuuggagccgcugugaaagccggcgcuugcaugcuggaugggggaaauaugcucgagacaaucaaggugaccccucagacgauggacggcauucugaaaagcauccugaaggucaaaaagucucucggcauguuuguguccgauacacccggggaaagaaacccuuacgagaacauucuguauaagaucugucuuagcggagacggcuggccguacauugccucucggaccagcaucguugggcgcgcgugggaaaauacaaccguggaucuggaguccgacggaaaaccccacaaggucggcaccgccgggucuaacaaaagccuccaguccgcuggauucccuacaggccugacguauagccagcugaugacccuuaaggauucuaugaugcaacucgaccccuccgccaaaacauggauugauaucgagggcagaccugaagaccccguggagaucgcucuguaccagccgaugagcgggugcuacauucacuuuuuccgggaaccuaccgaccugaagcaguuuaagcaggaugccaaauauucucauggaaucgacguugccgaucucuuccccgcucaaccuggccugacauccgcggugauugaggcccuucccagaaauaugguccugaccugucaggggagcgacgauaucaagcgccuccuggacucccagggacggagagauauuaaacugaucgacaucgcucuuucuaaggccgauagccgccgguuugaaaacgccgugugggaccagugcaaagaucucugucauaugcacacgggcgucgugguugagaagaagaaaagagggggcaaggaggaaauuacaccccacugcgcucugauggacuguaucauguacgaugccgcgguguccggaggccugaauauuccuguccuccgcgcugugcugccgcgggacaugguuuucagaaccucuagccccaaagugguccuuugaggacuagucccuguucccagagcccacuuuuuuuucuuuuuuugaaauaaaauagccugucuuucagaucucaaaggcucuuuucagagccaccaaaaaaaaaaaaaaaaaaaaaaaaaaaaaaaaaaaaaaaaaaaaaaaaaaaaaaaaaaaaaaaaagaauu

SEQ ID NO: 21209 - RNA, 2021 nt, Artificial Sequence
  mRNA product Design a-2 (hSL-A64-N5) comprising derived and/or modified sequence from LASV(Lassa virus/H.sapiens-wt/NGA/2015/ISTH_0543;Clade II)__AVO03640__SP-IgE_NP(2-569) (opt5)
aggagaguccgcucagccagguugcagaagcggcuuagcguguguccuaaucuucucucugcguguagguaggccugugccgcaaacaagcuuaccauggacuggaccuggauccuguuccucguggccgcugccacaagaguccacagcagcgccuccaaggaggugaaaucuuuccuguggacccagagccucagacgggaacuguccggcuacugcucuaacaucaaacuucaagucguuaaggacgcucaggcccugcuccacgggcuggauuuuagcgagguguccaaugugcagcgccuuaugagaaagcagaaacgggacgauucugaccugaagcgccucagagaucugaaccaagcggucaauaaccugguggaacucaagagcacacagcagaaauccauucugcggguuggaacgcuuaccagcgacgaucugcucacacuggcugccgaccuugagaagcugaaaucuaaggugauccgcaccgaaagaccccucuccagcggcgucuauauggggaaucugucuacacagcaacuggagcagcggcgcgcccuccugaacaugauuggaauggugggcggggcucagggaacccagccuggcagagauggcguugugcgggucugggacgugaaaaauccggaucuucugaacaaucaauucgggacaaugcccucccucacccuggccugucuuacgaagcagggacagguggaccugaacgaugcuguccucgcccugaccgaccugggccucaucuacacagcgaaguauccuaauagcucugaccuggaucgccuuucccaaagccaucccauucugaacaugguugacaccaaaaaguccucucucaauaucagcggguacaacuuuucccugggagccgcugugaaagccggcgcuugcaugcuugaugggggaaauaugcuggagacaaucaaggugaccccucagacgauggacggcauucucaaaagcauccugaaggucaaaaagucucugggcauguucguguccgauacacccggggaaagaaacccuuaugagaacauucucuacaagaucugucugagcggagacggcuggccguauauugccucucggaccagcaucguugggcgcgcgugggaaaauacaaccguggaucuugaguccgacggaaaaccccagaaggucggcucugccgggagcaacaaaucccugcagagcgcuggauuuccuaccggccucacauacucucaacugaugacgcugaaggauuccaugaugcagcuugaccccagcgccaaaaccuggauugauaucgagggcagaccugaagaccccguggagaucgcucucuaccagccgaugucugggugcuauauucacuucuuucgggaaccuacagaccugaagcaguucaagcaagaugccaaauacucccauggaaucgacguugccgaucuguuucccgcucagccuggccucaccagcgcggugauugaggcccugcccagaaauaugguccuuacaugucagggguccgacgauaucaagcgccugcucgacucucagggacggaaagauauuaagcugaucgacaucgcucugagcaaagccgauuccagacgcuucgaaaacgccgugugggaccaaugcaaggaucuuugucacaugcauaccggcgucgugguugagaagaaaaagagagggggcaaagaggaaauuacgccccacugcgcucucauggacuguaucauguaugaugccgcggugucuggaggccugaauauuccuguccugcgggcugugcucccgcgcgacaugguuuuucggacaagcucccccaaggugguccugugaggacuagucccuguucccagagcccacuuuuuuuucuuuuuuugaaauaaaauagccugucuuucagaucucaaaggcucuuuucagagccaccaaaaaaaaaaaaaaaaaaaaaaaaaaaaaaaaaaaaaaaaaaaaaaaaaaaaaaaaaaaaaaaaagaauu

SEQ ID NO: 21210 - RNA, 2021 nt, Artificial Sequence
  mRNA product Design a-2 (hSL-A64-N5) comprising derived and/or modified sequence from LASV(Lassa virus/H.sapiens-wt/NGA/2016/ISTH_0009;Clade II)__AVO03572__SP-IgE_NP(2-569) (opt5)
aggagaguccgcucagccagguugcagaagcggcuuagcguguguccuaaucuucucucugcguguagguaggccugugccgcaaacaagcuuaccauggacuggaccuggauccuguuccucguggccgcugccacaagaguccacagcagcgccuccaaggaggugaaaucuuuccuguggacccagagccucagacgggaacuguccggcuacugcucuaacaucaaacuucaagucguuaaggacgcucaggcccugcuccacgggcuggauuuuagcgagguguccaaugugcagcgccuuaugagaaagcagaaacgggacgauucugaccugaagcgccucagagaucugaaccaagcggucaauaaccugguggaacucaagagcacacagcagaaauccauucugcggguuggaacgcuuaccagcgacgaucugcucacacuggcugccgaccuugagaagcugaaaucuaaggugauccgcaccgaaagaccccucuccagcggcgucuauauggggaaucugucuacacagcaacuggagcagcggcgcgcccuccugaacaugauuggaauggugggcggggcucagggaacccagccuggcagagauggcguugugcgggucugggacgugaaaaauccggaucuucugaacaaucaauucgggacaaugcccucccucacccuggccugucuuacgaagcagggacagguggaccugaacgaugcuguccucgcccugaccgaccugggccucaucuacacagcgaaguauccuaauagcucugaccuggaucgccuuucccaaagccaucccauucugaacaugguugacaccaaaaaguccucucucaauaucagcggguacaacuuuucccugggagccgcugugaaagccggcgcuugcaugcuugaugggggaaauaugcuggagacaaucaaggugaccccucagacgauggacggcauucucaaaagcauccugaaggucaaaaagucucugggcauguucguguccgauacacccggggaaagaaacccuuaugagaacauucucuacaagaucugucugagcggagacggcuggccguauauugccucucggaccagcaucguugggcgcgcgugggaaaauacaaccguggaucuugaguccgacggaaaaccccagaaggucggcucugccgggagcaacaaaucccugcagagcgcuggauuuccuaccggccucacauacucucaacugaugacgcugaaggauuccaugaugcagcuugaccccagcgccaaaaccuggauugauaucgagggcagaccugaagaccccguggagaucgcucucuaccagccgaugucugggugcuauauucacuucuuucgggaaccuacagaccugaagcaguucaagcaagaugccaaauacucccauggaaucgacguugccgaucuguuucccgcucagccuggccucaccagcgcggugauugaggcccugcccagaaauaugguccuuacaugucagggguccgacgauaucaagcgccugcucgacucucagggacggagagauauuaaacugaucgacaucgcucugagcaaggccgauucccgccgguucgaaaacgccgugugggaccaaugcaaagaucuuugucacaugcauaccggcgucgugguugagaagaagaaaagagggggcaaggaggaaauuacgccccacugcgcucucauggacuguaucauguaugaugccgcggugucuggaggccugaauauuccuguccugcgcgcugugcucccgcgggacaugguuuuuagaacaagcucccccaaagugguccugugaggacuagucccuguucccagagcccacuuuuuuuucuuuuuuugaaauaaaauagccugucuuucagaucucaaaggcucuuuucagagccaccaaaaaaaaaaaaaaaaaaaaaaaaaaaaaaaaaaaaaaaaaaaaaaaaaaaaaaaaaaaaaaaaagaauu

SEQ ID NO: 21211 - RNA, 2021 nt, Artificial Sequence
  mRNA product Design a-2 (hSL-A64-N5) comprising derived and/or modified sequence from LASV(Lassa virus/H.sapiens-wt/NGA/2016/ISTH_0017;Clade II)__AVO03568__SP-IgE_NP(2-569) (opt5)
aggagaguccgcucagccagguugcagaagcggcuuagcguguguccuaaucuucucucugcguguagguaggccugugccgcaaacaagcuuaccauggacuggaccuggauccuguuccucguggccgcugccacaagaguccacagcagcgccuccaaggaggugaaaucuuuccuguggacccagagccucagacgggaacuguccggcuacugcucuagcaucaaacuucaagucguuaaggacgcucaggcccugcuccacgggcuggauuuuuccgaggugucuaacgugcagcgccuuaugagaaagcagaaacgggacgauagcgaccugaagcgccucagagaucugaaucaagcggucaacaaucugguggaacucaaguccacacagcagaaaagcauucugcggguuggaacgcuuaccucugacgaucugcucacacuggcugccgaccuugagaagcugaaauccaaggugauccgcaccgaaagaccccucagcucuggcgucuauauggggaaccuguccacacagcaacuggagcagcggcgcgcccuccugaauaugauuggaauggcuggcggggcccagggaacccagccuggcagagauggcgugguucgggugugggacgucaaaaacccggaucuucugaauaaccaauucgggacaaugcccagccucacccuggcuugucuuacgaagcagggacagguggaccugaaugaugccgugcucgcgcugaccgaccugggccucaucuacacagccaaguauccuaacucuuccgaccuggaucgccuuagccaaucccaucccauucugaauauggucgacaccaaaaagucuagccucaacaucuccggguacaauuuuagccugggagcugccguuaaagcuggcgccugcaugcuugaugggggaaacaugcuggagacaaucaaggugaccccucagacgauggacggcauucucaaaucuauccugaaggugaaaagaucccugggcauguucgucagcgaugcgcccggggaacggaauccuuaugagaacauucucuacaagaucugucugucuggagacggcuggccguauauugccagccgcacauccaucguggggagagcuugggaaaacaccacaguugaucuugagucugacggaaagccccagaaagugggcgccaccgggagcaauaagucccugcagagcgcuggauuuccuaccggccucacauacucucaacugaugacgcugaaagauuccaugaugcagcuugaccccagcgccaagaccuggauugauaucgagggccggccugaagaccccgucgagguggcccucuaccagccgguuucugggugcuauauccacuucuuuagagaaccuacagaccugaaacaguucaagcaagaugcuaaguacucccauggaauugacguggcggaucuguuucccgcccagccuggccucaccagcgcugucaucgaggcccugccccgcaacauggugcuuacaugucagggguccgacgauauuaaaaagcugcucgacucucagggacggaaagauaucaagcugauugacaucgcccugagcaaagcugauuccagacgcuucgaaaaugccgucugggaccaaugcaaggaucuuugucacaugcauaccggcgugguuguggagaagaaaaagagagggggcaaagaggaaaucacgccccacugcgcgcucauggacuguauuauguaugaugcugccgucucuggaggccugaacaucccugugcugcgggccguucucccgcgcgacaugguguuucggacaagcucccccaaggucgugcugugaggacuagucccuguucccagagcccacuuuuuuuucuuuuuuugaaauaaaauagccugucuuucagaucucaaaggcucuuuucagagccaccaaaaaaaaaaaaaaaaaaaaaaaaaaaaaaaaaaaaaaaaaaaaaaaaaaaaaaaaaaaaaaaaagaauu

SEQ ID NO: 21212 - RNA, 2021 nt, Artificial Sequence
  mRNA product Design a-2 (hSL-A64-N5) comprising derived and/or modified sequence from LASV(Lassa virus/H.sapiens-wt/NGA/2018/ISTH_0959;Clade II)__AVV65100__SP-IgE_NP(2-569) (opt5)
aggagaguccgcucagccagguugcagaagcggcuuagcguguguccuaaucuucucucugcguguagguaggccugugccgcaaacaagcuuaccauggacuggaccuggauccuguuccucguggccgcugccacaagaguccacagcagcgccuccaaggaggugaaaucuuuccuguggacccagagccucagacgggaacuguccggcuacugcucuaacaucaaacuucaagucguuaaggacgcucaggcccugcuccacgggcuggauuuuagcgagguguccaaugugcagcgccuuaugagaaagcagaaacgggacgauucugaccugaagcgccucagagaucugaaccaagcggucaauaaccugguggaacucaagagcacccagcagaaauccauucugcggguuggaacgcuuaccagcgacgaucugcucacacuggcugccgaccuugagaagcugaaaucuaaggugauccgcaccgaaagaccccucuccagcggcgucuauauggggaaucugucuacacagcaacuggagcagcggcgcgcccuccugaaccuuauuggaauggugggcggggcucagggaacccagccuggcagagauggcguugugcgggucugggacgugaaaaauccggaucugcucaacaaucaauucgggacaaugcccucccugacccuugccugucugacgaagcagggacagguggaccucaacgaugucguucuggcucugaccgaccucggccugaucuacacagccaaguauccuaauagcucugaccuugaucgccugucccaaagccaucccauucucaacaugguggacaccaaaaaguccucucugaauaucagcggguuuaacuucucccuuggagcggccgugaaagcuggcgccugcaugcuggaugggggaaauaugcucgagacaaucaaggucaccccucagacgauggacggcauucugaaaagcauccugaaggugaaaaagucucucggcauguuuguuuccgauacacccggggaaagaaacccuuacgagaacauucuguauaagaucugucuuagcggagacggcuggccguacauugcuucucggaccagcaucguggggcgcgccugggaaaauacaaccgucgaucuggaguccgacggaaaaccccacaaggugggcaccgcggggucuaacaaaagccuccaguccgccggauucccuacaggccugacguauagccagcugaugacccuuaaggauucuaugaugcaacucgaccccuccgcuaaaacauggauugauaucgagggcagaccugaagaccccguugagaucgcccuguaccagccgaugagcgggugcuacauucacuuuuuccgggaaccuaccgaccugaagcaguuuaagcaggaugcuaaauauucucauggaaucgacguggccgaucucuuccccgcccaaccuggccugacauccgcugucauugaggcgcuucccagaaauauggugcugaccugucaggggagcgacgauaucaagcgccuccuggacucccagggacggaaagauauuaagcugaucgacaucgcccuuucuaaaacggauagcagacgcuuugaaaacgcugucugggaccagugcaaggaucucugucauaugcacacaggcgugguuguggagaagaaaaagagagggggcaaagaggaaauuacaccccacugcgcccugauggacuguaucauguacgaugccgcugucuccggaggccugaauauuccugugcuccgggccguucugccgcgcgacaugguguuccggaccucuagccccaaggucgugcuuugaggacuagucccuguucccagagcccacuuuuuuuucuuuuuuugaaauaaaauagccugucuuucagaucucaaaggcucuuuucagagccaccaaaaaaaaaaaaaaaaaaaaaaaaaaaaaaaaaaaaaaaaaaaaaaaaaaaaaaaaaaaaaaaaagaauu

SEQ ID NO: 21213 - RNA, 2021 nt, Artificial Sequence
  mRNA product Design a-2 (hSL-A64-N5) comprising derived and/or modified sequence from LASV(LASV003-NIG-2008;Clade II)__AIT17581__SP-IgE_NP(2-569) (opt5)
aggagaguccgcucagccagguugcagaagcggcuuagcguguguccuaaucuucucucugcguguagguaggccugugccgcaaacaagcuuaccauggacuggaccuggauccuguuccucguggccgcugccacaagaguccacagcagcgccuccaaggaggugaaaucuuuccuguggacccagagccucagacgggaacuguccggcuacugcucuagcaucaaacuucaagucguuaaggacgcucaggcccugcuccacgggcuggauuuuuccgaggugucuaacgugcagcgccuuaugagaaagcagaaacgggacgauagcgaccugaagcgccucagagaucugaaucaagcggucaacaaucugguggaacucaaguccacccagcagaaaagcguucugcgggugggaacgcuuaccucugacgaucugcucacacuggcugccgaccuugagaagcugaaauccaaggucauucgcaccgaaagaccccucagcucuggcguguauauggggaaccuguccgcccagcaacuggagcagcggcgcacacuccugaauaugaucggaaugguuggcggggcucagggaacccagccuggcagagauggcgugguccgggugugggacgugaaaaacccggaucuucugaauaaccaauucgggacaaugcccagccucacccuggccugucuuacgaagcagggacaggucgaccugaaugauguugugcucgcucugaccgaccugggccucauuuacacagccaaguauccuaacucuuccgaccuggaucgccuuagccaaucccaucccauccugucuaugguggacaccaaaaagagcucccucaauauuagcggguacaacuuuucucugggagcggccgucaaagcuggcgccugcaugcuugaugggggaaauaugcuggagacaaucaaggugaccccucagacgauggacggcauccucaaauccauucugaagguuaaaaagagccugggcauguucgugucugauacacccggggaaagaaacccuuaugagaauauccucuacaagauuugucugagcggagacggcuggccguauaucgcuucccggaccucuauugucgggcgcgccugggaaaacacaaccguggaucuugagagcgacggaaaaccccagaagguuggcaccgcgggguccaacaaaagccugcagucugccggauuuccuacaggccucacguacucccaacugaugacccugaaggauagcaugaugcagcuugaccccucugcuaaaacauggaucgauauugagggcagaccugaagaccccguggagaucgcccucuaccagccgauguccgggugcuauauccacuucuuucgggaaccuaccgaccugaagcaguucaagcaagaugcuaaauacagccauggaauugacgucacagaucuguuucccgcccagccuggccucaccuccgccgugaucgaggcucugcccagaaauaugguccuuacgugucaggggucugacgauauuaagcgccugcucgacagccagggacggagagauaucaaacugauugacaucgcgcuguccaaggccgauucucgccgguucgaaaacgcugugugggaccaaugcaaagaucuuugucacaugcauacaggcguuguggucgagaagaagaaaagagggggcaaggaggaaaucacaccccacugcgcccucauggacuguauuauguaugaugccgcugugagcggaggccugaauaucccuguucugcgcgccgugcucccgcgggacauggucuuuagaaccuccagccccaaaguggugcugugaggacuagucccuguucccagagcccacuuuuuuuucuuuuuuugaaauaaaauagccugucuuucagaucucaaaggcucuuuucagagccaccaaaaaaaaaaaaaaaaaaaaaaaaaaaaaaaaaaaaaaaaaaaaaaaaaaaaaaaaaaaaaaaaagaauu

SEQ ID NO: 21214 - RNA, 2021 nt, Artificial Sequence
  mRNA product Design a-2 (hSL-A64-N5) comprising derived and/or modified sequence from LASV(LASV035-NIG-2009;Clade II)__AIT17589__SP-IgE_NP(2-569) (opt5)
aggagaguccgcucagccagguugcagaagcggcuuagcguguguccuaaucuucucucugcguguagguaggccugugccgcaaacaagcuuaccauggacuggaccuggauccuguuccucguggccgcugccacaagaguccacagcagcgccuccaaggaggugaaaucuuuccuguggacccagagccucagacgggaacuguccggcuacugcucuagcaucaaacuucaagucguuaaagacgcucaggcccugcuccacgggcuggauuuuuccgaggugucuaacgugcagcgccuuaugagaaagcagaaacgggacgauagcgaccugaagcgccucagagaucugaaucaagcggucaacaaucugguggaacucaaguccacacagcagaaaagcauucugcggguuggaacgcuuaccucugacgaucugcucacacuggcugccgaccuugagaagcugaaauccaaggugauccgcaccgaaagaccccucagcucuggcgucuauauggggaaccuguccgcccagcaacuggagcagcggcgcgcucuccugaauaugauuggaauggugggcggggcccagggaacacagccuggcagagauggcguugugcgggucugggacgugaaaaacccggaucuucugaauaaccaauucgggaccaugcccagccucacacuggcuugucuuaccaagcagggacagguggaccugaaugaugccguccucgcgcugacggaccugggccucaucuacaccgccaaguauccuaacucuuccgaccuggaucgccuuagccaaucccaucccauucugaauaugguugacacaaagaagucuagccucaacaucuccggguacaauuuuagccugggagcugccgugaaagcuggcgccugcaugcuugaugggggaaacaugcuggagaccaucaaggugacaccucagaccauggacggcauucucaaaucuauccugaaggucaaaagaucccugggcauguucgugagcgauacgcccggggaacggaauccuuaugagaacauucucuacaagaucugucugucuggagacggcuggccguauauugcgagccgcacauccaucguugggagagccugggaaaacaccacaguggaucuugagucugacggaaagccccagaaagucggcaccaccgggagcaauaagucccugcagagcgcuggauuuccuacaggccucacguacucucaacugaugacccugaaagauuccaugaugcagcuugaccccagcgccaagacauggauugauaucgagggccggccugaagaccccguggagaucgcucucuaccagccgaugucugggugcuauauucacuucuuuagagaaccuaccgaccugaaacaguucaagcaagaugccaaguacucccauggaaucgacguugccgaucuguuucccgcucagccuggccucacaagcgcggugauugaggcccugccccgcaacaugguccuuaccugucagggguccgacgauaucaaaaagcugcucgacucucagggacggagagauauuaaacugaucgacaucgcucugagcaaggccgauucccgcaaauucgaaaaugccgugugggaccaaugcaaggaucuuugucacaugcauacgggcgucgugguugagaagaaaaagagagggggcaaagaggaaauuacaccccacugcgcucucauggacuguaucauguaugaugccgcggugucuggaggccugaacauuccuguccugcgggcugugcucccgcgcgacaugguuuuucggaccagcucccccaaggugguccugugaggacuagucccuguucccagagcccacuuuuuuuucuuuuuuugaaauaaaauagccugucuuucagaucucaaaggcucuuuucagagccaccaaaaaaaaaaaaaaaaaaaaaaaaaaaaaaaaaaaaaaaaaaaaaaaaaaaaaaaaaaaaaaaaagaauu

SEQ ID NO: 21215 - RNA, 2021 nt, Artificial Sequence
  mRNA product Design a-2 (hSL-A64-N5) comprising derived and/or modified sequence from LASV(LASV1000-NIG-2009;Clade II)__AIT17783__SP-IgE_NP(2-569) (opt5)
aggagaguccgcucagccagguugcagaagcggcuuagcguguguccuaaucuucucucugcguguagguaggccugugccgcaaacaagcuuaccauggacuggaccuggauccuguuccucguggccgcugccacaagaguccacagcagcgccuccaaggaggugaaaucuuuccuguggacccagagccucagacgggaacuguccggcuacugcucuaacaucaaacuucaagucguuaaggacgcucaggcccugcuccacgggcuggauuuuagcgagguguccaaugugcagcgccuuaugagaaagcagaaacgggacgauucugaccugaagcgccucagagaucugaaccaagcggucaauaaccugguggaacucaagagcacacagcagaaauccauucugcggguuggaacgcuuaccagcgacgaucugcucacacuggcugccgaccuugagaagcugaaaucuaaggugauccgcaccgaaagaccccucuccagcggcgucuauauggggaaucugucuacacagcaacuggagcagcggcgcgcccuccugaacaugauuggaauggugggcggggcucagggaacccagccuggcagagauggcguugugcgggucugggacgugaaaaauccggaucuucugaacaaucaauucgggacaaugcccucccucacccuggccugucuuacgaagcagggacagguggaccugaacgaugucguucucgcucugaccgaccugggccucaucuacacagccaaguauccuaauagcucugaccuggaucgccuuucccaaagccaucccauucugaacaugguggacaccaaaaaguccucucucaauaucagcggguacaacuuuucccugggagcggccgugaaagcuggcgccugcaugcuugaugggggaaauaugcuggagacaaucaaggucaccccucagacgauggacggcauucucaaaagcauccugaaggugaaaaagucucugggcauguucguuuccgauacacccggggaaagaaacccuuaugagaacauucucuacaagaucugucugagcggagacggcuggccguauauugcuucucggaccagcaucguggggcgcgccugggaaaauacaaccgucgaucuugaguccgacggaaaaccccagaaggugggcaccgcggggucuaacaaaagccugcaguccgccggauuuccuacaggccucacguacagccaacugaugacccugaaggauucuaugaugcagcuugaccccuccgcuaaaacauggauugauaucgagggcagaccugaagaccccguugagaucgcccucuaccagccggugagcgggugcuauauucacuucuuucgggaaccuaccgaccugaagcaguucaagcaagaugcuaaauacucucauggaaucgacgucgccgaucuguuucccgcccagccuggccucacauccgcugugauugaggcgcugcccagaaauaugguccuuaccugucaggggagcgacgauaucaagcgccugcucgacucccagggacggagagauauuaaacugaucgacaucgcccugucuaaggcugauagccgccgguucgaaaacgccgugugggaccaaugcaaagaucuuugucacaugcauacgggcguuguggucgagaagaagaaaagagggggcaaggaggaaauuacaccccacugcgcccucauggacuguaucauguaugaugcugccguguccggaggccugaauauuccuguucugcgcgcggugcucccgcgggacauggucuuuagaaccucuagccccaaaguggugcugugaggacuagucccuguucccagagcccacuuuuuuuucuuuuuuugaaauaaaauagccugucuuucagaucucaaaggcucuuuucagagccaccaaaaaaaaaaaaaaaaaaaaaaaaaaaaaaaaaaaaaaaaaaaaaaaaaaaaaaaaaaaaaaaaagaauu

SEQ ID NO: 21216 - RNA, 2021 nt, Artificial Sequence
  mRNA product Design a-2 (hSL-A64-N5) comprising derived and/or modified sequence from LASV(LASV221-NIG-2010;Clade II)__AIT17625__SP-IgE_NP(2-569) (opt5)
aggagaguccgcucagccagguugcagaagcggcuuagcguguguccuaaucuucucucugcguguagguaggccugugccgcaaacaagcuuaccauggacuggaccuggauccuguuccucguggccgcugccacaagaguccacagcagcgccuccaaggaggugaaaucuuuccuguggacccagagccucagacgggaacuguccggcuacugcucuagcaucaaacuucaagucguuaaggacgcucaggcccugcuccacgggcuggauuuuuccgaggugucuaacgugcagcgccuuaugagaaagcagcggcgcgacgauagcgaccugaaaagacuccgggaucugaaucaagcggucaacaaucugguggaacucaaguccacacagcaaaagagcauucugcgcguuggaacgcuuaccucugacgaucugcucacacuggcugccgaccuugagaaacugaaguccaaagugaucagaaccgaacggccccucagcucuggcgucuauauggggaaccuguccacacagcagcuggagcagcgcagagcccuccugaauaugauuggaauggugggcggggcucagggaacccagccuggccgggauggcguugugcgcgucugggacgugaagaacccggaucuucugaauaaccaauucgggacaaugcccagccucacccuggccugucuuacgaaacagggacagguggaccugaaugaugcuguccucgcccugaccgaccugggccucaucuacacagcgaaguauccuaacucuuccgaccuggauagacuuagccaaucccaucccauucugaauaugguugacaccaagaaaucuagccucaacaucuccggguacaauuuuagccugggagccgcugugaaggccggcgcuugcaugcuugaugggggaaacaugcuggagacaaucaaagugaccccucagacggucgacggcauucucaagucuauccugaaagugaagcggucccugggcauguucguuagcgauacacccggggaacgcaauccuuaugagaacauucucuacaaaaucugucugucuggagacggcuggccguauauugccagcagaaccuccaucguggggcgggcgugggaaaacacaaccgucgaucuugagucugacggaaagccccagaaggugggcaccgccgggagcaauaaaucccugcagagcgcuggauuuccuacaggccucacguacucucaacugaugacccugaaggauuccaugaugcagcuugaccccagcgccaaaacauggauugauaucgagggcagaccugaagaccccguugagaucgcucucuaccagccgaugucugggugcuauauucacuucuuucgcgaaccuaccgaccugaagcaguucaaacaagaugccaaguacucccauggaaucgacguggccgaucuguuucccgcucagccuggccucacaagcgcggucauugaggcccugccccggaacauggugcuuaccugucagggguccgacgauaucaagagacugcucgacucucagggacgccgggauauuaaacugaucgacaucgcucugagcaaggccgauuccagaaaauucgaaaaugccgucugggaccaaugcaaggaucuuugucacaugcauacgggcgugguuguggagaaaaagaagcgcgggggcaaagaggaaauuacaccccacugcgcucucauggacuguaucauguaugaugccgcggucucuggaggccugaacauuccugugcugcgggcuguucucccgagagacaugguguuucgcaccagcucccccaaggucgugcugugaggacuagucccuguucccagagcccacuuuuuuuucuuuuuuugaaauaaaauagccugucuuucagaucucaaaggcucuuuucagagccaccaaaaaaaaaaaaaaaaaaaaaaaaaaaaaaaaaaaaaaaaaaaaaaaaaaaaaaaaaaaaaaaaagaauu

SEQ ID NO: 21217 - RNA, 2021 nt, Artificial Sequence
  mRNA product Design a-2 (hSL-A64-N5) comprising derived and/or modified sequence from LASV(LASV237-NIG-2010;Clade II)__AIT17639__SP-IgE_NP(2-569) (opt5)
aggagaguccgcucagccagguugcagaagcggcuuagcguguguccuaaucuucucucugcguguagguaggccugugccgcaaacaagcuuaccauggacuggaccuggauccuguuccucguggccgcugccacaagaguccacagcagcgccuccaaggaggugaaaucuuuccuguggacccagagccucagacgggaacuguccggcuacugcucuaacaucaaacuucaagucguuaaggacgcucaggcccugcuccacgggcuggauuuuagcgagguguccaaugugcagcgccuuaugagaaagcagaaacgggacgauucugaccugaagcgccucagagaucugaaccaagcggucaauaaccugguggaacucaagagcacacagcagaaauccauucugcggguuggaacgcuuaccagcgacgaucugcucacacuggcugccgaccuugagaagcugaaaucuaaggugauccgcaccgaaagaccccucuccagcggcgucuauauggggaaucugucuacacagcaacuggagcagcggcgcgcccuccugaacaugauuggaauggugggcggggcucagggaacccagccuggcagagauggcguugugcgggucugggacgugaaaaauccggaucuucugaacaaucaauucgggacaaugcccucccucacccuggccugucuuacgaagcagggacagguggaccugaacgaugcuguccucgcccugaccgaccugggccucaucuacacagcgaaguauccuaauagcucugaccuggaucgccuuucccaaagccaucccauucugaacaugguugacaucaaaaaguccucucucaauaucagcggguacaacuuuucccugggagccgcugugaaagccggcgcuugcaugcuugaugggggaaauaugcuggagaccauuaaggugacaccucagaccauggacggcauccucaaaagcauucugaaggucaaaagaucucugggcauguucguguccgauacgcccggggaacggaacccuuaugagaacauccucuacaagauuugucugagcggagacggcuggccguauaucgccucucgcacaagcauuguugggagagcgugggaaaauaccacaguggaucuugaguccgacggaaagccccagaaagucggcucugccgggagcaacaagucccugcagagcgcuggauuuccuaccggccucaccuacucucaacugaugacacugaaagauuccaugaugcagcuugaccccagcgccaagacguggaucgauaucgagggccggccugaagaccccguggagauugcucucuaccagccgaugucugggugcuauauccacuucuuuagagaaccuaccgaccugaaacaguucaagcaagaugccaaguacucccauggaauugacguugccgaucuguuucccgcucagccuggccucacaagcgcggugaucgaggcccugccccgcaauaugguccuuaccugucagggguccgacgauauuaaacggcugcucgacucucagggaagacgcgauaucaagcugaucgacauugcucugagcaaagccgauucccggagauucgaaaacgccgugugggaccaaugcaaggaucuuugucacaugcauacaggcgucgugguugagaaaaagaagcgcgggggcaaagaggaaaucacgccccacugcgcucucauggacuguauuauguaugaugccgcggugucuggaggccugaauaucccuguccugcgggcugugcucccgagagacaugguuuuucgcaccagcucccccaaggugguccugugaggacuagucccuguucccagagcccacuuuuuuuucuuuuuuugaaauaaaauagccugucuuucagaucucaaaggcucuuuucagagccaccaaaaaaaaaaaaaaaaaaaaaaaaaaaaaaaaaaaaaaaaaaaaaaaaaaaaaaaaaaaaaaaaagaauu

SEQ ID NO: 21218 - RNA, 2021 nt, Artificial Sequence
  mRNA product Design a-2 (hSL-A64-N5) comprising derived and/or modified sequence from LASV(LASV253-NIG-2011;Clade II)__AIT17671__SP-IgE_NP(2-569) (opt5)
aggagaguccgcucagccagguugcagaagcggcuuagcguguguccuaaucuucucucugcguguagguaggccugugccgcaaacaagcuuaccauggacuggaccuggauccuguuccucguggccgcugccacaagaguccacagcagcgccuccaaggaggugaaaucuuuccuguggacccagagccucagacgggaacuguccggcuacugcucuagcaucaaacuucaagucguuaaggacgcucaggcccugcuccacgggcuggauuuuuccgaggugucuaacgugcagcgccuuaugagaaagcagaaacgggacgauagcgaccugaagcgccucagagaucugaaucaagcggucaacaaucugguggaacucaaguccacccagcagaaaagcguucugcgggugggaacgcuuaccucugacgaucugcucacacuggcugccgaccuugagaagcugaaauccaaggucauucgcaccgaaagaccccucagcucuggcguguauauggggaaccuguccacacagcaacuggagcagcggcgcgcccuccugaauaugaucggaaugguuggcggggcucagggaacccagccuggcagagauggcgugguccgggugugggacgugaaaaacccggaucuucugaauaaccaauucgggacaaugcccagccucacccuggccugucuuacgaagcagggacaggucgaccugaaugauguugugcucgcucugaccgaccugggccucauuuacacagccaaguauccuaacucuuccgaccuggaucgccuuagccaaucccaucccauccugaauaugguggacaccaaaaagucuagccucaacauuuccggguacaauuuuagccugggagcggccgucaaagcuggcgccugcaugcuugaugggggaaacaugcuggagacaaucaaggugaccccucagacgauggacggcauccucaaaucuauucugaagguuaaaaagucccugggcauguucgugagcgauacacccggggaaagaaauccuuaugagaacauccucuacaagauuugucugucuggagacggcuggccguauaucgcuagccggaccuccauugucgggcgcgccugggaaaacacaaccguggaucuugagucugacggaaaaccccagaagguuggcaccgcggggagcaauaaaucccugcagagcgccggauuuccuacaggccucacguacucucaacugaugacccugaaggauuccaugaugcagcuugaccccagcgcuaaaacauggaucgauauugagggcagaccugaagaccccguggagaucgcccucuaccagccgaugucugggugcuauauccacuucuuucgggaaccuaccgaccugaagcaguucaagcaagaugcuaaauacucccauggaauugacgucacagaucuguuucccgcccagccuggccucaccagcgccgugaucgaggcucugcccagaaacaugguccuuacgugucagggguccgacgauauuaagcgccugcucgacucucagggacggagagauaucaaacugauugacaucgcgcugagcaaggccgauucccgccgguucgaaaaugcugugugggaccaaugcaaagaucuuugucacaugcauacaggcguuguggucgagaagaagaaaagagggggcaaggaggaaaucacaccccacugcgcccucauggacuguauuauguaugaugccgcugugucuggaggccugaacaucccuguucugcgcgccgugcucccgcgggacauggucuuuagaaccagcucccccaaaguggugcugugaggacuagucccuguucccagagcccacuuuuuuuucuuuuuuugaaauaaaauagccugucuuucagaucucaaaggcucuuuucagagccaccaaaaaaaaaaaaaaaaaaaaaaaaaaaaaaaaaaaaaaaaaaaaaaaaaaaaaaaaaaaaaaaaagaauu

SEQ ID NO: 21219 - RNA, 2021 nt, Artificial Sequence
  mRNA product Design a-2 (hSL-A64-N5) comprising derived and/or modified sequence from LASV(LASV254-NIG-2011;Clade II)__AIT17675__SP-IgE_NP(2-569) (opt5)
aggagaguccgcucagccagguugcagaagcggcuuagcguguguccuaaucuucucucugcguguagguaggccugugccgcaaacaagcuuaccauggacuggaccuggauccuguuccucguggccgcugccacaagaguccacagcagcgccuccaaggaggugaaaucuuuccuguggacccagagccucagacgggaacuguccggcuacugcucuagcaucaaacuucaagucguuaaggacgcucaggcccugcuccacgggcuggauuuuuccgaggugucuaacgugcagcgccuuaugagaaagcagaaacgggacgauagcgaccugaagcgccucagagaucugaaucaagcggucaacaaucugguggaacucaaguccacacagcagaaaagcguucugcgggugggaacgcuuaccucugacgaucugcucacacuggcugccgaccuugagaagcugaaauccaaggucauucgcaccgaaagaccccucagcucuggcguguauauggggaaccuguccacacagcaacuggagcagcggcgcgcccuccugaauaugaucggaaugguuggcggggcucagggaacccagccuggcagagauggcgugguccgggugugggacgugaaaaacccggaucuucugaauaaccaauucgggacaaugcccagccucacccuggccugucuuacgaagcagggacaggucgaccugaaugaugcuguucucgcccugaccgaccugggccucauuuacacagcgaaguauccuaacucuuccgaccuggaucgccuuagccaaucccaucccauccugaauaugguggacaccaaaaagucuagccucaacauuuccggguacaauuuuagccugggagccgcugugaaagccggcgcuugcaugcuugaugggggaaacaugcuggagacaaucaaggucaccccucagacgauggacggcauccucaaaucuauucugaaggugaaaaagucccugggcauguucguuagcgauacacccggggaaagaaauccuuaugagaacauccucuacaagauuugucugucuggagacggcuggccguauaucgccagccggaccuccauuguggggcgcgcgugggaaaacacaaucgucgaucuugagucugacggaaaaccccagaaggugggcaccgccgggagcaauaaaucccugcagagcgcuggauuuccuaccggccucacauacucucaacugaugacgcugaaggauuccaugaugcagcuugaccccagcgccaaaaccuggauugauaucgagggcagaccugaagaccccguugagaucgcucucuaccagccgaugucugggugcuauauucacuucuuucgggaaccuacagaccugaagcaguucaagcaagaugccaaauacucccauggaaucgacguggccgaucuguuucccgcucagccuggccucaccagcgcggucauugaggcccugcccagaaacauggugcuuacaugucagggguccgacgauaucaagcgccugcucgacucucagggacggagagauauuaaacugaucgacaucgcucugagcaaggccgauucccgccgguucgaaaaugccgucugggaccaaugcaaagaucuuugucacaugcauaccggcgugguuguggagaagaagaaaagagggggcaaggaggaaauuacgccccacugcgcucucauggacuguaucauguaugaugccgcggucucuggaggccugaacauuccugugcugcgcgcuguucucccgcgggacaugguguuuagaacaagcucccccaaagucgugcugugaggacuagucccuguucccagagcccacuuuuuuuucuuuuuuugaaauaaaauagccugucuuucagaucucaaaggcucuuuucagagccaccaaaaaaaaaaaaaaaaaaaaaaaaaaaaaaaaaaaaaaaaaaaaaaaaaaaaaaaaaaaaaaaaagaauu

SEQ ID NO: 21220 - RNA, 2021 nt, Artificial Sequence
  mRNA product Design a-2 (hSL-A64-N5) comprising derived and/or modified sequence from LASV(Nig08-04;Clade II)__ADU56611__SP-IgE_NP(2-569) (opt5)
aggagaguccgcucagccagguugcagaagcggcuuagcguguguccuaaucuucucucugcguguagguaggccugugccgcaaacaagcuuaccauggacuggaccuggauccuguuccucguggccgcugccacaagaguccacagcagcgccuccaaggaggugaaaucuuuccuguggacccagagccucagacgggaacuguccggcuacugcucuaacaucaaacuucaagucguuaaggacgcucaggcccugcuccacgggcuggauuuuagcgagguguccaaugugcagcgccuuaugagaaagcagaaacgggacgauggagaccugaagcgccucagagaucugaaccaagcggucaauaaccugguggaacucaagucuacccagcagaaaagcguucugcgggugggcacgcuuaccuccgacgaucugcucacacuggcugccgaccuugagaagcugaaaagcaaggucauucgcaccgaaagaccccucucuuccgggguguauaugggaaaucugagcacacagcaacuggagcagcggaaagcccuccugucuaugaucggcaugguugggggagcucagggcacccagccuggccgcgaugggguggucagagugugggacgugaagaacccggaucuucugaauaaccaauucggaacaaugcccucccucacccuggccugucuuacgaagcagggccaggucgaccugaaugaugcuguucucgcccugaccgaccuggggcucauuuacacagcgaaauauccuaacagcucugaccuggaucggcuuucccaaagccaucccauccugaauaugguggacaccaagaaauccucucucaacauuagcggauacaauuuuucccugggcgccgcugugaaggccggggcuugcaugcuugauggaggcaacaugcuggagacaaucaaagucaccccucagacgauggacggcauccucaagagcauucugaaagugaagcgcucucuggggauguucguuuccgauacacccggagaaagaaauccuuaugagaacauccucuacaagauuugucugagcggcgacggguggccguauaucgccucucggaccagcauugugggacgcgcgugggaaaacacaaccgucgaucuugaguccgacggcaaaccccagaagguggggaccgccggaucuaauaaaagccugcaguccgcuggcuuuccuacaggccucacguacagccaacugaugacccugaaggauucuaugaugcagcuugaccccuccgccaaaacauggaucgauauugaggggagaccugaagaccccguugagaucgcucucuaccagccgaugagcggaugcuauauccacuucuuucgggaaccuaccgaccugaagcaguucaagcaagaugccaaauacucucauggcauugacgugacagaucuguuuuccgcccagcccgggcucaccagcgcugucaucgaggcgcugccuagaaacauggugcuuacgugucagggauccgacgauauuaagaaacugcucgacucucagggccgccgggauaucaagcugauugacaucagccugaauaaagccgauuccagacgcuucgaaaacgcugucugggaccaaugcaaggaucuuugucacaugcauacaggggugguuguggagaagaaaaagcggggcggaaaagaggaaaucacaccccacugcgcccucauggacuguauuauguuugaugccgcugucucuggcgggcugaauauccccauucugagagccgugcucccucgcgacaugguuuuccggaccagcuccccgaaggugguccugugaggacuagucccuguucccagagcccacuuuuuuuucuuuuuuugaaauaaaauagccugucuuucagaucucaaaggcucuuuucagagccaccaaaaaaaaaaaaaaaaaaaaaaaaaaaaaaaaaaaaaaaaaaaaaaaaaaaaaaaaaaaaaaaaagaauu

SEQ ID NO: 21221 - RNA, 2024 nt, Artificial Sequence
  mRNA product Design a-2 (hSL-A64-N5) comprising derived and/or modified sequence from LASV(GA391;Clade III)__AAA46284__SP-IgE_NP(2-570) (opt5)
aggagaguccgcucagccagguugcagaagcggcuuagcguguguccuaaucuucucucugcguguagguaggccugugccgcaaacaagcuuaccauggacuggaccuggauccuguuccucguggccgcugccacaagaguccacagcagcgccuccaaggaggugagaucuugccuguggacccagagccuccggcgcgaacuguccggcuacuguucuaacaucaaacuucaagucguuaaggacgcucaggcccugcuccacgggcuggauuucagcgagguguccaaugugcagagacuuaugcggaaacagaagcgcgacgauggagaccugaaaagacuccgggaucugaaccaagcggucaauaaccugguggaacucaagucuacacagcagaaaagcguucugcgcgugggcacgcuuuccagcgacgaucugcucauucuggcugccgaccuugagaaacugaagucuaaagucaccagaacagaacggccccucuccagcgggguguauaugggaaaucugucuucccagcaacuggaucagcgcagagcccuccugaacaugaucggcaugaccgggguuagcggaggcggcaagggggcuucuaauggaauugugcgggucugggacgugaaaaacgccgagcuucugaauaaccaguuuggcacaaugccuucccucacccuggcuugccuuacaaagcaggggcaaguggaucugaaugacgccguccaggcgcucaccgaucugggacugaucuacacggccaaguauccgaacagcuccgaccucgaccgccugucucagagccaucccauucuuaauaugaucgauaccaaaaaguccagccugaacaucucuggcuacaauuucucccucggggcugccguuaaagcuggagccuguaugcuggacggcggcaacaugcuugagacaauuaaggugagcccucaaaccauggaugggauccugaaaucuauucucaaggugaaaaagagccugggaauguuugucuccgacacacccggcgaaagaaacccuuaugagaauauccuguacaagauuugccucucuggggauggauggagcuauaucgcgucccggaccagcauugugggccgcgccugggaaaacacgguuguggaccuggagcaggauaauaaaccccagaagaucgggaacggaggcucuaauaaaucccuucagagcgcuggcuucgccgcugggcugaucuacucucaacucaugacacugaaggacuuuaaauguuucaaccugauuccuaaugccaagaccuggauggauaucgagggaagaccggaagaccccgucgagauugcccuuuaccagccuuccagcggcugcuaugugcacuuuuuccgggaacccacagaucucaagcaguuuaaacaggacgcuaaguacucccaugggagagacguuaccgaucuguucgcggcccaaccuggacugaccucugcugugaucgaggcccucccccgcaacauggucauuacaugucagggcagcgaagacauccggaaacugcuugagucccaggggagacgcgauaucaagcugauugacaucacgcucucuaaagccgauagccggaaguuugagaaugcugugugggaccaguucaaggaucugugccacaugcauaccggcgucgugguugaaaagaagaaaagaggaggcaaggaggaaauuacaccgcacugugcccugauggacugcaucauguuugaugcggcuguguccgggggacuugacgccaaaguccuccgcgugguucugccucgggauaugguguucagaaccagcacacccaaggucgugcugugaggacuagucccuguucccagagcccacuuuuuuuucuuuuuuugaaauaaaauagccugucuuucagaucucaaaggcucuuuucagagccaccaaaaaaaaaaaaaaaaaaaaaaaaaaaaaaaaaaaaaaaaaaaaaaaaaaaaaaaaaaaaaaaaagaauu

SEQ ID NO: 21222 - RNA, 2021 nt, Artificial Sequence
  mRNA product Design a-2 (hSL-A64-N5) comprising derived and/or modified sequence from LASV(Nig08-A19;Clade III)__ADU56619__SP-IgE_NP(2-569) (opt5)
aggagaguccgcucagccagguugcagaagcggcuuagcguguguccuaaucuucucucugcguguagguaggccugugccgcaaacaagcuuaccauggacuggaccuggauccuguuccucguggccgcugccacaagaguccacagcagcgccuccaaggaggugaaaucuuuccuguggacccagagccucagacgggaacuguccggcuacugcucuaacaucaaacuucaagucguuaaggacgcucaggcccugcuccacgggcuggauuuuagcgagguguccaaugugcagcgccuuaugagaaagcagaaacgggacgauggagaccugaagcgccucagagaucugaaccaagcggucaauaaccugguggaacucaagucuacacagcagaaaagcguucugcgggugggcacgcuuuccagcgacgaucugcucguccuggcugccgaccuugagaagcugaaaucuaaggugguucgcaccgaaagaccccucuccagcgggauuuauaugggaaaucugucuucccagcaacuggaucagcggaaagcccuccugaacaugaucggcaugacagggggaaauggcggccgcaacaccacaagcgacgggauugugagagucugggaugugaagaaugcugagcuucugaacaaucaguucggaaccaugccuucucucacacuggccugucuuaccaagcagggccaaguggaccugaacgaugcuguccaggcccucacggaccuggggcugaucuacaccgcgaaauaucccaauuccagcgaccucgaucggcuggcccagucccauccgauucuuaacaugaucgacacaaagaaaucuagccugaauaucuccggauacaacuuuagccucggcgcugccguuaaggcuggggccugcaugcuggauggaggcaacaugcuugagaccauuaaagugucuccucaaacaauggacggcauccugaaguccauucucaaagugaagcgcagccuggggauguucaucucugauacccccggagaaagaaauccuuaugagaacauucuguacaagaucugucucagcggcgacggguggcccuauauugcgucccggacgucuaucgucggacgcgccugggaaaauacagugguugaucuggagagcgacaacaaaccucagaagaccggcaaugggggauccaacaaaagccuucagucugcuggcuuugccgcuggccugacauacucccagcucaugacccugaaggauagcaugcugcaacuugacccgaaugccaaaaccuggauggauaucgaggggagacccgaagacccuguggagauugcccucuaccagcccucuuccggaugcuauauccacuucuuucgggaaccuacagaccugaagcaguucaagcaggaugcuaaauacagccauggcauugacgucacggaucuguuugcggcccaacccgggcucaccuccgcugugaucgaggcccugccgagaaacaugguuauuacaugucagggaucugaagacauccgcaaacuucuggagagccagggccggagagauaucaagcucauugacaucucccugucuaagguggauagccgcaaauucgagaaugccgucugggaccaguuuaaggaucugugccacaugcauaccgggauuguggucgaaaagaaaaagcggggcggaaaagaggaaaucacaccucacugugcucuuauggacugcauuauguucgaugccgcgguguccggcgggguugacgcuaaggugcucagagccguccugccccgcgauaugguguuucggaccagcacgccuaaaguugugcugugaggacuagucccuguucccagagcccacuuuuuuuucuuuuuuugaaauaaaauagccugucuuucagaucucaaaggcucuuuucagagccaccaaaaaaaaaaaaaaaaaaaaaaaaaaaaaaaaaaaaaaaaaaaaaaaaaaaaaaaaaaaaaaaaagaauu

SEQ ID NO: 21223 - RNA, 2021 nt, Artificial Sequence
  mRNA product Design a-2 (hSL-A64-N5) comprising derived and/or modified sequence from LASV(G1180-SLE-2010;Clade IV)__AIT17169__SP-IgE_NP(2-569) (opt5)
aggagaguccgcucagccagguugcagaagcggcuuagcguguguccuaaucuucucucugcguguagguaggccugugccgcaaacaagcuuaccauggacuggaccuggauccuguuccucguggccgcugccacaagaguccacagcagcgccuccaaggagaucaaaucuuuccuguggacccagagccucagacgggaacuguccggcuacugcucuaacauuaagcugcaaguggucaaagacgcucaggcccugcuccacgggcuggauuuuagcgagguuuccaaugugcagcgccuuaugagaaaggaacggcgcgacgauaacgaccugaaaagacuccgggaucugaaucaggcggugaacaaucuggucgagcucaagucuacacaacaaaagagcauccugcgcgugggaacgcuuaccuccgacgaucugcucauucuggcugccgaccuugaaaaacuuaagagcaaaguuaucagaacagagcggccccucucugccggcguguauauggggaaccuguccagccagcagcuggaucagcgcagagcucuccugucuaugauuggaauguccagcggcaaucagcgggcccaggcugggcgcgacggagucgugagaguuugggaugugaagaacgucgagcuucugaauaaccaguucggcaccaugccuucucucacacuggccugucuuaccaaacaaggccagguggaccugaaugaugcggugcaggcccucacagaccuggggcugaucuacaccgcuaaguauccgaacacguccgaccucgaucggcugacccaaagccaucccauccuuaauaugauugacacaaagaaauccucucugaacaucagcggauacaauuuuucccucggcgccgcugucaaggccggggcgugcaugcuggauggaggcaacaugcuugaaaccauuaaaguuagcccucagacaauggacgggauccugaagucuauucucaaagugaagaaagcccugggaauguucaucuccgauacccccggcgagcgcaacccuuaugaaaauauucuguacaagaucugucucagcggcgacggguggcccuauaucgcuucuagaacgagcauuacaggacgggccugggagaacaccguggucgaucuggaguccgacggcaagccucagaaagcugggucuaauaacagcaauaagucccuucagagcgugggauuuacagccggccugaccuacucucaacucaugacccugaaagaugccaugcugcagcuugacccgaacgcuaagacauggauggauaucgaagggagacccgaggacccuguugaaauugcgcucuaccagcccuccagcggaugcuauauccacuucuuucgcgagccuacggaccugaaacaguucaagcaagaugccaaguacucucauggcauugacgugaccgaucuguuugcugcccagcccggccucacauccgccgucaucgacgcucugccgcggaauauggugaucaccugucaggggagcgaugacauuagaaaacuucuggaaucccagggacgcaaggauaucaaacucauugacaucgcccugucuaagacagauagccggaaauaugagaacgcgguuugggaccaauacaaggaucugugccacaugcauaccggcguggucguggagaagaaaaagagagggggaaaagaagagauuacgccucacugugcucuuauggacugcaucauguucgaugccgccgucuccggcgggcucaauacaucugugcugcgcgcuguucugccccgggacaugguguuuagaaccagcaccccucgcgucgugcucugaggacuagucccuguucccagagcccacuuuuuuuucuuuuuuugaaauaaaauagccugucuuucagaucucaaaggcucuuuucagagccaccaaaaaaaaaaaaaaaaaaaaaaaaaaaaaaaaaaaaaaaaaaaaaaaaaaaaaaaaaaaaaaaaagaauu

SEQ ID NO: 21224 - RNA, 2021 nt, Artificial Sequence
  mRNA product Design a-2 (hSL-A64-N5) comprising derived and/or modified sequence from LASV(G1442-SLE-2011;Clade IV)__AIT17181__SP-IgE_NP(2-569) (opt5)
aggagaguccgcucagccagguugcagaagcggcuuagcguguguccuaaucuucucucugcguguagguaggccugugccgcaaacaagcuuaccauggacuggaccuggauccuguuccucguggccgcugccacaagaguccacagcagcgccuccaaggaggugaaaucuuuccuguggacccagagccucagacgggaacuguccggcuacugcucuaacaucaaacuucaagucguuaaggacgcucaggcccugcuccacgggcuggauuuuagcgagguguccaaugugcagcgccuuaugagaaagcagcggcgcgacgauaacgaccugaaaagacuccgggaucugaaucaagcggucaacaaucugguggaacucaagucuacacagcaaaagagcguucugcgcgugggaacgcuuaccuccgacgaucugcucguccuggcugccgaccuugagaaacuuaagagcaaagugauuagaacagaacggccccucucugccggcguuuauauggggaaccuguccagccagcagcuggaucagcgcagagcucuccugaauaugaucggaaugucuggcgggauucagggaacccggacaggccgcgacggcguggucagagugugggaugugaagaacgccgaccuucugaauaaccaguucgggaccaugccuucccucacacuggcuugucuuaccaaacaaggacaggucgaucugaaugacguugugcaggcccucacggaccugggccugaucuacaccgcgaaguauccgaacgccagcgaucucgaccggcugacacaaucucaucccauucuuaauaugaucgauaccaagaaauccagccugaacaucuccggguacaauuuuucucucggagcugccgugaaggcuggcgccugcaugcuggacgggggaaacaugcuugagacaauuaaagucagcccucagaccauggauggcauccugaaguccauucucaaagugaagaaaacgcugggcauguucaucagcgacacacccggggagcgcaacccuuaugaaaauauucuguacaagaucugucucucuggagauggcuggcccuauauugcguccagaaccagcaucacagggcgggccugggagaacaccguuguggaccuggaaucugauggaaagccucagaaagcuggcagcaauaacuccaauaagucucuucagagcgccggguuugcugccggacugaccuacucccaacucaugacacugaaagacgccaugcugcagcuugauccgaacgcuaagacguggauggacaucgagggcagacccgaggacccugucgaaauugcgcucuaccagcccagcucuggcugcuauauccacuucuuucgcgagccuaccgaucugaaacaguucaagcaagacgccaaguacucccaugggauugaugugacagaccuguuugcugcccagcccggacucaccagcgccguuaucgaagcucugccgcggaauauggugauuacaugucagggcucugaugacaucaaaaagcugcuggagucccaggggagaaaagauaucaagcucauugacaucgcccugagcaaaaccgauucccgcaaguaugaaaacgcggucugggaccaauacaaggaucugugccacaugcauacgggaguggucguggagaaaaagaaacggggcgggaaggaggaaauuacaccucacugugcucuuauggacugcaucauguucgaugccgccguuucuggcggacucaauacccuggugcugagagcuguccucccccgcgacaugguguuucggaccagcacaccuagaguugugcugugaggacuagucccuguucccagagcccacuuuuuuuucuuuuuuugaaauaaaauagccugucuuucagaucucaaaggcucuuuucagagccaccaaaaaaaaaaaaaaaaaaaaaaaaaaaaaaaaaaaaaaaaaaaaaaaaaaaaaaaaaaaaaaaaagaauu

SEQ ID NO: 21225 - RNA, 2021 nt, Artificial Sequence
  mRNA product Design a-2 (hSL-A64-N5) comprising derived and/or modified sequence from LASV(G3010-SLE-2013;Clade IV)__AIT17345__SP-IgE_NP(2-569) (opt5)
aggagaguccgcucagccagguugcagaagcggcuuagcguguguccuaaucuucucucugcguguagguaggccugugccgcaaacaagcuuaccauggacuggaccuggauccuguuccucguggccgcugccacaagaguccacagcagcgccuccaaggagaucaaaucuuuccuguggacccagagccucagacgggaacuguccggcuacugcucuaacauuaaacuucaaguggucaaagacgcucaggcccugcuccacgggcuggauuuuagcgagguuuccaaugugcagcgccuuaugagaaaggaacggcgcgacgauaacgaccugaaaagacuccgggaucugaaucaggcggugaacaaucuggucgagcucaagucuacacaacaaaagagcauccugcgcgugggaacgcuuaccuccgacgaucugcucauucuggcugccgaccuugaaaaacuuaagagcaaaguuacaagaaccgagcggccccucucugccggcguguauauggggaaccuguccagccagcagcuggaucagcgcagagcucuccugucuaugaucggaauguccagcggcguccagggggcccgggcuggacgcgacggcgugguuagagugugggaugucaagaaugccgagcuucugaacaaucaguucggcacaaugccuucucucacccuggcgugucuuacaaaacaggggcaaguggaccugaacgaugugguccaggcccucaccgaccugggacugauuuacacggcuaaguauccgaauaccuccgaccucgaucggcugacacagagccaucccauccuuaacaugaucgacaccaagaaauccucucugaauauuagcggcuacaacuuuucccucggggccgcuguuaaggccggagcgugcaugcuggauggcgggaauaugcuugaaacaaucaaagugagcccucaaaccauggacggcauucugaagucuauccucaaagugaagaaagcccugggaauguucauuuccgagacgcccggcgaacgcaacccuuaugagaacauccuguacaagauuugucucagcggggauggauggcccuauaucgcuucuagaacaagcaucaccggccgggccugggagaauacagucguggaccuggaauccgaugggaagccucagaaagcuggaucuaacaauagcaacaagucccuucagagcgccggcuuuaccgccgggcugaccuacucucagcucaugacacugaaagacgcuaugcugcaacuugauccgaaugcgaagacguggauggacauugagggaagacccgaagauccuguugagguggcccucuaccagcccuccagcggcugcuauauccacuucuuucgcgaaccuaccgaccugaaacaguucaagcaggacgcuaaguacucucauggcauugaugucacagaccuguuugccgcccaacccgggcucaccuccgcugugaucgaugcccugccgcggaacaugguuauuacaugucagggaagcgacgauaucaaaaagcugcuggagucccagggcagaaaagacaucaagcucauugauaucgcgcugucuaaaaccgacagccgcaaguaugagaaugcugugugggaucaguacaaggaccugugccacaugcauacgggggucguggucgaaaagaagaaacggggaggcaaggaggaaauuacaccucacugugcccuuauggauugcaucauguucgacgccgcuguguccgggggccucaacaccucuguucugagagccgugcugccccgcgauauggucuuucggaccagcacaccuagagugguucucugaggacuagucccuguucccagagcccacuuuuuuuucuuuuuuugaaauaaaauagccugucuuucagaucucaaaggcucuuuucagagccaccaaaaaaaaaaaaaaaaaaaaaaaaaaaaaaaaaaaaaaaaaaaaaaaaaaaaaaaaaaaaaaaaagaauu

SEQ ID NO: 21226 - RNA, 2021 nt, Artificial Sequence
  mRNA product Design a-2 (hSL-A64-N5) comprising derived and/or modified sequence from LASV(G502-SLE-2009;Clade IV)__AIT17127__SP-IgE_NP(2-569) (opt5)
aggagaguccgcucagccagguugcagaagcggcuuagcguguguccuaaucuucucucugcguguagguaggccugugccgcaaacaagcuuaccauggacuggaccuggauccuguuccucguggccgcugccacaagaguccacagcagcgccuccaaggagaucaaaucuuuccuguggacccagagccucagacgggaacuguccggcuacugcucuaacauuaagcugcaaguggucaaagacgcucaggcccugcuccacgggcuggauuuuagcgagguuuccaaugugcagcgccuuaugagaaaggaacggcgcgacgauaacgaccugaaaagacuccgggaucugaaucaggcggugaacaaucuggucgagcucaagucuacacaacaaaagagcauccugcgcgugggaacgcuuaccuccgacgaucugcucauucuggcugccgaccuugaaaaacuuaagagcaaaguuaucagaacagagcggccccucucugccggcguguauauggggaaccuguccagccagcagcuggaucagcgcagagcucuccugucuaugauuggaauguccggcgggaaucagggaguccgggccggcaaggacggcgugguucgcgugugggaugucaaaaacgcugagcuucugaauaaccaguucgggaccaugccuagccucacacuggccugucuuaccaagcagggacaaguggaccugaaugaugcggugcaggcccucacagaccugggccugaucuacaccgcuaaguauccgaacacgucugaccucgauagacugacccagucccaucccauccuuaauaugauugacaccaaaaagagcucccugaacaucucuggguacaauuuuagccucggagccgcugucaaagccggcgcgugcaugcuggaugggggaaacaugcuugaaacaauuaagguuuccccucaaacaauggacggcauccugaaaagcauucucaaggugaaaaaggcccugggcauguucaucucugauacccccggggagcggaacccuuaugaaaauauucuguacaagaucugucucuccggagacggcuggcccuauaucgcuagccgcacgucuauuacagggagagccugggagaacaccguggucgaucuggagagcgacggaaaaccucagaaggcuggcuccaauaacucuaauaaaagccuucaguccgccggguuuacagccggacugaccuacagccagcucaugacccugaaggaugcuaugcugcaacuugacccgaacacaaaaacguggauggauaucgaaggccggcccgaggacccuguggaaauugcgcucuaccagcccucuuccggcugcuauauccacuucuuuagagagccuaccgaccugaagcaguucaagcaggaugccaaauacagccaugggauugacguuacagaucuguuugcugcccaacccggacucaccucugccgugaucgacgcucugccgcgcaauauggucaucacaugucagggcuccgaugacauucggaaacuucuggaaagccaggggagaaaggauaucaagcucauugacaucgcccugaacaaaaccgauucccgcaaguaugagaaugcggugugggaccaguacaaggaucugugccacaugcauacgggaguuguggucgagaaaaagaaacggggcgggaaggaagagauuacaccucacugugcucuuauggacugcaucauguucgaugccgccgugucuggcggacucaacaccagcguccugagagcugugcugccccgcgacaugguuuuucggaccuccacaccuagagugguccucugaggacuagucccuguucccagagcccacuuuuuuuucuuuuuuugaaauaaaauagccugucuuucagaucucaaaggcucuuuucagagccaccaaaaaaaaaaaaaaaaaaaaaaaaaaaaaaaaaaaaaaaaaaaaaaaaaaaaaaaaaaaaaaaaagaauu

SEQ ID NO: 21227 - RNA, 2021 nt, Artificial Sequence
  mRNA product Design a-2 (hSL-A64-N5) comprising derived and/or modified sequence from LASV(G733-SLE-2010;Clade IV)__AIT17155__SP-IgE_NP(2-569) (opt5)
aggagaguccgcucagccagguugcagaagcggcuuagcguguguccuaaucuucucucugcguguagguaggccugugccgcaaacaagcuuaccauggacuggaccuggauccuguuccucguggccgcugccacaagaguccacagcagcgccuccaaggagaucaaaucuuuccuguggacccagagccucagacgggaacuguccggcuacugcucuaacauuaagcugcaaguggucaaagacgcucaggcccugcuccacgggcuggauuuuagcgagguuuccaaugugcagcgccuuaugagaaaggaacggcgcgacgauaacgaccugaaaagacuccgggaucugaaucaggcggugaacaaucuggucgagcucaagucuacacaacaaaagagcgugcugcgcguuggaacgcuuaccuccgacgaacugcucgugcuggcugccgaucuugagaaacuuaagagcaaagucaucagaacagagcggccccucucugccggcguguauauggggaaccuguccagccagcagcuggaccagcgcagagcucuccugucuaugauuggaauguccggcgggaaucagggagcccggaccggccgcgauggcguugugagagucugggacgugaagaacgcugaacuucugaauaaccaguucgggacaaugccuagccucacccuggccugucuuacaaaacagggacaaguggaucugaaugacgcgguccaggcccucaccgaucugggccugaucuacacggcuaaguauccgaacaccucugaccucgaccggcugacacagucccaucccauucuuaauaugaucgauaccaagaaaagcucccugaacaucucuggguacaauuuuagccucggagccgcuguuaaggccggcgcgugcaugcuggacgggggaaacaugcuugagacaauuaaaguguccccucaaaccauggauggcauccucaagagcauucugaaagugaagaaagcccugggcauguucaucucugacacgcccggggaacgcaacccuuaugagaauauucuguacaagaucugucucuccggagauggcuggcccuauauugcuagcagaacaucuaucaccgggcgggccugggagaacacagucguggaccuggaaagcgauggaaagccucagaaagcuggcuccaauaacucuaauaagagccuucaguccgccggguuuaccgccggacugaccuacagccagcucaugacacugaaagacgcuaugcugcaacuugauccgaacgcgaagacguggauggacaucgagggcagacccgaagauccuguugagauugcccucuaccagcccucuuccggcugcuauauccacuucuuucgcgaaccuaccgaccugaaacaguucaagcaggacgcuaaguacagccaugggauugaugugacagaccuguuugccgcccaacccggacucaccucugcugucaucgaugcccugccgcggaauauggugauuacaugucagggcuccgacgauaucagaaaacuucuggagagccaggggcgcaaggacaucaaacucauugauaucgcgcuguccaagauugacucucggaaauaugagaacgcuguuugggaucaguacaaggaccugugccacaugcauaccggaguggucguggaaaagaaaaagagaggcgggaaagaggaaaucacgccucacugugcccuuauggauugcauuauguucgacgccgcugucagcggcggacucaauucccuggugcugcgcgccguucucccccgggauaugguguuuagaacaucuaccccucgcgucgugcugugaggacuagucccuguucccagagcccacuuuuuuuucuuuuuuugaaauaaaauagccugucuuucagaucucaaaggcucuuuucagagccaccaaaaaaaaaaaaaaaaaaaaaaaaaaaaaaaaaaaaaaaaaaaaaaaaaaaaaaaaaaaaaaaaagaauu

SEQ ID NO: 21228 - RNA, 2021 nt, Artificial Sequence
  mRNA product Design a-2 (hSL-A64-N5) comprising derived and/or modified sequence from MOPV/LASV reassortant(IGS-1;Clade IV)__AFY05578__SP-IgE_NP(2-569) (opt5)
aggagaguccgcucagccagguugcagaagcggcuuagcguguguccuaaucuucucucugcguguagguaggccugugccgcaaacaagcuuaccauggacuggaccuggauccuguuccucguggccgcugccacaagaguccacagcagcgccuccaaggagaucaaaucuuuccuguggacccagagccucagacgggaacuguccggcuacugcucuaacauuaaacuucaaguggucaaggacgcucaggcccugcuccacgggcuggauuuuagcgagguuuccaaugugcagcgccuuaugagaaaggaacggcgcgacgauaacgaccugaaaagacuccgggaucugaaucaggcggugaacaaucuggucgagcucaagucuacacaacaaaagagcauccugcgcgugggaacgcuuaccuccgacgaucugcucauucuggcugccgaccuugaaaaacugagaagcaagguuauccggacagagcgcccccucucugccggcguguauauggggaaccuguccagccagcagcuggaucagagacgggcucuccugaauaugauuggaaugucuggcgggaaccagggagcccgcgcuggcagagacggcgucgugcggguuugggaugugaaaaaugccgagcuucuguccaaccaguucgggaccaugccuagccucacacuggcgugucuuaccaagcagggacaagucgaccugaaugaugccgugcaggcucucacagaccugggccugaucuacaccgccaaauauccgaacacgucugaccucgaucgccugacccagucccaucccauccuuaauaugauugacacaaagaaaagcucccugaacaucucuggguacaauuuuagccucggagcugccgugaaggcgggcgccugcaugcuggaugggggaaacaugcuugaaaccauuaaggucuccccucaaacaauggacggcauccugaaaagcauucucaagguuaaaaaggcucugggcauguucaucucugauacccccggggagagaaacccuuaugaaaauauucuguacaaaaucugucucuccggagacggcuggcccuauaucgccagccggacgucuauuacagggagagcuugggagaacaccgugguggaucuggagagcgacggaaagccucagaaggccgauuccaauaacucuagcaaaucccuucagagcgccggcuuuacagcugggcugaccuacucucagcucaugacccugaaggacgcgaugcugcaacuugauccgaaugccaaaacauggauggacaucgaaggacgccccgaggacccugucgaaauugcucucuaccagcccuccagcggcugcuauauccacuucuuucgggagccuacggaucugaagcaguucaaacaggacgccaaguacucucauggcauugaugugaccgaccuguuugccacacaacccgggcucaccuccgcuguuaucgaugcccugccgagaaacauggugaucacaugucagggaagcgacgauauucgcaaacuucuggaaucccagggccggaaggacaucaagcucauugauaucgaccugucuaaaaccgauagcagaaaguaugagaaugcggucugggaccaguacaaagaucugugccacaugcauacgggggugguuguggagaagaagaaacgcggaggcaaggaagagauuacaccucacugugcucuuauggacugcaucauguucgacgccgccgucuccgggggccucaacaccucugugcugcgggcuguccugcccagagauaugguguuucgcaccagcacaccucggguugugcucugaggacuagucccuguucccagagcccacuuuuuuuucuuuuuuugaaauaaaauagccugucuuucagaucucaaaggcucuuuucagagccaccaaaaaaaaaaaaaaaaaaaaaaaaaaaaaaaaaaaaaaaaaaaaaaaaaaaaaaaaaaaaaaaaagaauu

SEQ ID NO: 21229 - RNA, 2021 nt, Artificial Sequence
  mRNA product Design a-2 (hSL-A64-N5) comprising derived and/or modified sequence from LASV(LM765-SLE-2012;Clade IV)__AIT17815__SP-IgE_NP(2-569) (opt5)
aggagaguccgcucagccagguugcagaagcggcuuagcguguguccuaaucuucucucugcguguagguaggccugugccgcaaacaagcuuaccauggacuggaccuggauccuguuccucguggccgcugccacaagaguccacagcagcgccuccaaggagaucaaaucuuuccuguggacccagagccucagacgggaacuguccggcuacugcucuaacauuaagcugcaaguggucaaagacgcucaggcccugcuccacgggcuggauuuuagcgagguuuccaaugugcagcgccuuaugagaaaggaacggcgcgacgauaacgaccugaaaagacuccgggaucugaaucaggcggugaacaaucuggucgagcucaagucuacacaacaaaagagcauccugcgcgugggaacgcuuaccuccgacgaucugcucauucuggcugccgaccuugaaaaacuuaagagcaaaguuacaagaaccgagcggccccucucugccggcguguauauggggaaccuguccagccagcagcuggaucagcgcagagcucuccuggacaugaucggaaugucuggcuccaaucagggggcccgggcuggacgcgauggcgucgugagaguuugggacgugaagaacgccgagcuucugaauaaccaguucggcacaaugccuagccucacccuggcgugucuuacaaaacaggggcaagucgaucugaaugacgccgugcaggcucucaccgaccugggacugauuuacacggccaaguauccgaacaccucugaucucgaccggcugacacagucccaucccauccuuaauaugaucgauaccaagaaaagcucccugaacauuucuggcuacaauuuuagccucggggcugccgugaaggcgggagccugcaugcuggacggcgggaacaugcuugaaacaaucaaagucuccccucaaaccauggauggcauucucaagagcauccugaaaguuaagaaagcucugggaauguucauuucugacgcccccggcgagcgcaacccuuaugaaaauauccuguacaagauuugucucuccggggauggauggcccuauaucgcuagcagaacgucuaucacaggccgggccugggagaacaccgugguggaccuggagagcgaugggaagccucagaaagccggauccaauggcucuaacaagagccuucaguccgcuggguuuacagcgggacugaccuacagccagcucaugacccugaaagacgccaugcugcaacuugauccgaaugcuaagacauggauggacauugaaggcagacccgaggacccugucgaaaucgcccucuaccagcccucuuccggcugcuauauucacuucuuucgcgagccuacggaucugaaacaguucaagcaggacgccaaguacagccaugggaucgaugugaccgaccuguuugcugcccaacccggacucacaucugcgguuauugaugcucugccgcggaacauggugaucaccugucagggcuccgacgauaucagaaaacuuuucgaaagccaggggcgcaaggacauuaaacugaucgauauugcccucuccaagacagacucucggaaauaugagaaugccgucugggaucaguacaaggaccugugccacaugcauaccggaaucgugguugagaagaaaaagagaggcgggaaagaagagauuacgccucacugugcucugauggauugcaucauguuugacgccgcugugagcggcggacuuaacacauccguccuccgcgccgugcugccccgggacauggucuucagaaccucuaccccucgcgugguucugugaggacuagucccuguucccagagcccacuuuuuuuucuuuuuuugaaauaaaauagccugucuuucagaucucaaaggcucuuuucagagccaccaaaaaaaaaaaaaaaaaaaaaaaaaaaaaaaaaaaaaaaaaaaaaaaaaaaaaaaaaaaaaaaaagaauu

SEQ ID NO: 21230 - RNA, 2021 nt, Artificial Sequence
  mRNA product Design a-2 (hSL-A64-N5) comprising derived and/or modified sequence from LASV(LM776-SLE-2012;Clade IV)__AIT17825__SP-IgE_NP(2-569) (opt5)
aggagaguccgcucagccagguugcagaagcggcuuagcguguguccuaaucuucucucugcguguagguaggccugugccgcaaacaagcuuaccauggacuggaccuggauccuguuccucguggccgcugccacaagaguccacagcagcgccuccaaggagaucaaaucuuuccuguggacccagagccucagacgggaacuguccucuuacugcagcaacauuaaacuucaaguggucaaggacgcucaggcccugcuccacggccuggauuuuuccgagguuucuaaugugcagcgccuuaugagaaaggaacggcgcgacgauaacgaccugaaaagacuccgggaucugaaucaggcggugaacaaucuggucgagcucaagagcacacaacagaaguccauccugcgcguggggacgcuuaccagcgacgaucugcucauucuggcugccgaccuugaaaaacugaagucuaaaguuacaagaaccgagcggccccucuccgccggaguguauaugggcaaccugagcucucagcagcuggaucaacgcagagcucuccuguccaugaucgggaugagcggaucuaaucagggcgcccgggcugggcgcgacggagucgugagaguuugggaugugaagaacgccgagcuucugaauaaccaguucggcacaaugccuucccucacccuggcgugucuuacaaaacagggccaagucgaccugaaugaugccgugcaggcucucaccgaccuggggcugauuuacacggccaaguauccgaacaccagcgaccucgaucggcugacacagucccaucccauccuuaauaugaucgacaccaagaaaucuagccugaacauuuccggauacaauuuuagccucggcgcugccgugaaggcgggggccugcaugcuggauggaggcaacaugcuugaaacaaucaaagucucuccucaaaccauggacgggauucugaaguccauccucaaaguuaagaaagcucugggaauguucauuagcgauacgcccggcgagcgcaacccuuaugaaaauauccuguacaagauuugucucucuggcgacggguggcccuauaucgccagcagaacauccaucaccggacgggcuugggagaacacagugguggaucuggagucugacggcaagccucagaaagccgggagcaauaacuccaauaagagccuucagucugccggauuuaccgcuggccugaccuacucccagcucaugacacugaaagaugcgaugcugcaacuugacccgaacgccaagacguggauggauauugaagggagacccgaggacccugucgaaguggcucucuaccagcccagcucuggaugcuauauccacuucuuucgcgagccuaccgaccugaaacaguucaagcaggaugccaaguacucccauggcauugacguuacagaucuguuugccgcucaacccggccucaccagcgccgugaucgacgcgcugccgcggaauauggucauuacaugucagggguccgaugacaucagaaaacuucuggaaucucagggacgcaaggauaucaaacucauugacaucgcucugagcaagaccgauucccggaaauaugagaacgccgugugggaccaguacaaggaucugugccacaugcauacgggcguuguggucgagaagaaaaagagagggggaaaagaagagauuacaccucacugugcccuuauggacugcaucauguucgaugcugccgugucuggcgggcucaauaccagcguccugcgcgcugugcugccccgggacaugguuuuuagaaccuccacaccucgcgugguccucugaggacuagucccuguucccagagcccacuuuuuuuucuuuuuuugaaauaaaauagccugucuuucagaucucaaaggcucuuuucagagccaccaaaaaaaaaaaaaaaaaaaaaaaaaaaaaaaaaaaaaaaaaaaaaaaaaaaaaaaaaaaaaaaaagaauu

SEQ ID NO: 21231 - RNA, 2021 nt, Artificial Sequence
  mRNA product Design a-2 (hSL-A64-N5) comprising derived and/or modified sequence from LASV(Mad39;Clade IV)__ANH09723__SP-IgE_NP(2-569) (opt5)
aggagaguccgcucagccagguugcagaagcggcuuagcguguguccuaaucuucucucugcguguagguaggccugugccgcaaacaagcuuaccauggacuggaccuggauccuguuccucguggccgcugccacaagaguccacagcagcgccuccaaggagaucaaaucuuuccuguggacccagagccucagacgggaacuguccggcuacugcucuaacauuaagcugcaaguggucaaagacgcucaggcccugcuccacgggcuggauuuuagcgagguuuccaaugugcagcgccuuaugagaaagcagcggcgcgacgauaacgaccugaaaagacuccgggaucugaaucaagcggugaacaaucuggucgaacucaagucuacacagcaaaagagcgugcugcgcguuggaacgcuuaccuccgacgaucugcucacacuggcugccgaccuugagaaacuuaagagcaaagugaccagaacagaacggccccucaccgccggcgucuauauggggaaccugucuucccagcagcuggaucagcgcagagcucuccugaauaugaucggaaugagcggcgggaaccagggagcccggacaggccgcgacggcgugguuagagugugggaugucaagaaugcugagcuucugaacaaucaguucgggaccaugccuucucucacgcuggccugucuuaccaaacaaggacagguggaccugaacgaugugguccaggcgcucacagaccugggccugauuuacaccgccaaguauccgaauacauccgaccucgaucggcugacccaaagccaucccauccuuaacaugauugacacgaauaagucuucccugaacaucagcggguacaacuuuucccucggagcugccguuaaagcuggcgccugcaugcuggaugggggaaauaugcuugagacaaucaaggugucuccucagaccauggacggcauucugaaaagcauccucaaggugaaaaagucccugggcauguucauuagcgauacacccggggaacgcaacccuuaugagaauauccuguacaaaauuugucucucuggagacggcuggcccuauaucgcguccagaaccagcauuaccgggcgggccugggaaaacacagucguggaucuggagucuggaggcaagccucagaaggcugggagcaauaacuccaauaaaucucuucagagcgccggauuugcugccggccugacguacucccaacucaugacccugaaggacgccaugcugcagcuugauccgaacgcuaaaacauggauggacaucgagggcagacccgaagauccuguugagaucgcgcucuaccagcccauuagcgggugcuauauccacuucuuucgcgaaccuaccgaccugaagcaguucaaacaagacgccaaguacucucauggaauugaugugacagaccuguuugcugcccagcccggccucaccuccgccgucaucgaggcucugccgcggaauauggugauuacgugucaggggagcgaugacaucagaaaacuuuucgaaucucagggacgcaaggauaucaagcugauugacaucgcccucuccaaaacagauagccggaaguaugagaacgcgguuugggaccaauacaaagaucugugccacaugcauaccggcguggucguggagaagaagaaaaagggcgggaaagaagagauuaccccucacugugcucugauggacugcaucauguuugaugccgccgucuccggaggccuuaauacacucgugcugagagcuguucugccccgcgacaugguguuccggaccucuacaccuaaggucgugcucugaggacuagucccuguucccagagcccacuuuuuuuucuuuuuuugaaauaaaauagccugucuuucagaucucaaaggcucuuuucagagccaccaaaaaaaaaaaaaaaaaaaaaaaaaaaaaaaaaaaaaaaaaaaaaaaaaaaaaaaaaaaaaaaaagaauu

SEQ ID NO: 21232 - RNA, 2021 nt, Artificial Sequence
  mRNA product Design a-2 (hSL-A64-N5) comprising derived and/or modified sequence from LASV(Z0947-SLE-2011;Clade IV)__AIT17841__SP-IgE_NP(2-569) (opt5)
aggagaguccgcucagccagguugcagaagcggcuuagcguguguccuaaucuucucucugcguguagguaggccugugccgcaaacaagcuuaccauggacuggaccuggauccuguuccucguggccgcugccacaagaguccacagcagcgccuccaaggagaucaaaucuuuccuguggacccagagccucagacgggaacuguccggcuacugcucuaacauuaagcugcaaguggucaaagacgcucaggcccugcuccacgggcuggauuuuagcgagguuuccaaugugcagcgccuuaugagaaaggaacggcgcgacgauaacgaccugaaaagacuccgggaucugaaucaggcggugaacaaucuggucgagcucaagucuacacaacaaaagagcauccugcgcgugggaacgcuuaccuccgacgaucugcucauucuggcugccgaccuugaaaaacuuaagagcaaaguuacaagaaccgagcggccccucucugccggcguguauauggggaaccuguccagccagcagcuggaucagcgcagagcucuccugaauaugaucggaaugucuggcuccaaccagggggcccggacaggacgcgacggcgucgugagaguuugggaugugaagaaugcugagcuucugaacaaucaguucggcaccaugccuagccucacacuggccugucuuaccaaacaggggcaagucgaccugaacgaugcggugcaggcccucacggaccugggacugauuuacaccgcuaaguauccgaauacaucugaccucgaucggcugacccagucccaucccauccuuaacaugaucgacacaaagaaaagcucccugaauauuucuggcuacaacuuuagccucggggccgcugugaaggccggagcgugcaugcuggauggcgggaacaugcuugaaaccaucaaagucuccccucaaacgauggacggcauucucaagagcauccugaaaguuaagaaagcccugggaauguucauuucugaugcucccggcgagcgcaauccuuaugaaaacauccuguacaagauuugucucuccggggacggauggcccuauaucgccagcagaacaucuaucaccggccgggcuugggagaauacagugguggaucuggagagcgacgggaagccucagaaagccggauccaacggcucuaauaagagccuucaguccgccggguuuaccgcuggacugaccuacagccagcucaugacacugaaagaugcgaugcugcaacuugacccgaacgccaagacguggauggauauugaaggcagacccgaggacccugucgaaaucgcucucuaccagcccucuuccggcugcuauauucacuucuuucgcgagccuaccgaccugaaacaguucaagcaggaugccaaguacagccaugggaucgacgugacagaucuguuugccgcucaacccggacucaccucugccguuauugacgcgcugccgcggaauauggugaucacaugucagggcuccgaugacaucagaaaacuuuucgaaagccaggggcgcaaggauauuaaacugaucgacauugcucucuccaagaccgauucucggaaauaugagaacgccgucugggaccaguacaaggaucugugccacaugcauacgggaaucgugguugagaagaaaaagagaggcgggaaagaagagauuacaccucacugugcccugauggacugcaucauguuugaugcugccgugagcggcggacuuaauaccuccguccuccgcgcugugcugccccgggacauggucuucagaaccucuacaccucgcgugguucugugaggacuagucccuguucccagagcccacuuuuuuuucuuuuuuugaaauaaaauagccugucuuucagaucucaaaggcucuuuucagagccaccaaaaaaaaaaaaaaaaaaaaaaaaaaaaaaaaaaaaaaaaaaaaaaaaaaaaaaaaaaaaaaaaagaauu

SEQ ID NO: 21233 - RNA, 2052 nt, Artificial Sequence
  mRNA product Design a-2 (hSL-A100) comprising derived and/or modified sequence from LASV(Josiah;Clade IV)__NP_694869__SP-IgE_NP(2-569) (opt1)
aggagaguccgcucagccagguugcagaagcggcuuagcguguguccuaaucuucucucugcguguagguaggccugugccgcaaacaagcuuaccauggacuggaccuggauccuguuccucguggccgccgcgacccgcguccacagcagcgccuccaaggagaucaagagcuuccuguggacccagucccuccgccgggagcugagcggcuacugcuccaacaucaagcuccagguggucaaggacgcccaggcgcugcugcacgggcuggacuucagcgagguguccaacgugcagcgccucaugcggaaggagcgccgggacgacaacgaccugaagcgccugcgggaccucaaccaggccgucaacaaccugguggagcucaagagcacccagcagaaguccauccugcgcgugggcacccugaccagcgacgaccugcucauccuggccgccgaccuggagaagcucaaguccaaggucauccggaccgagcgcccccugagcgccgggguguacaugggcaaccuguccagccagcagcucgaccagcggcgcgcgcugcugaacaugaucgggauguccggcggcaaccagggggcccgggccggccgcgacggggugguccgggugugggacgugaagaacgccgagcuccugaacaaccaguucggcaccaugccgagccugacgcucgcgugccugaccaagcaggggcaggucgaccugaacgacgccgugcaggcccucaccgaccugggccugaucuacaccgccaaguaccccaacacguccgaccucgaccgccugacccagagccaccccauccugaacaugaucgacaccaagaaguccagccucaacaucagcggcuacaacuucucccugggggccgcggugaaggccggcgccugcaugcuggacgggggcaacaugcucgagaccaucaaggucagcccccagacgauggacggcauccugaaguccauccugaaggugaagaaggcccucgggauguucaucagcgacaccccgggcgagcggaaccccuacgagaacauccuguacaagaucugccuguccggggacggcuggcccuacaucgccagccgcaccuccaucaccgggcgggcgugggagaacacgguggucgaccucgagagcgacggcaagccccagaaggccgacuccaacaacagcuccaagagccugcaguccgccggcuucaccgccgggcugaccuacagccagcucaugacccugaaggacgccaugcugcagcuggacccgaacgcgaagacguggauggacaucgagggccgccccgaggaccccguggagaucgcccucuaccagcccuccagcgggugcuacauccacuucuuccgggagccgaccgaccugaagcaguucaagcaggacgccaaguacucccacggcaucgacgugaccgaccuguucgccacccagcccgggcucacgagcgccgucaucgacgcgcugccccgcaacauggugaucacgugccagggcuccgacgacauccgcaagcugcucgagagccagggccggaaggacaucaagcugaucgacaucgcccugagcaagaccgacucccgcaaguacgagaacgccgugugggaccaguacaaggaccucugccacaugcacaccggggucguggucgagaagaagaagcggggcgggaaggaggagaucaccccgcacugcgcccugauggacugcaucauguucgacgcggccgugagcggcgggcugaacaccuccgugcuccgcgccguccugccccgggacaugguguuccgcaccagcacgccccgggugguccugugaggacuagucccuguucccagagcccacuuuuuuuucuuuuuuugaaauaaaauagccugucuuucagaucucaaaggcucuuuucagagccaccaaaaaaaaaaaaaaaaaaaaaaaaaaaaaaaaaaaaaaaaaaaaaaaaaaaaaaaaaaaaaaaaaaaaaaaaaaaaaaaaaaaaaaaaaaaaaaaaaaaaa

SEQ ID NO: 21234 - RNA, 2052 nt, Artificial Sequence
  mRNA product Design a-2 (hSL-A100) comprising derived and/or modified sequence from LASV(LP;Clade I)__AAF86702__SP-IgE_NP(2-569) (opt1)
aggagaguccgcucagccagguugcagaagcggcuuagcguguguccuaaucuucucucugcguguagguaggccugugccgcaaacaagcuuaccauggacuggaccuggauccuguuccucguggccgccgcgacccgcguccacagcagcaacuccaaggagaucaagagcuuccuguggacccagucccuccgccgggagcugagcggcuacugcuccaacaucaagcuccagguggucaaggacgcccaggcccugcugcacgggcuggacuucagcgagguguccaacgugcagcgccucaugcggaagcagaagcgcgacgacgcggaccugaagcggcugcgcgaccucaaccaggccgucaacaaccugguggagcucaagagcacccagcagaagaacgugcugcgggucggcacgcuguccagcgacgaccugaucacccucgccgccgaccuggagaagcugaaguccaaggugauccgcaccgagcggccccucagcuccgggguguacaugggcaaccugagcucccagcagcuggaccagcgccgggcccuccugagcaugaucgggauguccggcggcccgcaggggaaccgcaccggcggggacggcgucgugcgggugugggacgucaagaacgcggagcugcucaacaaccaguucgggacgaugcccagccugacccuggccugccucaccaagcagggccagguggaccugaacgacgccgugcaggcccugaccgaccucggccugaucuacacggcgaaguaccccaacuccagcgaccuggacaugcucacccagagccaccccauccuggggauggucgacaccaagaaguccagccugaacaucuccggcuacaacuucagccucggggccgccgugaaggccggcgccugcaugcuggacggcgggaacaugcuggagaccaucaagguguccccgcagacgauggacggcauccucaagagcauccugaaggucaagcgcucccuggggauguucaucagcgacacccccggcgagcggaaccccuacgagaacauccucuacaagaucugccuguccggggagggcuggcccuacaucgcgagccgcaccuccaucaccggccgggccugggagaacacgcugguggaccucgagagcgacaacaagccgcccaagcugaacuccgccgggagcaacaagucccugcaggccgccggccucaacgcggggcugaccuacagccagcugaugacccugaaggacugcaugcuccagcuggaccccuccagcaagaccuggaucgacaucgagggccgccccgaggacccgguggagaucgcccuguuccagcccuccagcgggugcuacauccacuucuuccgggagcccacggaccucaagcaguucaagcaggacgccaaguacagccacggcaucgacgucaccgaccuguucuccacccagcccggccugaccagcgccgugaucgaggcccucccgcgcaacauggugcugacgugccagggguccgacgacaucaagaagcugcucgagagccagggccggcgcgacaucaagcugaucgacaucucccugagcaaggcggacucccgcaaguucgagaacgccgucugggaccaguacaaggaccucugccacaugcacaccgggguggucguggagaagaagaagcggggcgggaaggaggagaucacgccccacugcgcccugcuggacugcaucauguucgacgccgccaccaccggcagccucaacaucaccacccugcgcgcggugcugccccgggacauggucuuccgcaccuccacgcccaagguggugcucugaggacuagucccuguucccagagcccacuuuuuuuucuuuuuuugaaauaaaauagccugucuuucagaucucaaaggcucuuuucagagccaccaaaaaaaaaaaaaaaaaaaaaaaaaaaaaaaaaaaaaaaaaaaaaaaaaaaaaaaaaaaaaaaaaaaaaaaaaaaaaaaaaaaaaaaaaaaaaaaaaaaaa

SEQ ID NO: 21235 - RNA, 2052 nt, Artificial Sequence
  mRNA product Design a-2 (hSL-A100) comprising derived and/or modified sequence from LASV(803213;Clade II)__AAF86704__SP-IgE_NP(2-569) (opt1)
aggagaguccgcucagccagguugcagaagcggcuuagcguguguccuaaucuucucucugcguguagguaggccugugccgcaaacaagcuuaccauggacuggaccuggauccuguuccucguggccgccgcgacccgcguccacagcagcgccuccaaggaggugaaguccuuccuguggacccagagccuccgccgggagcugagcggcuacugcuccaacaucaagcugcaggucgugaaggacgcccaggcgcuccugcacgggcuggacuucagcgaggugaacaacguccagcgccucaugcggaagcagaagcgcgacgacggcgaccugaagcggcugcgcgaccucaaccaggccgugaacaaccugguggagcugaaguccacccagcagaaguccauccuccgggucgggacgcugaccagcgacgaccugcucacccuggccgccgaccuggagaagcucaagagcaaggugauccgcaccgagcggccccuguccagcggcguguacauggggaaccuguccacgcagcagcucgagcagcgccgggcccugcugaacaugaucggcauggucggcggggcgcagggcacccagccggggcgcgacggcguggugcgggucugggacgugaagaaccccgaccuccugaacaaccaguucgggaccaugcccagccugacccucgccugccugacgaagcagggccagguggaccugaacgacgccguccucgcccugaccgaccugggccucaucuacaccgcgaaguaccccaacuccagcgaccuggaccgccugucccagagccacccgauccucaacaugguggacaccaagaaguccagccugaacaucagcggguacaacuucucccugggcgccgccgugaaggccggggccugcaugcucgacggcggcaacaugcuggagacgaucaaggucacgccccagaccauggacgggauccucaagagcauccugaaggugaagcggucccugggcauguucgugagcgacacccccggggagcgcaaccccuacgagaacauccuguacaagaucugccucuccggcgacggguggccguacaucgcgagccggaccuccaucgucggccgcgccugggagaacaccaccguggaccuggagagcgacggcaagccccagaagguggggaccgccggcuccaacaagagccugcaguccgccggguuccccacgggccucaccuacagccagcugaugacccugaaggacuccaugaugcagcuggaccccagcgccaagaccuggaucgacaucgaggggcggccggaggaccccgucgagaucgcgcucuaccagcccauguccggcugcuacauccacuucuuccgcgagcccacggaccugaagcaguucaagcaggacgccaaguacagccacggcaucgacguggccgaccuguucccggcccagcccgggcucaccuccgccgucaucgaggcgcugccccggaacauggugcugaccugccagggcagcgacgacaucaagaagcuccuggacucccaggggcgccgcgacaucaagcugaucgacaucagccucagcaagguggacucccggaaguucgagaacgccgucugggaccagugcaaggaccugugccacaugcacaccggcgugguggucgagaagaagaagcgcgggggcaaggaggagaucacgccccacugcgcccugauggacugcaucauguucgacgccgccgugagcggcgggcucaacaucccggugcugcgggcgguccugccccgcgacaugguguuccggaccuccagccccaaggugguccucugaggacuagucccuguucccagagcccacuuuuuuuucuuuuuuugaaauaaaauagccugucuuucagaucucaaaggcucuuuucagagccaccaaaaaaaaaaaaaaaaaaaaaaaaaaaaaaaaaaaaaaaaaaaaaaaaaaaaaaaaaaaaaaaaaaaaaaaaaaaaaaaaaaaaaaaaaaaaaaaaaaaaa

SEQ ID NO: 21236 - RNA, 2055 nt, Artificial Sequence
  mRNA product Design a-2 (hSL-A100) comprising derived and/or modified sequence from LASV(GA391;Clade III)__CAA36646__SP-IgE_NP(2-570) (opt1)
aggagaguccgcucagccagguugcagaagcggcuuagcguguguccuaaucuucucucugcguguagguaggccugugccgcaaacaagcuuaccauggacuggaccuggauccuguuccucguggccgccgcgacccgcguccacagcagcgccuccaaggaggugcgcagcuuccuguggacccagucccuccggcgcgagcugagcggcuacugcuccaacaucaagcugcaggucgugaaggacgcccaggcgcuccugcacgggcuggacuucagcgagguguccaacguccagcggcucaugcgcaagcagaagcgggacgacggcgaccugaagcgccugcgggaccucaaccaggccgugaacaaccugguggagcucaagagcacccagcagaaguccguccugcgcguggggacccugagcuccgacgaccugcucauccuggccgccgaccuggagaagcucaagagcaaggugacccggaccgagcgcccccuguccagcggcgucuacauggggaaccuguccagccagcagcucgaccagcggcgcgcccugcugaacaugaucggcaugaccggcguguccgggggcgggaagggcgcgagcgacgggaucgugcgggucugggacgugaagaacgccgagcuccugaacaaccaguucggcacgaugccgucccugacccucgccugccugaccaagcagggccagguggaccugaacgacgccguccaggcgcucaccgaccuggggcugaucuacacggccaaguaccccaacagcagcgaccucgaccgccugucccagagccaccccauccugaacaugaucgacaccaagaaguccagccucaacaucuccggcuacaacuucagccugggggccgccgugaaggccggcgcgugcaugcuggacggcgggaacaugcucgagaccaucaaggugagcccccagaccauggacggcauccucaaguccauccugaaggucaagaagucccuggggauguucgugagcgacacgccgggcgagcggaaccccuacgagaacauccuguacaagaucugccuguccggggacggcuggcccuacaucgccagccgcaccuccaucgugggccgggccugggagaacaccgucguggaccucgagcaggacaacaagccccagaagaucgggaacggcgggagcaacaagucccugcagagcgccggcuucgccgcggggcugaccuacucccagcucaugacgcugaaggacuucaagugcuucaaccugaucccgaacgccaagaccuggauggacaucgagggccgccccgaggaccccguggagaucgcccuguaccagcccagcuccggcugcuacguccacuucuuccgggagccgaccgaccucaagcaguucaagcaggacgccaaguacagccacgggaucgacgugaccgaccuguucgccgcgcagcccggccugacgagcgccgucaucgaggcccucccccgcaacauggugaucacgugccagggguccgaggacauccggaagcugcuggagagccagggccgccgcgacaucaagcucaucgacaucacccuguccaaggccgacagccggaaguucgagaacgccgugugggaccaguucaaggaccugugccacaugcacaccggggucgugguggagaagaagaagcgcggcggcaaggaggagaucacgccccacugcgcgcucauggacugcaucauguucgacgccgccgucuccgggggccuggacgccaaggugcugcgggugguccucccgcgcgacaugguguuccggaccagcacccccaaggugguccugugaggacuagucccuguucccagagcccacuuuuuuuucuuuuuuugaaauaaaauagccugucuuucagaucucaaaggcucuuuucagagccaccaaaaaaaaaaaaaaaaaaaaaaaaaaaaaaaaaaaaaaaaaaaaaaaaaaaaaaaaaaaaaaaaaaaaaaaaaaaaaaaaaaaaaaaaaaaaaaaaaaaaa

SEQ ID NO: 21237 - RNA, 2052 nt, Artificial Sequence
  mRNA product Design a-2 (hSL-A100) comprising derived and/or modified sequence from LASV(AV;Clade V)__CCA30315__SP-IgE_NP(2-569) (opt1)
aggagaguccgcucagccagguugcagaagcggcuuagcguguguccuaaucuucucucugcguguagguaggccugugccgcaaacaagcuuaccauggacuggaccuggauccuguuccucguggccgccgcgacccgcguccacagcagcgccuccaaggaggugaaguccuuccuguggacccagagccuccgccgggagcugagcggcuacugcuccaacaucaagcugcaggucgugaaggacgcccaggcgcuccugcacgggcuggacuucagcgagguguccaacguccagcgccucaugcggaagcagcgccgggacgacagcgaccugaagcgccugcgggaccucaaccaggccgugaacaaccugguggagcugaaguccacccagcagaaguccguccuccgcgugggcacgcugagcagcgacgaccugcucacccuggccgccgaccuggagaagcucaaguccaaggugacccggaccgagcgcccccugagcuccggggucuacaugggcaaccugagcucccagcagcucgaccagcggcgcgcccugcugaaccucaucgggaugacgaacggcagccagggcucccaggcggggcgggacggcguggugcgcgucugggacgugaagaacgccgagcugcugaacaaccaguucgggaccaugccgagccucacccuggccugccugaccaagcagggccagguggaccucaacgacgucgugcaggcccugacggaccuggggcucaucuacaccgcgaaguaccccaacaccagcgaccuggaccggcugacccagucccaccccauccucaacaugaucgacacgaagaaguccagccugaacaucagcggcuacaacuucucccugggcgccgccgugaaggccggggccugcaugcucgacggcgggaacaugcuggagaccaucaaggucagcccccaguccauggacggcauccucaagagcauccugaaggugaagcgcgcgcugggcauguucguguccgacaccccgggggagcggaaccccuacgagaacauccuguacaagaucugccucagcggcgacggguggcccuacaucgccucccgcaccagcaucgucggccgggccugggagaacacggugguggaccuggagaccgacgggaagccccagaagaucggcuccggcaacagcaacaagucccugcagagcgccggguucuccgccggccucaccuacagccagcugaugacccugaaggacgcgaugcugcagcucgacccgaacgccaagacguggauggacaucgaggggcgccccgaggaccccgucgagguggcccuguaccagcccaucuccggcugcuacauccacuucuuccgggagccgaccgaccugaagcaguucaagcaggacgccaaguacagccacgggaucgacaucgccgaccucuucgcggcccagcccggccugaccagcgccgucaucgaggcccugccccgcaacauggugaucacgugccagggcuccgaggacaucaagaagcuccuggagagccaggggcgcaaggacaucaagcugaucgacaucgcccucuccaagaucgacagccggaaguucgagaacgcggugugggaccaguacaaggaccugugccacaugcacaccggcgucgugguggagaagaagaagcgcgggggcaaggaggagaucaccccgcacugcgcccugauggacugcaucauguucgacgccgccgucuccgggggccucaacacccuggugcugcgggcggugcucccccgcgacauggucuuccggaccagcacgccccgcguggugcugugaggacuagucccuguucccagagcccacuuuuuuuucuuuuuuugaaauaaaauagccugucuuucagaucucaaaggcucuuuucagagccaccaaaaaaaaaaaaaaaaaaaaaaaaaaaaaaaaaaaaaaaaaaaaaaaaaaaaaaaaaaaaaaaaaaaaaaaaaaaaaaaaaaaaaaaaaaaaaaaaaaaaa

SEQ ID NO: 21238 - RNA, 2052 nt, Artificial Sequence
  mRNA product Design a-2 (hSL-A100) comprising derived and/or modified sequence from LASV(Togo/2016/7082;Clade VI)__AMR44578__SP-IgE_NP(2-569) (opt1)
aggagaguccgcucagccagguugcagaagcggcuuagcguguguccuaaucuucucucugcguguagguaggccugugccgcaaacaagcuuaccauggacuggaccuggauccuguuccucguggccgccgcgacccgcguccacagcagcaacuccaaggaggugaaguccuuccuguggacccagagccuccgccgggagcugagcggcuacugcuccaacaucaagcugcaggucgugaaggacgcccaggcccuccugcacgggcuggacuucagcgagguguccaacguccagcgccucaugcggaagcagaagcgcgacgacggcgaccugaagcggcugcgcgaccucaaccaggcggugaacaaccugguggagcucaagagcguccagcagaaguccauccugcggguggggacccugaccagcgacgaccugcucacccuggccgccgaccuggagaagcucaaguccaaggugacccgcaccgagcggccccugagcuccggcgucuacauggggaaccugagcucccagcagcucgaccagcgccgggcccugcugagcaugaucggcauguccggcgggaaccagaacagccagccgaagggcgacgggguggugcgcgucugggacgugaagaacgccgaccuccugaacaaccaguucggcacgaugcccucccugacccucgcgugccugaccaagcagggccagguggaccugaacgacgccguccaggcccucaccgaccuggggcugaucuacacggccaaguaccccaacagcagcgaccucgaccggcugucccagagccaccccauccugaacaugaucgacaccaagaaguccagccucaacaucuccggcuacaacuucagccugggggcggccaucaagaccggcgccugcaugcuggacgggggcaacaugcucgagaccaucaaggugacgccgcagaccauggacggcauccugaaguccauccugaaggugaagcgcagccucgggauguucaucuccgacacccccggcgagcggaaccccuacgagaacauccuguacaagaucugccugagcggggacggcuggcccuacaucgccucccgcaccgccaucaucgggcgggcgugggagaacacggucguggaccucgagagcgacuccaagccgcagaagaucggcagcaacggcuccaacaagagccugcaguccgccggguucgcccccggccugaccuacagccagcucaugacccugaaggacuccaugcugcagcuggaccccaacgccaagaccuggaucgacaucgaggggcgccccgaggacccgguggaggucgcccucuuccagcccaucagcggcugcuacauccacuucuuccgggagcccacggaccugaagcaguucaagcaggacgcgaaguacagccacgggaucgacgugaccgaccuguucgccgcccagcccggccucaccuccgccgugaucgaggcccugccgcgcaacaugguccugaccugccagggcagcgacgacaucaagaagcuccuggacucccaggggcggcgcgacaucaagcugaucgacgugagccucaacaagaucgacucccgcaaguucgagaacgcggucugggaccaguacaaggaccugugccacaugcacacgggcgugguggucgagaagaagaagaagggcgggaaggaggagaucacgccccacugcgcccugcucgacugcaucauguucgacgccgccgugagcgggggccugaacgccaccgugcugcgggcgguccucccccgcgacaugguguuccggaccuccagccccaaggugguccugugaggacuagucccuguucccagagcccacuuuuuuuucuuuuuuugaaauaaaauagccugucuuucagaucucaaaggcucuuuucagagccaccaaaaaaaaaaaaaaaaaaaaaaaaaaaaaaaaaaaaaaaaaaaaaaaaaaaaaaaaaaaaaaaaaaaaaaaaaaaaaaaaaaaaaaaaaaaaaaaaaaaaa

SEQ ID NO: 21239 - RNA, 2052 nt, Artificial Sequence
  mRNA product Design a-2 (hSL-A100) comprising derived and/or modified sequence from LASV(KAK-428;Clade n.d. (VII))__ANH09741__SP-IgE_NP(2-569) (opt1)
aggagaguccgcucagccagguugcagaagcggcuuagcguguguccuaaucuucucucugcguguagguaggccugugccgcaaacaagcuuaccauggacuggaccuggauccuguuccucguggccgccgcgacccgcguccacagcagcaacuccaaggaggugaaguccuuccuguggacccagagccuccgccgggagcugagcggcuacugcaccaacaucaagcugcaggucgugaaggacgcccaggcccuccugcacgggcuggacuucuccgaggugagcaacguccagcgccucaugcggaagcagaagcgcgacgacaacgaccugaagcggcugcgcgaccucaaccaggcggugaacaaccugguggagcugaaguccguccagcagaaguccgugcucaaggugggcacgcugaacagcgacgaccugcucacccuggccgccgaccuggagaagcucaagagcaaggucgugcggaccgagcgcccccuguccagcgggguguacaugggcaaccuguccagccagcagcucgaccagcggcgcgcccugcugaacaugaucgggauggccggcggcucccaggggaaccagccgagccgggacggcgucgugcgcgugugggacgucaagaacgcggaccuccugaacaaccaguucgggaccaugcccucccugacgcucgccugccugaccaagcagggccagguggaccugaacgacgugguccucgcccugaccgaccuggggcucaucuacaccgccaaguaccccaacagcuccgaccuggaccggcugagccagaaccaccccgugcucaacaugaucgacgugaacaagagcucccugaacaucagcggcuacaacuucucccugggcgcggccgucaaggccggggccugcaugcucgacggcgggaacaugcuggagacgaucaagaucagcccgcagaccguggacggcauccugaaguccauccucaaggugaagcgcgcccugggcauguucgucagcgacacccccggggagcggaaccccuacgagaacauccuguacaaggugugccucuccggcaacggguggcccuacaucgcgagccgcaccuccaucgucggccgggccugggagaacacggugguggaccuggagagcaacaagaaccagccgaaggucgggaacaacggcuccaacaagaugcugcagagcuccggcuucgccaccgggcucaccuacagccagcugaugacccugcgcgacuccaugcugcagcucgaccccacggccaagaccuggaucgacaucgagggccggcccgaggaccccguggagcuggcccuguuccagccgagcuccgggugcuacauccacuucuuccgcgagcccaccgaccucaagcaguucaagcaggacgcgaaguacagccacggcaucgacgugaacgaccuguucuccgcccagcccgggcugaccagcgccguccucgaggcccugccccggaacauggugcugacgugccagggcagcgacgacauccgcaagcuccuggacucccaggaccgcaaggacaucaagcugaucgacaucagccucuccaaggccgacgcgcggaaguucgagaacgacgugugggaccaguucaaggaccugugccacaugcacaccggcaucgucguggagaagaagaagaagggcgggaagcaggagaugaccccgcacugcgcccugcucgacugcaucauguucgacgccgccgugagcgggggccugaacguccccacccugcgcgccgugcuccccacggacaugguguuccggaccaucaccaccaaggucgugcugugaggacuagucccuguucccagagcccacuuuuuuuucuuuuuuugaaauaaaauagccugucuuucagaucucaaaggcucuuuucagagccaccaaaaaaaaaaaaaaaaaaaaaaaaaaaaaaaaaaaaaaaaaaaaaaaaaaaaaaaaaaaaaaaaaaaaaaaaaaaaaaaaaaaaaaaaaaaaaaaaaaaaa

SEQ ID NO: 21240 - RNA, 2052 nt, Artificial Sequence; identical to SEQ ID NO: 21234
  mRNA product Design a-2 (hSL-A100) comprising derived and/or modified sequence from LASV(Pinneo-NIG-1969;Clade I)__AIT17837__SP-IgE_NP(2-569) (opt1)

SEQ ID NO: 21241 - RNA, 2052 nt, Artificial Sequence
  mRNA product Design a-2 (hSL-A100) comprising derived and/or modified sequence from LASV(ISTH0009-NIG-2011;Clade II)__AIT17405__SP-IgE_NP(2-569) (opt1)
aggagaguccgcucagccagguugcagaagcggcuuagcguguguccuaaucuucucucugcguguagguaggccugugccgcaaacaagcuuaccauggacuggaccuggauccuguuccucguggccgccgcgacccgcguccacagcagcguguccaaggaggucaagagcuuccuguggacccagucccuccgccgggagcugagcggcuacugcuccaacaucaagcuccagguggugaaggacgcccaggcccugcugcacgggcuggacuucagcgaggucuccaacgugcagcgccucaugcggaagcagaagcgcgacgacagcgaccugaagcggcugcgcgaccucaaccaggcggugaacaaccuggucgagcugaaguccacccagcagaaguccauccuccgggugggcacccugaccagcgacgaccugcucacccuggccgccgaccuggagaagcucaagagcaaggugauccgcaccgagcggccccuguccagcggggucuacaugggcaaccuguccacgcagcagcucgagcagcgccgggcccugcugaacaugaucgggauggugggcggcgcccaggggacccagccgggccgcgacggggugguccgggugugggacgugaagaaccccgaccuccugaacaaccaguucggcaccaugcccagccugacccucgcgugccugacgaagcaggggcaggucgaccugaacgacgccgugcucgcccugaccgaccugggccucaucuacaccgccaaguaccccaacuccagcgaccuggaccgccugucccagagccacccgauccucaacaugguggacaucaagaaguccagccugaacaucagcggcuacaacuucucccugggggcggccgucaaggccggcgccugcaugcucgacgggggcaacaugcuggagaccaucaaggugacgccccagaccauggacggcauccucaagagcauccugaaggugaagcggucccuggggauguucgucagcgacacccccggcgagcgcaaccccuacgagaacauccuguacaagaucugccucuccggggacggcuggccguacaucgccagccggaccuccaucguggggcgcgcgugggagaacacgaccguggaccuggagagcgacggcaagccccagaaggucggcuccgccgggagcaacaagucccugcagagcgccggcuuccccaccgggcucaccuacucccagcugaugacgcugaaggacagcaugaugcagcuggaccccuccgccaagaccuggaucgacaucgagggccggccggaggaccccguggagaucgcccucuaccagcccaugagcgggugcuacauccacuucuuccgcgagcccaccgaccugaagcaguucaagcaggacgcgaaguacucccacggcaucgacgucgccgaccuguucccggcccagcccggccucaccagcgccgugaucgaggcccugccccggaacauggugcugacgugccaggggagcgacgacaucaagcgccuccuggacucccagggccgccgggacaucaagcugaucgacaucgcgcucagcaaggccgacucccgccgguucgagaacgccgucugggaccagugcaaggaccugugccacaugcacaccggggugguggucgagaagaagaagcgcggcgggaaggaggagaucacgccccacugcgcccugauggacugcaucauguacgacgccgcggugagcggcggccucaacaucccggugcugcgggccguccugccccgcgacaugguguuccggaccuccagccccaaggugguccucugaggacuagucccuguucccagagcccacuuuuuuuucuuuuuuugaaauaaaauagccugucuuucagaucucaaaggcucuuuucagagccaccaaaaaaaaaaaaaaaaaaaaaaaaaaaaaaaaaaaaaaaaaaaaaaaaaaaaaaaaaaaaaaaaaaaaaaaaaaaaaaaaaaaaaaaaaaaaaaaaaaaaa

SEQ ID NO: 21242 - RNA, 2052 nt, Artificial Sequence
  mRNA product Design a-2 (hSL-A100) comprising derived and/or modified sequence from LASV(ISTH2010-NIG-2012;Clade II)__AIT17483__SP-IgE_NP(2-569) (opt1)
aggagaguccgcucagccagguugcagaagcggcuuagcguguguccuaaucuucucucugcguguagguaggccugugccgcaaacaagcuuaccauggacuggaccuggauccuguuccucguggccgccgcgacccgcguccacagcagcgccuccaaggaggugaaguccuuccuguggacccagagccuccgccgggagcugagcggcuacugcuccaacaucaagcugcaggucgugaaggacgcccaggcgcuccugcacgggcuggacuucagcgagguguccaacguccagcgccucaugcggaagcagaagcgcgacgacagcgaccugaagcggcugcgcgaccucaaccaggccgugaacaaccugguggagcugaaguccacccagcagaaguccauccuccgggucggcacgcugaccagcgacgaccugcucacccuggccgccgaccuggagaagcucaagagcaaggugauccgcaccgagcggccccuguccagcgggguguacaugggcaaccuguccacgcagcagcucgagcagcgccgggcccugcugaaccucaucgggauggucggcggcgcgcaggggacccagccgggccgcgacgggguggugcgggucugggacgugaagaaccccgaccugcugaacaaccaguucggcaccaugcccagccucacccuggccugccugacgaagcagggccagguggaccucaacgacgccguccuggcccugaccgaccucgggcugaucuacaccgcgaaguaccccaacuccagcgaccuggaccgccucucccagagccacccgauccugaacaugguggacaccaagaaguccagccugaacaucagcggcuucaacuucucccucggggccgccgugaaggccggcgccugcaugcuggacgggggcaacaugcuggagacgaucaaggucacgccccagaccauggacggcauccucaagagcauccugaaggugaagaagucccuggggauguucgugagcgacacccccggcgagcggaaccccuacgagaacauccucuacaagaucugccuguccggggacggcuggccguacaucgcgagccgcaccuccaucgucgggcgggccugggagaacaccaccguggaccuggagagcgacggcaagccccacaaggugggcaccgccggguccaacaagagccuccaguccgccggcuuccccacggggcugaccuacagccagcugaugacccugaaggacuccaugaugcagcucgaccccagcgccaagaccuggaucgacaucgagggccgcccggaggaccccgucgagaucgcgcuguaccagcccauguccgggugcuacauccacuucuuccgggagcccacggaccugaagcaguucaagcaggacgccaaguacagccacggcaucgacguggccgaccucuucccggcccagcccggccugaccuccgccgucaucgaggcgcugccccgcaacauggugcugaccugccaggggagcgacgacaucaagcggcuccuggacagccagggccgccgcgacaucaagcucaucgacaucgcccuguccaaggccgacagccggcgcuucgagaacgccgugugggaccagugcaaggaccugugccacaugcacaccggggucgugguggagaagaagaagcggggcgggaaggaggagaucacgccccacugcgcccucauggacugcaucauguacgacgcggccgucuccggcggccugaacaucccggugcugcgcgccgugcucccccgggacauggucuuccgcaccagcucccccaagguggugcugugaggacuagucccuguucccagagcccacuuuuuuuucuuuuuuugaaauaaaauagccugucuuucagaucucaaaggcucuuuucagagccaccaaaaaaaaaaaaaaaaaaaaaaaaaaaaaaaaaaaaaaaaaaaaaaaaaaaaaaaaaaaaaaaaaaaaaaaaaaaaaaaaaaaaaaaaaaaaaaaaaaaaa

SEQ ID NO: 21243 - RNA, 2052 nt, Artificial Sequence
  mRNA product Design a-2 (hSL-A100) comprising derived and/or modified sequence from LASV(Lassa virus/H.sapiens-wt/NGA/2015/ISTH_0543;Clade II)__AVO03640__SP-IgE_NP(2-569) (opt1)
aggagaguccgcucagccagguugcagaagcggcuuagcguguguccuaaucuucucucugcguguagguaggccugugccgcaaacaagcuuaccauggacuggaccuggauccuguuccucguggccgccgcgacccgcguccacagcagcgccuccaaggaggugaaguccuuccuguggacccagagccuccgccgggagcugagcggcuacugcuccaacaucaagcugcaggucgugaaggacgcccaggcgcuccugcacgggcuggacuucagcgagguguccaacguccagcgccucaugcggaagcagaagcgcgacgacagcgaccugaagcggcugcgcgaccucaaccaggccgugaacaaccugguggagcugaaguccacccagcagaaguccauccuccgggucggcacgcugaccagcgacgaccugcucacccuggccgccgaccuggagaagcucaagagcaaggugauccgcaccgagcggccccuguccagcgggguguacaugggcaaccuguccacgcagcagcucgagcagcgccgggcccugcugaacaugaucgggauggucggcggcgcgcaggggacccagccgggccgcgacgggguggugcgggucugggacgugaagaaccccgaccuccugaacaaccaguucggcaccaugcccagccugacccucgccugccugacgaagcagggccagguggaccugaacgacgccguccucgcccugaccgaccuggggcucaucuacaccgcgaaguaccccaacuccagcgaccuggaccgccugucccagagccacccgauccucaacaugguggacaccaagaaguccagccugaacaucagcggcuacaacuucucccugggggccgccgugaaggccggcgccugcaugcucgacgggggcaacaugcuggagacgaucaaggucacgccccagaccauggacggcauccucaagagcauccugaaggugaagaagucccuggggauguucgugagcgacacccccggcgagcggaaccccuacgagaacauccuguacaagaucugccucuccggggacggcuggccguacaucgcgagccgcaccuccaucgucgggcgggccugggagaacaccaccguggaccuggagagcgacggcaagccccagaaggugggcuccgccgggagcaacaagucccugcagagcgccggcuuccccaccgggcucacguacucccagcugaugacccugaaggacagcaugaugcagcuggaccccuccgccaagaccuggaucgacaucgagggccgcccggaggaccccgucgagaucgcgcucuaccagcccaugagcgggugcuacauccacuucuuccgggagcccaccgaccugaagcaguucaagcaggacgccaaguacucccacggcaucgacguggccgaccuguucccggcccagcccggccucacgagcgccgucaucgaggcgcugccccgcaacauggugcugaccugccaggggagcgacgacaucaagcggcuccuggacucccagggccgcaaggacaucaagcugaucgacaucgcccucagcaaggccgacucccgccgguucgagaacgccgugugggaccagugcaaggaccugugccacaugcacaccggggucgugguggagaagaagaagcgcggcgggaaggaggagaucacgccccacugcgcccugauggacugcaucauguacgacgcggccgucagcggcggccucaacaucccggugcugcgggccgugcugccccgcgacauggucuuccggaccuccagccccaagguggugcucugaggacuagucccuguucccagagcccacuuuuuuuucuuuuuuugaaauaaaauagccugucuuucagaucucaaaggcucuuuucagagccaccaaaaaaaaaaaaaaaaaaaaaaaaaaaaaaaaaaaaaaaaaaaaaaaaaaaaaaaaaaaaaaaaaaaaaaaaaaaaaaaaaaaaaaaaaaaaaaaaaaaaa

SEQ ID NO: 21244 - RNA, 2052 nt, Artificial Sequence
  mRNA product Design a-2 (hSL-A100) comprising derived and/or modified sequence from LASV(Lassa virus/H.sapiens-wt/NGA/2016/ISTH_0009;Clade II)__AVO03572__SP-IgE_NP(2-569) (opt1)
aggagaguccgcucagccagguugcagaagcggcuuagcguguguccuaaucuucucucugcguguagguaggccugugccgcaaacaagcuuaccauggacuggaccuggauccuguuccucguggccgccgcgacccgcguccacagcagcgccuccaaggaggugaaguccuuccuguggacccagagccuccgccgggagcugagcggcuacugcuccaacaucaagcugcaggucgugaaggacgcccaggcgcuccugcacgggcuggacuucagcgagguguccaacguccagcgccucaugcggaagcagaagcgcgacgacagcgaccugaagcggcugcgcgaccucaaccaggccgugaacaaccugguggagcugaaguccacccagcagaaguccauccuccgggucggcacgcugaccagcgacgaccugcucacccuggccgccgaccuggagaagcucaagagcaaggugauccgcaccgagcggccccuguccagcgggguguacaugggcaaccuguccacgcagcagcucgagcagcgccgggcccugcugaacaugaucgggauggucggcggcgcgcaggggacccagccgggccgcgacgggguggugcgggucugggacgugaagaaccccgaccuccugaacaaccaguucggcaccaugcccagccugacccucgccugccugacgaagcagggccagguggaccugaacgacgccguccucgcccugaccgaccuggggcucaucuacaccgcgaaguaccccaacuccagcgaccuggaccgccugucccagagccacccgauccucaacaugguggacaccaagaaguccagccugaacaucagcggcuacaacuucucccugggggccgccgugaaggccggcgccugcaugcucgacgggggcaacaugcuggagacgaucaaggucacgccccagaccauggacggcauccucaagagcauccugaaggugaagaagucccuggggauguucgugagcgacacccccggcgagcggaaccccuacgagaacauccuguacaagaucugccucuccggggacggcuggccguacaucgcgagccgcaccuccaucgucgggcgggccugggagaacaccaccguggaccuggagagcgacggcaagccccagaaggugggcuccgccgggagcaacaagucccugcagagcgccggcuuccccaccgggcucacguacucccagcugaugacccugaaggacagcaugaugcagcuggaccccuccgccaagaccuggaucgacaucgagggccgcccggaggaccccgucgagaucgcgcucuaccagcccaugagcgggugcuacauccacuucuuccgggagcccaccgaccugaagcaguucaagcaggacgccaaguacucccacggcaucgacguggccgaccuguucccggcccagcccggccucacgagcgccgucaucgaggcgcugccccgcaacauggugcugaccugccaggggagcgacgacaucaagcggcuccuggacucccagggccgccgcgacaucaagcugaucgacaucgcccucagcaaggccgacucccggcgcuucgagaacgccgugugggaccagugcaaggaccugugccacaugcacaccggggucgugguggagaagaagaagcggggcgggaaggaggagaucacgccccacugcgcccugauggacugcaucauguacgacgcggccgucagcggcggccucaacaucccggugcugcgcgccgugcugccccgggacauggucuuccgcaccuccagccccaagguggugcucugaggacuagucccuguucccagagcccacuuuuuuuucuuuuuuugaaauaaaauagccugucuuucagaucucaaaggcucuuuucagagccaccaaaaaaaaaaaaaaaaaaaaaaaaaaaaaaaaaaaaaaaaaaaaaaaaaaaaaaaaaaaaaaaaaaaaaaaaaaaaaaaaaaaaaaaaaaaaaaaaaaaaa

SEQ ID NO: 21245 - RNA, 2052 nt, Artificial Sequence
  mRNA product Design a-2 (hSL-A100) comprising derived and/or modified sequence from LASV(Lassa virus/H.sapiens-wt/NGA/2016/ISTH_0017;Clade II)__AVO03568__SP-IgE_NP(2-569) (opt1)
aggagaguccgcucagccagguugcagaagcggcuuagcguguguccuaaucuucucucugcguguagguaggccugugccgcaaacaagcuuaccauggacuggaccuggauccuguuccucguggccgccgcgacccgcguccacagcagcgccuccaaggaggugaaguccuuccuguggacccagagccuccgccgggagcugagcggcuacugcuccagcaucaagcugcaggucgugaaggacgcccaggcgcuccugcacgggcuggacuucuccgaggugagcaacguccagcgccucaugcggaagcagaagcgcgacgacuccgaccugaagcggcugcgcgaccucaaccaggccgugaacaaccugguggagcucaagagcacccagcagaaguccauccugcgggucggcacgcugaccagcgacgaccugcucacccuggccgccgaccuggagaagcucaaguccaaggugauccgcaccgagcggccccugagcuccgggguguacaugggcaaccugagcacgcagcagcucgagcagcgccgggcccugcugaacaugaucgggauggcgggcggcgcccaggggacccagccgggccgcgacggggucgugcgggugugggacgucaagaaccccgaccuccugaacaaccaguucggcaccaugcccucccugacccucgccugccugacgaagcagggccagguggaccugaacgacgccgugcucgcgcugaccgaccuggggcucaucuacaccgccaaguaccccaacagcuccgaccuggaccgccugagccagagccacccgauccucaacauggucgacaccaagaaguccagccugaacaucuccggcuacaacuucagccugggggccgccgugaaggccggcgcgugcaugcucgacgggggcaacaugcuggagacgaucaaggugacgccccagaccauggacggcauccugaaguccauccucaaggucaagcggagccuggggauguucguguccgacgcccccggcgagcgcaaccccuacgagaacauccuguacaagaucugccucagcggggacggcuggccguacaucgccucccggaccagcaucguggggcgcgccugggagaacaccaccgucgaccuggaguccgacggcaagccccagaaggugggcgccaccgggagcaacaagucccugcagagcgcgggcuuccccaccgggcucacguacucccagcugaugacccugaaggacagcaugaugcagcuggaccccuccgccaagaccuggaucgacaucgagggccggccggaggaccccguggaggucgcccucuaccagcccgugagcgggugcuacauccacuucuuccgcgagcccaccgaccugaagcaguucaagcaggacgccaaguacucccacggcaucgacgucgccgaccuguucccggcgcagcccggccucacgagcgccgugaucgaggcccugccccggaacauggugcugaccugccaggggagcgacgacaucaagaagcuccuggacucccagggccgcaaggacaucaagcugaucgacaucgcccucagcaaggccgacucccgccgguucgagaacgcggucugggaccagugcaaggaccugugccacaugcacaccggggugguggucgagaagaagaagcgcggcgggaaggaggagaucacgccccacugcgcccugauggacugcaucauguacgacgccgccgugagcggcggccucaacaucccggugcugcgggcgguccugccccgcgacaugguguuccggaccuccagccccaaggugguccucugaggacuagucccuguucccagagcccacuuuuuuuucuuuuuuugaaauaaaauagccugucuuucagaucucaaaggcucuuuucagagccaccaaaaaaaaaaaaaaaaaaaaaaaaaaaaaaaaaaaaaaaaaaaaaaaaaaaaaaaaaaaaaaaaaaaaaaaaaaaaaaaaaaaaaaaaaaaaaaaaaaaaa

SEQ ID NO: 21246 - RNA, 2052 nt, Artificial Sequence
  mRNA product Design a-2 (hSL-A100) comprising derived and/or modified sequence from LASV(Lassa virus/H.sapiens-wt/NGA/2018/ISTH_0959;Clade II)__AVV65100__SP-IgE_NP(2-569) (opt1)
aggagaguccgcucagccagguugcagaagcggcuuagcguguguccuaaucuucucucugcguguagguaggccugugccgcaaacaagcuuaccauggacuggaccuggauccuguuccucguggccgccgcgacccgcguccacagcagcgccuccaaggaggugaaguccuuccuguggacccagagccuccgccgggagcugagcggcuacugcuccaacaucaagcugcaggucgugaaggacgcccaggcgcuccugcacgggcuggacuucagcgagguguccaacguccagcgccucaugcggaagcagaagcgcgacgacagcgaccugaagcggcugcgcgaccucaaccaggccgugaacaaccugguggagcugaaguccacccagcagaaguccauccuccgggucggcacccugaccagcgacgaccugcucacccuggccgccgaccuggagaagcucaagagcaaggugauccgcaccgagcggccccuguccagcgggguguacaugggcaaccuguccacgcagcagcucgagcagcgccgggcccugcugaaccucaucgggauggucggcggcgcgcaggggacccagccgggccgcgacgggguggugcgggucugggacgugaagaaccccgaccugcugaacaaccaguucggcaccaugcccagccucacccuggccugccugacgaagcagggccagguggaccucaacgacgucgugcuggcccugaccgaccucgggcugaucuacaccgccaaguaccccaacuccagcgaccuggaccgccucucccagagccacccgauccugaacaugguggacaccaagaaguccagccugaacaucagcggcuucaacuucucccucggggcggccgucaaggccggcgccugcaugcuggacgggggcaacaugcuggagacgaucaaggugacgccccagaccauggacggcauccucaagagcauccugaaggugaagaagucccuggggauguucgucagcgacacccccggcgagcggaaccccuacgagaacauccucuacaagaucugccuguccggggacggcuggccguacaucgccagccgcaccuccaucguggggcgggcgugggagaacaccaccguggaccuggagagcgacggcaagccccacaaggucggcaccgccggguccaacaagagccuccaguccgccggcuuccccacggggcugaccuacagccagcugaugacccugaaggacuccaugaugcagcucgaccccagcgccaagaccuggaucgacaucgagggccgcccggaggaccccguggagaucgcccuguaccagcccauguccgggugcuacauccacuucuuccgggagcccacggaccugaagcaguucaagcaggacgcgaaguacagccacggcaucgacgucgccgaccucuucccggcccagcccggccugaccuccgccgugaucgaggcccugccccgcaacauggugcugaccugccaggggagcgacgacaucaagcggcuccuggacagccagggccgcaaggacaucaagcucaucgacaucgcgcuguccaagaccgacagccgccgguucgagaacgccgucugggaccagugcaaggaccugugccacaugcacacgggggugguggucgagaagaagaagcgcggcgggaaggaggagaucacgccccacugcgcccucauggacugcaucauguacgacgccgccguguccggcggccugaacaucccggugcugcgggcgguccucccccgcgacaugguguuccggaccagcucccccaaggugguccugugaggacuagucccuguucccagagcccacuuuuuuuucuuuuuuugaaauaaaauagccugucuuucagaucucaaaggcucuuuucagagccaccaaaaaaaaaaaaaaaaaaaaaaaaaaaaaaaaaaaaaaaaaaaaaaaaaaaaaaaaaaaaaaaaaaaaaaaaaaaaaaaaaaaaaaaaaaaaaaaaaaaaa

SEQ ID NO: 21247 - RNA, 2052 nt, Artificial Sequence
  mRNA product Design a-2 (hSL-A100) comprising derived and/or modified sequence from LASV(LASV003-NIG-2008;Clade II)__AIT17581__SP-IgE_NP(2-569) (opt1)
aggagaguccgcucagccagguugcagaagcggcuuagcguguguccuaaucuucucucugcguguagguaggccugugccgcaaacaagcuuaccauggacuggaccuggauccuguuccucguggccgccgcgacccgcguccacagcagcgccuccaaggaggugaaguccuuccuguggacccagagccuccgccgggagcugagcggcuacugcuccagcaucaagcugcaggucgugaaggacgcccaggcgcuccugcacgggcuggacuucuccgaggugagcaacguccagcgccucaugcggaagcagaagcgcgacgacuccgaccugaagcggcugcgcgaccucaaccaggccgugaacaaccugguggagcucaagagcacccagcagaaguccguccugcgggugggcacccugaccagcgacgaccugcucacccuggccgccgaccuggagaagcucaaguccaaggugauccgcaccgagcggccccugagcuccggggucuacaugggcaaccugagcgcccagcagcucgagcagcgccggacgcugcugaacaugaucgggauggugggcggcgcgcaggggacccagccgggccgcgacggggugguccgggugugggacgugaagaaccccgaccuccugaacaaccaguucggcaccaugcccucccugacccucgccugccugacgaagcaggggcaggucgaccugaacgacguggugcucgcccugaccgaccugggccucaucuacaccgccaaguaccccaacagcuccgaccuggaccgccugagccagagccacccgauccucuccauggucgacaccaagaaguccagccugaacaucagcggcuacaacuucucccugggggcggccgugaaggccggcgccugcaugcucgacgggggcaacaugcuggagacgaucaaggugacgccccagaccauggacggcauccucaagagcauccugaaggucaagaagucccuggggauguucgugagcgacacccccggcgagcggaaccccuacgagaacauccuguacaagaucugccucuccggggacggcuggccguacaucgccagccgcaccuccaucguggggcgggcgugggagaacaccaccgucgaccuggagagcgacggcaagccccagaaggugggcaccgccggguccaacaagagccugcaguccgccggcuuccccacggggcucaccuacagccagcugaugacccugaaggacuccaugaugcagcuggaccccagcgccaagaccuggaucgacaucgagggccgcccggaggaccccgucgagaucgcccucuaccagcccauguccgggugcuacauccacuucuuccgggagcccacggaccugaagcaguucaagcaggacgcgaaguacagccacggcaucgacgugaccgaccuguucccggcccagcccggccucaccagcgccgugaucgaggcccugccccgcaacaugguccugaccugccagggguccgacgacaucaagcggcuccuggacagccagggccgccgcgacaucaagcugaucgacaucgcccucuccaaggcggacagccggcgcuucgagaacgccgugugggaccagugcaaggaccugugccacaugcacacggggguggucguggagaagaagaagcggggcgggaaggaggagaucacgccccacugcgcccugauggacugcaucauguacgacgccgccguguccggcggccucaacaucccgguccugcgcgcggugcugccccgggacaugguguuccgcaccagcucccccaaggucgugcucugaggacuagucccuguucccagagcccacuuuuuuuucuuuuuuugaaauaaaauagccugucuuucagaucucaaaggcucuuuucagagccaccaaaaaaaaaaaaaaaaaaaaaaaaaaaaaaaaaaaaaaaaaaaaaaaaaaaaaaaaaaaaaaaaaaaaaaaaaaaaaaaaaaaaaaaaaaaaaaaaaaaaa

SEQ ID NO: 21248 - RNA, 2052 nt, Artificial Sequence
  mRNA product Design a-2 (hSL-A100) comprising derived and/or modified sequence from LASV(LASV035-NIG-2009;Clade II)__AIT17589__SP-IgE_NP(2-569) (opt1)
aggagaguccgcucagccagguugcagaagcggcuuagcguguguccuaaucuucucucugcguguagguaggccugugccgcaaacaagcuuaccauggacuggaccuggauccuguuccucguggccgccgcgacccgcguccacagcagcgccuccaaggaggugaaguccuuccuguggacccagagccuccgccgggagcugagcggcuacugcuccagcaucaagcugcaggucgugaaggacgcccaggcgcuccugcacgggcuggacuucuccgaggugagcaacguccagcgccucaugcggaagcagaagcgcgacgacuccgaccugaagcggcugcgcgaccucaaccaggccgugaacaaccugguggagcucaagagcacccagcagaaguccauccugcgggucggcacgcugaccagcgacgaccugcucacccuggccgccgaccuggagaagcucaaguccaaggugauccgcaccgagcggccccugagcuccgggguguacaugggcaaccugagcgcccagcagcucgagcagcgccgggcgcugcugaacaugaucgggauggucggcggcgcccaggggacgcagccgggccgcgacgggguggugcgggucugggacgugaagaaccccgaccuccugaacaaccaguucggcaccaugcccucccugacccucgccugccugaccaagcagggccagguggaccugaacgacgccguccucgcgcugacggaccuggggcucaucuacaccgccaaguaccccaacagcuccgaccuggaccgccugagccagagccacccgauccucaacaugguggacaccaagaaguccagccugaacaucuccggcuacaacuucagccugggggccgccgugaaggccggcgcgugcaugcucgacgggggcaacaugcuggagaccaucaaggucacgccccagaccauggacggcauccugaaguccauccucaaggugaagcggagccuggggauguucguguccgacacccccggcgagcgcaaccccuacgagaacauccuguacaagaucugccucagcggggacggcuggccguacaucgccucccggaccagcaucgucgggcgcgccugggagaacacgaccguggaccuggaguccgacggcaagccccagaaggugggcaccaccgggagcaacaagucccugcagagcgccggcuuccccacggggcucaccuacucccagcugaugacccugaaggacagcaugaugcagcuggaccccuccgccaagaccuggaucgacaucgagggccggccggaggaccccgucgagaucgcgcucuaccagcccaugagcgggugcuacauccacuucuuccgcgagcccacggaccugaagcaguucaagcaggacgccaaguacucccacggcaucgacguggccgaccuguucccggcccagcccggccucaccagcgccgucaucgaggcgcugccccggaacauggugcugaccugccaggggagcgacgacaucaagaagcuccuggacucccagggccgccgcgacaucaagcugaucgacaucgcccucagcaaggccgacucccggaaguucgagaacgccgugugggaccagugcaaggaccugugccacaugcacaccggggucgugguggagaagaagaagcgcggcgggaaggaggagaucacgccccacugcgcccugauggacugcaucauguacgacgcggccgucagcggcggccucaacaucccggugcugcgggccgugcugccccgcgacauggucuuccggaccuccagccccaagguggugcucugaggacuagucccuguucccagagcccacuuuuuuuucuuuuuuugaaauaaaauagccugucuuucagaucucaaaggcucuuuucagagccaccaaaaaaaaaaaaaaaaaaaaaaaaaaaaaaaaaaaaaaaaaaaaaaaaaaaaaaaaaaaaaaaaaaaaaaaaaaaaaaaaaaaaaaaaaaaaaaaaaaaaa

SEQ ID NO: 21249 - RNA, 2052 nt, Artificial Sequence
  mRNA product Design a-2 (hSL-A100) comprising derived and/or modified sequence from LASV(LASV1000-NIG-2009;Clade II)__AIT17783__SP-IgE_NP(2-569) (opt1)
aggagaguccgcucagccagguugcagaagcggcuuagcguguguccuaaucuucucucugcguguagguaggccugugccgcaaacaagcuuaccauggacuggaccuggauccuguuccucguggccgccgcgacccgcguccacagcagcgccuccaaggaggugaaguccuuccuguggacccagagccuccgccgggagcugagcggcuacugcuccaacaucaagcugcaggucgugaaggacgcccaggcgcuccugcacgggcuggacuucagcgagguguccaacguccagcgccucaugcggaagcagaagcgcgacgacagcgaccugaagcggcugcgcgaccucaaccaggccgugaacaaccugguggagcugaaguccacccagcagaaguccauccuccgggucggcacgcugaccagcgacgaccugcucacccuggccgccgaccuggagaagcucaagagcaaggugauccgcaccgagcggccccuguccagcgggguguacaugggcaaccuguccacgcagcagcucgagcagcgccgggcccugcugaacaugaucgggauggucggcggcgcgcaggggacccagccgggccgcgacgggguggugcgggucugggacgugaagaaccccgaccuccugaacaaccaguucggcaccaugcccagccugacccucgccugccugacgaagcagggccagguggaccugaacgacgucgugcucgcccugaccgaccuggggcucaucuacaccgccaaguaccccaacuccagcgaccuggaccgccugucccagagccacccgauccucaacaugguggacaccaagaaguccagccugaacaucagcggcuacaacuucucccugggggcggccgucaaggccggcgccugcaugcucgacgggggcaacaugcuggagacgaucaaggugacgccccagaccauggacggcauccucaagagcauccugaaggugaagaagucccuggggauguucgucagcgacacccccggcgagcggaaccccuacgagaacauccuguacaagaucugccucuccggggacggcuggccguacaucgccagccgcaccuccaucguggggcgggcgugggagaacaccaccguggaccuggagagcgacggcaagccccagaaggucggcaccgccggguccaacaagagccugcaguccgccggcuuccccacggggcucaccuacagccagcugaugacccugaaggacuccaugaugcagcuggaccccagcgccaagaccuggaucgacaucgagggccgcccggaggaccccguggagaucgcccucuaccagcccgucuccgggugcuacauccacuucuuccgggagcccacggaccugaagcaguucaagcaggacgcgaaguacagccacggcaucgacguggccgaccuguucccggcccagcccggccucaccuccgccgugaucgaggcccugccccgcaacaugguccugaccugccaggggagcgacgacaucaagcggcuccuggacagccagggccgccgcgacaucaagcugaucgacaucgcgcucuccaaggccgacagccggcgcuucgagaacgccgugugggaccagugcaaggaccugugccacaugcacaccgggguggucguggagaagaagaagcggggcgggaaggaggagaucacgccccacugcgcccugauggacugcaucauguacgacgccgcgguguccggcggccucaacaucccgguccugcgcgccgugcugccccgggacaugguguuccgcaccagcucccccaaggucgugcucugaggacuagucccuguucccagagcccacuuuuuuuucuuuuuuugaaauaaaauagccugucuuucagaucucaaaggcucuuuucagagccaccaaaaaaaaaaaaaaaaaaaaaaaaaaaaaaaaaaaaaaaaaaaaaaaaaaaaaaaaaaaaaaaaaaaaaaaaaaaaaaaaaaaaaaaaaaaaaaaaaaaaa

SEQ ID NO: 21250 - RNA, 2052 nt, Artificial Sequence
  mRNA product Design a-2 (hSL-A100) comprising derived and/or modified sequence from LASV(LASV221-NIG-2010;Clade II)__AIT17625__SP-IgE_NP(2-569) (opt1)
aggagaguccgcucagccagguugcagaagcggcuuagcguguguccuaaucuucucucugcguguagguaggccugugccgcaaacaagcuuaccauggacuggaccuggauccuguuccucguggccgccgcgacccgcguccacagcagcgccuccaaggaggugaaguccuuccuguggacccagagccuccgccgggagcugagcggcuacugcuccagcaucaagcugcaggucgugaaggacgcccaggcgcuccugcacgggcuggacuucuccgaggugagcaacguccagcgccucaugcggaagcagcgccgggacgacuccgaccugaagcgccugcgggaccucaaccaggccgugaacaaccugguggagcucaagagcacccagcagaaguccauccugcgcgucggcacgcugaccagcgacgaccugcucacccuggccgccgaccuggagaagcucaaguccaaggugauccggaccgagcgcccccugagcuccgggguguacaugggcaaccugagcacgcagcagcucgagcagcggcgcgcccugcugaacaugaucgggauggucggcggcgcgcaggggacccagccgggccgggacgggguggugcgcgucugggacgugaagaaccccgaccuccugaacaaccaguucggcaccaugcccucccugacccucgccugccugacgaagcagggccagguggaccugaacgacgccguccucgcccugaccgaccuggggcucaucuacaccgcgaaguaccccaacagcuccgaccuggaccggcugagccagagccacccgauccucaacaugguggacaccaagaaguccagccugaacaucuccggcuacaacuucagccugggggccgccgugaaggccggcgccugcaugcucgacgggggcaacaugcuggagacgaucaaggucacgccccagaccguggacggcauccugaaguccauccucaaggugaagcgcagccuggggauguucgucuccgacacccccggcgagcggaaccccuacgagaacauccuguacaagaucugccucagcggggacggcuggccguacaucgcgucccgcaccagcaucguggggcgggccugggagaacaccaccguggaccuggaguccgacggcaagccccagaaggucggcaccgccgggagcaacaagucccugcagagcgccggcuuccccacggggcucaccuacucccagcugaugacccugaaggacagcaugaugcagcuggaccccuccgccaagaccuggaucgacaucgagggccgcccggaggaccccguggagaucgcgcucuaccagcccaugagcgggugcuacauccacuucuuccgggagcccacggaccugaagcaguucaagcaggacgccaaguacucccacggcaucgacgucgccgaccuguucccggcccagcccggccucaccagcgccgugaucgaggcgcugccccgcaacauggugcugaccugccaggggagcgacgacaucaagcgccuccuggacucccagggccggcgcgacaucaagcugaucgacaucgcccucagcaaggccgacucccggaaguucgagaacgccgucugggaccagugcaaggaccugugccacaugcacaccggggugguggucgagaagaagaagcgcggcgggaaggaggagaucacgccccacugcgcccugauggacugcaucauguacgacgcggccgugagcggcggccucaacaucccggugcugcgggccguccugccccgcgacaugguguuccggaccuccagccccaaggugguccucugaggacuagucccuguucccagagcccacuuuuuuuucuuuuuuugaaauaaaauagccugucuuucagaucucaaaggcucuuuucagagccaccaaaaaaaaaaaaaaaaaaaaaaaaaaaaaaaaaaaaaaaaaaaaaaaaaaaaaaaaaaaaaaaaaaaaaaaaaaaaaaaaaaaaaaaaaaaaaaaaaaaaa

SEQ ID NO: 21251 - RNA, 2052 nt, Artificial Sequence
  mRNA product Design a-2 (hSL-A100) comprising derived and/or modified sequence from LASV(LASV237-NIG-2010;Clade II)__AIT17639__SP-IgE_NP(2-569) (opt1)
aggagaguccgcucagccagguugcagaagcggcuuagcguguguccuaaucuucucucugcguguagguaggccugugccgcaaacaagcuuaccauggacuggaccuggauccuguuccucguggccgccgcgacccgcguccacagcagcgccuccaaggaggugaaguccuuccuguggacccagagccuccgccgggagcugagcggcuacugcuccaacaucaagcugcaggucgugaaggacgcccaggcgcuccugcacgggcuggacuucagcgagguguccaacguccagcgccucaugcggaagcagaagcgcgacgacagcgaccugaagcggcugcgcgaccucaaccaggccgugaacaaccugguggagcugaaguccacccagcagaaguccauccuccgggucggcacccugaccagcgacgaccugcucacccuggccgccgaccuggagaagcucaagagcaaggugauccgcaccgagcggccccuguccagcgggguguacaugggcaaccuguccacgcagcagcucgagcagcgccgggcccugcugaacaugaucgggauggucggcggcgcgcaggggacccagccgggccgcgacgggguggugcgggucugggacgugaagaaccccgaccuccugaacaaccaguucggcaccaugcccagccugacccucgccugccugacgaagcagggccagguggaccugaacgacgccguccucgcccugaccgaccuggggcucaucuacaccgcgaaguaccccaacuccagcgaccuggaccgccugucccagagccacccgauccucaacaugguggacaucaagaaguccagccugaacaucagcggcuacaacuucucccugggggccgccgugaaggccggcgccugcaugcucgacgggggcaacaugcuggagaccaucaaggucacgccccagaccauggacggcauccucaagagcauccugaaggugaagcggucccuggggauguucgugagcgacacccccggcgagcgcaaccccuacgagaacauccuguacaagaucugccucuccggggacggcuggccguacaucgcgagccggaccuccaucgucgggcgcgccugggagaacacgaccguggaccuggagagcgacggcaagccccagaaggugggcuccgccgggagcaacaagucccugcagagcgccggcuuccccaccgggcucaccuacucccagcugaugacgcugaaggacagcaugaugcagcuggaccccuccgccaagaccuggaucgacaucgagggccggccggaggaccccgucgagaucgcgcucuaccagcccaugagcgggugcuacauccacuucuuccgcgagcccaccgaccugaagcaguucaagcaggacgccaaguacucccacggcaucgacguggccgaccuguucccggcccagcccggccucaccagcgccgucaucgaggcgcugccccggaacauggugcugacgugccaggggagcgacgacaucaagcgccuccuggacucccagggccgccgggacaucaagcugaucgacaucgcccucagcaaggccgacucccgccgguucgagaacgccgugugggaccagugcaaggaccugugccacaugcacaccggggucgugguggagaagaagaagcgcggcgggaaggaggagaucacgccccacugcgcccugauggacugcaucauguacgacgcggccgucagcggcggccucaacaucccggugcugcgggccgugcugccccgcgacauggucuuccggaccuccagccccaagguggugcucugaggacuagucccuguucccagagcccacuuuuuuuucuuuuuuugaaauaaaauagccugucuuucagaucucaaaggcucuuuucagagccaccaaaaaaaaaaaaaaaaaaaaaaaaaaaaaaaaaaaaaaaaaaaaaaaaaaaaaaaaaaaaaaaaaaaaaaaaaaaaaaaaaaaaaaaaaaaaaaaaaaaaa

SEQ ID NO: 21252 - RNA, 2052 nt, Artificial Sequence
  mRNA product Design a-2 (hSL-A100) comprising derived and/or modified sequence from LASV(LASV253-NIG-2011;Clade II)__AIT17671__SP-IgE_NP(2-569) (opt1)
aggagaguccgcucagccagguugcagaagcggcuuagcguguguccuaaucuucucucugcguguagguaggccugugccgcaaacaagcuuaccauggacuggaccuggauccuguuccucguggccgccgcgacccgcguccacagcagcgccuccaaggaggugaaguccuuccuguggacccagagccuccgccgggagcugagcggcuacugcuccagcaucaagcugcaggucgugaaggacgcccaggcgcuccugcacgggcuggacuucuccgaggugagcaacguccagcgccucaugcggaagcagaagcgcgacgacuccgaccugaagcggcugcgcgaccucaaccaggccgugaacaaccugguggagcucaagagcacccagcagaaguccguccugcgggugggcacccugaccagcgacgaccugcucacccuggccgccgaccuggagaagcucaaguccaaggugauccgcaccgagcggccccugagcuccggggucuacaugggcaaccugagcacgcagcagcucgagcagcgccgggcccugcugaacaugaucgggauggugggcggcgcgcaggggacccagccgggccgcgacggggugguccgggugugggacgugaagaaccccgaccuccugaacaaccaguucggcaccaugcccucccugacccucgccugccugacgaagcaggggcaggucgaccugaacgacguggugcucgcccugaccgaccugggccucaucuacaccgccaaguaccccaacagcuccgaccuggaccgccugagccagagccacccgauccucaacauggucgacaccaagaaguccagccugaacaucuccggcuacaacuucagccugggggcggccgugaaggccggcgccugcaugcucgacgggggcaacaugcuggagacgaucaaggugacgccccagaccauggacggcauccugaaguccauccucaaggucaagaagucccuggggauguucgugagcgacacccccggcgagcggaaccccuacgagaacauccuguacaagaucugccucagcggggacggcuggccguacaucgccucccgcaccagcaucguggggcgggcgugggagaacaccaccgucgaccuggaguccgacggcaagccccagaaggugggcaccgccgggagcaacaagucccugcagagcgccggcuuccccacggggcucaccuacucccagcugaugacccugaaggacagcaugaugcagcuggaccccuccgccaagaccuggaucgacaucgagggccgcccggaggaccccgucgagaucgcccucuaccagcccaugagcgggugcuacauccacuucuuccgggagcccacggaccugaagcaguucaagcaggacgcgaaguacucccacggcaucgacgugaccgaccuguucccggcccagcccggccucaccagcgccgugaucgaggcccugccccgcaacaugguccugaccugccaggggagcgacgacaucaagcggcuccuggacucccagggccgccgcgacaucaagcugaucgacaucgcccucagcaaggcggacucccggcgcuucgagaacgccgugugggaccagugcaaggaccugugccacaugcacacggggguggucguggagaagaagaagcggggcgggaaggaggagaucacgccccacugcgcccugauggacugcaucauguacgacgccgccgugagcggcggccucaacaucccgguccugcgcgcggugcugccccgggacaugguguuccgcaccuccagccccaaggucgugcucugaggacuagucccuguucccagagcccacuuuuuuuucuuuuuuugaaauaaaauagccugucuuucagaucucaaaggcucuuuucagagccaccaaaaaaaaaaaaaaaaaaaaaaaaaaaaaaaaaaaaaaaaaaaaaaaaaaaaaaaaaaaaaaaaaaaaaaaaaaaaaaaaaaaaaaaaaaaaaaaaaaaaa

SEQ ID NO: 21253 - RNA, 2052 nt, Artificial Sequence
  mRNA product Design a-2 (hSL-A100) comprising derived and/or modified sequence from LASV(LASV254-NIG-2011;Clade II)__AIT17675__SP-IgE_NP(2-569) (opt1)
aggagaguccgcucagccagguugcagaagcggcuuagcguguguccuaaucuucucucugcguguagguaggccugugccgcaaacaagcuuaccauggacuggaccuggauccuguuccucguggccgccgcgacccgcguccacagcagcgccuccaaggaggugaaguccuuccuguggacccagagccuccgccgggagcugagcggcuacugcuccagcaucaagcugcaggucgugaaggacgcccaggcgcuccugcacgggcuggacuucuccgaggugagcaacguccagcgccucaugcggaagcagaagcgcgacgacuccgaccugaagcggcugcgcgaccucaaccaggccgugaacaaccugguggagcucaagagcacccagcagaaguccguccugcgggugggcacgcugaccagcgacgaccugcucacccuggccgccgaccuggagaagcucaaguccaaggugauccgcaccgagcggccccugagcuccggggucuacaugggcaaccugagcacgcagcagcucgagcagcgccgggcccugcugaacaugaucgggauggugggcggcgcgcaggggacccagccgggccgcgacggggugguccgggugugggacgugaagaaccccgaccuccugaacaaccaguucggcaccaugcccucccugacccucgccugccugacgaagcaggggcaggucgaccugaacgacgccgugcucgcccugaccgaccugggccucaucuacaccgcgaaguaccccaacagcuccgaccuggaccgccugagccagagccacccgauccucaacaugguggacaccaagaaguccagccugaacaucuccggcuacaacuucagccugggggccgccgucaaggccggcgccugcaugcucgacgggggcaacaugcuggagacgaucaaggugacgccccagaccauggacggcauccugaaguccauccucaaggugaagaagucccuggggauguucgucagcgacacccccggcgagcggaaccccuacgagaacauccuguacaagaucugccucagcggggacggcuggccguacaucgcgucccgcaccagcaucguggggcgggccugggagaacaccaucguggaccuggaguccgacggcaagccccagaaggucggcaccgccgggagcaacaagucccugcagagcgccggcuuccccaccgggcucacguacucccagcugaugacccugaaggacagcaugaugcagcuggaccccuccgccaagaccuggaucgacaucgagggccgcccggaggaccccguggagaucgcgcucuaccagcccaugagcgggugcuacauccacuucuuccgggagcccaccgaccugaagcaguucaagcaggacgccaaguacucccacggcaucgacgucgccgaccuguucccggcccagcccggccucacgagcgccgugaucgaggcgcugccccgcaacauggugcugaccugccaggggagcgacgacaucaagcggcuccuggacucccagggccgccgcgacaucaagcugaucgacaucgcccucagcaaggccgacucccggcgcuucgagaacgccgucugggaccagugcaaggaccugugccacaugcacaccggggugguggucgagaagaagaagcggggcgggaaggaggagaucacgccccacugcgcccugauggacugcaucauguacgacgcggccgugagcggcggccucaacaucccggugcugcgcgccguccugccccgggacaugguguuccgcaccuccagccccaaggugguccucugaggacuagucccuguucccagagcccacuuuuuuuucuuuuuuugaaauaaaauagccugucuuucagaucucaaaggcucuuuucagagccaccaaaaaaaaaaaaaaaaaaaaaaaaaaaaaaaaaaaaaaaaaaaaaaaaaaaaaaaaaaaaaaaaaaaaaaaaaaaaaaaaaaaaaaaaaaaaaaaaaaaaa

SEQ ID NO: 21254 - RNA, 2052 nt, Artificial Sequence
  mRNA product Design a-2 (hSL-A100) comprising derived and/or modified sequence from LASV(Nig08-04;Clade II)__ADU56611__SP-IgE_NP(2-569) (opt1)
aggagaguccgcucagccagguugcagaagcggcuuagcguguguccuaaucuucucucugcguguagguaggccugugccgcaaacaagcuuaccauggacuggaccuggauccuguuccucguggccgccgcgacccgcguccacagcagcgccuccaaggaggugaaguccuuccuguggacccagagccuccgccgggagcugagcggcuacugcuccaacaucaagcugcaggucgugaaggacgcccaggcgcuccugcacgggcuggacuucagcgagguguccaacguccagcgccucaugcggaagcagaagcgcgacgacggcgaccugaagcggcugcgcgaccucaaccaggccgugaacaaccugguggagcucaagagcacccagcagaaguccguccugcggguggggacccugaccagcgacgaccugcucacccuggccgccgaccuggagaagcucaaguccaaggugauccgcaccgagcggccccugagcuccggcgucuacauggggaaccugagcacgcagcagcucgagcagcgcaaggcccugcuguccaugaucggcauggugggcggggcgcagggcacccagccggggcgggacggcgugguccgcgugugggacgugaagaaccccgaccuccugaacaaccaguucgggaccaugcccagccugacccucgccugccugacgaagcagggccaggucgaccugaacgacgccgugcucgcccugaccgaccugggccucaucuacaccgcgaaguaccccaacuccagcgaccuggaccggcugucccagagccacccgauccucaacaugguggacaccaagaaguccagccugaacaucagcggguacaacuucucccugggcgccgccgucaaggccggggccugcaugcucgacggcggcaacaugcuggagacgaucaaggugacgccccagaccauggacgggauccucaagagcauccugaaggugaagcgcucccugggcauguucgucagcgacacccccggggagcggaaccccuacgagaacauccuguacaagaucugccucuccggcgacggguggccguacaucgcgagccgcaccuccaucgugggccgggccugggagaacaccaccguggaccuggagagcgacggcaagccccagaaggucgggaccgccggcuccaacaagagccugcaguccgccggguuccccacgggccucaccuacagccagcugaugacccugaaggacuccaugaugcagcuggaccccagcgccaagaccuggaucgacaucgaggggcgcccggaggaccccguggagaucgcgcucuaccagcccauguccggcugcuacauccacuucuuccgggagcccacggaccugaagcaguucaagcaggacgccaaguacagccacggcaucgacgucaccgaccuguucuccgcccagccggggcucaccagcgccgugaucgaggcccugccccgcaacauggugcugaccugccagggcagcgacgacaucaagaagcuccuggacucccaggggcggcgcgacaucaagcugaucgacaucagccucaacaaggcggacucccgccgguucgagaacgccgucugggaccagugcaaggaccugugccacaugcacacgggcgugguggucgagaagaagaagcgcgggggcaaggaggagaucacgccccacugcgcccugauggacugcaucauguucgacgccgccgugagcggcgggcucaacauccccauccugcgggcggugcugccgcgcgacauggucuuccggaccuccagccccaagguggugcucugaggacuagucccuguucccagagcccacuuuuuuuucuuuuuuugaaauaaaauagccugucuuucagaucucaaaggcucuuuucagagccaccaaaaaaaaaaaaaaaaaaaaaaaaaaaaaaaaaaaaaaaaaaaaaaaaaaaaaaaaaaaaaaaaaaaaaaaaaaaaaaaaaaaaaaaaaaaaaaaaaaaaa

SEQ ID NO: 21255 - RNA, 2055 nt, Artificial Sequence
  mRNA product Design a-2 (hSL-A100) comprising derived and/or modified sequence from LASV(GA391;Clade III)__AAA46284__SP-IgE_NP(2-570) (opt1)
aggagaguccgcucagccagguugcagaagcggcuuagcguguguccuaaucuucucucugcguguagguaggccugugccgcaaacaagcuuaccauggacuggaccuggauccuguuccucguggccgccgcgacccgcguccacagcagcgccuccaaggaggugcgcagcugccuguggacccagucccuccggcgcgagcugagcggcuacugcuccaacaucaagcugcaggucgugaaggacgcccaggcgcuccugcacgggcuggacuucagcgagguguccaacguccagcggcucaugcgcaagcagaagcgggacgacggcgaccugaagcgccugcgggaccucaaccaggccgugaacaaccugguggagcugaaguccacccagcagaaguccguccuccgcguggggacgcugagcuccgacgaccugcucauccuggccgccgaccuggagaagcucaagagcaaggugacccggaccgagcgcccccuguccagcggcgucuacauggggaaccuguccagccagcagcucgaccagcggcgcgcccugcugaacaugaucggcaugaccggcguguccgggggcgggaagggcgcgagcaacgggaucgugcgggucugggacgugaagaacgccgagcuccugaacaaccaguucggcacgaugccgucccugacccucgccugccugaccaagcagggccagguggaccugaacgacgccguccaggcgcucaccgaccuggggcugaucuacacggccaaguaccccaacagcagcgaccucgaccgccugucccagagccaccccauccugaacaugaucgacaccaagaaguccagccucaacaucuccggcuacaacuucagccugggggccgccgugaaggccggcgcgugcaugcuggacggcgggaacaugcucgagaccaucaaggugagcccccagaccauggacggcauccucaagagcauccugaaggucaagaagucccuggggauguucgugagcgacacgccgggcgagcggaaccccuacgagaacauccuguacaagaucugccuguccggggacggcuggagcuacaucgccucccgcaccagcaucgugggccgggccugggagaacaccgucguggaccucgagcaggacaacaagccccagaagaucgggaacggcggguccaacaagagccugcaguccgccggcuucgccgcggggcugaucuacagccagcucaugacccugaaggacuucaagugcuucaaccugauccccaacgccaagacguggauggacaucgagggccgcccggaggaccccguggagaucgcccuguaccagcccuccagcggcugcuacguccacuucuuccgggagcccaccgaccucaagcaguucaagcaggacgccaaguacagccacgggcgcgacgugaccgaccuguucgccgcgcagccgggccugaccuccgccgucaucgaggcccucccccggaacauggugaucacgugccaggggagcgaggacauccgcaagcugcuggagucccagggccgccgggacaucaagcucaucgacaucacccugagcaaggccgacucccgcaaguucgagaacgccgugugggaccaguucaaggaccugugccacaugcacaccggggucgugguggagaagaagaagcggggcggcaaggaggagaucacgccccacugcgcgcucauggacugcaucauguucgacgccgccgucagcgggggccuggacgccaaggugcugcgcgugguccucccccgggacaugguguuccgcaccuccaccccgaaggugguccugugaggacuagucccuguucccagagcccacuuuuuuuucuuuuuuugaaauaaaauagccugucuuucagaucucaaaggcucuuuucagagccaccaaaaaaaaaaaaaaaaaaaaaaaaaaaaaaaaaaaaaaaaaaaaaaaaaaaaaaaaaaaaaaaaaaaaaaaaaaaaaaaaaaaaaaaaaaaaaaaaaaaaa

SEQ ID NO: 21256 - RNA, 2052 nt, Artificial Sequence
  mRNA product Design a-2 (hSL-A100) comprising derived and/or modified sequence from LASV(Nig08-A19;Clade III)__ADU56619__SP-IgE_NP(2-569) (opt1)
aggagaguccgcucagccagguugcagaagcggcuuagcguguguccuaaucuucucucugcguguagguaggccugugccgcaaacaagcuuaccauggacuggaccuggauccuguuccucguggccgccgcgacccgcguccacagcagcgccuccaaggaggugaaguccuuccuguggacccagucccuccgccgggagcugagcggcuacugcuccaacaucaagcugcaggucgugaaggacgcccaggcgcuccugcacgggcuggacuucagcgagguguccaacguccagcgccucaugcggaagcagaagcgcgacgacggcgaccugaagcggcugcgcgaccucaaccaggccgugaacaaccugguggagcucaagagcacccagcagaaguccguccugcggguggggacccugagcuccgacgaccugcucgugcuggccgccgaccuggagaagcucaagagcaaggucgugcgcaccgagcggccccuguccagcggcaucuacauggggaaccuguccagccagcagcucgaccagcgcaaggcccugcugaacaugaucggcaugaccggcgggaacggcgggcggaacaccacguccgacggcaucgugcgcgucugggacgugaagaacgcggagcuccugaacaaccaguucgggaccaugccgagccugacccucgccugccugaccaagcagggccagguggaccugaacgacgccguccaggcccucacggaccugggccugaucuacaccgcgaaguaccccaacuccagcgaccucgaccggcuggcccagagccaccccauccugaacaugaucgacaccaagaaguccagccucaacaucuccggguacaacuucagccugggcgccgccgugaaggccggggcgugcaugcuggacggcggcaacaugcucgagaccaucaaggugagcccccagacgauggacgggauccucaagagcauccugaaggucaagcgcucccugggcauguucaucagcgacaccccgggggagcggaaccccuacgagaacauccuguacaagaucugccuguccggcgacggguggcccuacaucgccagccgcaccuccaucgugggccgggccugggagaacaccguggucgaccucgagagcgacaacaagccccagaagacgggcaacgggggcuccaacaagagccugcaguccgccggguucgccgcgggccugaccuacagccagcucaugacccugaaggacuccaugcugcagcuggacccgaacgccaagaccuggauggacaucgaggggcgccccgaggaccccguggagaucgcccucuaccagcccagcuccggcugcuacauccacuucuuccgggagccgacggaccugaagcaguucaagcaggacgccaaguacagccacggcaucgacgugaccgaccuguucgccgcgcagcccgggcucaccagcgccgucaucgaggcccugccccgcaacauggugaucacgugccagggcuccgaggacauccggaagcugcucgagagccaggggcgccgcgacaucaagcugaucgacaucucccugagcaaggucgacucccggaaguucgagaacgccgugugggaccaguucaaggaccucugccacaugcacaccggcaucguggucgagaagaagaagcgcgggggcaaggaggagaucacgccccacugcgcccugauggacugcaucauguucgacgcggccgugagcggcgggguggacgccaagguccugcgggccgugcucccgcgcgacaugguguuccggaccuccacccccaaggucgugcugugaggacuagucccuguucccagagcccacuuuuuuuucuuuuuuugaaauaaaauagccugucuuucagaucucaaaggcucuuuucagagccaccaaaaaaaaaaaaaaaaaaaaaaaaaaaaaaaaaaaaaaaaaaaaaaaaaaaaaaaaaaaaaaaaaaaaaaaaaaaaaaaaaaaaaaaaaaaaaaaaaaaaa

SEQ ID NO: 21257 - RNA, 2052 nt, Artificial Sequence
  mRNA product Design a-2 (hSL-A100) comprising derived and/or modified sequence from LASV(G1180-SLE-2010;Clade IV)__AIT17169__SP-IgE_NP(2-569) (opt1)
aggagaguccgcucagccagguugcagaagcggcuuagcguguguccuaaucuucucucugcguguagguaggccugugccgcaaacaagcuuaccauggacuggaccuggauccuguuccucguggccgccgcgacccgcguccacagcagcgccuccaaggagaucaagagcuuccuguggacccagucccuccgccgggagcugagcggcuacugcuccaacaucaagcuccagguggucaaggacgcccaggcgcugcugcacgggcuggacuucagcgagguguccaacgugcagcgccucaugcggaaggagcgccgggacgacaacgaccugaagcgccugcgggaccucaaccaggccgucaacaaccugguggagcucaagagcacccagcagaaguccauccugcgcgugggcacccugaccagcgacgaccugcucauccuggccgccgaccuggagaagcucaaguccaaggucauccggaccgagcgcccccugagcgccgggguguacaugggcaaccuguccagccagcagcucgaccagcggcgcgcgcugcuguccaugaucgggaugagcuccggcaaccagcgggcccaggccggccgcgacggggugguccgggugugggacgugaagaacgucgagcuccugaacaaccaguucggcaccaugccgagccugacgcucgccugccugaccaagcagggccagguggaccugaacgacgcggugcaggcccucaccgaccuggggcugaucuacaccgccaaguaccccaacacguccgaccucgaccgccugacccagagccaccccauccugaacaugaucgacaccaagaaguccagccucaacaucagcggguacaacuucucccugggcgccgccgucaaggcgggcgccugcaugcuggacgggggcaacaugcucgagaccaucaaggugagcccccagacgauggacgggauccugaaguccauccugaaggugaagaaggcccucggcauguucaucagcgacaccccgggcgagcggaaccccuacgagaacauccuguacaagaucugccuguccggggacggcuggcccuacaucgccagccgcaccuccaucaccgggcgggccugggagaacacggucguggaccucgagagcgacggcaagccccagaaggcgggguccaacaacagcaacaagucccugcagagcgugggcuucaccgccggccugaccuacucccagcucaugacccugaaggacgccaugcugcagcuggacccgaacgccaagacguggauggacaucgaggggcgccccgaggaccccgucgagaucgcccucuaccagcccagcuccggcugcuacauccacuucuuccgggagccgaccgaccugaagcaguucaagcaggacgcgaaguacagccacgggaucgacgugaccgaccuguucgccgcccagcccggccucaccuccgccgugaucgacgcccugccccgcaacauggucaucacgugccaggggagcgacgacauccgcaagcugcucgagagccagggccggaaggacaucaagcugaucgacaucgcgcuguccaagaccgacagccgcaaguacgagaacgccgugugggaccaguacaaggaccucugccacaugcacaccggcgucgugguggagaagaagaagcgcgggggcaaggaggagaucacgccccacugcgcccugauggacugcaucauguucgacgccgcggucuccgggggccugaacaccagcgugcuccgggccgugcugccgcgggacauggucuuccgcaccuccacgccccggguggugcugugaggacuagucccuguucccagagcccacuuuuuuuucuuuuuuugaaauaaaauagccugucuuucagaucucaaaggcucuuuucagagccaccaaaaaaaaaaaaaaaaaaaaaaaaaaaaaaaaaaaaaaaaaaaaaaaaaaaaaaaaaaaaaaaaaaaaaaaaaaaaaaaaaaaaaaaaaaaaaaaaaaaaa

SEQ ID NO: 21258 - RNA, 2052 nt, Artificial Sequence
  mRNA product Design a-2 (hSL-A100) comprising derived and/or modified sequence from LASV(G1442-SLE-2011;Clade IV)__AIT17181__SP-IgE_NP(2-569) (opt1)
aggagaguccgcucagccagguugcagaagcggcuuagcguguguccuaaucuucucucugcguguagguaggccugugccgcaaacaagcuuaccauggacuggaccuggauccuguuccucguggccgccgcgacccgcguccacagcagcgccuccaaggaggugaaguccuuccuguggacccagagccuccgccgggagcugagcggcuacugcuccaacaucaagcugcaggucgugaaggacgcccaggcgcuccugcacgggcuggacuucagcgagguguccaacguccagcgccucaugcggaagcagcgccgggacgacaacgaccugaagcgccugcgggaccucaaccaggccgugaacaaccugguggagcucaagagcacccagcagaaguccguccugcgcgugggcacccugaccagcgacgaccugcucgugcuggccgccgaccuggagaagcucaaguccaaggucauccggaccgagcgcccccugagcgccgggguguacaugggcaaccuguccagccagcagcucgaccagcggcgcgcgcugcugaacaugaucgggauguccggcggcauccaggggacccggacgggccgcgacggggugguccgggugugggacgugaagaacgccgaccuccugaacaaccaguucggcaccaugccgagccugacccucgccugccugaccaagcaggggcaggucgaccugaacgacguggugcaggcccucacggaccugggccugaucuacaccgcgaaguaccccaacgccuccgaccucgaccgccugacccagagccaccccauccugaacaugaucgacaccaagaaguccagccucaacaucagcggcuacaacuucucccugggggccgccgucaaggccggcgcgugcaugcuggacgggggcaacaugcucgagacgaucaaggugagcccccagaccauggacggcauccugaaguccauccugaaggugaagaagacccucgggauguucaucagcgacaccccgggcgagcggaaccccuacgagaacauccuguacaagaucugccuguccggggacggcuggcccuacaucgccagccgcacguccaucaccgggcgggccugggagaacaccgucguggaccucgagagcgacggcaagccccagaaggccggcuccaacaacagcaacaagucccugcagagcgccggguucgcggccggccugaccuacucccagcucaugacgcugaaggacgccaugcugcagcuggacccgaacgccaagaccuggauggacaucgaggggcgccccgaggaccccguggagaucgcccucuaccagcccagcuccggcugcuacauccacuucuuccgggagccgaccgaccugaagcaguucaagcaggacgcgaaguacagccacgggaucgacgucaccgaccuguucgccgcccagcccggccucacguccgccgugaucgaggcccugccccgcaacauggucaucacgugccagggcagcgacgacaucaagaagcugcucgagucccaggggcgcaaggacaucaagcugaucgacaucgcgcugagcaagaccgacagccggaaguacgagaacgccgugugggaccaguacaaggaccucugccacaugcacaccggcguggucguggagaagaagaagcgcgggggcaaggaggagaucaccccgcacugcgcccugauggacugcaucauguucgacgccgcgguguccgggggccugaacacccucguccugcgggccgugcugccccgcgacaugguguuccggaccagcacgccccgcgucgugcucugaggacuagucccuguucccagagcccacuuuuuuuucuuuuuuugaaauaaaauagccugucuuucagaucucaaaggcucuuuucagagccaccaaaaaaaaaaaaaaaaaaaaaaaaaaaaaaaaaaaaaaaaaaaaaaaaaaaaaaaaaaaaaaaaaaaaaaaaaaaaaaaaaaaaaaaaaaaaaaaaaaaaa

SEQ ID NO: 21259 - RNA, 2052 nt, Artificial Sequence
  mRNA product Design a-2 (hSL-A100) comprising derived and/or modified sequence from LASV(G3010-SLE-2013;Clade IV)__AIT17345__SP-IgE_NP(2-569) (opt1)
aggagaguccgcucagccagguugcagaagcggcuuagcguguguccuaaucuucucucugcguguagguaggccugugccgcaaacaagcuuaccauggacuggaccuggauccuguuccucguggccgccgcgacccgcguccacagcagcgccuccaaggagaucaagagcuuccuguggacccagucccuccgccgggagcugagcggcuacugcuccaacaucaagcuccagguggucaaggacgcccaggcgcugcugcacgggcuggacuucagcgagguguccaacgugcagcgccucaugcggaaggagcgccgggacgacaacgaccugaagcgccugcgggaccucaaccaggccgucaacaaccugguggagcucaagagcacccagcagaaguccauccugcgcgugggcacccugaccagcgacgaccugcucauccuggccgccgaccuggagaagcucaaguccaaggucacccggaccgagcgcccccugagcgccgggguguacaugggcaaccuguccagccagcagcucgaccagcggcgcgcgcugcuguccaugaucgggaugagcuccggcgugcagggcgcccgggccgggcgcgacggcgucgugcgggugugggacgucaagaacgccgagcuccugaacaaccaguucgggacgaugccgagccugacccucgcgugccugaccaagcagggccagguggaccugaacgacgugguccaggcccucaccgaccuggggcugaucuacacggccaaguaccccaacaccuccgaccucgaccgccugacccagagccaccccauccugaacaugaucgacaccaagaaguccagccucaacaucagcggcuacaacuucucccugggcgccgccgugaaggcgggggccugcaugcuggacggcgggaacaugcucgagacgaucaaggugagcccccagaccauggacggcauccugaaguccauccugaaggucaagaaggcccucggcauguucaucagcgagaccccgggggagcggaaccccuacgagaacauccuguacaagaucugccuguccggcgacggguggcccuacaucgccagccgcaccuccaucacgggccgggccugggagaacaccgugguggaccucgagagcgacgggaagccccagaaggcgggcuccaacaacagcaacaagucccugcagagcgccggcuucaccgccgggcugaccuacucccagcucaugacgcugaaggacgccaugcugcagcuggacccgaacgccaagaccuggauggacaucgagggccgccccgaggaccccgucgagguggcgcucuaccagcccagcuccgggugcuacauccacuucuuccgggagccgaccgaccugaagcaguucaagcaggacgccaaguacagccacggcaucgacgugaccgaccuguucgccgcccagcccgggcucacguccgccgucaucgacgcgcugccccgcaacauggugaucacgugccagggcagcgacgacaucaagaagcugcucgagagccagggccgcaaggacaucaagcugaucgacaucgcccuguccaagaccgacagccggaaguacgagaacgccgucugggaccaguacaaggaccucugccacaugcacaccggggugguggucgagaagaagaagcgcggcgggaaggaggagaucaccccgcacugcgcccugauggacugcaucauguucgacgcggccguguccggcgggcugaacaccagcgugcuccgggccguccugccccgcgacaugguguuccggaccuccacgccccgcgugguccugugaggacuagucccuguucccagagcccacuuuuuuuucuuuuuuugaaauaaaauagccugucuuucagaucucaaaggcucuuuucagagccaccaaaaaaaaaaaaaaaaaaaaaaaaaaaaaaaaaaaaaaaaaaaaaaaaaaaaaaaaaaaaaaaaaaaaaaaaaaaaaaaaaaaaaaaaaaaaaaaaaaaaa

SEQ ID NO: 21260 - RNA, 2052 nt, Artificial Sequence
  mRNA product Design a-2 (hSL-A100) comprising derived and/or modified sequence from LASV(G502-SLE-2009;Clade IV)__AIT17127__SP-IgE_NP(2-569) (opt1)
aggagaguccgcucagccagguugcagaagcggcuuagcguguguccuaaucuucucucugcguguagguaggccugugccgcaaacaagcuuaccauggacuggaccuggauccuguuccucguggccgccgcgacccgcguccacagcagcgccuccaaggagaucaagagcuuccuguggacccagucccuccgccgggagcugagcggcuacugcuccaacaucaagcuccagguggucaaggacgcccaggcgcugcugcacgggcuggacuucagcgagguguccaacgugcagcgccucaugcggaaggagcgccgggacgacaacgaccugaagcgccugcgggaccucaaccaggccgucaacaaccugguggagcucaagagcacccagcagaaguccauccugcgcgugggcacccugaccagcgacgaccugcucauccuggccgccgaccuggagaagcucaaguccaaggucauccggaccgagcgcccccugagcgccgggguguacaugggcaaccuguccagccagcagcucgaccagcggcgcgcgcugcuguccaugaucgggaugagcggcggcaaccagggggugcgggccggcaaggacggggucgugcgcgugugggacgucaagaacgccgagcuccugaacaaccaguucggcaccaugccgucccugacgcucgccugccugaccaagcagggccagguggaccugaacgacgcggugcaggcccucaccgaccuggggcugaucuacaccgccaaguaccccaacacgagcgaccucgaccggcugacccagucccaccccauccugaacaugaucgacaccaagaaguccagccucaacaucuccggcuacaacuucagccugggggccgccgucaaggcgggcgccugcaugcuggacgggggcaacaugcucgagaccaucaaggugagcccccagacgauggacggcauccucaagagcauccugaaggugaagaaggcccuggggauguucaucuccgacaccccgggcgagcgcaaccccuacgagaacauccuguacaagaucugccugagcggggacggcuggcccuacaucgccucccggaccagcaucaccgggcgcgccugggagaacacggucguggaccucgaguccgacggcaagccccagaaggcgggcagcaacaacuccaacaagagccugcaguccgccggguucaccgccggccugaccuacagccagcucaugacccugaaggacgccaugcugcagcuggacccgaacacgaagaccuggauggacaucgaggggcggcccgaggaccccguggagaucgcccucuaccagcccuccagcggcugcuacauccacuucuuccgcgagccgaccgaccugaagcaguucaagcaggacgcgaaguacucccacgggaucgacgucaccgaccuguucgccgcccagcccggccucacgagcgccgugaucgacgcccugccccggaacauggugaucacgugccagggcuccgacgacauccgcaagcugcucgagagccaggggcgcaaggacaucaagcugaucgacaucgcgcugaacaagaccgacagccggaaguacgagaacgccgucugggaccaguacaaggaccucugccacaugcacaccggcguggucguggagaagaagaagcgcgggggcaaggaggagaucaccccgcacugcgcccugauggacugcaucauguucgacgccgcgguguccgggggccugaacaccagcguccuccgggccgugcugccccgcgacaugguguuccggaccuccacgccccgcgucgugcugugaggacuagucccuguucccagagcccacuuuuuuuucuuuuuuugaaauaaaauagccugucuuucagaucucaaaggcucuuuucagagccaccaaaaaaaaaaaaaaaaaaaaaaaaaaaaaaaaaaaaaaaaaaaaaaaaaaaaaaaaaaaaaaaaaaaaaaaaaaaaaaaaaaaaaaaaaaaaaaaaaaaaa

SEQ ID NO: 21261 - RNA, 2052 nt, Artificial Sequence
  mRNA product Design a-2 (hSL-A100) comprising derived and/or modified sequence from LASV(G733-SLE-2010;Clade IV)__AIT17155__SP-IgE_NP(2-569) (opt1)
aggagaguccgcucagccagguugcagaagcggcuuagcguguguccuaaucuucucucugcguguagguaggccugugccgcaaacaagcuuaccauggacuggaccuggauccuguuccucguggccgccgcgacccgcguccacagcagcgccuccaaggagaucaagagcuuccuguggacccagucccuccgccgggagcugagcggcuacugcuccaacaucaagcuccagguggucaaggacgcccaggcgcugcugcacgggcuggacuucagcgagguguccaacgugcagcgccucaugcggaaggagcgccgggacgacaacgaccugaagcgccugcgggaccucaaccaggccgucaacaaccugguggagcucaagagcacccagcagaaguccgugcugcgcgucggcacccugaccagcgacgagcugcucgugcuggccgccgaccuggagaagcucaaguccaaggugauccggaccgagcgcccccugagcgccggggucuacaugggcaaccuguccagccagcagcucgaccagcggcgcgcgcugcuguccaugaucgggaugagcggcggcaaccagggggcccggaccggccgcgacgggguggugcgggucugggacgugaagaacgccgagcuccugaacaaccaguucggcaccaugccgucccugacccucgccugccugaccaagcagggccagguggaccugaacgacgcgguccaggcccucaccgaccuggggcugaucuacacggccaaguaccccaacaccagcgaccucgaccgccugacccagucccaccccauccugaacaugaucgacaccaagaaguccagccucaacaucuccggcuacaacuucagccugggggccgccgugaaggcgggcgccugcaugcuggacgggggcaacaugcucgagacgaucaaggugagcccccagaccauggacggcauccucaagagcauccugaaggucaagaaggcccuggggauguucaucuccgacaccccgggcgagcggaaccccuacgagaacauccuguacaagaucugccugagcggggacggcuggcccuacaucgccucccgcaccagcaucacggggcgggccugggagaacaccgugguggaccucgaguccgacggcaagccccagaaggcgggcagcaacaacuccaacaagagccugcaguccgccggguucaccgccggccugaccuacagccagcucaugacgcugaaggacgccaugcugcagcuggacccgaacgccaagaccuggauggacaucgaggggcgccccgaggaccccgucgagaucgcgcucuaccagcccuccagcggcugcuacauccacuucuuccgggagccgaccgaccugaagcaguucaagcaggacgccaaguacucccacgggaucgacgugaccgaccuguucgccgcccagcccggccucacgagcgccgugaucgacgcgcugccccgcaacauggucaucacgugccagggcuccgacgacauccgcaagcugcucgagagccaggggcggaaggacaucaagcugaucgacaucgcccugagcaagaucgacucccgcaaguacgagaacgccgugugggaccaguacaaggaccucugccacaugcacaccggcgucgugguggagaagaagaagcgcgggggcaaggaggagaucacgccccacugcgcccugauggacugcaucauguucgacgcggccgucagcgggggccugaacucccucgugcugcgggccgugcugccgcgggacauggucuuccgcaccagcacgccccggguggugcucugaggacuagucccuguucccagagcccacuuuuuuuucuuuuuuugaaauaaaauagccugucuuucagaucucaaaggcucuuuucagagccaccaaaaaaaaaaaaaaaaaaaaaaaaaaaaaaaaaaaaaaaaaaaaaaaaaaaaaaaaaaaaaaaaaaaaaaaaaaaaaaaaaaaaaaaaaaaaaaaaaaaaa

SEQ ID NO: 21262 - RNA, 2052 nt, Artificial Sequence
  mRNA product Design a-2 (hSL-A100) comprising derived and/or modified sequence from MOPV/LASV reassortant(IGS-1;Clade IV)__AFY05578__SP-IgE_NP(2-569) (opt1)
aggagaguccgcucagccagguugcagaagcggcuuagcguguguccuaaucuucucucugcguguagguaggccugugccgcaaacaagcuuaccauggacuggaccuggauccuguuccucguggccgccgcgacccgcguccacagcagcgccuccaaggagaucaagagcuuccuguggacccagucccuccgccgggagcugagcggcuacugcuccaacaucaagcuccagguggucaaggacgcccaggcgcugcugcacgggcuggacuucagcgagguguccaacgugcagcgccucaugcggaaggagcgccgggacgacaacgaccugaagcgccugcgggaccucaaccaggccgucaacaaccugguggagcucaagagcacccagcagaaguccauccugcgcgugggcacccugaccagcgacgaccugcucauccuggccgccgaccuggagaagcuccgguccaaggucauccgcaccgagcggccccugagcgccgggguguacaugggcaaccuguccagccagcagcucgaccagcgccgggcgcugcugaacaugaucgggauguccggcggcaaccagggggcccgcgccggccgggacggggugguccgcgugugggacgugaagaacgccgagcuccugagcaaccaguucggcaccaugccgucccugacgcucgcgugccugaccaagcaggggcaggucgaccugaacgacgccgugcaggcccucaccgaccugggccugaucuacaccgccaaguaccccaacacgagcgaccucgaccggcugacccagucccaccccauccugaacaugaucgacaccaagaaguccagccucaacaucuccggcuacaacuucagccugggggccgcggugaaggccggcgccugcaugcuggacgggggcaacaugcucgagaccaucaaggucagcccccagacgauggacggcauccucaagagcauccugaaggugaagaaggcccuggggauguucaucuccgacaccccgggcgagcgcaaccccuacgagaacauccuguacaagaucugccugagcggggacggcuggcccuacaucgccucccggaccagcaucaccgggcgcgcgugggagaacacgguggucgaccucgaguccgacggcaagccccagaaggccgacagcaacaacuccagcaagucccugcagagcgccggcuucaccgccgggcugaccuacucccagcucaugacccugaaggacgccaugcugcagcuggacccgaacgcgaagacguggauggacaucgagggccggcccgaggaccccguggagaucgcccucuaccagcccagcuccgggugcuacauccacuucuuccgcgagccgaccgaccugaagcaguucaagcaggacgccaaguacagccacggcaucgacgugaccgaccuguucgccacccagcccgggcucacguccgccgucaucgacgcgcugccccgcaacauggugaucacgugccagggcagcgacgacauccggaagcugcucgagagccagggccgcaaggacaucaagcugaucgacaucgaccuguccaagaccgacagccggaaguacgagaacgccgugugggaccaguacaaggaccucugccacaugcacaccggggucguggucgagaagaagaagcgcggcgggaaggaggagaucaccccgcacugcgcccugauggacugcaucauguucgacgccgcgguguccggcgggcugaacaccagcgugcuccgggccguccugccccgcgacaugguguuccggaccuccacgccccgcgugguccugugaggacuagucccuguucccagagcccacuuuuuuuucuuuuuuugaaauaaaauagccugucuuucagaucucaaaggcucuuuucagagccaccaaaaaaaaaaaaaaaaaaaaaaaaaaaaaaaaaaaaaaaaaaaaaaaaaaaaaaaaaaaaaaaaaaaaaaaaaaaaaaaaaaaaaaaaaaaaaaaaaaaaa

SEQ ID NO: 21263 - RNA, 2052 nt, Artificial Sequence
  mRNA product Design a-2 (hSL-A100) comprising derived and/or modified sequence from LASV(LM765-SLE-2012;Clade IV)__AIT17815__SP-IgE_NP(2-569) (opt1)
aggagaguccgcucagccagguugcagaagcggcuuagcguguguccuaaucuucucucugcguguagguaggccugugccgcaaacaagcuuaccauggacuggaccuggauccuguuccucguggccgccgcgacccgcguccacagcagcgccuccaaggagaucaagagcuuccuguggacccagucccuccgccgggagcugagcggcuacugcuccaacaucaagcuccagguggucaaggacgcccaggcgcugcugcacgggcuggacuucagcgagguguccaacgugcagcgccucaugcggaaggagcgccgggacgacaacgaccugaagcgccugcgggaccucaaccaggccgucaacaaccugguggagcucaagagcacccagcagaaguccauccugcgcgugggcacccugaccagcgacgaccugcucauccuggccgccgaccuggagaagcucaaguccaaggucacccggaccgagcgcccccugagcgccgggguguacaugggcaaccuguccagccagcagcucgaccagcggcgcgcgcugcuggacaugaucgggauguccggcagcaaccagggcgcccgggccgggcgcgacggcgugguccgggugugggacgugaagaacgccgagcuccugaacaaccaguucgggacgaugccgucccugacccucgcgugccugaccaagcagggccaggucgaccugaacgacgccgugcaggcccucaccgaccuggggcugaucuacacggccaaguaccccaacaccagcgaccucgaccgccugacccagucccaccccauccugaacaugaucgacaccaagaaguccagccucaacaucuccggcuacaacuucagccugggcgccgcggugaaggccggggccugcaugcuggacggcgggaacaugcucgagacgaucaaggucagcccccagaccauggacggcauccucaagagcauccugaaggugaagaaggcccugggcauguucaucuccgacgccccgggggagcggaaccccuacgagaacauccuguacaagaucugccugagcggcgacggguggcccuacaucgcgucccgcaccagcaucaccggccgggccugggagaacacgguggucgaccucgaguccgacgggaagccccagaaggccggcagcaacggcuccaacaagagccugcaguccgccggguucaccgccggccugaccuacagccagcucaugacccugaaggacgcgaugcugcagcuggacccgaacgccaagacguggauggacaucgaggggcgccccgaggaccccguggagaucgcccucuaccagcccuccagcggcugcuacauccacuucuuccgggagccgaccgaccugaagcaguucaagcaggacgccaaguacucccacgggaucgacgugaccgaccuguucgccgcgcagcccggccucaccagcgccgucaucgacgcccugccccgcaacauggugaucacgugccagggcuccgacgacauccgcaagcuguucgagagccaggggcggaaggacaucaagcucaucgacaucgcccugagcaagaccgacucccgcaaguacgagaacgcggugugggaccaguacaaggaccugugccacaugcacaccggcaucgucguggagaagaagaagcgcgggggcaaggaggagaucacgccccacugcgcccucauggacugcaucauguucgacgccgccgucagcgggggccugaacaccuccgugcugcgggccgugcucccgcgggacauggucuuccgcaccagcacgccccggguggugcugugaggacuagucccuguucccagagcccacuuuuuuuucuuuuuuugaaauaaaauagccugucuuucagaucucaaaggcucuuuucagagccaccaaaaaaaaaaaaaaaaaaaaaaaaaaaaaaaaaaaaaaaaaaaaaaaaaaaaaaaaaaaaaaaaaaaaaaaaaaaaaaaaaaaaaaaaaaaaaaaaaaaaa

SEQ ID NO: 21264 - RNA, 2052 nt, Artificial Sequence
  mRNA product Design a-2 (hSL-A100) comprising derived and/or modified sequence from LASV(LM776-SLE-2012;Clade IV)__AIT17825__SP-IgE_NP(2-569) (opt1)
aggagaguccgcucagccagguugcagaagcggcuuagcguguguccuaaucuucucucugcguguagguaggccugugccgcaaacaagcuuaccauggacuggaccuggauccuguuccucguggccgccgcgacccgcguccacagcagcgccuccaaggagaucaagagcuuccuguggacccagucccuccgccgggagcugagcuccuacugcagcaacaucaagcuccagguggucaaggacgcccaggcgcugcugcacggccuggacuucuccgaggugagcaacgugcagcgccucaugcggaaggagcgccgggacgacaacgaccugaagcgccugcgggaccucaaccaggccgucaacaaccugguggagcugaaguccacccagcagaaguccauccuccgcguggggacccugaccuccgacgaccugcucauccuggccgccgaccuggagaagcucaagagcaaggucacccggaccgagcgcccccuguccgccggcguguacauggggaaccugagcucccagcagcucgaccagcggcgcgcgcugcugagcaugaucggcauguccgggagcaaccagggcgcccgggccggccgcgacggggugguccgggugugggacgugaagaacgccgagcuccugaacaaccaguucggcacgaugccgucccugacccucgcgugccugaccaagcaggggcaggucgaccugaacgacgccgugcaggcccucaccgaccugggccugaucuacacggccaaguaccccaacaccagcgaccucgaccgccugacccagagccaccccauccugaacaugaucgacaccaagaaguccagccucaacaucuccggguacaacuucagccugggcgccgcggugaaggccggcgccugcaugcuggacgggggcaacaugcucgagacgaucaaggucagcccccagaccauggacgggauccucaagagcauccugaaggugaagaaggcccugggcauguucaucuccgacaccccgggcgagcggaaccccuacgagaacauccuguacaagaucugccugagcggggacggcuggcccuacaucgccucccgcaccagcaucacggggcgggcgugggagaacaccguggucgaccucgaguccgacggcaagccccagaaggccgggagcaacaacuccaacaagagccugcaguccgccggcuucaccgccggccugaccuacagccagcucaugacgcugaaggacgccaugcugcagcuggacccgaacgcgaagaccuggauggacaucgaggggcgccccgaggaccccguggagguggcccucuaccagcccuccagcggcugcuacauccacuucuuccgggagccgaccgaccugaagcaguucaagcaggacgccaaguacucccacgggaucgacgucaccgaccuguucgccgcccagcccggccucacgagcgcggugaucgacgcccugccccgcaacauggugaucacgugccaggggagcgacgacauccgcaagcugcucgagucccagggccggaaggacaucaagcugaucgacaucgcccugagcaagaccgacucccgcaaguacgagaacgccgucugggaccaguacaaggaccucugccacaugcacaccggcguggucguggagaagaagaagcgcgggggcaaggaggagaucaccccgcacugcgcgcugauggacugcaucauguucgacgccgccgugagcgggggccugaacaccuccguccuccgggccgugcugccccgggacaugguguuccgcaccagcacgccccgggucgugcugugaggacuagucccuguucccagagcccacuuuuuuuucuuuuuuugaaauaaaauagccugucuuucagaucucaaaggcucuuuucagagccaccaaaaaaaaaaaaaaaaaaaaaaaaaaaaaaaaaaaaaaaaaaaaaaaaaaaaaaaaaaaaaaaaaaaaaaaaaaaaaaaaaaaaaaaaaaaaaaaaaaaaa

SEQ ID NO: 21265 - RNA, 2052 nt, Artificial Sequence
  mRNA product Design a-2 (hSL-A100) comprising derived and/or modified sequence from LASV(Mad39;Clade IV)__ANH09723__SP-IgE_NP(2-569) (opt1)
aggagaguccgcucagccagguugcagaagcggcuuagcguguguccuaaucuucucucugcguguagguaggccugugccgcaaacaagcuuaccauggacuggaccuggauccuguuccucguggccgccgcgacccgcguccacagcagcgccuccaaggagaucaagagcuuccuguggacccagucccuccgccgggagcugagcggcuacugcuccaacaucaagcuccagguggucaaggacgcccaggcgcugcugcacgggcuggacuucagcgagguguccaacgugcagcgccucaugcggaagcagcgccgggacgacaacgaccugaagcgccugcgggaccucaaccaggccgucaacaaccugguggagcugaaguccacccagcagaaguccgugcuccgcgucggcacgcugaccagcgacgaccugcucacccuggccgccgaccuggagaagcucaaguccaaggugacccggacggagcgcccccugaccgccgggguguacaugggcaaccugagcucccagcagcucgaccagcggcgcgcgcugcugaacaugaucgggaugagcggcggcaaccagggggcccggaccggccgcgacggggucgugcgggugugggacgucaagaacgccgagcuccugaacaaccaguucggcaccaugccgucccugacgcucgccugccugaccaagcagggccagguggaccugaacgacgugguccaggcgcucaccgaccuggggcugaucuacaccgccaaguaccccaacacgagcgaccucgaccgccugacccagucccaccccauccugaacaugaucgacaccaacaagagcucccucaacaucagcggcuacaacuucagccugggggccgccgugaaggccggcgcgugcaugcuggacgggggcaacaugcucgagaccaucaaggugagcccccagacgauggacggcauccucaagagcauccugaaggucaagaagucccuggggauguucaucagcgacaccccgggcgagcggaaccccuacgagaacauccuguacaagaucugccuguccggggacggcuggcccuacaucgccagccgcaccuccaucaccgggcgggccugggagaacacggugguggaccucgagagcggcggcaagccccagaaggccggguccaacaacagcaacaagucccugcagagcgccggcuucgcggccgggcugaccuacucccagcucaugacccugaaggacgccaugcugcagcuggacccgaacgccaagaccuggauggacaucgagggccgccccgaggaccccgucgagaucgcccucuaccagcccaucagcgggugcuacauccacuucuuccgggagccgacggaccugaagcaguucaagcaggacgcgaaguacucccacggcaucgacgugaccgaccuguucgccgcccagcccggccucaccagcgccgugaucgaggcccugccccgcaacauggucaucacgugccagggguccgacgacauccgcaagcuguucgagagccagggccggaaggacaucaagcucaucgacaucgcgcuguccaagaccgacagccgcaaguacgagaacgccgugugggaccaguacaaggaccugugccacaugcacaccggggucgugguggagaagaagaagaagggcgggaaggaggagaucacgccccacugcgcccucauggacugcaucauguucgacgccgcggucagcggcggccugaacacccuggugcuccgggccgugcugccgcgcgacauggucuuccggaccuccacccccaagguggugcugugaggacuagucccuguucccagagcccacuuuuuuuucuuuuuuugaaauaaaauagccugucuuucagaucucaaaggcucuuuucagagccaccaaaaaaaaaaaaaaaaaaaaaaaaaaaaaaaaaaaaaaaaaaaaaaaaaaaaaaaaaaaaaaaaaaaaaaaaaaaaaaaaaaaaaaaaaaaaaaaaaaaaa

SEQ ID NO: 21266 - RNA, 2052 nt, Artificial Sequence
  mRNA product Design a-2 (hSL-A100) comprising derived and/or modified sequence from LASV(Z0947-SLE-2011;Clade IV)__AIT17841__SP-IgE_NP(2-569) (opt1)
aggagaguccgcucagccagguugcagaagcggcuuagcguguguccuaaucuucucucugcguguagguaggccugugccgcaaacaagcuuaccauggacuggaccuggauccuguuccucguggccgccgcgacccgcguccacagcagcgccuccaaggagaucaagagcuuccuguggacccagucccuccgccgggagcugagcggcuacugcuccaacaucaagcuccagguggucaaggacgcccaggcgcugcugcacgggcuggacuucagcgagguguccaacgugcagcgccucaugcggaaggagcgccgggacgacaacgaccugaagcgccugcgggaccucaaccaggccgucaacaaccugguggagcucaagagcacccagcagaaguccauccugcgcgugggcacccugaccagcgacgaccugcucauccuggccgccgaccuggagaagcucaaguccaaggucacccggaccgagcgcccccugagcgccgggguguacaugggcaaccuguccagccagcagcucgaccagcggcgcgcgcugcugaacaugaucgggauguccggcagcaaccagggcgcccggacggggcgcgacggcgugguccgggugugggacgugaagaacgccgagcuccugaacaaccaguucgggaccaugccgucccugacccucgccugccugaccaagcagggccaggucgaccugaacgacgcggugcaggcccucacggaccuggggcugaucuacaccgccaaguaccccaacaccagcgaccucgaccgccugacccagucccaccccauccugaacaugaucgacacgaagaaguccagccucaacaucuccggcuacaacuucagccugggcgccgccgugaaggcgggggccugcaugcuggacggcgggaacaugcucgagaccaucaaggucagcccccagaccauggacggcauccucaagagcauccugaaggugaagaaggcccugggcauguucaucuccgacgccccgggggagcggaaccccuacgagaacauccuguacaagaucugccugagcggcgacggguggcccuacaucgccucccgcaccagcaucacgggccgggcgugggagaacaccguggucgaccucgaguccgacgggaagccccagaaggccggcagcaacggcuccaacaagagccugcaguccgccggguucaccgccggccugaccuacagccagcucaugacgcugaaggacgccaugcugcagcuggacccgaacgcgaagaccuggauggacaucgaggggcgccccgaggaccccguggagaucgcccucuaccagcccuccagcggcugcuacauccacuucuuccgggagccgaccgaccugaagcaguucaagcaggacgccaaguacucccacgggaucgacgugaccgaccuguucgccgcccagcccggccucacgagcgcggucaucgacgcccugccccgcaacauggugaucacgugccagggcuccgacgacauccgcaagcuguucgagagccaggggcggaaggacaucaagcucaucgacaucgcccugagcaagaccgacucccgcaaguacgagaacgccgugugggaccaguacaaggaccugugccacaugcacaccggcaucgucguggagaagaagaagcgcgggggcaaggaggagaucaccccgcacugcgcgcucauggacugcaucauguucgacgccgccgucagcgggggccugaacaccuccgugcugcgggccgugcucccccgggacauggucuuccgcaccagcacgccccggguggugcugugaggacuagucccuguucccagagcccacuuuuuuuucuuuuuuugaaauaaaauagccugucuuucagaucucaaaggcucuuuucagagccaccaaaaaaaaaaaaaaaaaaaaaaaaaaaaaaaaaaaaaaaaaaaaaaaaaaaaaaaaaaaaaaaaaaaaaaaaaaaaaaaaaaaaaaaaaaaaaaaaaaaaa

SEQ ID NO: 21267 - RNA, 2052 nt, Artificial Sequence
  mRNA product Design a-2 (hSL-A100) comprising derived and/or modified sequence from LASV(Josiah;Clade IV)__NP_694869__SP-IgE_NP(2-569) (opt4)
aggagaguccgcucagccagguugcagaagcggcuuagcguguguccuaaucuucucucugcguguagguaggccugugccgcaaacaagcuuaccauggacuggaccuggauccuguuccugguggccgccgccaccagagugcacagcagcgccagcaaggagaucaagagcuuccuguggacccagagccugagaagagagcugagcggcuacugcagcaacaucaagcugcagguggugaaggacgcccaggcccugcugcacggccuggacuucagcgaggugagcaacgugcagagacugaugagaaaggagagaagagacgacaacgaccugaagagacugagagaccugaaccaggccgugaacaaccugguggagcugaagagcacccagcagaagagcauccugagagugggcacccugaccagcgacgaccugcugauccuggccgccgaccuggagaagcugaagagcaaggugaucagaaccgagagaccccugagcgccggcguguacaugggcaaccugagcagccagcagcuggaccagagaagagcccugcugaacaugaucggcaugagcggcggcaaccagggcgccagagccggcagagacggcguggugagagugugggacgugaagaacgccgagcugcugaacaaccaguucggcaccaugcccagccugacccuggccugccugaccaagcagggccagguggaccugaacgacgccgugcaggcccugaccgaccugggccugaucuacaccgccaaguaccccaacaccagcgaccuggacagacugacccagagccaccccauccugaacaugaucgacaccaagaagagcagccugaacaucagcggcuacaacuucagccugggcgccgccgugaaggccggcgccugcaugcuggacggcggcaacaugcuggagaccaucaaggugagcccccagaccauggacggcauccugaagagcauccugaaggugaagaaggcccugggcauguucaucagcgacacccccggcgagagaaaccccuacgagaacauccuguacaagaucugccugagcggcgacggcuggcccuacaucgccagcagaaccagcaucaccggcagagccugggagaacaccgugguggaccuggagagcgacggcaagccccagaaggccgacagcaacaacagcagcaagagccugcagagcgccggcuucaccgccggccugaccuacagccagcugaugacccugaaggacgccaugcugcagcuggaccccaacgccaagaccuggauggacaucgagggcagacccgaggaccccguggagaucgcccuguaccagcccagcagcggcugcuacauccacuucuucagagagcccaccgaccugaagcaguucaagcaggacgccaaguacagccacggcaucgacgugaccgaccuguucgccacccagcccggccugaccagcgccgugaucgacgcccugcccagaaacauggugaucaccugccagggcagcgacgacaucagaaagcugcuggagagccagggcagaaaggacaucaagcugaucgacaucgcccugagcaagaccgacagcagaaaguacgagaacgccgugugggaccaguacaaggaccugugccacaugcacaccggcguggugguggagaagaagaagagaggcggcaaggaggagaucaccccccacugcgcccugauggacugcaucauguucgacgccgccgugagcggcggccugaacaccagcgugcugagagccgugcugcccagagacaugguguucagaaccagcacccccagaguggugcugugaggacuagucccuguucccagagcccacuuuuuuuucuuuuuuugaaauaaaauagccugucuuucagaucucaaaggcucuuuucagagccaccaaaaaaaaaaaaaaaaaaaaaaaaaaaaaaaaaaaaaaaaaaaaaaaaaaaaaaaaaaaaaaaaaaaaaaaaaaaaaaaaaaaaaaaaaaaaaaaaaaaaa

SEQ ID NO: 21268 - RNA, 2052 nt, Artificial Sequence
  mRNA product Design a-2 (hSL-A100) comprising derived and/or modified sequence from LASV(LP;Clade I)__AAF86702__SP-IgE_NP(2-569) (opt4)
aggagaguccgcucagccagguugcagaagcggcuuagcguguguccuaaucuucucucugcguguagguaggccugugccgcaaacaagcuuaccauggacuggaccuggauccuguuccugguggccgccgccaccagagugcacagcagcaacagcaaggagaucaagagcuuccuguggacccagagccugagaagagagcugagcggcuacugcagcaacaucaagcugcagguggugaaggacgcccaggcccugcugcacggccuggacuucagcgaggugagcaacgugcagagacugaugagaaagcagaagagagacgacgccgaccugaagagacugagagaccugaaccaggccgugaacaaccugguggagcugaagagcacccagcagaagaacgugcugagagugggcacccugagcagcgacgaccugaucacccuggccgccgaccuggagaagcugaagagcaaggugaucagaaccgagagaccccugagcagcggcguguacaugggcaaccugagcagccagcagcuggaccagagaagagcccugcugagcaugaucggcaugagcggcggcccccagggcaacagaaccggcggcgacggcguggugagagugugggacgugaagaacgccgagcugcugaacaaccaguucggcaccaugcccagccugacccuggccugccugaccaagcagggccagguggaccugaacgacgccgugcaggcccugaccgaccugggccugaucuacaccgccaaguaccccaacagcagcgaccuggacaugcugacccagagccaccccauccugggcaugguggacaccaagaagagcagccugaacaucagcggcuacaacuucagccugggcgccgccgugaaggccggcgccugcaugcuggacggcggcaacaugcuggagaccaucaaggugagcccccagaccauggacggcauccugaagagcauccugaaggugaagagaagccugggcauguucaucagcgacacccccggcgagagaaaccccuacgagaacauccuguacaagaucugccugagcggcgagggcuggcccuacaucgccagcagaaccagcaucaccggcagagccugggagaacacccugguggaccuggagagcgacaacaagccccccaagcugaacagcgccggcagcaacaagagccugcaggccgccggccugaacgccggccugaccuacagccagcugaugacccugaaggacugcaugcugcagcuggaccccagcagcaagaccuggaucgacaucgagggcagacccgaggaccccguggagaucgcccuguuccagcccagcagcggcugcuacauccacuucuucagagagcccaccgaccugaagcaguucaagcaggacgccaaguacagccacggcaucgacgugaccgaccuguucagcacccagcccggccugaccagcgccgugaucgaggcccugcccagaaacauggugcugaccugccagggcagcgacgacaucaagaagcugcuggagagccagggcagaagagacaucaagcugaucgacaucagccugagcaaggccgacagcagaaaguucgagaacgccgugugggaccaguacaaggaccugugccacaugcacaccggcguggugguggagaagaagaagagaggcggcaaggaggagaucaccccccacugcgcccugcuggacugcaucauguucgacgccgccaccaccggcagccugaacaucaccacccugagagccgugcugcccagagacaugguguucagaaccagcacccccaagguggugcugugaggacuagucccuguucccagagcccacuuuuuuuucuuuuuuugaaauaaaauagccugucuuucagaucucaaaggcucuuuucagagccaccaaaaaaaaaaaaaaaaaaaaaaaaaaaaaaaaaaaaaaaaaaaaaaaaaaaaaaaaaaaaaaaaaaaaaaaaaaaaaaaaaaaaaaaaaaaaaaaaaaaaa

SEQ ID NO: 21269 - RNA, 2052 nt, Artificial Sequence
  mRNA product Design a-2 (hSL-A100) comprising derived and/or modified sequence from LASV(803213;Clade II)__AAF86704__SP-IgE_NP(2-569) (opt4)
aggagaguccgcucagccagguugcagaagcggcuuagcguguguccuaaucuucucucugcguguagguaggccugugccgcaaacaagcuuaccauggacuggaccuggauccuguuccugguggccgccgccaccagagugcacagcagcgccagcaaggaggugaagagcuuccuguggacccagagccugagaagagagcugagcggcuacugcagcaacaucaagcugcagguggugaaggacgcccaggcccugcugcacggccuggacuucagcgaggugaacaacgugcagagacugaugagaaagcagaagagagacgacggcgaccugaagagacugagagaccugaaccaggccgugaacaaccugguggagcugaagagcacccagcagaagagcauccugagagugggcacccugaccagcgacgaccugcugacccuggccgccgaccuggagaagcugaagagcaaggugaucagaaccgagagaccccugagcagcggcguguacaugggcaaccugagcacccagcagcuggagcagagaagagcccugcugaacaugaucggcauggugggcggcgcccagggcacccagcccggcagagacggcguggugagagugugggacgugaagaaccccgaccugcugaacaaccaguucggcaccaugcccagccugacccuggccugccugaccaagcagggccagguggaccugaacgacgccgugcuggcccugaccgaccugggccugaucuacaccgccaaguaccccaacagcagcgaccuggacagacugagccagagccaccccauccugaacaugguggacaccaagaagagcagccugaacaucagcggcuacaacuucagccugggcgccgccgugaaggccggcgccugcaugcuggacggcggcaacaugcuggagaccaucaaggugaccccccagaccauggacggcauccugaagagcauccugaaggugaagagaagccugggcauguucgugagcgacacccccggcgagagaaaccccuacgagaacauccuguacaagaucugccugagcggcgacggcuggcccuacaucgccagcagaaccagcaucgugggcagagccugggagaacaccaccguggaccuggagagcgacggcaagccccagaaggugggcaccgccggcagcaacaagagccugcagagcgccggcuuccccaccggccugaccuacagccagcugaugacccugaaggacagcaugaugcagcuggaccccagcgccaagaccuggaucgacaucgagggcagacccgaggaccccguggagaucgcccuguaccagcccaugagcggcugcuacauccacuucuucagagagcccaccgaccugaagcaguucaagcaggacgccaaguacagccacggcaucgacguggccgaccuguuccccgcccagcccggccugaccagcgccgugaucgaggcccugcccagaaacauggugcugaccugccagggcagcgacgacaucaagaagcugcuggacagccagggcagaagagacaucaagcugaucgacaucagccugagcaagguggacagcagaaaguucgagaacgccgugugggaccagugcaaggaccugugccacaugcacaccggcguggugguggagaagaagaagagaggcggcaaggaggagaucaccccccacugcgcccugauggacugcaucauguucgacgccgccgugagcggcggccugaacauccccgugcugagagccgugcugcccagagacaugguguucagaaccagcagccccaagguggugcugugaggacuagucccuguucccagagcccacuuuuuuuucuuuuuuugaaauaaaauagccugucuuucagaucucaaaggcucuuuucagagccaccaaaaaaaaaaaaaaaaaaaaaaaaaaaaaaaaaaaaaaaaaaaaaaaaaaaaaaaaaaaaaaaaaaaaaaaaaaaaaaaaaaaaaaaaaaaaaaaaaaaaa

SEQ ID NO: 21270 - RNA, 2055 nt, Artificial Sequence
  mRNA product Design a-2 (hSL-A100) comprising derived and/or modified sequence from LASV(GA391;Clade III)__CAA36646__SP-IgE_NP(2-570) (opt4)
aggagaguccgcucagccagguugcagaagcggcuuagcguguguccuaaucuucucucugcguguagguaggccugugccgcaaacaagcuuaccauggacuggaccuggauccuguuccugguggccgccgccaccagagugcacagcagcgccagcaaggaggugagaagcuuccuguggacccagagccugagaagagagcugagcggcuacugcagcaacaucaagcugcagguggugaaggacgcccaggcccugcugcacggccuggacuucagcgaggugagcaacgugcagagacugaugagaaagcagaagagagacgacggcgaccugaagagacugagagaccugaaccaggccgugaacaaccugguggagcugaagagcacccagcagaagagcgugcugagagugggcacccugagcagcgacgaccugcugauccuggccgccgaccuggagaagcugaagagcaaggugaccagaaccgagagaccccugagcagcggcguguacaugggcaaccugagcagccagcagcuggaccagagaagagcccugcugaacaugaucggcaugaccggcgugagcggcggcggcaagggcgccagcgacggcaucgugagagugugggacgugaagaacgccgagcugcugaacaaccaguucggcaccaugcccagccugacccuggccugccugaccaagcagggccagguggaccugaacgacgccgugcaggcccugaccgaccugggccugaucuacaccgccaaguaccccaacagcagcgaccuggacagacugagccagagccaccccauccugaacaugaucgacaccaagaagagcagccugaacaucagcggcuacaacuucagccugggcgccgccgugaaggccggcgccugcaugcuggacggcggcaacaugcuggagaccaucaaggugagcccccagaccauggacggcauccugaagagcauccugaaggugaagaagagccugggcauguucgugagcgacacccccggcgagagaaaccccuacgagaacauccuguacaagaucugccugagcggcgacggcuggcccuacaucgccagcagaaccagcaucgugggcagagccugggagaacaccgugguggaccuggagcaggacaacaagccccagaagaucggcaacggcggcagcaacaagagccugcagagcgccggcuucgccgccggccugaccuacagccagcugaugacccugaaggacuucaagugcuucaaccugauccccaacgccaagaccuggauggacaucgagggcagacccgaggaccccguggagaucgcccuguaccagcccagcagcggcugcuacgugcacuucuucagagagcccaccgaccugaagcaguucaagcaggacgccaaguacagccacggcaucgacgugaccgaccuguucgccgcccagcccggccugaccagcgccgugaucgaggcccugcccagaaacauggugaucaccugccagggcagcgaggacaucagaaagcugcuggagagccagggcagaagagacaucaagcugaucgacaucacccugagcaaggccgacagcagaaaguucgagaacgccgugugggaccaguucaaggaccugugccacaugcacaccggcguggugguggagaagaagaagagaggcggcaaggaggagaucaccccccacugcgcccugauggacugcaucauguucgacgccgccgugagcggcggccuggacgccaaggugcugagaguggugcugcccagagacaugguguucagaaccagcacccccaagguggugcugugaggacuagucccuguucccagagcccacuuuuuuuucuuuuuuugaaauaaaauagccugucuuucagaucucaaaggcucuuuucagagccaccaaaaaaaaaaaaaaaaaaaaaaaaaaaaaaaaaaaaaaaaaaaaaaaaaaaaaaaaaaaaaaaaaaaaaaaaaaaaaaaaaaaaaaaaaaaaaaaaaaaaa

SEQ ID NO: 21271 - RNA, 2052 nt, Artificial Sequence
  mRNA product Design a-2 (hSL-A100) comprising derived and/or modified sequence from LASV(AV;Clade V)__CCA30315__SP-IgE_NP(2-569) (opt4)
aggagaguccgcucagccagguugcagaagcggcuuagcguguguccuaaucuucucucugcguguagguaggccugugccgcaaacaagcuuaccauggacuggaccuggauccuguuccugguggccgccgccaccagagugcacagcagcgccagcaaggaggugaagagcuuccuguggacccagagccugagaagagagcugagcggcuacugcagcaacaucaagcugcagguggugaaggacgcccaggcccugcugcacggccuggacuucagcgaggugagcaacgugcagagacugaugagaaagcagagaagagacgacagcgaccugaagagacugagagaccugaaccaggccgugaacaaccugguggagcugaagagcacccagcagaagagcgugcugagagugggcacccugagcagcgacgaccugcugacccuggccgccgaccuggagaagcugaagagcaaggugaccagaaccgagagaccccugagcagcggcguguacaugggcaaccugagcagccagcagcuggaccagagaagagcccugcugaaccugaucggcaugaccaacggcagccagggcagccaggccggcagagacggcguggugagagugugggacgugaagaacgccgagcugcugaacaaccaguucggcaccaugcccagccugacccuggccugccugaccaagcagggccagguggaccugaacgacguggugcaggcccugaccgaccugggccugaucuacaccgccaaguaccccaacaccagcgaccuggacagacugacccagagccaccccauccugaacaugaucgacaccaagaagagcagccugaacaucagcggcuacaacuucagccugggcgccgccgugaaggccggcgccugcaugcuggacggcggcaacaugcuggagaccaucaaggugagcccccagagcauggacggcauccugaagagcauccugaaggugaagagagcccugggcauguucgugagcgacacccccggcgagagaaaccccuacgagaacauccuguacaagaucugccugagcggcgacggcuggcccuacaucgccagcagaaccagcaucgugggcagagccugggagaacaccgugguggaccuggagaccgacggcaagccccagaagaucggcagcggcaacagcaacaagagccugcagagcgccggcuucagcgccggccugaccuacagccagcugaugacccugaaggacgccaugcugcagcuggaccccaacgccaagaccuggauggacaucgagggcagacccgaggaccccguggagguggcccuguaccagcccaucagcggcugcuacauccacuucuucagagagcccaccgaccugaagcaguucaagcaggacgccaaguacagccacggcaucgacaucgccgaccuguucgccgcccagcccggccugaccagcgccgugaucgaggcccugcccagaaacauggugaucaccugccagggcagcgaggacaucaagaagcugcuggagagccagggcagaaaggacaucaagcugaucgacaucgcccugagcaagaucgacagcagaaaguucgagaacgccgugugggaccaguacaaggaccugugccacaugcacaccggcguggugguggagaagaagaagagaggcggcaaggaggagaucaccccccacugcgcccugauggacugcaucauguucgacgccgccgugagcggcggccugaacacccuggugcugagagccgugcugcccagagacaugguguucagaaccagcacccccagaguggugcugugaggacuagucccuguucccagagcccacuuuuuuuucuuuuuuugaaauaaaauagccugucuuucagaucucaaaggcucuuuucagagccaccaaaaaaaaaaaaaaaaaaaaaaaaaaaaaaaaaaaaaaaaaaaaaaaaaaaaaaaaaaaaaaaaaaaaaaaaaaaaaaaaaaaaaaaaaaaaaaaaaaaaa

SEQ ID NO: 21272 - RNA, 2052 nt, Artificial Sequence
  mRNA product Design a-2 (hSL-A100) comprising derived and/or modified sequence from LASV(Togo/2016/7082;Clade VI)__AMR44578__SP-IgE_NP(2-569) (opt4)
aggagaguccgcucagccagguugcagaagcggcuuagcguguguccuaaucuucucucugcguguagguaggccugugccgcaaacaagcuuaccauggacuggaccuggauccuguuccugguggccgccgccaccagagugcacagcagcaacagcaaggaggugaagagcuuccuguggacccagagccugagaagagagcugagcggcuacugcagcaacaucaagcugcagguggugaaggacgcccaggcccugcugcacggccuggacuucagcgaggugagcaacgugcagagacugaugagaaagcagaagagagacgacggcgaccugaagagacugagagaccugaaccaggccgugaacaaccugguggagcugaagagcgugcagcagaagagcauccugagagugggcacccugaccagcgacgaccugcugacccuggccgccgaccuggagaagcugaagagcaaggugaccagaaccgagagaccccugagcagcggcguguacaugggcaaccugagcagccagcagcuggaccagagaagagcccugcugagcaugaucggcaugagcggcggcaaccagaacagccagcccaagggcgacggcguggugagagugugggacgugaagaacgccgaccugcugaacaaccaguucggcaccaugcccagccugacccuggccugccugaccaagcagggccagguggaccugaacgacgccgugcaggcccugaccgaccugggccugaucuacaccgccaaguaccccaacagcagcgaccuggacagacugagccagagccaccccauccugaacaugaucgacaccaagaagagcagccugaacaucagcggcuacaacuucagccugggcgccgccaucaagaccggcgccugcaugcuggacggcggcaacaugcuggagaccaucaaggugaccccccagaccauggacggcauccugaagagcauccugaaggugaagagaagccugggcauguucaucagcgacacccccggcgagagaaaccccuacgagaacauccuguacaagaucugccugagcggcgacggcuggcccuacaucgccagcagaaccgccaucaucggcagagccugggagaacaccgugguggaccuggagagcgacagcaagccccagaagaucggcagcaacggcagcaacaagagccugcagagcgccggcuucgcccccggccugaccuacagccagcugaugacccugaaggacagcaugcugcagcuggaccccaacgccaagaccuggaucgacaucgagggcagacccgaggaccccguggagguggcccuguuccagcccaucagcggcugcuacauccacuucuucagagagcccaccgaccugaagcaguucaagcaggacgccaaguacagccacggcaucgacgugaccgaccuguucgccgcccagcccggccugaccagcgccgugaucgaggcccugcccagaaacauggugcugaccugccagggcagcgacgacaucaagaagcugcuggacagccagggcagaagagacaucaagcugaucgacgugagccugaacaagaucgacagcagaaaguucgagaacgccgugugggaccaguacaaggaccugugccacaugcacaccggcguggugguggagaagaagaagaagggcggcaaggaggagaucaccccccacugcgcccugcuggacugcaucauguucgacgccgccgugagcggcggccugaacgccaccgugcugagagccgugcugcccagagacaugguguucagaaccagcagccccaagguggugcugugaggacuagucccuguucccagagcccacuuuuuuuucuuuuuuugaaauaaaauagccugucuuucagaucucaaaggcucuuuucagagccaccaaaaaaaaaaaaaaaaaaaaaaaaaaaaaaaaaaaaaaaaaaaaaaaaaaaaaaaaaaaaaaaaaaaaaaaaaaaaaaaaaaaaaaaaaaaaaaaaaaaaa

SEQ ID NO: 21273 - RNA, 2052 nt, Artificial Sequence
  mRNA product Design a-2 (hSL-A100) comprising derived and/or modified sequence from LASV(KAK-428;Clade n.d. (VII))__ANH09741__SP-IgE_NP(2-569) (opt4)
aggagaguccgcucagccagguugcagaagcggcuuagcguguguccuaaucuucucucugcguguagguaggccugugccgcaaacaagcuuaccauggacuggaccuggauccuguuccugguggccgccgccaccagagugcacagcagcaacagcaaggaggugaagagcuuccuguggacccagagccugagaagagagcugagcggcuacugcaccaacaucaagcugcagguggugaaggacgcccaggcccugcugcacggccuggacuucagcgaggugagcaacgugcagagacugaugagaaagcagaagagagacgacaacgaccugaagagacugagagaccugaaccaggccgugaacaaccugguggagcugaagagcgugcagcagaagagcgugcugaaggugggcacccugaacagcgacgaccugcugacccuggccgccgaccuggagaagcugaagagcaagguggugagaaccgagagaccccugagcagcggcguguacaugggcaaccugagcagccagcagcuggaccagagaagagcccugcugaacaugaucggcauggccggcggcagccagggcaaccagcccagcagagacggcguggugagagugugggacgugaagaacgccgaccugcugaacaaccaguucggcaccaugcccagccugacccuggccugccugaccaagcagggccagguggaccugaacgacguggugcuggcccugaccgaccugggccugaucuacaccgccaaguaccccaacagcagcgaccuggacagacugagccagaaccaccccgugcugaacaugaucgacgugaacaagagcagccugaacaucagcggcuacaacuucagccugggcgccgccgugaaggccggcgccugcaugcuggacggcggcaacaugcuggagaccaucaagaucagcccccagaccguggacggcauccugaagagcauccugaaggugaagagagcccugggcauguucgugagcgacacccccggcgagagaaaccccuacgagaacauccuguacaaggugugccugagcggcaacggcuggcccuacaucgccagcagaaccagcaucgugggcagagccugggagaacaccgugguggaccuggagagcaacaagaaccagcccaaggugggcaacaacggcagcaacaagaugcugcagagcagcggcuucgccaccggccugaccuacagccagcugaugacccugagagacagcaugcugcagcuggaccccaccgccaagaccuggaucgacaucgagggcagacccgaggaccccguggagcuggcccuguuccagcccagcagcggcugcuacauccacuucuucagagagcccaccgaccugaagcaguucaagcaggacgccaaguacagccacggcaucgacgugaacgaccuguucagcgcccagcccggccugaccagcgccgugcuggaggcccugcccagaaacauggugcugaccugccagggcagcgacgacaucagaaagcugcuggacagccaggacagaaaggacaucaagcugaucgacaucagccugagcaaggccgacgccagaaaguucgagaacgacgugugggaccaguucaaggaccugugccacaugcacaccggcaucgugguggagaagaagaagaagggcggcaagcaggagaugaccccccacugcgcccugcuggacugcaucauguucgacgccgccgugagcggcggccugaacgugcccacccugagagccgugcugcccaccgacaugguguucagaaccaucaccaccaagguggugcugugaggacuagucccuguucccagagcccacuuuuuuuucuuuuuuugaaauaaaauagccugucuuucagaucucaaaggcucuuuucagagccaccaaaaaaaaaaaaaaaaaaaaaaaaaaaaaaaaaaaaaaaaaaaaaaaaaaaaaaaaaaaaaaaaaaaaaaaaaaaaaaaaaaaaaaaaaaaaaaaaaaaaa

SEQ ID NO: 21274 - RNA, 2052 nt, Artificial Sequence; identical to SEQ ID NO: 21268
  mRNA product Design a-2 (hSL-A100) comprising derived and/or modified sequence from LASV(Pinneo-NIG-1969;Clade I)__AIT17837__SP-IgE_NP(2-569) (opt4)

SEQ ID NO: 21275 - RNA, 2052 nt, Artificial Sequence
  mRNA product Design a-2 (hSL-A100) comprising derived and/or modified sequence from LASV(ISTH0009-NIG-2011;Clade II)__AIT17405__SP-IgE_NP(2-569) (opt4)
aggagaguccgcucagccagguugcagaagcggcuuagcguguguccuaaucuucucucugcguguagguaggccugugccgcaaacaagcuuaccauggacuggaccuggauccuguuccugguggccgccgccaccagagugcacagcagcgugagcaaggaggugaagagcuuccuguggacccagagccugagaagagagcugagcggcuacugcagcaacaucaagcugcagguggugaaggacgcccaggcccugcugcacggccuggacuucagcgaggugagcaacgugcagagacugaugagaaagcagaagagagacgacagcgaccugaagagacugagagaccugaaccaggccgugaacaaccugguggagcugaagagcacccagcagaagagcauccugagagugggcacccugaccagcgacgaccugcugacccuggccgccgaccuggagaagcugaagagcaaggugaucagaaccgagagaccccugagcagcggcguguacaugggcaaccugagcacccagcagcuggagcagagaagagcccugcugaacaugaucggcauggugggcggcgcccagggcacccagcccggcagagacggcguggugagagugugggacgugaagaaccccgaccugcugaacaaccaguucggcaccaugcccagccugacccuggccugccugaccaagcagggccagguggaccugaacgacgccgugcuggcccugaccgaccugggccugaucuacaccgccaaguaccccaacagcagcgaccuggacagacugagccagagccaccccauccugaacaugguggacaucaagaagagcagccugaacaucagcggcuacaacuucagccugggcgccgccgugaaggccggcgccugcaugcuggacggcggcaacaugcuggagaccaucaaggugaccccccagaccauggacggcauccugaagagcauccugaaggugaagagaagccugggcauguucgugagcgacacccccggcgagagaaaccccuacgagaacauccuguacaagaucugccugagcggcgacggcuggcccuacaucgccagcagaaccagcaucgugggcagagccugggagaacaccaccguggaccuggagagcgacggcaagccccagaaggugggcagcgccggcagcaacaagagccugcagagcgccggcuuccccaccggccugaccuacagccagcugaugacccugaaggacagcaugaugcagcuggaccccagcgccaagaccuggaucgacaucgagggcagacccgaggaccccguggagaucgcccuguaccagcccaugagcggcugcuacauccacuucuucagagagcccaccgaccugaagcaguucaagcaggacgccaaguacagccacggcaucgacguggccgaccuguuccccgcccagcccggccugaccagcgccgugaucgaggcccugcccagaaacauggugcugaccugccagggcagcgacgacaucaagagacugcuggacagccagggcagaagagacaucaagcugaucgacaucgcccugagcaaggccgacagcagaagauucgagaacgccgugugggaccagugcaaggaccugugccacaugcacaccggcguggugguggagaagaagaagagaggcggcaaggaggagaucaccccccacugcgcccugauggacugcaucauguacgacgccgccgugagcggcggccugaacauccccgugcugagagccgugcugcccagagacaugguguucagaaccagcagccccaagguggugcugugaggacuagucccuguucccagagcccacuuuuuuuucuuuuuuugaaauaaaauagccugucuuucagaucucaaaggcucuuuucagagccaccaaaaaaaaaaaaaaaaaaaaaaaaaaaaaaaaaaaaaaaaaaaaaaaaaaaaaaaaaaaaaaaaaaaaaaaaaaaaaaaaaaaaaaaaaaaaaaaaaaaaa

SEQ ID NO: 21276 - RNA, 2052 nt, Artificial Sequence
  mRNA product Design a-2 (hSL-A100) comprising derived and/or modified sequence from LASV(ISTH2010-NIG-2012;Clade II)__AIT17483__SP-IgE_NP(2-569) (opt4)
aggagaguccgcucagccagguugcagaagcggcuuagcguguguccuaaucuucucucugcguguagguaggccugugccgcaaacaagcuuaccauggacuggaccuggauccuguuccugguggccgccgccaccagagugcacagcagcgccagcaaggaggugaagagcuuccuguggacccagagccugagaagagagcugagcggcuacugcagcaacaucaagcugcagguggugaaggacgcccaggcccugcugcacggccuggacuucagcgaggugagcaacgugcagagacugaugagaaagcagaagagagacgacagcgaccugaagagacugagagaccugaaccaggccgugaacaaccugguggagcugaagagcacccagcagaagagcauccugagagugggcacccugaccagcgacgaccugcugacccuggccgccgaccuggagaagcugaagagcaaggugaucagaaccgagagaccccugagcagcggcguguacaugggcaaccugagcacccagcagcuggagcagagaagagcccugcugaaccugaucggcauggugggcggcgcccagggcacccagcccggcagagacggcguggugagagugugggacgugaagaaccccgaccugcugaacaaccaguucggcaccaugcccagccugacccuggccugccugaccaagcagggccagguggaccugaacgacgccgugcuggcccugaccgaccugggccugaucuacaccgccaaguaccccaacagcagcgaccuggacagacugagccagagccaccccauccugaacaugguggacaccaagaagagcagccugaacaucagcggcuucaacuucagccugggcgccgccgugaaggccggcgccugcaugcuggacggcggcaacaugcuggagaccaucaaggugaccccccagaccauggacggcauccugaagagcauccugaaggugaagaagagccugggcauguucgugagcgacacccccggcgagagaaaccccuacgagaacauccuguacaagaucugccugagcggcgacggcuggcccuacaucgccagcagaaccagcaucgugggcagagccugggagaacaccaccguggaccuggagagcgacggcaagccccacaaggugggcaccgccggcagcaacaagagccugcagagcgccggcuuccccaccggccugaccuacagccagcugaugacccugaaggacagcaugaugcagcuggaccccagcgccaagaccuggaucgacaucgagggcagacccgaggaccccguggagaucgcccuguaccagcccaugagcggcugcuacauccacuucuucagagagcccaccgaccugaagcaguucaagcaggacgccaaguacagccacggcaucgacguggccgaccuguuccccgcccagcccggccugaccagcgccgugaucgaggcccugcccagaaacauggugcugaccugccagggcagcgacgacaucaagagacugcuggacagccagggcagaagagacaucaagcugaucgacaucgcccugagcaaggccgacagcagaagauucgagaacgccgugugggaccagugcaaggaccugugccacaugcacaccggcguggugguggagaagaagaagagaggcggcaaggaggagaucaccccccacugcgcccugauggacugcaucauguacgacgccgccgugagcggcggccugaacauccccgugcugagagccgugcugcccagagacaugguguucagaaccagcagccccaagguggugcugugaggacuagucccuguucccagagcccacuuuuuuuucuuuuuuugaaauaaaauagccugucuuucagaucucaaaggcucuuuucagagccaccaaaaaaaaaaaaaaaaaaaaaaaaaaaaaaaaaaaaaaaaaaaaaaaaaaaaaaaaaaaaaaaaaaaaaaaaaaaaaaaaaaaaaaaaaaaaaaaaaaaaa

SEQ ID NO: 21277 - RNA, 2052 nt, Artificial Sequence
  mRNA product Design a-2 (hSL-A100) comprising derived and/or modified sequence from LASV(Lassa virus/H.sapiens-wt/NGA/2015/ISTH_0543;Clade II)__AVO03640__SP-IgE_NP(2-569) (opt4)
aggagaguccgcucagccagguugcagaagcggcuuagcguguguccuaaucuucucucugcguguagguaggccugugccgcaaacaagcuuaccauggacuggaccuggauccuguuccugguggccgccgccaccagagugcacagcagcgccagcaaggaggugaagagcuuccuguggacccagagccugagaagagagcugagcggcuacugcagcaacaucaagcugcagguggugaaggacgcccaggcccugcugcacggccuggacuucagcgaggugagcaacgugcagagacugaugagaaagcagaagagagacgacagcgaccugaagagacugagagaccugaaccaggccgugaacaaccugguggagcugaagagcacccagcagaagagcauccugagagugggcacccugaccagcgacgaccugcugacccuggccgccgaccuggagaagcugaagagcaaggugaucagaaccgagagaccccugagcagcggcguguacaugggcaaccugagcacccagcagcuggagcagagaagagcccugcugaacaugaucggcauggugggcggcgcccagggcacccagcccggcagagacggcguggugagagugugggacgugaagaaccccgaccugcugaacaaccaguucggcaccaugcccagccugacccuggccugccugaccaagcagggccagguggaccugaacgacgccgugcuggcccugaccgaccugggccugaucuacaccgccaaguaccccaacagcagcgaccuggacagacugagccagagccaccccauccugaacaugguggacaccaagaagagcagccugaacaucagcggcuacaacuucagccugggcgccgccgugaaggccggcgccugcaugcuggacggcggcaacaugcuggagaccaucaaggugaccccccagaccauggacggcauccugaagagcauccugaaggugaagaagagccugggcauguucgugagcgacacccccggcgagagaaaccccuacgagaacauccuguacaagaucugccugagcggcgacggcuggcccuacaucgccagcagaaccagcaucgugggcagagccugggagaacaccaccguggaccuggagagcgacggcaagccccagaaggugggcagcgccggcagcaacaagagccugcagagcgccggcuuccccaccggccugaccuacagccagcugaugacccugaaggacagcaugaugcagcuggaccccagcgccaagaccuggaucgacaucgagggcagacccgaggaccccguggagaucgcccuguaccagcccaugagcggcugcuacauccacuucuucagagagcccaccgaccugaagcaguucaagcaggacgccaaguacagccacggcaucgacguggccgaccuguuccccgcccagcccggccugaccagcgccgugaucgaggcccugcccagaaacauggugcugaccugccagggcagcgacgacaucaagagacugcuggacagccagggcagaaaggacaucaagcugaucgacaucgcccugagcaaggccgacagcagaagauucgagaacgccgugugggaccagugcaaggaccugugccacaugcacaccggcguggugguggagaagaagaagagaggcggcaaggaggagaucaccccccacugcgcccugauggacugcaucauguacgacgccgccgugagcggcggccugaacauccccgugcugagagccgugcugcccagagacaugguguucagaaccagcagccccaagguggugcugugaggacuagucccuguucccagagcccacuuuuuuuucuuuuuuugaaauaaaauagccugucuuucagaucucaaaggcucuuuucagagccaccaaaaaaaaaaaaaaaaaaaaaaaaaaaaaaaaaaaaaaaaaaaaaaaaaaaaaaaaaaaaaaaaaaaaaaaaaaaaaaaaaaaaaaaaaaaaaaaaaaaaa

SEQ ID NO: 21278 - RNA, 2052 nt, Artificial Sequence
  mRNA product Design a-2 (hSL-A100) comprising derived and/or modified sequence from LASV(Lassa virus/H.sapiens-wt/NGA/2016/ISTH_0009;Clade II)__AVO03572__SP-IgE_NP(2-569) (opt4)
aggagaguccgcucagccagguugcagaagcggcuuagcguguguccuaaucuucucucugcguguagguaggccugugccgcaaacaagcuuaccauggacuggaccuggauccuguuccugguggccgccgccaccagagugcacagcagcgccagcaaggaggugaagagcuuccuguggacccagagccugagaagagagcugagcggcuacugcagcaacaucaagcugcagguggugaaggacgcccaggcccugcugcacggccuggacuucagcgaggugagcaacgugcagagacugaugagaaagcagaagagagacgacagcgaccugaagagacugagagaccugaaccaggccgugaacaaccugguggagcugaagagcacccagcagaagagcauccugagagugggcacccugaccagcgacgaccugcugacccuggccgccgaccuggagaagcugaagagcaaggugaucagaaccgagagaccccugagcagcggcguguacaugggcaaccugagcacccagcagcuggagcagagaagagcccugcugaacaugaucggcauggugggcggcgcccagggcacccagcccggcagagacggcguggugagagugugggacgugaagaaccccgaccugcugaacaaccaguucggcaccaugcccagccugacccuggccugccugaccaagcagggccagguggaccugaacgacgccgugcuggcccugaccgaccugggccugaucuacaccgccaaguaccccaacagcagcgaccuggacagacugagccagagccaccccauccugaacaugguggacaccaagaagagcagccugaacaucagcggcuacaacuucagccugggcgccgccgugaaggccggcgccugcaugcuggacggcggcaacaugcuggagaccaucaaggugaccccccagaccauggacggcauccugaagagcauccugaaggugaagaagagccugggcauguucgugagcgacacccccggcgagagaaaccccuacgagaacauccuguacaagaucugccugagcggcgacggcuggcccuacaucgccagcagaaccagcaucgugggcagagccugggagaacaccaccguggaccuggagagcgacggcaagccccagaaggugggcagcgccggcagcaacaagagccugcagagcgccggcuuccccaccggccugaccuacagccagcugaugacccugaaggacagcaugaugcagcuggaccccagcgccaagaccuggaucgacaucgagggcagacccgaggaccccguggagaucgcccuguaccagcccaugagcggcugcuacauccacuucuucagagagcccaccgaccugaagcaguucaagcaggacgccaaguacagccacggcaucgacguggccgaccuguuccccgcccagcccggccugaccagcgccgugaucgaggcccugcccagaaacauggugcugaccugccagggcagcgacgacaucaagagacugcuggacagccagggcagaagagacaucaagcugaucgacaucgcccugagcaaggccgacagcagaagauucgagaacgccgugugggaccagugcaaggaccugugccacaugcacaccggcguggugguggagaagaagaagagaggcggcaaggaggagaucaccccccacugcgcccugauggacugcaucauguacgacgccgccgugagcggcggccugaacauccccgugcugagagccgugcugcccagagacaugguguucagaaccagcagccccaagguggugcugugaggacuagucccuguucccagagcccacuuuuuuuucuuuuuuugaaauaaaauagccugucuuucagaucucaaaggcucuuuucagagccaccaaaaaaaaaaaaaaaaaaaaaaaaaaaaaaaaaaaaaaaaaaaaaaaaaaaaaaaaaaaaaaaaaaaaaaaaaaaaaaaaaaaaaaaaaaaaaaaaaaaaa

SEQ ID NO: 21279 - RNA, 2052 nt, Artificial Sequence
  mRNA product Design a-2 (hSL-A100) comprising derived and/or modified sequence from LASV(Lassa virus/H.sapiens-wt/NGA/2016/ISTH_0017;Clade II)__AVO03568__SP-IgE_NP(2-569) (opt4)
aggagaguccgcucagccagguugcagaagcggcuuagcguguguccuaaucuucucucugcguguagguaggccugugccgcaaacaagcuuaccauggacuggaccuggauccuguuccugguggccgccgccaccagagugcacagcagcgccagcaaggaggugaagagcuuccuguggacccagagccugagaagagagcugagcggcuacugcagcagcaucaagcugcagguggugaaggacgcccaggcccugcugcacggccuggacuucagcgaggugagcaacgugcagagacugaugagaaagcagaagagagacgacagcgaccugaagagacugagagaccugaaccaggccgugaacaaccugguggagcugaagagcacccagcagaagagcauccugagagugggcacccugaccagcgacgaccugcugacccuggccgccgaccuggagaagcugaagagcaaggugaucagaaccgagagaccccugagcagcggcguguacaugggcaaccugagcacccagcagcuggagcagagaagagcccugcugaacaugaucggcauggccggcggcgcccagggcacccagcccggcagagacggcguggugagagugugggacgugaagaaccccgaccugcugaacaaccaguucggcaccaugcccagccugacccuggccugccugaccaagcagggccagguggaccugaacgacgccgugcuggcccugaccgaccugggccugaucuacaccgccaaguaccccaacagcagcgaccuggacagacugagccagagccaccccauccugaacaugguggacaccaagaagagcagccugaacaucagcggcuacaacuucagccugggcgccgccgugaaggccggcgccugcaugcuggacggcggcaacaugcuggagaccaucaaggugaccccccagaccauggacggcauccugaagagcauccugaaggugaagagaagccugggcauguucgugagcgacgcccccggcgagagaaaccccuacgagaacauccuguacaagaucugccugagcggcgacggcuggcccuacaucgccagcagaaccagcaucgugggcagagccugggagaacaccaccguggaccuggagagcgacggcaagccccagaaggugggcgccaccggcagcaacaagagccugcagagcgccggcuuccccaccggccugaccuacagccagcugaugacccugaaggacagcaugaugcagcuggaccccagcgccaagaccuggaucgacaucgagggcagacccgaggaccccguggagguggcccuguaccagcccgugagcggcugcuacauccacuucuucagagagcccaccgaccugaagcaguucaagcaggacgccaaguacagccacggcaucgacguggccgaccuguuccccgcccagcccggccugaccagcgccgugaucgaggcccugcccagaaacauggugcugaccugccagggcagcgacgacaucaagaagcugcuggacagccagggcagaaaggacaucaagcugaucgacaucgcccugagcaaggccgacagcagaagauucgagaacgccgugugggaccagugcaaggaccugugccacaugcacaccggcguggugguggagaagaagaagagaggcggcaaggaggagaucaccccccacugcgcccugauggacugcaucauguacgacgccgccgugagcggcggccugaacauccccgugcugagagccgugcugcccagagacaugguguucagaaccagcagccccaagguggugcugugaggacuagucccuguucccagagcccacuuuuuuuucuuuuuuugaaauaaaauagccugucuuucagaucucaaaggcucuuuucagagccaccaaaaaaaaaaaaaaaaaaaaaaaaaaaaaaaaaaaaaaaaaaaaaaaaaaaaaaaaaaaaaaaaaaaaaaaaaaaaaaaaaaaaaaaaaaaaaaaaaaaaa

SEQ ID NO: 21280 - RNA, 2052 nt, Artificial Sequence
  mRNA product Design a-2 (hSL-A100) comprising derived and/or modified sequence from LASV(Lassa virus/H.sapiens-wt/NGA/2018/ISTH_0959;Clade II)__AVV65100__SP-IgE_NP(2-569) (opt4)
aggagaguccgcucagccagguugcagaagcggcuuagcguguguccuaaucuucucucugcguguagguaggccugugccgcaaacaagcuuaccauggacuggaccuggauccuguuccugguggccgccgccaccagagugcacagcagcgccagcaaggaggugaagagcuuccuguggacccagagccugagaagagagcugagcggcuacugcagcaacaucaagcugcagguggugaaggacgcccaggcccugcugcacggccuggacuucagcgaggugagcaacgugcagagacugaugagaaagcagaagagagacgacagcgaccugaagagacugagagaccugaaccaggccgugaacaaccugguggagcugaagagcacccagcagaagagcauccugagagugggcacccugaccagcgacgaccugcugacccuggccgccgaccuggagaagcugaagagcaaggugaucagaaccgagagaccccugagcagcggcguguacaugggcaaccugagcacccagcagcuggagcagagaagagcccugcugaaccugaucggcauggugggcggcgcccagggcacccagcccggcagagacggcguggugagagugugggacgugaagaaccccgaccugcugaacaaccaguucggcaccaugcccagccugacccuggccugccugaccaagcagggccagguggaccugaacgacguggugcuggcccugaccgaccugggccugaucuacaccgccaaguaccccaacagcagcgaccuggacagacugagccagagccaccccauccugaacaugguggacaccaagaagagcagccugaacaucagcggcuucaacuucagccugggcgccgccgugaaggccggcgccugcaugcuggacggcggcaacaugcuggagaccaucaaggugaccccccagaccauggacggcauccugaagagcauccugaaggugaagaagagccugggcauguucgugagcgacacccccggcgagagaaaccccuacgagaacauccuguacaagaucugccugagcggcgacggcuggcccuacaucgccagcagaaccagcaucgugggcagagccugggagaacaccaccguggaccuggagagcgacggcaagccccacaaggugggcaccgccggcagcaacaagagccugcagagcgccggcuuccccaccggccugaccuacagccagcugaugacccugaaggacagcaugaugcagcuggaccccagcgccaagaccuggaucgacaucgagggcagacccgaggaccccguggagaucgcccuguaccagcccaugagcggcugcuacauccacuucuucagagagcccaccgaccugaagcaguucaagcaggacgccaaguacagccacggcaucgacguggccgaccuguuccccgcccagcccggccugaccagcgccgugaucgaggcccugcccagaaacauggugcugaccugccagggcagcgacgacaucaagagacugcuggacagccagggcagaaaggacaucaagcugaucgacaucgcccugagcaagaccgacagcagaagauucgagaacgccgugugggaccagugcaaggaccugugccacaugcacaccggcguggugguggagaagaagaagagaggcggcaaggaggagaucaccccccacugcgcccugauggacugcaucauguacgacgccgccgugagcggcggccugaacauccccgugcugagagccgugcugcccagagacaugguguucagaaccagcagccccaagguggugcugugaggacuagucccuguucccagagcccacuuuuuuuucuuuuuuugaaauaaaauagccugucuuucagaucucaaaggcucuuuucagagccaccaaaaaaaaaaaaaaaaaaaaaaaaaaaaaaaaaaaaaaaaaaaaaaaaaaaaaaaaaaaaaaaaaaaaaaaaaaaaaaaaaaaaaaaaaaaaaaaaaaaaa

SEQ ID NO: 21281 - RNA, 2052 nt, Artificial Sequence
  mRNA product Design a-2 (hSL-A100) comprising derived and/or modified sequence from LASV(LASV003-NIG-2008;Clade II)__AIT17581__SP-IgE_NP(2-569) (opt4)
aggagaguccgcucagccagguugcagaagcggcuuagcguguguccuaaucuucucucugcguguagguaggccugugccgcaaacaagcuuaccauggacuggaccuggauccuguuccugguggccgccgccaccagagugcacagcagcgccagcaaggaggugaagagcuuccuguggacccagagccugagaagagagcugagcggcuacugcagcagcaucaagcugcagguggugaaggacgcccaggcccugcugcacggccuggacuucagcgaggugagcaacgugcagagacugaugagaaagcagaagagagacgacagcgaccugaagagacugagagaccugaaccaggccgugaacaaccugguggagcugaagagcacccagcagaagagcgugcugagagugggcacccugaccagcgacgaccugcugacccuggccgccgaccuggagaagcugaagagcaaggugaucagaaccgagagaccccugagcagcggcguguacaugggcaaccugagcgcccagcagcuggagcagagaagaacccugcugaacaugaucggcauggugggcggcgcccagggcacccagcccggcagagacggcguggugagagugugggacgugaagaaccccgaccugcugaacaaccaguucggcaccaugcccagccugacccuggccugccugaccaagcagggccagguggaccugaacgacguggugcuggcccugaccgaccugggccugaucuacaccgccaaguaccccaacagcagcgaccuggacagacugagccagagccaccccauccugagcaugguggacaccaagaagagcagccugaacaucagcggcuacaacuucagccugggcgccgccgugaaggccggcgccugcaugcuggacggcggcaacaugcuggagaccaucaaggugaccccccagaccauggacggcauccugaagagcauccugaaggugaagaagagccugggcauguucgugagcgacacccccggcgagagaaaccccuacgagaacauccuguacaagaucugccugagcggcgacggcuggcccuacaucgccagcagaaccagcaucgugggcagagccugggagaacaccaccguggaccuggagagcgacggcaagccccagaaggugggcaccgccggcagcaacaagagccugcagagcgccggcuuccccaccggccugaccuacagccagcugaugacccugaaggacagcaugaugcagcuggaccccagcgccaagaccuggaucgacaucgagggcagacccgaggaccccguggagaucgcccuguaccagcccaugagcggcugcuacauccacuucuucagagagcccaccgaccugaagcaguucaagcaggacgccaaguacagccacggcaucgacgugaccgaccuguuccccgcccagcccggccugaccagcgccgugaucgaggcccugcccagaaacauggugcugaccugccagggcagcgacgacaucaagagacugcuggacagccagggcagaagagacaucaagcugaucgacaucgcccugagcaaggccgacagcagaagauucgagaacgccgugugggaccagugcaaggaccugugccacaugcacaccggcguggugguggagaagaagaagagaggcggcaaggaggagaucaccccccacugcgcccugauggacugcaucauguacgacgccgccgugagcggcggccugaacauccccgugcugagagccgugcugcccagagacaugguguucagaaccagcagccccaagguggugcugugaggacuagucccuguucccagagcccacuuuuuuuucuuuuuuugaaauaaaauagccugucuuucagaucucaaaggcucuuuucagagccaccaaaaaaaaaaaaaaaaaaaaaaaaaaaaaaaaaaaaaaaaaaaaaaaaaaaaaaaaaaaaaaaaaaaaaaaaaaaaaaaaaaaaaaaaaaaaaaaaaaaaa

SEQ ID NO: 21282 - RNA, 2052 nt, Artificial Sequence
  mRNA product Design a-2 (hSL-A100) comprising derived and/or modified sequence from LASV(LASV035-NIG-2009;Clade II)__AIT17589__SP-IgE_NP(2-569) (opt4)
aggagaguccgcucagccagguugcagaagcggcuuagcguguguccuaaucuucucucugcguguagguaggccugugccgcaaacaagcuuaccauggacuggaccuggauccuguuccugguggccgccgccaccagagugcacagcagcgccagcaaggaggugaagagcuuccuguggacccagagccugagaagagagcugagcggcuacugcagcagcaucaagcugcagguggugaaggacgcccaggcccugcugcacggccuggacuucagcgaggugagcaacgugcagagacugaugagaaagcagaagagagacgacagcgaccugaagagacugagagaccugaaccaggccgugaacaaccugguggagcugaagagcacccagcagaagagcauccugagagugggcacccugaccagcgacgaccugcugacccuggccgccgaccuggagaagcugaagagcaaggugaucagaaccgagagaccccugagcagcggcguguacaugggcaaccugagcgcccagcagcuggagcagagaagagcccugcugaacaugaucggcauggugggcggcgcccagggcacccagcccggcagagacggcguggugagagugugggacgugaagaaccccgaccugcugaacaaccaguucggcaccaugcccagccugacccuggccugccugaccaagcagggccagguggaccugaacgacgccgugcuggcccugaccgaccugggccugaucuacaccgccaaguaccccaacagcagcgaccuggacagacugagccagagccaccccauccugaacaugguggacaccaagaagagcagccugaacaucagcggcuacaacuucagccugggcgccgccgugaaggccggcgccugcaugcuggacggcggcaacaugcuggagaccaucaaggugaccccccagaccauggacggcauccugaagagcauccugaaggugaagagaagccugggcauguucgugagcgacacccccggcgagagaaaccccuacgagaacauccuguacaagaucugccugagcggcgacggcuggcccuacaucgccagcagaaccagcaucgugggcagagccugggagaacaccaccguggaccuggagagcgacggcaagccccagaaggugggcaccaccggcagcaacaagagccugcagagcgccggcuuccccaccggccugaccuacagccagcugaugacccugaaggacagcaugaugcagcuggaccccagcgccaagaccuggaucgacaucgagggcagacccgaggaccccguggagaucgcccuguaccagcccaugagcggcugcuacauccacuucuucagagagcccaccgaccugaagcaguucaagcaggacgccaaguacagccacggcaucgacguggccgaccuguuccccgcccagcccggccugaccagcgccgugaucgaggcccugcccagaaacauggugcugaccugccagggcagcgacgacaucaagaagcugcuggacagccagggcagaagagacaucaagcugaucgacaucgcccugagcaaggccgacagcagaaaguucgagaacgccgugugggaccagugcaaggaccugugccacaugcacaccggcguggugguggagaagaagaagagaggcggcaaggaggagaucaccccccacugcgcccugauggacugcaucauguacgacgccgccgugagcggcggccugaacauccccgugcugagagccgugcugcccagagacaugguguucagaaccagcagccccaagguggugcugugaggacuagucccuguucccagagcccacuuuuuuuucuuuuuuugaaauaaaauagccugucuuucagaucucaaaggcucuuuucagagccaccaaaaaaaaaaaaaaaaaaaaaaaaaaaaaaaaaaaaaaaaaaaaaaaaaaaaaaaaaaaaaaaaaaaaaaaaaaaaaaaaaaaaaaaaaaaaaaaaaaaaa

SEQ ID NO: 21283 - RNA, 2052 nt, Artificial Sequence
  mRNA product Design a-2 (hSL-A100) comprising derived and/or modified sequence from LASV(LASV1000-NIG-2009;Clade II)__AIT17783__SP-IgE_NP(2-569) (opt4)
aggagaguccgcucagccagguugcagaagcggcuuagcguguguccuaaucuucucucugcguguagguaggccugugccgcaaacaagcuuaccauggacuggaccuggauccuguuccugguggccgccgccaccagagugcacagcagcgccagcaaggaggugaagagcuuccuguggacccagagccugagaagagagcugagcggcuacugcagcaacaucaagcugcagguggugaaggacgcccaggcccugcugcacggccuggacuucagcgaggugagcaacgugcagagacugaugagaaagcagaagagagacgacagcgaccugaagagacugagagaccugaaccaggccgugaacaaccugguggagcugaagagcacccagcagaagagcauccugagagugggcacccugaccagcgacgaccugcugacccuggccgccgaccuggagaagcugaagagcaaggugaucagaaccgagagaccccugagcagcggcguguacaugggcaaccugagcacccagcagcuggagcagagaagagcccugcugaacaugaucggcauggugggcggcgcccagggcacccagcccggcagagacggcguggugagagugugggacgugaagaaccccgaccugcugaacaaccaguucggcaccaugcccagccugacccuggccugccugaccaagcagggccagguggaccugaacgacguggugcuggcccugaccgaccugggccugaucuacaccgccaaguaccccaacagcagcgaccuggacagacugagccagagccaccccauccugaacaugguggacaccaagaagagcagccugaacaucagcggcuacaacuucagccugggcgccgccgugaaggccggcgccugcaugcuggacggcggcaacaugcuggagaccaucaaggugaccccccagaccauggacggcauccugaagagcauccugaaggugaagaagagccugggcauguucgugagcgacacccccggcgagagaaaccccuacgagaacauccuguacaagaucugccugagcggcgacggcuggcccuacaucgccagcagaaccagcaucgugggcagagccugggagaacaccaccguggaccuggagagcgacggcaagccccagaaggugggcaccgccggcagcaacaagagccugcagagcgccggcuuccccaccggccugaccuacagccagcugaugacccugaaggacagcaugaugcagcuggaccccagcgccaagaccuggaucgacaucgagggcagacccgaggaccccguggagaucgcccuguaccagcccgugagcggcugcuacauccacuucuucagagagcccaccgaccugaagcaguucaagcaggacgccaaguacagccacggcaucgacguggccgaccuguuccccgcccagcccggccugaccagcgccgugaucgaggcccugcccagaaacauggugcugaccugccagggcagcgacgacaucaagagacugcuggacagccagggcagaagagacaucaagcugaucgacaucgcccugagcaaggccgacagcagaagauucgagaacgccgugugggaccagugcaaggaccugugccacaugcacaccggcguggugguggagaagaagaagagaggcggcaaggaggagaucaccccccacugcgcccugauggacugcaucauguacgacgccgccgugagcggcggccugaacauccccgugcugagagccgugcugcccagagacaugguguucagaaccagcagccccaagguggugcugugaggacuagucccuguucccagagcccacuuuuuuuucuuuuuuugaaauaaaauagccugucuuucagaucucaaaggcucuuuucagagccaccaaaaaaaaaaaaaaaaaaaaaaaaaaaaaaaaaaaaaaaaaaaaaaaaaaaaaaaaaaaaaaaaaaaaaaaaaaaaaaaaaaaaaaaaaaaaaaaaaaaaa

SEQ ID NO: 21284 - RNA, 2052 nt, Artificial Sequence
  mRNA product Design a-2 (hSL-A100) comprising derived and/or modified sequence from LASV(LASV221-NIG-2010;Clade II)__AIT17625__SP-IgE_NP(2-569) (opt4)
aggagaguccgcucagccagguugcagaagcggcuuagcguguguccuaaucuucucucugcguguagguaggccugugccgcaaacaagcuuaccauggacuggaccuggauccuguuccugguggccgccgccaccagagugcacagcagcgccagcaaggaggugaagagcuuccuguggacccagagccugagaagagagcugagcggcuacugcagcagcaucaagcugcagguggugaaggacgcccaggcccugcugcacggccuggacuucagcgaggugagcaacgugcagagacugaugagaaagcagagaagagacgacagcgaccugaagagacugagagaccugaaccaggccgugaacaaccugguggagcugaagagcacccagcagaagagcauccugagagugggcacccugaccagcgacgaccugcugacccuggccgccgaccuggagaagcugaagagcaaggugaucagaaccgagagaccccugagcagcggcguguacaugggcaaccugagcacccagcagcuggagcagagaagagcccugcugaacaugaucggcauggugggcggcgcccagggcacccagcccggcagagacggcguggugagagugugggacgugaagaaccccgaccugcugaacaaccaguucggcaccaugcccagccugacccuggccugccugaccaagcagggccagguggaccugaacgacgccgugcuggcccugaccgaccugggccugaucuacaccgccaaguaccccaacagcagcgaccuggacagacugagccagagccaccccauccugaacaugguggacaccaagaagagcagccugaacaucagcggcuacaacuucagccugggcgccgccgugaaggccggcgccugcaugcuggacggcggcaacaugcuggagaccaucaaggugaccccccagaccguggacggcauccugaagagcauccugaaggugaagagaagccugggcauguucgugagcgacacccccggcgagagaaaccccuacgagaacauccuguacaagaucugccugagcggcgacggcuggcccuacaucgccagcagaaccagcaucgugggcagagccugggagaacaccaccguggaccuggagagcgacggcaagccccagaaggugggcaccgccggcagcaacaagagccugcagagcgccggcuuccccaccggccugaccuacagccagcugaugacccugaaggacagcaugaugcagcuggaccccagcgccaagaccuggaucgacaucgagggcagacccgaggaccccguggagaucgcccuguaccagcccaugagcggcugcuacauccacuucuucagagagcccaccgaccugaagcaguucaagcaggacgccaaguacagccacggcaucgacguggccgaccuguuccccgcccagcccggccugaccagcgccgugaucgaggcccugcccagaaacauggugcugaccugccagggcagcgacgacaucaagagacugcuggacagccagggcagaagagacaucaagcugaucgacaucgcccugagcaaggccgacagcagaaaguucgagaacgccgugugggaccagugcaaggaccugugccacaugcacaccggcguggugguggagaagaagaagagaggcggcaaggaggagaucaccccccacugcgcccugauggacugcaucauguacgacgccgccgugagcggcggccugaacauccccgugcugagagccgugcugcccagagacaugguguucagaaccagcagccccaagguggugcugugaggacuagucccuguucccagagcccacuuuuuuuucuuuuuuugaaauaaaauagccugucuuucagaucucaaaggcucuuuucagagccaccaaaaaaaaaaaaaaaaaaaaaaaaaaaaaaaaaaaaaaaaaaaaaaaaaaaaaaaaaaaaaaaaaaaaaaaaaaaaaaaaaaaaaaaaaaaaaaaaaaaaa

SEQ ID NO: 21285 - RNA, 2052 nt, Artificial Sequence
  mRNA product Design a-2 (hSL-A100) comprising derived and/or modified sequence from LASV(LASV237-NIG-2010;Clade II)__AIT17639__SP-IgE_NP(2-569) (opt4)
aggagaguccgcucagccagguugcagaagcggcuuagcguguguccuaaucuucucucugcguguagguaggccugugccgcaaacaagcuuaccauggacuggaccuggauccuguuccugguggccgccgccaccagagugcacagcagcgccagcaaggaggugaagagcuuccuguggacccagagccugagaagagagcugagcggcuacugcagcaacaucaagcugcagguggugaaggacgcccaggcccugcugcacggccuggacuucagcgaggugagcaacgugcagagacugaugagaaagcagaagagagacgacagcgaccugaagagacugagagaccugaaccaggccgugaacaaccugguggagcugaagagcacccagcagaagagcauccugagagugggcacccugaccagcgacgaccugcugacccuggccgccgaccuggagaagcugaagagcaaggugaucagaaccgagagaccccugagcagcggcguguacaugggcaaccugagcacccagcagcuggagcagagaagagcccugcugaacaugaucggcauggugggcggcgcccagggcacccagcccggcagagacggcguggugagagugugggacgugaagaaccccgaccugcugaacaaccaguucggcaccaugcccagccugacccuggccugccugaccaagcagggccagguggaccugaacgacgccgugcuggcccugaccgaccugggccugaucuacaccgccaaguaccccaacagcagcgaccuggacagacugagccagagccaccccauccugaacaugguggacaucaagaagagcagccugaacaucagcggcuacaacuucagccugggcgccgccgugaaggccggcgccugcaugcuggacggcggcaacaugcuggagaccaucaaggugaccccccagaccauggacggcauccugaagagcauccugaaggugaagagaagccugggcauguucgugagcgacacccccggcgagagaaaccccuacgagaacauccuguacaagaucugccugagcggcgacggcuggcccuacaucgccagcagaaccagcaucgugggcagagccugggagaacaccaccguggaccuggagagcgacggcaagccccagaaggugggcagcgccggcagcaacaagagccugcagagcgccggcuuccccaccggccugaccuacagccagcugaugacccugaaggacagcaugaugcagcuggaccccagcgccaagaccuggaucgacaucgagggcagacccgaggaccccguggagaucgcccuguaccagcccaugagcggcugcuacauccacuucuucagagagcccaccgaccugaagcaguucaagcaggacgccaaguacagccacggcaucgacguggccgaccuguuccccgcccagcccggccugaccagcgccgugaucgaggcccugcccagaaacauggugcugaccugccagggcagcgacgacaucaagagacugcuggacagccagggcagaagagacaucaagcugaucgacaucgcccugagcaaggccgacagcagaagauucgagaacgccgugugggaccagugcaaggaccugugccacaugcacaccggcguggugguggagaagaagaagagaggcggcaaggaggagaucaccccccacugcgcccugauggacugcaucauguacgacgccgccgugagcggcggccugaacauccccgugcugagagccgugcugcccagagacaugguguucagaaccagcagccccaagguggugcugugaggacuagucccuguucccagagcccacuuuuuuuucuuuuuuugaaauaaaauagccugucuuucagaucucaaaggcucuuuucagagccaccaaaaaaaaaaaaaaaaaaaaaaaaaaaaaaaaaaaaaaaaaaaaaaaaaaaaaaaaaaaaaaaaaaaaaaaaaaaaaaaaaaaaaaaaaaaaaaaaaaaaa

SEQ ID NO: 21286 - RNA, 2052 nt, Artificial Sequence
  mRNA product Design a-2 (hSL-A100) comprising derived and/or modified sequence from LASV(LASV253-NIG-2011;Clade II)__AIT17671__SP-IgE_NP(2-569) (opt4)
aggagaguccgcucagccagguugcagaagcggcuuagcguguguccuaaucuucucucugcguguagguaggccugugccgcaaacaagcuuaccauggacuggaccuggauccuguuccugguggccgccgccaccagagugcacagcagcgccagcaaggaggugaagagcuuccuguggacccagagccugagaagagagcugagcggcuacugcagcagcaucaagcugcagguggugaaggacgcccaggcccugcugcacggccuggacuucagcgaggugagcaacgugcagagacugaugagaaagcagaagagagacgacagcgaccugaagagacugagagaccugaaccaggccgugaacaaccugguggagcugaagagcacccagcagaagagcgugcugagagugggcacccugaccagcgacgaccugcugacccuggccgccgaccuggagaagcugaagagcaaggugaucagaaccgagagaccccugagcagcggcguguacaugggcaaccugagcacccagcagcuggagcagagaagagcccugcugaacaugaucggcauggugggcggcgcccagggcacccagcccggcagagacggcguggugagagugugggacgugaagaaccccgaccugcugaacaaccaguucggcaccaugcccagccugacccuggccugccugaccaagcagggccagguggaccugaacgacguggugcuggcccugaccgaccugggccugaucuacaccgccaaguaccccaacagcagcgaccuggacagacugagccagagccaccccauccugaacaugguggacaccaagaagagcagccugaacaucagcggcuacaacuucagccugggcgccgccgugaaggccggcgccugcaugcuggacggcggcaacaugcuggagaccaucaaggugaccccccagaccauggacggcauccugaagagcauccugaaggugaagaagagccugggcauguucgugagcgacacccccggcgagagaaaccccuacgagaacauccuguacaagaucugccugagcggcgacggcuggcccuacaucgccagcagaaccagcaucgugggcagagccugggagaacaccaccguggaccuggagagcgacggcaagccccagaaggugggcaccgccggcagcaacaagagccugcagagcgccggcuuccccaccggccugaccuacagccagcugaugacccugaaggacagcaugaugcagcuggaccccagcgccaagaccuggaucgacaucgagggcagacccgaggaccccguggagaucgcccuguaccagcccaugagcggcugcuacauccacuucuucagagagcccaccgaccugaagcaguucaagcaggacgccaaguacagccacggcaucgacgugaccgaccuguuccccgcccagcccggccugaccagcgccgugaucgaggcccugcccagaaacauggugcugaccugccagggcagcgacgacaucaagagacugcuggacagccagggcagaagagacaucaagcugaucgacaucgcccugagcaaggccgacagcagaagauucgagaacgccgugugggaccagugcaaggaccugugccacaugcacaccggcguggugguggagaagaagaagagaggcggcaaggaggagaucaccccccacugcgcccugauggacugcaucauguacgacgccgccgugagcggcggccugaacauccccgugcugagagccgugcugcccagagacaugguguucagaaccagcagccccaagguggugcugugaggacuagucccuguucccagagcccacuuuuuuuucuuuuuuugaaauaaaauagccugucuuucagaucucaaaggcucuuuucagagccaccaaaaaaaaaaaaaaaaaaaaaaaaaaaaaaaaaaaaaaaaaaaaaaaaaaaaaaaaaaaaaaaaaaaaaaaaaaaaaaaaaaaaaaaaaaaaaaaaaaaaa

SEQ ID NO: 21287 - RNA, 2052 nt, Artificial Sequence
  mRNA product Design a-2 (hSL-A100) comprising derived and/or modified sequence from LASV(LASV254-NIG-2011;Clade II)__AIT17675__SP-IgE_NP(2-569) (opt4)
aggagaguccgcucagccagguugcagaagcggcuuagcguguguccuaaucuucucucugcguguagguaggccugugccgcaaacaagcuuaccauggacuggaccuggauccuguuccugguggccgccgccaccagagugcacagcagcgccagcaaggaggugaagagcuuccuguggacccagagccugagaagagagcugagcggcuacugcagcagcaucaagcugcagguggugaaggacgcccaggcccugcugcacggccuggacuucagcgaggugagcaacgugcagagacugaugagaaagcagaagagagacgacagcgaccugaagagacugagagaccugaaccaggccgugaacaaccugguggagcugaagagcacccagcagaagagcgugcugagagugggcacccugaccagcgacgaccugcugacccuggccgccgaccuggagaagcugaagagcaaggugaucagaaccgagagaccccugagcagcggcguguacaugggcaaccugagcacccagcagcuggagcagagaagagcccugcugaacaugaucggcauggugggcggcgcccagggcacccagcccggcagagacggcguggugagagugugggacgugaagaaccccgaccugcugaacaaccaguucggcaccaugcccagccugacccuggccugccugaccaagcagggccagguggaccugaacgacgccgugcuggcccugaccgaccugggccugaucuacaccgccaaguaccccaacagcagcgaccuggacagacugagccagagccaccccauccugaacaugguggacaccaagaagagcagccugaacaucagcggcuacaacuucagccugggcgccgccgugaaggccggcgccugcaugcuggacggcggcaacaugcuggagaccaucaaggugaccccccagaccauggacggcauccugaagagcauccugaaggugaagaagagccugggcauguucgugagcgacacccccggcgagagaaaccccuacgagaacauccuguacaagaucugccugagcggcgacggcuggcccuacaucgccagcagaaccagcaucgugggcagagccugggagaacaccaucguggaccuggagagcgacggcaagccccagaaggugggcaccgccggcagcaacaagagccugcagagcgccggcuuccccaccggccugaccuacagccagcugaugacccugaaggacagcaugaugcagcuggaccccagcgccaagaccuggaucgacaucgagggcagacccgaggaccccguggagaucgcccuguaccagcccaugagcggcugcuacauccacuucuucagagagcccaccgaccugaagcaguucaagcaggacgccaaguacagccacggcaucgacguggccgaccuguuccccgcccagcccggccugaccagcgccgugaucgaggcccugcccagaaacauggugcugaccugccagggcagcgacgacaucaagagacugcuggacagccagggcagaagagacaucaagcugaucgacaucgcccugagcaaggccgacagcagaagauucgagaacgccgugugggaccagugcaaggaccugugccacaugcacaccggcguggugguggagaagaagaagagaggcggcaaggaggagaucaccccccacugcgcccugauggacugcaucauguacgacgccgccgugagcggcggccugaacauccccgugcugagagccgugcugcccagagacaugguguucagaaccagcagccccaagguggugcugugaggacuagucccuguucccagagcccacuuuuuuuucuuuuuuugaaauaaaauagccugucuuucagaucucaaaggcucuuuucagagccaccaaaaaaaaaaaaaaaaaaaaaaaaaaaaaaaaaaaaaaaaaaaaaaaaaaaaaaaaaaaaaaaaaaaaaaaaaaaaaaaaaaaaaaaaaaaaaaaaaaaaa

SEQ ID NO: 21288 - RNA, 2052 nt, Artificial Sequence
  mRNA product Design a-2 (hSL-A100) comprising derived and/or modified sequence from LASV(Nig08-04;Clade II)__ADU56611__SP-IgE_NP(2-569) (opt4)
aggagaguccgcucagccagguugcagaagcggcuuagcguguguccuaaucuucucucugcguguagguaggccugugccgcaaacaagcuuaccauggacuggaccuggauccuguuccugguggccgccgccaccagagugcacagcagcgccagcaaggaggugaagagcuuccuguggacccagagccugagaagagagcugagcggcuacugcagcaacaucaagcugcagguggugaaggacgcccaggcccugcugcacggccuggacuucagcgaggugagcaacgugcagagacugaugagaaagcagaagagagacgacggcgaccugaagagacugagagaccugaaccaggccgugaacaaccugguggagcugaagagcacccagcagaagagcgugcugagagugggcacccugaccagcgacgaccugcugacccuggccgccgaccuggagaagcugaagagcaaggugaucagaaccgagagaccccugagcagcggcguguacaugggcaaccugagcacccagcagcuggagcagagaaaggcccugcugagcaugaucggcauggugggcggcgcccagggcacccagcccggcagagacggcguggugagagugugggacgugaagaaccccgaccugcugaacaaccaguucggcaccaugcccagccugacccuggccugccugaccaagcagggccagguggaccugaacgacgccgugcuggcccugaccgaccugggccugaucuacaccgccaaguaccccaacagcagcgaccuggacagacugagccagagccaccccauccugaacaugguggacaccaagaagagcagccugaacaucagcggcuacaacuucagccugggcgccgccgugaaggccggcgccugcaugcuggacggcggcaacaugcuggagaccaucaaggugaccccccagaccauggacggcauccugaagagcauccugaaggugaagagaagccugggcauguucgugagcgacacccccggcgagagaaaccccuacgagaacauccuguacaagaucugccugagcggcgacggcuggcccuacaucgccagcagaaccagcaucgugggcagagccugggagaacaccaccguggaccuggagagcgacggcaagccccagaaggugggcaccgccggcagcaacaagagccugcagagcgccggcuuccccaccggccugaccuacagccagcugaugacccugaaggacagcaugaugcagcuggaccccagcgccaagaccuggaucgacaucgagggcagacccgaggaccccguggagaucgcccuguaccagcccaugagcggcugcuacauccacuucuucagagagcccaccgaccugaagcaguucaagcaggacgccaaguacagccacggcaucgacgugaccgaccuguucagcgcccagcccggccugaccagcgccgugaucgaggcccugcccagaaacauggugcugaccugccagggcagcgacgacaucaagaagcugcuggacagccagggcagaagagacaucaagcugaucgacaucagccugaacaaggccgacagcagaagauucgagaacgccgugugggaccagugcaaggaccugugccacaugcacaccggcguggugguggagaagaagaagagaggcggcaaggaggagaucaccccccacugcgcccugauggacugcaucauguucgacgccgccgugagcggcggccugaacauccccauccugagagccgugcugcccagagacaugguguucagaaccagcagccccaagguggugcugugaggacuagucccuguucccagagcccacuuuuuuuucuuuuuuugaaauaaaauagccugucuuucagaucucaaaggcucuuuucagagccaccaaaaaaaaaaaaaaaaaaaaaaaaaaaaaaaaaaaaaaaaaaaaaaaaaaaaaaaaaaaaaaaaaaaaaaaaaaaaaaaaaaaaaaaaaaaaaaaaaaaaa

SEQ ID NO: 21289 - RNA, 2055 nt, Artificial Sequence
  mRNA product Design a-2 (hSL-A100) comprising derived and/or modified sequence from LASV(GA391;Clade III)__AAA46284__SP-IgE_NP(2-570) (opt4)
aggagaguccgcucagccagguugcagaagcggcuuagcguguguccuaaucuucucucugcguguagguaggccugugccgcaaacaagcuuaccauggacuggaccuggauccuguuccugguggccgccgccaccagagugcacagcagcgccagcaaggaggugagaagcugccuguggacccagagccugagaagagagcugagcggcuacugcagcaacaucaagcugcagguggugaaggacgcccaggcccugcugcacggccuggacuucagcgaggugagcaacgugcagagacugaugagaaagcagaagagagacgacggcgaccugaagagacugagagaccugaaccaggccgugaacaaccugguggagcugaagagcacccagcagaagagcgugcugagagugggcacccugagcagcgacgaccugcugauccuggccgccgaccuggagaagcugaagagcaaggugaccagaaccgagagaccccugagcagcggcguguacaugggcaaccugagcagccagcagcuggaccagagaagagcccugcugaacaugaucggcaugaccggcgugagcggcggcggcaagggcgccagcaacggcaucgugagagugugggacgugaagaacgccgagcugcugaacaaccaguucggcaccaugcccagccugacccuggccugccugaccaagcagggccagguggaccugaacgacgccgugcaggcccugaccgaccugggccugaucuacaccgccaaguaccccaacagcagcgaccuggacagacugagccagagccaccccauccugaacaugaucgacaccaagaagagcagccugaacaucagcggcuacaacuucagccugggcgccgccgugaaggccggcgccugcaugcuggacggcggcaacaugcuggagaccaucaaggugagcccccagaccauggacggcauccugaagagcauccugaaggugaagaagagccugggcauguucgugagcgacacccccggcgagagaaaccccuacgagaacauccuguacaagaucugccugagcggcgacggcuggagcuacaucgccagcagaaccagcaucgugggcagagccugggagaacaccgugguggaccuggagcaggacaacaagccccagaagaucggcaacggcggcagcaacaagagccugcagagcgccggcuucgccgccggccugaucuacagccagcugaugacccugaaggacuucaagugcuucaaccugauccccaacgccaagaccuggauggacaucgagggcagacccgaggaccccguggagaucgcccuguaccagcccagcagcggcugcuacgugcacuucuucagagagcccaccgaccugaagcaguucaagcaggacgccaaguacagccacggcagagacgugaccgaccuguucgccgcccagcccggccugaccagcgccgugaucgaggcccugcccagaaacauggugaucaccugccagggcagcgaggacaucagaaagcugcuggagagccagggcagaagagacaucaagcugaucgacaucacccugagcaaggccgacagcagaaaguucgagaacgccgugugggaccaguucaaggaccugugccacaugcacaccggcguggugguggagaagaagaagagaggcggcaaggaggagaucaccccccacugcgcccugauggacugcaucauguucgacgccgccgugagcggcggccuggacgccaaggugcugagaguggugcugcccagagacaugguguucagaaccagcacccccaagguggugcugugaggacuagucccuguucccagagcccacuuuuuuuucuuuuuuugaaauaaaauagccugucuuucagaucucaaaggcucuuuucagagccaccaaaaaaaaaaaaaaaaaaaaaaaaaaaaaaaaaaaaaaaaaaaaaaaaaaaaaaaaaaaaaaaaaaaaaaaaaaaaaaaaaaaaaaaaaaaaaaaaaaaaa

SEQ ID NO: 21290 - RNA, 2052 nt, Artificial Sequence
  mRNA product Design a-2 (hSL-A100) comprising derived and/or modified sequence from LASV(Nig08-A19;Clade III)__ADU56619__SP-IgE_NP(2-569) (opt4)
aggagaguccgcucagccagguugcagaagcggcuuagcguguguccuaaucuucucucugcguguagguaggccugugccgcaaacaagcuuaccauggacuggaccuggauccuguuccugguggccgccgccaccagagugcacagcagcgccagcaaggaggugaagagcuuccuguggacccagagccugagaagagagcugagcggcuacugcagcaacaucaagcugcagguggugaaggacgcccaggcccugcugcacggccuggacuucagcgaggugagcaacgugcagagacugaugagaaagcagaagagagacgacggcgaccugaagagacugagagaccugaaccaggccgugaacaaccugguggagcugaagagcacccagcagaagagcgugcugagagugggcacccugagcagcgacgaccugcuggugcuggccgccgaccuggagaagcugaagagcaagguggugagaaccgagagaccccugagcagcggcaucuacaugggcaaccugagcagccagcagcuggaccagagaaaggcccugcugaacaugaucggcaugaccggcggcaacggcggcagaaacaccaccagcgacggcaucgugagagugugggacgugaagaacgccgagcugcugaacaaccaguucggcaccaugcccagccugacccuggccugccugaccaagcagggccagguggaccugaacgacgccgugcaggcccugaccgaccugggccugaucuacaccgccaaguaccccaacagcagcgaccuggacagacuggcccagagccaccccauccugaacaugaucgacaccaagaagagcagccugaacaucagcggcuacaacuucagccugggcgccgccgugaaggccggcgccugcaugcuggacggcggcaacaugcuggagaccaucaaggugagcccccagaccauggacggcauccugaagagcauccugaaggugaagagaagccugggcauguucaucagcgacacccccggcgagagaaaccccuacgagaacauccuguacaagaucugccugagcggcgacggcuggcccuacaucgccagcagaaccagcaucgugggcagagccugggagaacaccgugguggaccuggagagcgacaacaagccccagaagaccggcaacggcggcagcaacaagagccugcagagcgccggcuucgccgccggccugaccuacagccagcugaugacccugaaggacagcaugcugcagcuggaccccaacgccaagaccuggauggacaucgagggcagacccgaggaccccguggagaucgcccuguaccagcccagcagcggcugcuacauccacuucuucagagagcccaccgaccugaagcaguucaagcaggacgccaaguacagccacggcaucgacgugaccgaccuguucgccgcccagcccggccugaccagcgccgugaucgaggcccugcccagaaacauggugaucaccugccagggcagcgaggacaucagaaagcugcuggagagccagggcagaagagacaucaagcugaucgacaucagccugagcaagguggacagcagaaaguucgagaacgccgugugggaccaguucaaggaccugugccacaugcacaccggcaucgugguggagaagaagaagagaggcggcaaggaggagaucaccccccacugcgcccugauggacugcaucauguucgacgccgccgugagcggcggcguggacgccaaggugcugagagccgugcugcccagagacaugguguucagaaccagcacccccaagguggugcugugaggacuagucccuguucccagagcccacuuuuuuuucuuuuuuugaaauaaaauagccugucuuucagaucucaaaggcucuuuucagagccaccaaaaaaaaaaaaaaaaaaaaaaaaaaaaaaaaaaaaaaaaaaaaaaaaaaaaaaaaaaaaaaaaaaaaaaaaaaaaaaaaaaaaaaaaaaaaaaaaaaaaa

SEQ ID NO: 21291 - RNA, 2052 nt, Artificial Sequence
  mRNA product Design a-2 (hSL-A100) comprising derived and/or modified sequence from LASV(G1180-SLE-2010;Clade IV)__AIT17169__SP-IgE_NP(2-569) (opt4)
aggagaguccgcucagccagguugcagaagcggcuuagcguguguccuaaucuucucucugcguguagguaggccugugccgcaaacaagcuuaccauggacuggaccuggauccuguuccugguggccgccgccaccagagugcacagcagcgccagcaaggagaucaagagcuuccuguggacccagagccugagaagagagcugagcggcuacugcagcaacaucaagcugcagguggugaaggacgcccaggcccugcugcacggccuggacuucagcgaggugagcaacgugcagagacugaugagaaaggagagaagagacgacaacgaccugaagagacugagagaccugaaccaggccgugaacaaccugguggagcugaagagcacccagcagaagagcauccugagagugggcacccugaccagcgacgaccugcugauccuggccgccgaccuggagaagcugaagagcaaggugaucagaaccgagagaccccugagcgccggcguguacaugggcaaccugagcagccagcagcuggaccagagaagagcccugcugagcaugaucggcaugagcagcggcaaccagagagcccaggccggcagagacggcguggugagagugugggacgugaagaacguggagcugcugaacaaccaguucggcaccaugcccagccugacccuggccugccugaccaagcagggccagguggaccugaacgacgccgugcaggcccugaccgaccugggccugaucuacaccgccaaguaccccaacaccagcgaccuggacagacugacccagagccaccccauccugaacaugaucgacaccaagaagagcagccugaacaucagcggcuacaacuucagccugggcgccgccgugaaggccggcgccugcaugcuggacggcggcaacaugcuggagaccaucaaggugagcccccagaccauggacggcauccugaagagcauccugaaggugaagaaggcccugggcauguucaucagcgacacccccggcgagagaaaccccuacgagaacauccuguacaagaucugccugagcggcgacggcuggcccuacaucgccagcagaaccagcaucaccggcagagccugggagaacaccgugguggaccuggagagcgacggcaagccccagaaggccggcagcaacaacagcaacaagagccugcagagcgugggcuucaccgccggccugaccuacagccagcugaugacccugaaggacgccaugcugcagcuggaccccaacgccaagaccuggauggacaucgagggcagacccgaggaccccguggagaucgcccuguaccagcccagcagcggcugcuacauccacuucuucagagagcccaccgaccugaagcaguucaagcaggacgccaaguacagccacggcaucgacgugaccgaccuguucgccgcccagcccggccugaccagcgccgugaucgacgcccugcccagaaacauggugaucaccugccagggcagcgacgacaucagaaagcugcuggagagccagggcagaaaggacaucaagcugaucgacaucgcccugagcaagaccgacagcagaaaguacgagaacgccgugugggaccaguacaaggaccugugccacaugcacaccggcguggugguggagaagaagaagagaggcggcaaggaggagaucaccccccacugcgcccugauggacugcaucauguucgacgccgccgugagcggcggccugaacaccagcgugcugagagccgugcugcccagagacaugguguucagaaccagcacccccagaguggugcugugaggacuagucccuguucccagagcccacuuuuuuuucuuuuuuugaaauaaaauagccugucuuucagaucucaaaggcucuuuucagagccaccaaaaaaaaaaaaaaaaaaaaaaaaaaaaaaaaaaaaaaaaaaaaaaaaaaaaaaaaaaaaaaaaaaaaaaaaaaaaaaaaaaaaaaaaaaaaaaaaaaaaa

SEQ ID NO: 21292 - RNA, 2052 nt, Artificial Sequence
  mRNA product Design a-2 (hSL-A100) comprising derived and/or modified sequence from LASV(G1442-SLE-2011;Clade IV)__AIT17181__SP-IgE_NP(2-569) (opt4)
aggagaguccgcucagccagguugcagaagcggcuuagcguguguccuaaucuucucucugcguguagguaggccugugccgcaaacaagcuuaccauggacuggaccuggauccuguuccugguggccgccgccaccagagugcacagcagcgccagcaaggaggugaagagcuuccuguggacccagagccugagaagagagcugagcggcuacugcagcaacaucaagcugcagguggugaaggacgcccaggcccugcugcacggccuggacuucagcgaggugagcaacgugcagagacugaugagaaagcagagaagagacgacaacgaccugaagagacugagagaccugaaccaggccgugaacaaccugguggagcugaagagcacccagcagaagagcgugcugagagugggcacccugaccagcgacgaccugcuggugcuggccgccgaccuggagaagcugaagagcaaggugaucagaaccgagagaccccugagcgccggcguguacaugggcaaccugagcagccagcagcuggaccagagaagagcccugcugaacaugaucggcaugagcggcggcauccagggcaccagaaccggcagagacggcguggugagagugugggacgugaagaacgccgaccugcugaacaaccaguucggcaccaugcccagccugacccuggccugccugaccaagcagggccagguggaccugaacgacguggugcaggcccugaccgaccugggccugaucuacaccgccaaguaccccaacgccagcgaccuggacagacugacccagagccaccccauccugaacaugaucgacaccaagaagagcagccugaacaucagcggcuacaacuucagccugggcgccgccgugaaggccggcgccugcaugcuggacggcggcaacaugcuggagaccaucaaggugagcccccagaccauggacggcauccugaagagcauccugaaggugaagaagacccugggcauguucaucagcgacacccccggcgagagaaaccccuacgagaacauccuguacaagaucugccugagcggcgacggcuggcccuacaucgccagcagaaccagcaucaccggcagagccugggagaacaccgugguggaccuggagagcgacggcaagccccagaaggccggcagcaacaacagcaacaagagccugcagagcgccggcuucgccgccggccugaccuacagccagcugaugacccugaaggacgccaugcugcagcuggaccccaacgccaagaccuggauggacaucgagggcagacccgaggaccccguggagaucgcccuguaccagcccagcagcggcugcuacauccacuucuucagagagcccaccgaccugaagcaguucaagcaggacgccaaguacagccacggcaucgacgugaccgaccuguucgccgcccagcccggccugaccagcgccgugaucgaggcccugcccagaaacauggugaucaccugccagggcagcgacgacaucaagaagcugcuggagagccagggcagaaaggacaucaagcugaucgacaucgcccugagcaagaccgacagcagaaaguacgagaacgccgugugggaccaguacaaggaccugugccacaugcacaccggcguggugguggagaagaagaagagaggcggcaaggaggagaucaccccccacugcgcccugauggacugcaucauguucgacgccgccgugagcggcggccugaacacccuggugcugagagccgugcugcccagagacaugguguucagaaccagcacccccagaguggugcugugaggacuagucccuguucccagagcccacuuuuuuuucuuuuuuugaaauaaaauagccugucuuucagaucucaaaggcucuuuucagagccaccaaaaaaaaaaaaaaaaaaaaaaaaaaaaaaaaaaaaaaaaaaaaaaaaaaaaaaaaaaaaaaaaaaaaaaaaaaaaaaaaaaaaaaaaaaaaaaaaaaaaa

SEQ ID NO: 21293 - RNA, 2052 nt, Artificial Sequence
  mRNA product Design a-2 (hSL-A100) comprising derived and/or modified sequence from LASV(G3010-SLE-2013;Clade IV)__AIT17345__SP-IgE_NP(2-569) (opt4)
aggagaguccgcucagccagguugcagaagcggcuuagcguguguccuaaucuucucucugcguguagguaggccugugccgcaaacaagcuuaccauggacuggaccuggauccuguuccugguggccgccgccaccagagugcacagcagcgccagcaaggagaucaagagcuuccuguggacccagagccugagaagagagcugagcggcuacugcagcaacaucaagcugcagguggugaaggacgcccaggcccugcugcacggccuggacuucagcgaggugagcaacgugcagagacugaugagaaaggagagaagagacgacaacgaccugaagagacugagagaccugaaccaggccgugaacaaccugguggagcugaagagcacccagcagaagagcauccugagagugggcacccugaccagcgacgaccugcugauccuggccgccgaccuggagaagcugaagagcaaggugaccagaaccgagagaccccugagcgccggcguguacaugggcaaccugagcagccagcagcuggaccagagaagagcccugcugagcaugaucggcaugagcagcggcgugcagggcgccagagccggcagagacggcguggugagagugugggacgugaagaacgccgagcugcugaacaaccaguucggcaccaugcccagccugacccuggccugccugaccaagcagggccagguggaccugaacgacguggugcaggcccugaccgaccugggccugaucuacaccgccaaguaccccaacaccagcgaccuggacagacugacccagagccaccccauccugaacaugaucgacaccaagaagagcagccugaacaucagcggcuacaacuucagccugggcgccgccgugaaggccggcgccugcaugcuggacggcggcaacaugcuggagaccaucaaggugagcccccagaccauggacggcauccugaagagcauccugaaggugaagaaggcccugggcauguucaucagcgagacccccggcgagagaaaccccuacgagaacauccuguacaagaucugccugagcggcgacggcuggcccuacaucgccagcagaaccagcaucaccggcagagccugggagaacaccgugguggaccuggagagcgacggcaagccccagaaggccggcagcaacaacagcaacaagagccugcagagcgccggcuucaccgccggccugaccuacagccagcugaugacccugaaggacgccaugcugcagcuggaccccaacgccaagaccuggauggacaucgagggcagacccgaggaccccguggagguggcccuguaccagcccagcagcggcugcuacauccacuucuucagagagcccaccgaccugaagcaguucaagcaggacgccaaguacagccacggcaucgacgugaccgaccuguucgccgcccagcccggccugaccagcgccgugaucgacgcccugcccagaaacauggugaucaccugccagggcagcgacgacaucaagaagcugcuggagagccagggcagaaaggacaucaagcugaucgacaucgcccugagcaagaccgacagcagaaaguacgagaacgccgugugggaccaguacaaggaccugugccacaugcacaccggcguggugguggagaagaagaagagaggcggcaaggaggagaucaccccccacugcgcccugauggacugcaucauguucgacgccgccgugagcggcggccugaacaccagcgugcugagagccgugcugcccagagacaugguguucagaaccagcacccccagaguggugcugugaggacuagucccuguucccagagcccacuuuuuuuucuuuuuuugaaauaaaauagccugucuuucagaucucaaaggcucuuuucagagccaccaaaaaaaaaaaaaaaaaaaaaaaaaaaaaaaaaaaaaaaaaaaaaaaaaaaaaaaaaaaaaaaaaaaaaaaaaaaaaaaaaaaaaaaaaaaaaaaaaaaaa

SEQ ID NO: 21294 - RNA, 2052 nt, Artificial Sequence
  mRNA product Design a-2 (hSL-A100) comprising derived and/or modified sequence from LASV(G502-SLE-2009;Clade IV)__AIT17127__SP-IgE_NP(2-569) (opt4)
aggagaguccgcucagccagguugcagaagcggcuuagcguguguccuaaucuucucucugcguguagguaggccugugccgcaaacaagcuuaccauggacuggaccuggauccuguuccugguggccgccgccaccagagugcacagcagcgccagcaaggagaucaagagcuuccuguggacccagagccugagaagagagcugagcggcuacugcagcaacaucaagcugcagguggugaaggacgcccaggcccugcugcacggccuggacuucagcgaggugagcaacgugcagagacugaugagaaaggagagaagagacgacaacgaccugaagagacugagagaccugaaccaggccgugaacaaccugguggagcugaagagcacccagcagaagagcauccugagagugggcacccugaccagcgacgaccugcugauccuggccgccgaccuggagaagcugaagagcaaggugaucagaaccgagagaccccugagcgccggcguguacaugggcaaccugagcagccagcagcuggaccagagaagagcccugcugagcaugaucggcaugagcggcggcaaccagggcgugagagccggcaaggacggcguggugagagugugggacgugaagaacgccgagcugcugaacaaccaguucggcaccaugcccagccugacccuggccugccugaccaagcagggccagguggaccugaacgacgccgugcaggcccugaccgaccugggccugaucuacaccgccaaguaccccaacaccagcgaccuggacagacugacccagagccaccccauccugaacaugaucgacaccaagaagagcagccugaacaucagcggcuacaacuucagccugggcgccgccgugaaggccggcgccugcaugcuggacggcggcaacaugcuggagaccaucaaggugagcccccagaccauggacggcauccugaagagcauccugaaggugaagaaggcccugggcauguucaucagcgacacccccggcgagagaaaccccuacgagaacauccuguacaagaucugccugagcggcgacggcuggcccuacaucgccagcagaaccagcaucaccggcagagccugggagaacaccgugguggaccuggagagcgacggcaagccccagaaggccggcagcaacaacagcaacaagagccugcagagcgccggcuucaccgccggccugaccuacagccagcugaugacccugaaggacgccaugcugcagcuggaccccaacaccaagaccuggauggacaucgagggcagacccgaggaccccguggagaucgcccuguaccagcccagcagcggcugcuacauccacuucuucagagagcccaccgaccugaagcaguucaagcaggacgccaaguacagccacggcaucgacgugaccgaccuguucgccgcccagcccggccugaccagcgccgugaucgacgcccugcccagaaacauggugaucaccugccagggcagcgacgacaucagaaagcugcuggagagccagggcagaaaggacaucaagcugaucgacaucgcccugaacaagaccgacagcagaaaguacgagaacgccgugugggaccaguacaaggaccugugccacaugcacaccggcguggugguggagaagaagaagagaggcggcaaggaggagaucaccccccacugcgcccugauggacugcaucauguucgacgccgccgugagcggcggccugaacaccagcgugcugagagccgugcugcccagagacaugguguucagaaccagcacccccagaguggugcugugaggacuagucccuguucccagagcccacuuuuuuuucuuuuuuugaaauaaaauagccugucuuucagaucucaaaggcucuuuucagagccaccaaaaaaaaaaaaaaaaaaaaaaaaaaaaaaaaaaaaaaaaaaaaaaaaaaaaaaaaaaaaaaaaaaaaaaaaaaaaaaaaaaaaaaaaaaaaaaaaaaaaa

SEQ ID NO: 21295 - RNA, 2052 nt, Artificial Sequence
  mRNA product Design a-2 (hSL-A100) comprising derived and/or modified sequence from LASV(G733-SLE-2010;Clade IV)__AIT17155__SP-IgE_NP(2-569) (opt4)
aggagaguccgcucagccagguugcagaagcggcuuagcguguguccuaaucuucucucugcguguagguaggccugugccgcaaacaagcuuaccauggacuggaccuggauccuguuccugguggccgccgccaccagagugcacagcagcgccagcaaggagaucaagagcuuccuguggacccagagccugagaagagagcugagcggcuacugcagcaacaucaagcugcagguggugaaggacgcccaggcccugcugcacggccuggacuucagcgaggugagcaacgugcagagacugaugagaaaggagagaagagacgacaacgaccugaagagacugagagaccugaaccaggccgugaacaaccugguggagcugaagagcacccagcagaagagcgugcugagagugggcacccugaccagcgacgagcugcuggugcuggccgccgaccuggagaagcugaagagcaaggugaucagaaccgagagaccccugagcgccggcguguacaugggcaaccugagcagccagcagcuggaccagagaagagcccugcugagcaugaucggcaugagcggcggcaaccagggcgccagaaccggcagagacggcguggugagagugugggacgugaagaacgccgagcugcugaacaaccaguucggcaccaugcccagccugacccuggccugccugaccaagcagggccagguggaccugaacgacgccgugcaggcccugaccgaccugggccugaucuacaccgccaaguaccccaacaccagcgaccuggacagacugacccagagccaccccauccugaacaugaucgacaccaagaagagcagccugaacaucagcggcuacaacuucagccugggcgccgccgugaaggccggcgccugcaugcuggacggcggcaacaugcuggagaccaucaaggugagcccccagaccauggacggcauccugaagagcauccugaaggugaagaaggcccugggcauguucaucagcgacacccccggcgagagaaaccccuacgagaacauccuguacaagaucugccugagcggcgacggcuggcccuacaucgccagcagaaccagcaucaccggcagagccugggagaacaccgugguggaccuggagagcgacggcaagccccagaaggccggcagcaacaacagcaacaagagccugcagagcgccggcuucaccgccggccugaccuacagccagcugaugacccugaaggacgccaugcugcagcuggaccccaacgccaagaccuggauggacaucgagggcagacccgaggaccccguggagaucgcccuguaccagcccagcagcggcugcuacauccacuucuucagagagcccaccgaccugaagcaguucaagcaggacgccaaguacagccacggcaucgacgugaccgaccuguucgccgcccagcccggccugaccagcgccgugaucgacgcccugcccagaaacauggugaucaccugccagggcagcgacgacaucagaaagcugcuggagagccagggcagaaaggacaucaagcugaucgacaucgcccugagcaagaucgacagcagaaaguacgagaacgccgugugggaccaguacaaggaccugugccacaugcacaccggcguggugguggagaagaagaagagaggcggcaaggaggagaucaccccccacugcgcccugauggacugcaucauguucgacgccgccgugagcggcggccugaacagccuggugcugagagccgugcugcccagagacaugguguucagaaccagcacccccagaguggugcugugaggacuagucccuguucccagagcccacuuuuuuuucuuuuuuugaaauaaaauagccugucuuucagaucucaaaggcucuuuucagagccaccaaaaaaaaaaaaaaaaaaaaaaaaaaaaaaaaaaaaaaaaaaaaaaaaaaaaaaaaaaaaaaaaaaaaaaaaaaaaaaaaaaaaaaaaaaaaaaaaaaaaa

SEQ ID NO: 21296 - RNA, 2052 nt, Artificial Sequence
  mRNA product Design a-2 (hSL-A100) comprising derived and/or modified sequence from MOPV/LASV reassortant(IGS-1;Clade IV)__AFY05578__SP-IgE_NP(2-569) (opt4)
aggagaguccgcucagccagguugcagaagcggcuuagcguguguccuaaucuucucucugcguguagguaggccugugccgcaaacaagcuuaccauggacuggaccuggauccuguuccugguggccgccgccaccagagugcacagcagcgccagcaaggagaucaagagcuuccuguggacccagagccugagaagagagcugagcggcuacugcagcaacaucaagcugcagguggugaaggacgcccaggcccugcugcacggccuggacuucagcgaggugagcaacgugcagagacugaugagaaaggagagaagagacgacaacgaccugaagagacugagagaccugaaccaggccgugaacaaccugguggagcugaagagcacccagcagaagagcauccugagagugggcacccugaccagcgacgaccugcugauccuggccgccgaccuggagaagcugagaagcaaggugaucagaaccgagagaccccugagcgccggcguguacaugggcaaccugagcagccagcagcuggaccagagaagagcccugcugaacaugaucggcaugagcggcggcaaccagggcgccagagccggcagagacggcguggugagagugugggacgugaagaacgccgagcugcugagcaaccaguucggcaccaugcccagccugacccuggccugccugaccaagcagggccagguggaccugaacgacgccgugcaggcccugaccgaccugggccugaucuacaccgccaaguaccccaacaccagcgaccuggacagacugacccagagccaccccauccugaacaugaucgacaccaagaagagcagccugaacaucagcggcuacaacuucagccugggcgccgccgugaaggccggcgccugcaugcuggacggcggcaacaugcuggagaccaucaaggugagcccccagaccauggacggcauccugaagagcauccugaaggugaagaaggcccugggcauguucaucagcgacacccccggcgagagaaaccccuacgagaacauccuguacaagaucugccugagcggcgacggcuggcccuacaucgccagcagaaccagcaucaccggcagagccugggagaacaccgugguggaccuggagagcgacggcaagccccagaaggccgacagcaacaacagcagcaagagccugcagagcgccggcuucaccgccggccugaccuacagccagcugaugacccugaaggacgccaugcugcagcuggaccccaacgccaagaccuggauggacaucgagggcagacccgaggaccccguggagaucgcccuguaccagcccagcagcggcugcuacauccacuucuucagagagcccaccgaccugaagcaguucaagcaggacgccaaguacagccacggcaucgacgugaccgaccuguucgccacccagcccggccugaccagcgccgugaucgacgcccugcccagaaacauggugaucaccugccagggcagcgacgacaucagaaagcugcuggagagccagggcagaaaggacaucaagcugaucgacaucgaccugagcaagaccgacagcagaaaguacgagaacgccgugugggaccaguacaaggaccugugccacaugcacaccggcguggugguggagaagaagaagagaggcggcaaggaggagaucaccccccacugcgcccugauggacugcaucauguucgacgccgccgugagcggcggccugaacaccagcgugcugagagccgugcugcccagagacaugguguucagaaccagcacccccagaguggugcugugaggacuagucccuguucccagagcccacuuuuuuuucuuuuuuugaaauaaaauagccugucuuucagaucucaaaggcucuuuucagagccaccaaaaaaaaaaaaaaaaaaaaaaaaaaaaaaaaaaaaaaaaaaaaaaaaaaaaaaaaaaaaaaaaaaaaaaaaaaaaaaaaaaaaaaaaaaaaaaaaaaaaa

SEQ ID NO: 21297 - RNA, 2052 nt, Artificial Sequence
  mRNA product Design a-2 (hSL-A100) comprising derived and/or modified sequence from LASV(LM765-SLE-2012;Clade IV)__AIT17815__SP-IgE_NP(2-569) (opt4)
aggagaguccgcucagccagguugcagaagcggcuuagcguguguccuaaucuucucucugcguguagguaggccugugccgcaaacaagcuuaccauggacuggaccuggauccuguuccugguggccgccgccaccagagugcacagcagcgccagcaaggagaucaagagcuuccuguggacccagagccugagaagagagcugagcggcuacugcagcaacaucaagcugcagguggugaaggacgcccaggcccugcugcacggccuggacuucagcgaggugagcaacgugcagagacugaugagaaaggagagaagagacgacaacgaccugaagagacugagagaccugaaccaggccgugaacaaccugguggagcugaagagcacccagcagaagagcauccugagagugggcacccugaccagcgacgaccugcugauccuggccgccgaccuggagaagcugaagagcaaggugaccagaaccgagagaccccugagcgccggcguguacaugggcaaccugagcagccagcagcuggaccagagaagagcccugcuggacaugaucggcaugagcggcagcaaccagggcgccagagccggcagagacggcguggugagagugugggacgugaagaacgccgagcugcugaacaaccaguucggcaccaugcccagccugacccuggccugccugaccaagcagggccagguggaccugaacgacgccgugcaggcccugaccgaccugggccugaucuacaccgccaaguaccccaacaccagcgaccuggacagacugacccagagccaccccauccugaacaugaucgacaccaagaagagcagccugaacaucagcggcuacaacuucagccugggcgccgccgugaaggccggcgccugcaugcuggacggcggcaacaugcuggagaccaucaaggugagcccccagaccauggacggcauccugaagagcauccugaaggugaagaaggcccugggcauguucaucagcgacgcccccggcgagagaaaccccuacgagaacauccuguacaagaucugccugagcggcgacggcuggcccuacaucgccagcagaaccagcaucaccggcagagccugggagaacaccgugguggaccuggagagcgacggcaagccccagaaggccggcagcaacggcagcaacaagagccugcagagcgccggcuucaccgccggccugaccuacagccagcugaugacccugaaggacgccaugcugcagcuggaccccaacgccaagaccuggauggacaucgagggcagacccgaggaccccguggagaucgcccuguaccagcccagcagcggcugcuacauccacuucuucagagagcccaccgaccugaagcaguucaagcaggacgccaaguacagccacggcaucgacgugaccgaccuguucgccgcccagcccggccugaccagcgccgugaucgacgcccugcccagaaacauggugaucaccugccagggcagcgacgacaucagaaagcuguucgagagccagggcagaaaggacaucaagcugaucgacaucgcccugagcaagaccgacagcagaaaguacgagaacgccgugugggaccaguacaaggaccugugccacaugcacaccggcaucgugguggagaagaagaagagaggcggcaaggaggagaucaccccccacugcgcccugauggacugcaucauguucgacgccgccgugagcggcggccugaacaccagcgugcugagagccgugcugcccagagacaugguguucagaaccagcacccccagaguggugcugugaggacuagucccuguucccagagcccacuuuuuuuucuuuuuuugaaauaaaauagccugucuuucagaucucaaaggcucuuuucagagccaccaaaaaaaaaaaaaaaaaaaaaaaaaaaaaaaaaaaaaaaaaaaaaaaaaaaaaaaaaaaaaaaaaaaaaaaaaaaaaaaaaaaaaaaaaaaaaaaaaaaaa

SEQ ID NO: 21298 - RNA, 2052 nt, Artificial Sequence
  mRNA product Design a-2 (hSL-A100) comprising derived and/or modified sequence from LASV(LM776-SLE-2012;Clade IV)__AIT17825__SP-IgE_NP(2-569) (opt4)
aggagaguccgcucagccagguugcagaagcggcuuagcguguguccuaaucuucucucugcguguagguaggccugugccgcaaacaagcuuaccauggacuggaccuggauccuguuccugguggccgccgccaccagagugcacagcagcgccagcaaggagaucaagagcuuccuguggacccagagccugagaagagagcugagcagcuacugcagcaacaucaagcugcagguggugaaggacgcccaggcccugcugcacggccuggacuucagcgaggugagcaacgugcagagacugaugagaaaggagagaagagacgacaacgaccugaagagacugagagaccugaaccaggccgugaacaaccugguggagcugaagagcacccagcagaagagcauccugagagugggcacccugaccagcgacgaccugcugauccuggccgccgaccuggagaagcugaagagcaaggugaccagaaccgagagaccccugagcgccggcguguacaugggcaaccugagcagccagcagcuggaccagagaagagcccugcugagcaugaucggcaugagcggcagcaaccagggcgccagagccggcagagacggcguggugagagugugggacgugaagaacgccgagcugcugaacaaccaguucggcaccaugcccagccugacccuggccugccugaccaagcagggccagguggaccugaacgacgccgugcaggcccugaccgaccugggccugaucuacaccgccaaguaccccaacaccagcgaccuggacagacugacccagagccaccccauccugaacaugaucgacaccaagaagagcagccugaacaucagcggcuacaacuucagccugggcgccgccgugaaggccggcgccugcaugcuggacggcggcaacaugcuggagaccaucaaggugagcccccagaccauggacggcauccugaagagcauccugaaggugaagaaggcccugggcauguucaucagcgacacccccggcgagagaaaccccuacgagaacauccuguacaagaucugccugagcggcgacggcuggcccuacaucgccagcagaaccagcaucaccggcagagccugggagaacaccgugguggaccuggagagcgacggcaagccccagaaggccggcagcaacaacagcaacaagagccugcagagcgccggcuucaccgccggccugaccuacagccagcugaugacccugaaggacgccaugcugcagcuggaccccaacgccaagaccuggauggacaucgagggcagacccgaggaccccguggagguggcccuguaccagcccagcagcggcugcuacauccacuucuucagagagcccaccgaccugaagcaguucaagcaggacgccaaguacagccacggcaucgacgugaccgaccuguucgccgcccagcccggccugaccagcgccgugaucgacgcccugcccagaaacauggugaucaccugccagggcagcgacgacaucagaaagcugcuggagagccagggcagaaaggacaucaagcugaucgacaucgcccugagcaagaccgacagcagaaaguacgagaacgccgugugggaccaguacaaggaccugugccacaugcacaccggcguggugguggagaagaagaagagaggcggcaaggaggagaucaccccccacugcgcccugauggacugcaucauguucgacgccgccgugagcggcggccugaacaccagcgugcugagagccgugcugcccagagacaugguguucagaaccagcacccccagaguggugcugugaggacuagucccuguucccagagcccacuuuuuuuucuuuuuuugaaauaaaauagccugucuuucagaucucaaaggcucuuuucagagccaccaaaaaaaaaaaaaaaaaaaaaaaaaaaaaaaaaaaaaaaaaaaaaaaaaaaaaaaaaaaaaaaaaaaaaaaaaaaaaaaaaaaaaaaaaaaaaaaaaaaaa

SEQ ID NO: 21299 - RNA, 2052 nt, Artificial Sequence
  mRNA product Design a-2 (hSL-A100) comprising derived and/or modified sequence from LASV(Mad39;Clade IV)__ANH09723__SP-IgE_NP(2-569) (opt4)
aggagaguccgcucagccagguugcagaagcggcuuagcguguguccuaaucuucucucugcguguagguaggccugugccgcaaacaagcuuaccauggacuggaccuggauccuguuccugguggccgccgccaccagagugcacagcagcgccagcaaggagaucaagagcuuccuguggacccagagccugagaagagagcugagcggcuacugcagcaacaucaagcugcagguggugaaggacgcccaggcccugcugcacggccuggacuucagcgaggugagcaacgugcagagacugaugagaaagcagagaagagacgacaacgaccugaagagacugagagaccugaaccaggccgugaacaaccugguggagcugaagagcacccagcagaagagcgugcugagagugggcacccugaccagcgacgaccugcugacccuggccgccgaccuggagaagcugaagagcaaggugaccagaaccgagagaccccugaccgccggcguguacaugggcaaccugagcagccagcagcuggaccagagaagagcccugcugaacaugaucggcaugagcggcggcaaccagggcgccagaaccggcagagacggcguggugagagugugggacgugaagaacgccgagcugcugaacaaccaguucggcaccaugcccagccugacccuggccugccugaccaagcagggccagguggaccugaacgacguggugcaggcccugaccgaccugggccugaucuacaccgccaaguaccccaacaccagcgaccuggacagacugacccagagccaccccauccugaacaugaucgacaccaacaagagcagccugaacaucagcggcuacaacuucagccugggcgccgccgugaaggccggcgccugcaugcuggacggcggcaacaugcuggagaccaucaaggugagcccccagaccauggacggcauccugaagagcauccugaaggugaagaagagccugggcauguucaucagcgacacccccggcgagagaaaccccuacgagaacauccuguacaagaucugccugagcggcgacggcuggcccuacaucgccagcagaaccagcaucaccggcagagccugggagaacaccgugguggaccuggagagcggcggcaagccccagaaggccggcagcaacaacagcaacaagagccugcagagcgccggcuucgccgccggccugaccuacagccagcugaugacccugaaggacgccaugcugcagcuggaccccaacgccaagaccuggauggacaucgagggcagacccgaggaccccguggagaucgcccuguaccagcccaucagcggcugcuacauccacuucuucagagagcccaccgaccugaagcaguucaagcaggacgccaaguacagccacggcaucgacgugaccgaccuguucgccgcccagcccggccugaccagcgccgugaucgaggcccugcccagaaacauggugaucaccugccagggcagcgacgacaucagaaagcuguucgagagccagggcagaaaggacaucaagcugaucgacaucgcccugagcaagaccgacagcagaaaguacgagaacgccgugugggaccaguacaaggaccugugccacaugcacaccggcguggugguggagaagaagaagaagggcggcaaggaggagaucaccccccacugcgcccugauggacugcaucauguucgacgccgccgugagcggcggccugaacacccuggugcugagagccgugcugcccagagacaugguguucagaaccagcacccccaagguggugcugugaggacuagucccuguucccagagcccacuuuuuuuucuuuuuuugaaauaaaauagccugucuuucagaucucaaaggcucuuuucagagccaccaaaaaaaaaaaaaaaaaaaaaaaaaaaaaaaaaaaaaaaaaaaaaaaaaaaaaaaaaaaaaaaaaaaaaaaaaaaaaaaaaaaaaaaaaaaaaaaaaaaaa

SEQ ID NO: 21300 - RNA, 2052 nt, Artificial Sequence
  mRNA product Design a-2 (hSL-A100) comprising derived and/or modified sequence from LASV(Z0947-SLE-2011;Clade IV)__AIT17841__SP-IgE_NP(2-569) (opt4)
aggagaguccgcucagccagguugcagaagcggcuuagcguguguccuaaucuucucucugcguguagguaggccugugccgcaaacaagcuuaccauggacuggaccuggauccuguuccugguggccgccgccaccagagugcacagcagcgccagcaaggagaucaagagcuuccuguggacccagagccugagaagagagcugagcggcuacugcagcaacaucaagcugcagguggugaaggacgcccaggcccugcugcacggccuggacuucagcgaggugagcaacgugcagagacugaugagaaaggagagaagagacgacaacgaccugaagagacugagagaccugaaccaggccgugaacaaccugguggagcugaagagcacccagcagaagagcauccugagagugggcacccugaccagcgacgaccugcugauccuggccgccgaccuggagaagcugaagagcaaggugaccagaaccgagagaccccugagcgccggcguguacaugggcaaccugagcagccagcagcuggaccagagaagagcccugcugaacaugaucggcaugagcggcagcaaccagggcgccagaaccggcagagacggcguggugagagugugggacgugaagaacgccgagcugcugaacaaccaguucggcaccaugcccagccugacccuggccugccugaccaagcagggccagguggaccugaacgacgccgugcaggcccugaccgaccugggccugaucuacaccgccaaguaccccaacaccagcgaccuggacagacugacccagagccaccccauccugaacaugaucgacaccaagaagagcagccugaacaucagcggcuacaacuucagccugggcgccgccgugaaggccggcgccugcaugcuggacggcggcaacaugcuggagaccaucaaggugagcccccagaccauggacggcauccugaagagcauccugaaggugaagaaggcccugggcauguucaucagcgacgcccccggcgagagaaaccccuacgagaacauccuguacaagaucugccugagcggcgacggcuggcccuacaucgccagcagaaccagcaucaccggcagagccugggagaacaccgugguggaccuggagagcgacggcaagccccagaaggccggcagcaacggcagcaacaagagccugcagagcgccggcuucaccgccggccugaccuacagccagcugaugacccugaaggacgccaugcugcagcuggaccccaacgccaagaccuggauggacaucgagggcagacccgaggaccccguggagaucgcccuguaccagcccagcagcggcugcuacauccacuucuucagagagcccaccgaccugaagcaguucaagcaggacgccaaguacagccacggcaucgacgugaccgaccuguucgccgcccagcccggccugaccagcgccgugaucgacgcccugcccagaaacauggugaucaccugccagggcagcgacgacaucagaaagcuguucgagagccagggcagaaaggacaucaagcugaucgacaucgcccugagcaagaccgacagcagaaaguacgagaacgccgugugggaccaguacaaggaccugugccacaugcacaccggcaucgugguggagaagaagaagagaggcggcaaggaggagaucaccccccacugcgcccugauggacugcaucauguucgacgccgccgugagcggcggccugaacaccagcgugcugagagccgugcugcccagagacaugguguucagaaccagcacccccagaguggugcugugaggacuagucccuguucccagagcccacuuuuuuuucuuuuuuugaaauaaaauagccugucuuucagaucucaaaggcucuuuucagagccaccaaaaaaaaaaaaaaaaaaaaaaaaaaaaaaaaaaaaaaaaaaaaaaaaaaaaaaaaaaaaaaaaaaaaaaaaaaaaaaaaaaaaaaaaaaaaaaaaaaaaa

SEQ ID NO: 21301 - RNA, 2052 nt, Artificial Sequence
  mRNA product Design a-2 (hSL-A100) comprising derived and/or modified sequence from LASV(Josiah;Clade IV)__NP_694869__SP-IgE_NP(2-569) (opt5)
aggagaguccgcucagccagguugcagaagcggcuuagcguguguccuaaucuucucucugcguguagguaggccugugccgcaaacaagcuuaccauggacuggaccuggauccuguuccucguggccgcugccacaagaguccacagcagcgccuccaaggagaucaaaucuuuccuguggacccagagccucagacgggaacuguccggcuacugcucuaacauuaagcugcaaguggucaaagacgcucaggcccugcuccacgggcuggauuuuagcgagguuuccaaugugcagcgccuuaugagaaaggaacggcgcgacgauaacgaccugaaaagacuccgggaucugaaucaggcggugaacaaucuggucgagcucaagucuacacaacaaaagagcauccugcgcgugggaacgcuuaccuccgacgaucugcucauucuggcugccgaccuugaaaaacuuaagagcaaaguuaucagaacagagcggccccucucugccggcguguauauggggaaccuguccagccagcagcuggaucagcgcagagcucuccugaauaugauuggaaugucuggcgggaaccagggagcccgggcuggccgcgacggcgucgugagaguuugggaugugaagaaugccgagcuucugaacaaucaguucgggaccaugccuucccucacacuggcgugucuuaccaaacagggacaagucgaccugaacgaugccgugcaggcucucacagaccugggccugaucuacaccgccaaguauccgaauacgagcgaccucgaucggcugacccagucucaucccauccuuaacaugauugacacaaagaaauccagccugaauaucuccggguacaacuuuucucucggagcugccgugaaggcgggcgccugcaugcuggaugggggaaacaugcuugaaaccauuaaagucagcccucaaacaauggacggcauccugaaguccauucucaaaguuaagaaagcucugggcauguucaucagcgauacccccggggagcgcaauccuuaugaaaacauucuguacaagaucugucucucuggagacggcuggcccuauaucgccuccagaacgagcauuacagggcgggcuugggagaauaccgugguggaucuggagucugacggaaagccucagaaagccgauagcaacaauuccucuaagagccuucaguccgccggcuuuacagcugggcugaccuacagccagcucaugacccugaaagacgcgaugcugcaacuugauccgaacgccaagacauggauggacaucgaaggaagacccgaggacccugucgaaauugcucucuaccagcccucuuccggcugcuauauccacuucuuucgcgagccuacggaucugaaacaguucaagcaggacgccaaguacagccauggcauugaugugaccgaccuguuugccacacaacccgggcucaccucugcuguuaucgaugcccugccgcggaauauggugaucacaugucagggauccgacgauauuagaaaacuucuggaaagccagggccgcaaggacaucaaacucauugauaucgcgcuguccaagaccgacucucggaaauaugagaacgcugucugggaucaguacaaggaccugugccacaugcauacgggggugguuguggagaagaaaaagagaggaggcaaagaagagauuacaccucacugugcccuuauggauugcaucauguucgacgccgcugucagcgggggccucaauaccuccgugcugcgcgccguccugccccgggacaugguguuuagaaccucuacaccucgcguugugcucugaggacuagucccuguucccagagcccacuuuuuuuucuuuuuuugaaauaaaauagccugucuuucagaucucaaaggcucuuuucagagccaccaaaaaaaaaaaaaaaaaaaaaaaaaaaaaaaaaaaaaaaaaaaaaaaaaaaaaaaaaaaaaaaaaaaaaaaaaaaaaaaaaaaaaaaaaaaaaaaaaaaaa

SEQ ID NO: 21302 - RNA, 2052 nt, Artificial Sequence
  mRNA product Design a-2 (hSL-A100) comprising derived and/or modified sequence from LASV(LP;Clade I)__AAF86702__SP-IgE_NP(2-569) (opt5)
aggagaguccgcucagccagguugcagaagcggcuuagcguguguccuaaucuucucucugcguguagguaggccugugccgcaaacaagcuuaccauggacuggaccuggauccuguuccucguggccgcugccacaagaguccacagcagcaacuccaaggagaucaaaucuuuccuguggacccagagccucagacgggaacuguccggcuacugcucuaauauuaagcuccaaguggucaaagacgcccaggcucugcuccacgggcuggauuuuagcgagguuuccaacgugcagcgccuuaugagaaagcagaaacgggacgaugccgaccugaagcgccucagagaucugaaucaagcggugaacaaucuggucgaacucaagucuacacagcagaaaaacgugcugcggguuggaacgcuuagcuccgacgaucugaucacccucgcugccgaccuggagaaacuuaaaagcaaggugauucgcacagaaagaccccugucuuccggcgucuauauggggaaucucagcucucagcaacuggaucagcggcgcgcccugcucuccaugaucggaaugagcggcgggccucagggaaacagaaccggcggcgacggggugguucgggugugggaugucaaaaaugcugagcugcuuaacaaucaguucggaacaaugccgucucugacccucgccugucugacaaagcaaggccagguggaccuuaacgaugcugugcaggcccugaccgaccucgggcugauuuacacggcgaaguaucccaauuccagcgaccuggauaugcucacccaaucccauccuauccugggaauggucgacacaaagaagucuagccuuaacaucuccggcuacaauuuuagccugggggccgcuguuaaagccggagcuugcaugcucgauggcggcaacaugcuggagaccauuaaggugucuccccagacaauggacgggauccuuaaauccauucugaaggugaaacgcagccucggaauguucaucucugauaccccuggcgaaagaaaccccuaugagaauauucuguacaagaucugucugagcggggaaggauggccuuauauugccucccggacgucuaucacaggccgcgcgugggagaacacccucgucgaccuggagagcgauaauaagccgcccaaacuuaacuccgccgggagcaauaagucucugcaggcugccggacucaacgcuggccugacauacucccagcugaugacccuuaaagacugcaugcuccaacuggauccuagcucuaagaccuggaucgacauugaaggcagacccgaggauccuguggaaaucgcccuguuucagcccuccagcggguguuacauucacuucuuucgggagccgacagaccucaaacaguucaagcaggacgccaaguauucccauggaaucgauguuacggaccuguuuucuacccaaccuggccuuacaagcgcugugauugaagcgcugcccagaaauaugguccuuaccugccagggguccgaugacaucaaaaagcugcuggagucucagggacgccgggauaucaaacuuauugacaucagccucuccaaggccgauagcagaaaauucgagaacgcugugugggaccaguacaaggaucugugucacaugcauacaggcguuguggucgaaaagaaaaagcgcgggggcaaagaggaaauuaccccucacugcgcccugcucgacuguaucauguuugaugccgcuacgacaggaucucugaauauuaccacccuucgggccgugcugcccagagacauggucuuccgcacauccacccccaaggugguucucugaggacuagucccuguucccagagcccacuuuuuuuucuuuuuuugaaauaaaauagccugucuuucagaucucaaaggcucuuuucagagccaccaaaaaaaaaaaaaaaaaaaaaaaaaaaaaaaaaaaaaaaaaaaaaaaaaaaaaaaaaaaaaaaaaaaaaaaaaaaaaaaaaaaaaaaaaaaaaaaaaaaaa

SEQ ID NO: 21303 - RNA, 2052 nt, Artificial Sequence
  mRNA product Design a-2 (hSL-A100) comprising derived and/or modified sequence from LASV(803213;Clade II)__AAF86704__SP-IgE_NP(2-569) (opt5)
aggagaguccgcucagccagguugcagaagcggcuuagcguguguccuaaucuucucucugcguguagguaggccugugccgcaaacaagcuuaccauggacuggaccuggauccuguuccucguggccgcugccacaagaguccacagcagcgccuccaaggaggugaaaucuuuccuguggacccagagccucagacgggaacuguccggcuacugcucuaacaucaaacuucaagucguuaaggacgcucaggcccugcuccacgggcuggauuuuagcgaggugaauaacgugcagcgccuuaugagaaagcagaaacgggacgauggagaccugaagcgccucagagaucugaaucaagcggucaacaaucugguggaacucaaguccacacagcagaaaucuauucugcggguuggcacgcuuaccagcgacgaucugcucacacuggcugccgaccuugagaagcugaaauccaaggugauccgcaccgaaagaccccucagcucuggggucuauaugggaaaccuguccacacagcaacuggagcagcggcgcgcccuccugaauaugauuggcauggugggaggagcucagggcacccagccuggcagagaugggguugugcgggucugggacgugaaaaacccggaucuucugaauaaccaauucggaacaaugcccagccucacccuggccugucuuacgaagcagggccagguggaccugaaugaugcuguccucgcccugaccgaccuggggcucaucuacacagcgaaguauccuaacucuuccgaccuggaucgccuuagccaaucucaucccauucugaauaugguugacaccaaaaaguccagccucaacaucuccggauacaauuuuucucugggcgccgcugugaaagccggggcuugcaugcuugauggaggcaacaugcuggagacaaucaaggugaccccucagacgauggacggcauucucaaaagcauccugaaggucaaaagaucccuggggauguucgugagcgauacacccggagaacggaacccuuaugagaauauucucuacaagaucugucugucuggcgacggguggccguauauugccucccgcaccagcaucguugggagagcgugggaaaacacaaccguggaucuugagucugacggcaagccccagaaagucgggaccgccggaagcaauaagucccugcagucugcuggcuuuccuacaggccucacguacagccaacugaugacccugaaagauuccaugaugcagcuugaccccagcgccaagacauggauugauaucgaggggcggccugaagaccccguggagaucgcucucuaccagccgaugucuggaugcuauauucacuucuuuagagaaccuaccgaccugaaacaguucaagcaagaugccaaguacucccauggcaucgacguugccgaucuguuucccgcucagccugggcucacaagcgcggugauugaggcccugccccgcaacaugguccuuaccugucagggaucugacgauaucaaaaagcugcucgacucccagggccggagagauauuaaacugaucgacaucagccuguccaagguggauucucgcaaauucgaaaaugcugucugggaccaaugcaaggaucuuugucacaugcauacgggggugguuguggagaagaaaaagcggggcggaaaagaggaaauuacaccccacugcgcccucauggacuguaucauguuugaugccgcugucagcggcgggcugaacauuccugugcugagagccguucucccgcgcgacaugguguuccggaccuccucucccaaggucgugcugugaggacuagucccuguucccagagcccacuuuuuuuucuuuuuuugaaauaaaauagccugucuuucagaucucaaaggcucuuuucagagccaccaaaaaaaaaaaaaaaaaaaaaaaaaaaaaaaaaaaaaaaaaaaaaaaaaaaaaaaaaaaaaaaaaaaaaaaaaaaaaaaaaaaaaaaaaaaaaaaaaaaaa

SEQ ID NO: 21304 - RNA, 2055 nt, Artificial Sequence
  mRNA product Design a-2 (hSL-A100) comprising derived and/or modified sequence from LASV(GA391;Clade III)__CAA36646__SP-IgE_NP(2-570) (opt5)
aggagaguccgcucagccagguugcagaagcggcuuagcguguguccuaaucuucucucugcguguagguaggccugugccgcaaacaagcuuaccauggacuggaccuggauccuguuccucguggccgcugccacaagaguccacagcagcgccuccaaggaggugagaucuuuccuguggacccagagccuccggcgcgaacuguccggcuacugcucuaacaucaaacuucaagucguuaaggacgcucaggcccugcuccacgggcuggauuuuagcgagguguccaaugugcagagacuuaugcggaaacagaagcgcgacgauggagaccugaaaagacuccgggaucugaaccaagcggucaauaaccugguggaacucaagucuacacagcagaaaagcguucugcgcgugggcacgcuuuccagcgacgaucugcucauucuggcugccgaccuugagaaacugaagucuaaagucaccagaacagaacggccccucuccagcgggguguauaugggaaaucugucuucccagcaacuggaucagcgcagagcccuccugaacaugaucggcaugaccgggguuagcggaggcggcaagggggcuucugacggaauugugcgggucugggaugugaaaaaugccgagcuucugaacaaucaguucggcacaaugccuucccucacccuggcuugucuuacaaagcaggggcaaguggaccugaacgaugccguccaggcgcucaccgaccugggacugaucuacacggccaaguauccgaauagcuccgaccucgaucgccugucucagagccaucccauucuuaacaugaucgacaccaaaaaguccagccugaauaucucuggcuacaacuuuucccucggggcugccguuaaagcuggagccugcaugcuggauggcggcaauaugcuugagacaauuaaggugagcccucaaaccauggacgggauccugaaaucuauucucaaggugaaaaagagccugggaauguucgucuccgauacacccggcgaaagaaacccuuaugagaacauccuguacaagauuugucucucuggggacggauggcccuauaucgcgagccggaccuccauugugggccgcgccugggaaaauacgguuguggaucuggagcaggacaacaaaccucagaagaucgggaauggaggcagcaacaaaucucuucaguccgcuggcuuugccgcugggcugacauacagccaacucaugacccugaaggauuucaaaugcuuuaaucugaucccgaacgccaagacauggauggacauugagggaagacccgaagauccugucgagaucgcccuuuaccagcccucuuccggcuguuaugugcacuucuuucgggaaccuaccgaccucaagcaguucaaacaggacgcuaaguacagccaugggauugauguuaccgaccuguuugcggcccaacccggacugacauccgcugugaucgaggcccucccgagaaauauggucauuacgugccagggcucugaagauauccgcaaacugcuugagagccaggggcggagagacaucaagcugauugauaucacccucuccaaagccgacucucgcaaguucgagaacgcugugugggaucaguuuaaggaccugugucacaugcauacaggcgucgugguugaaaagaagaaacggggaggcaaggaggaaauuaccccucacugcgcccugauggauuguaucauguucgacgcggcugugagcgggggacuugaugccaaaguccucagagugguucugccccgcgacaugguguuccggacauccaccccuaaggucgugcugugaggacuagucccuguucccagagcccacuuuuuuuucuuuuuuugaaauaaaauagccugucuuucagaucucaaaggcucuuuucagagccaccaaaaaaaaaaaaaaaaaaaaaaaaaaaaaaaaaaaaaaaaaaaaaaaaaaaaaaaaaaaaaaaaaaaaaaaaaaaaaaaaaaaaaaaaaaaaaaaaaaaaa

SEQ ID NO: 21305 - RNA, 2052 nt, Artificial Sequence
  mRNA product Design a-2 (hSL-A100) comprising derived and/or modified sequence from LASV(AV;Clade V)__CCA30315__SP-IgE_NP(2-569) (opt5)
aggagaguccgcucagccagguugcagaagcggcuuagcguguguccuaaucuucucucugcguguagguaggccugugccgcaaacaagcuuaccauggacuggaccuggauccuguuccucguggccgcugccacaagaguccacagcagcgccuccaaggaggugaaaucuuuccuguggacccagagccucagacgggaacuguccggcuacugcucuaacaucaaacuucaagucguuaaggacgcucaggcccugcuccacgggcuggauuuuagcgagguguccaaugugcagcgccuuaugagaaagcagcggcgcgacgauucugaccugaaaagacuccgggaucugaaccaagcggucaauaaccugguggaacucaagagcacacagcagaaguccguucugcgcgugggaacgcuuagcucugacgaucugcucacccuggcugccgaccuugagaaacugaaguccaaagucacaagaaccgaacggccccucagcucuggcguguauauggggaaucuguccagccagcaacuggaucagcgcagagcccuccugaaccuuauuggaaugacaaauggcucucaggggucccaggcuggacgggacggcguugugcgcgucugggaugugaagaacgccgagcugcucaauaaccaauucggcaccaugccuagccugacacuugcuugucugaccaaacagggacagguggaccucaaugaugucguucaagcccugacggaccuggggcucaucuacaccgcgaaguauccgaacacauccgaccuggauagacuuacccagucucaucccauucugaauaugaucgacacaaagaaaagcucccucaacauuagcggcuacaauuuuucucugggggccgcugugaaggccggagcuugcaugcuugauggcgggaacaugcuggagaccaucaaaguguccccucagagcauggacggaauccucaagucuauucugaaagucaagcgggcccugggcauguucgugagcgauacgcccggcgaacgcaacccuuaugagaauauccucuacaaaauuugucuguccggggacggauggcccuauaucgcgucuagaacaagcauuguuggccgggccugggaaaacaccguggucgaucuugagacagacgggaagccucagaagaucggauccggcaauagcaacaaaucucugcaauccgcuggguuuagcgccggacucaccuacucucagcugaugacccugaaggaugcuaugcuucagcucgacccgaaugccaaaacauggauggauauugagggcagacccgaagacccuguggagguugcccuguaccagcccaucuccggcugcuauauccacuucuuucgcgaaccuacggaccugaagcaauucaaacaggaugcuaaguacagccaugggauugacaucgcggaucucuuugccgcucagcccggacugaccuccgccgugauugaggcccuuccgcggaacauggucaucacaugucagggcucugaagacauuaagaaacugcucgagagccaagggagaaaggauaucaaacugaucgacauugcucuguccaagaucgauucucgcaaauucgagaaugccgugugggaccaguauaaggaucuuugccacaugcauaccggagucgugguugaaaagaaaaagcggggcgggaaagaggaaauuacaccucacugugcgcucauggacugcaucauguuugaugcugccgugagcggcggacugaacacccugguccucagagccgugcugccccgcgacaugguuuuccggacguccacaccuagagugguccuuugaggacuagucccuguucccagagcccacuuuuuuuucuuuuuuugaaauaaaauagccugucuuucagaucucaaaggcucuuuucagagccaccaaaaaaaaaaaaaaaaaaaaaaaaaaaaaaaaaaaaaaaaaaaaaaaaaaaaaaaaaaaaaaaaaaaaaaaaaaaaaaaaaaaaaaaaaaaaaaaaaaaaa

SEQ ID NO: 21306 - RNA, 2052 nt, Artificial Sequence
  mRNA product Design a-2 (hSL-A100) comprising derived and/or modified sequence from LASV(Togo/2016/7082;Clade VI)__AMR44578__SP-IgE_NP(2-569) (opt5)
aggagaguccgcucagccagguugcagaagcggcuuagcguguguccuaaucuucucucugcguguagguaggccugugccgcaaacaagcuuaccauggacuggaccuggauccuguuccucguggccgcugccacaagaguccacagcagcaacuccaaggaggugaaaucuuuccuguggacccagagccucagacgggaacuguccggcuacugcucuaauaucaaacuucaagucguuaaagacgcccaggcucugcuccacgggcuggauuuuagcgagguguccaacgugcagcgccuuaugagaaagcagaaacgggacgauggagaccugaagcgccucagagaucugaaucaagccgucaacaaucugguggaacucaagucuguucagcagaaaagcauucugcgggugggcacacuuacguccgacgaucugcucacccuggcggcugaccuugagaagcugaaaagcaaggucacacgcaccgaaagaccccucucuuccgggguguauaugggaaaccugagcucucagcaacuggaucagcggcgcgcccuccuguccaugaucggcaugagcgggggaaaucagaacucucagccuaaaggcgacggcguugugagagucugggaugugaagaaugccgaccuucugaacaaucaauucgggacaaugccgucccucacccuggcuugucuuacaaagcagggacagguggaucugaacgacgccguccaagcucucaccgaccugggccugauuuacacggccaaauaucccaauagcuccgaucucgaccggcugucucagagccauccuauccuuaacaugauugauaccaagaaauccagccugaauaucucuggguacaacuuuucccucggagcggccaucaagacaggcgcuugcaugcuggacgggggaaacaugcuugagaccauuaaaguuacaccccagaccauggauggcauccucaagagcauucugaaagugaagcgcucucugggcauguucaucagcgacacgccuggggagagaaaucccuaugaaaacauucuguacaagaucugucucuccggagauggcuggccuuauauugccucucggacagcuaucaucgggcgcgccugggagaauaccguggucgaccuggaaagcgauuccaaaccgcagaagauuggaagcaacggcucuaauaaaucccuucaaagcgcgggguuugcccccggacugacauacucucagcucaugacccugaaggacuccaugcugcagcuugauccuaacgcuaaaaccuggaucgacauugagggcagacccgaggacccuguggaaguugcccucuuccagcccaucagcggcugcuacauucacuuuuuccgggagccgacagaucugaagcaauuuaagcaggacgcuaaauauucccaugggaucgaugugacggaccuguucgccgcccagccuggacucaccucugcugucaucgaagcgcugcccagaaauauggugcuuacaugucagggcagcgaugacauuaagaaacugcucgauucccaagggcgccgggacaucaagcugauugauguuucucugaacaaaaucgacagcagaaaguuugagaaugccgugugggaucaguacaaggaccuuugccacaugcauaccggagucguggucgaaaagaagaaaaagggcgggaaagaggagauuacaccucacugugcucuccuggauugcaucauguucgacgccgccguguccggcggacugaacgcuaccguucuccgcgccgugcugccccgggacauggucuuuagaacgagcucucccaaggugguucuuugaggacuagucccuguucccagagcccacuuuuuuuucuuuuuuugaaauaaaauagccugucuuucagaucucaaaggcucuuuucagagccaccaaaaaaaaaaaaaaaaaaaaaaaaaaaaaaaaaaaaaaaaaaaaaaaaaaaaaaaaaaaaaaaaaaaaaaaaaaaaaaaaaaaaaaaaaaaaaaaaaaaaa

SEQ ID NO: 21307 - RNA, 2052 nt, Artificial Sequence
  mRNA product Design a-2 (hSL-A100) comprising derived and/or modified sequence from LASV(KAK-428;Clade n.d. (VII))__ANH09741__SP-IgE_NP(2-569) (opt5)
aggagaguccgcucagccagguugcagaagcggcuuagcguguguccuaaucuucucucugcguguagguaggccugugccgcaaacaagcuuaccauggacuggaccuggauccuguuccucguggccgcugccacaagaguccacagcagcaacuccaaggaggugaaaucuuuccuguggacccagagccucagacgggaacuguccggcuacugcacaaauaucaaacuucaagucguuaaggacgcccaggcucugcuccacgggcuggauuuuucugaggugagcaacgugcagcgccuuaugagaaagcagaaacgggacgauaaugaccugaagcgccucagagaucugaaccaagccgucaauaaccugguggaacucaaguccguucagcagaaaucugugcugaaggucggaacgcuuaauagcgacgaucugcucacccuggcggcugaccuugagaaacugaaguccaaagugguucggacagaacgcccccucagcucuggcguguauauggggaaccuguccagccagcaacuggaucagagacgggcccuccugaauaugauuggaauggccggcgggucucagggaaaccagccuucccgcgacggcgucgugagagugugggaugucaagaaugcugaccuucugaacaaucaauucggcaccaugccgagccucacacuggccugucuuaccaagcaggggcagguugaucugaacgacguggugcucgcucugacagaccugggacucaucuacaccgccaaauaucccaauucuuccgaucuggaccggcuuagccaaaaccauccuguccugaacaugauugaugugaauaaguccucucucaacaucagcggcuacaauuuuucccugggggcggccguuaaagcuggagccugcaugcuugacggcgggaacaugcuggagacgauuaagaucagcccccagaccguggauggaauccucaaaucuauucugaaggucaaacgcgcucugggcauguucguguccgacacaccuggcgagagaaaucccuaugaaaacauccucuacaagguuugucugagcgggaauggauggccuuauauugccucucggaccagcaucgugggccgcgcgugggagaacacagucguggaucuugaauccaauaagaaccagccgaaagucgggaauaacggaucuaauaagaugcugcagagcuccggcuuugccaccgggcucacguacagccaacugaugacacugagagacucuaugcuucagcucgaucccaccgcuaaaacauggauugacaucgagggacggccugaggaucccguggaacuggcccuguuccagccuuccagcggcugcuacauucacuuuuucagagagcccaccgaccucaagcaguuuaaacaagacgcuaaguauucucauggcaucgauguuaacgaccuguucuccgcccagccggggcuuaccagcgccgugcuggaagcucucccucgcaauaugguccugacaugucagggauccgaugacauccggaagcugcuugauucucaggacagaaaagauauuaagcucaucgacauuagccuguccaaagcggaugcccgcaaguuugagaacgacgugugggaucaauucaaagaccugugccacaugcauacgggcaucguuguggaaaagaagaaaaagggagggaaacaggagaugacaccccacugugcucuccuggauugcauuauguuugacgccgccgucucuggcgggcuuaacgugccuacccugcgggcugugcuccccaccgacaugguuuucagaacaaucaccacgaaggucgugcugugaggacuagucccuguucccagagcccacuuuuuuuucuuuuuuugaaauaaaauagccugucuuucagaucucaaaggcucuuuucagagccaccaaaaaaaaaaaaaaaaaaaaaaaaaaaaaaaaaaaaaaaaaaaaaaaaaaaaaaaaaaaaaaaaaaaaaaaaaaaaaaaaaaaaaaaaaaaaaaaaaaaaa

SEQ ID NO: 21308 - RNA, 2052 nt, Artificial Sequence; identical to SEQ ID NO: 21302
  mRNA product Design a-2 (hSL-A100) comprising derived and/or modified sequence from LASV(Pinneo-NIG-1969;Clade I)__AIT17837__SP-IgE_NP(2-569) (opt5)

SEQ ID NO: 21309 - RNA, 2052 nt, Artificial Sequence
  mRNA product Design a-2 (hSL-A100) comprising derived and/or modified sequence from LASV(ISTH0009-NIG-2011;Clade II)__AIT17405__SP-IgE_NP(2-569) (opt5)
aggagaguccgcucagccagguugcagaagcggcuuagcguguguccuaaucuucucucugcguguagguaggccugugccgcaaacaagcuuaccauggacuggaccuggauccuguuccucguggccgcugccacaagaguccacagcagcguguccaaggaggucaaaucuuuccuguggacccagagccucagacgggaacuguccggcuacugcucuaacaucaaacuucaaguugugaaggacgcccaggcucugcuccacgggcuggauuuuagcgagguguccaauguccagcgccuuaugagaaagcagaaacgggacgauucugaccugaagcgccucagagaucugaaccaagccgugaauaaccugguugaacucaagagcacacagcagaaauccauucugcgggugggaacgcuuaccagcgacgaucugcucacacuggcggcugaccuugagaagcugaaaucuaaggucauccgcaccgaaagaccccucuccagcggcguguauauggggaaucugucuacacagcaacuggagcagcggcgcgcccuccugaacaugauuggaaugguuggcggggcccagggaacccagccuggcagagauggcgugguccgggugugggacgugaaaaauccggaucuucugaacaaucaauucgggacaaugcccucccucacccuggcuugucuuacgaagcagggacaggucgaccugaacgaugccguucucgcucugaccgaccugggccucaucuacacagccaaguauccuaauagcucugaccuggaucgccuuucccaaagccaucccauucugaacaugguggacaucaaaaaguccucucucaauaucagcggguacaacuuuucccugggagcggccgugaaagcuggcgccugcaugcuugaugggggaaauaugcuggagaccauuaaggucacaccucagaccauggacggcauccucaaaagcauucugaaggugaaaagaucucugggcauguucguuuccgauacgcccggggaacggaacccuuaugagaacauccucuacaagauuugucugagcggagacggcuggccguauaucgcuucucgcacaagcauuguggggagagccugggaaaauaccacagucgaucuugaguccgacggaaagccccagaaagugggcucugcggggagcaacaagucccugcagagcgccggauuuccuaccggccucaccuacucucaacugaugacacugaaagauuccaugaugcagcuugaccccagcgcuaagacguggaucgauaucgagggccggccugaagaccccguugagauugcccucuaccagccgaugucugggugcuauauccacuucuuuagagaaccuaccgaccugaaacaguucaagcaagaugcuaaguacucccauggaauugacguggccgaucuguuucccgcccagccuggccucacaagcgcugucaucgaggcgcugccccgcaauauggugcuuaccugucagggguccgacgauauuaaacggcugcucgacucucagggaagacgcgauaucaagcugaucgacauugcccugagcaaagcugauucccggagauucgaaaacgccgucugggaccaaugcaaggaucuuugucacaugcauacaggcgugguuguggagaaaaagaagcgcgggggcaaagaggaaaucacgccccacugcgcccucauggacuguauuauguaugaugcugccgucucuggaggccugaauaucccugugcugcgggcgguucucccgagagacaugguguuucgcaccagcucccccaaggucgugcugugaggacuagucccuguucccagagcccacuuuuuuuucuuuuuuugaaauaaaauagccugucuuucagaucucaaaggcucuuuucagagccaccaaaaaaaaaaaaaaaaaaaaaaaaaaaaaaaaaaaaaaaaaaaaaaaaaaaaaaaaaaaaaaaaaaaaaaaaaaaaaaaaaaaaaaaaaaaaaaaaaaaaa

SEQ ID NO: 21310 - RNA, 2052 nt, Artificial Sequence
  mRNA product Design a-2 (hSL-A100) comprising derived and/or modified sequence from LASV(ISTH2010-NIG-2012;Clade II)__AIT17483__SP-IgE_NP(2-569) (opt5)
aggagaguccgcucagccagguugcagaagcggcuuagcguguguccuaaucuucucucugcguguagguaggccugugccgcaaacaagcuuaccauggacuggaccuggauccuguuccucguggccgcugccacaagaguccacagcagcgccuccaaggaggugaaaucuuuccuguggacccagagccucagacgggaacuguccggcuacugcucuaacaucaaacuucaagucguuaaggacgcucaggcccugcuccacgggcuggauuuuagcgagguguccaaugugcagcgccuuaugagaaagcagaaacgggacgauucugaccugaagcgccucagagaucugaaccaagcggucaauaaccugguggaacucaagagcacacagcagaaauccauucugcggguuggaacgcuuaccagcgacgaucugcucacacuggcugccgaccuugagaagcugaaaucuaaggugauccgcaccgaaagaccccucuccagcggcgucuauauggggaaucugucuacacagcaacuggagcagcggcgcgcccuccugaaccuuauuggaauggugggcggggcucagggaacccagccuggcagagauggcguugugcgggucugggacgugaaaaauccggaucugcucaacaaucaauucgggacaaugcccucccugacccuugccugucugacgaagcagggacagguggaccucaacgaugcuguccuggcccugaccgaccucggccugaucuacacagcgaaguauccuaauagcucugaccuugaucgccugucccaaagccaucccauucucaacaugguugacaccaaaaaguccucucugaauaucagcggguuuaacuucucccuuggagccgcugugaaagccggcgcuugcaugcuggaugggggaaauaugcucgagacaaucaaggugaccccucagacgauggacggcauucugaaaagcauccugaaggucaaaaagucucucggcauguuuguguccgauacacccggggaaagaaacccuuacgagaacauucuguauaagaucugucuuagcggagacggcuggccguacauugccucucggaccagcaucguugggcgcgcgugggaaaauacaaccguggaucuggaguccgacggaaaaccccacaaggucggcaccgccgggucuaacaaaagccuccaguccgcuggauucccuacaggccugacguauagccagcugaugacccuuaaggauucuaugaugcaacucgaccccuccgccaaaacauggauugauaucgagggcagaccugaagaccccguggagaucgcucuguaccagccgaugagcgggugcuacauucacuuuuuccgggaaccuaccgaccugaagcaguuuaagcaggaugccaaauauucucauggaaucgacguugccgaucucuuccccgcucaaccuggccugacauccgcggugauugaggcccuucccagaaauaugguccugaccugucaggggagcgacgauaucaagcgccuccuggacucccagggacggagagauauuaaacugaucgacaucgcucuuucuaaggccgauagccgccgguuugaaaacgccgugugggaccagugcaaagaucucugucauaugcacacgggcgucgugguugagaagaagaaaagagggggcaaggaggaaauuacaccccacugcgcucugauggacuguaucauguacgaugccgcgguguccggaggccugaauauuccuguccuccgcgcugugcugccgcgggacaugguuuucagaaccucuagccccaaagugguccuuugaggacuagucccuguucccagagcccacuuuuuuuucuuuuuuugaaauaaaauagccugucuuucagaucucaaaggcucuuuucagagccaccaaaaaaaaaaaaaaaaaaaaaaaaaaaaaaaaaaaaaaaaaaaaaaaaaaaaaaaaaaaaaaaaaaaaaaaaaaaaaaaaaaaaaaaaaaaaaaaaaaaaa

SEQ ID NO: 21311 - RNA, 2052 nt, Artificial Sequence
  mRNA product Design a-2 (hSL-A100) comprising derived and/or modified sequence from LASV(Lassa virus/H.sapiens-wt/NGA/2015/ISTH_0543;Clade II)__AVO03640__SP-IgE_NP(2-569) (opt5)
aggagaguccgcucagccagguugcagaagcggcuuagcguguguccuaaucuucucucugcguguagguaggccugugccgcaaacaagcuuaccauggacuggaccuggauccuguuccucguggccgcugccacaagaguccacagcagcgccuccaaggaggugaaaucuuuccuguggacccagagccucagacgggaacuguccggcuacugcucuaacaucaaacuucaagucguuaaggacgcucaggcccugcuccacgggcuggauuuuagcgagguguccaaugugcagcgccuuaugagaaagcagaaacgggacgauucugaccugaagcgccucagagaucugaaccaagcggucaauaaccugguggaacucaagagcacacagcagaaauccauucugcggguuggaacgcuuaccagcgacgaucugcucacacuggcugccgaccuugagaagcugaaaucuaaggugauccgcaccgaaagaccccucuccagcggcgucuauauggggaaucugucuacacagcaacuggagcagcggcgcgcccuccugaacaugauuggaauggugggcggggcucagggaacccagccuggcagagauggcguugugcgggucugggacgugaaaaauccggaucuucugaacaaucaauucgggacaaugcccucccucacccuggccugucuuacgaagcagggacagguggaccugaacgaugcuguccucgcccugaccgaccugggccucaucuacacagcgaaguauccuaauagcucugaccuggaucgccuuucccaaagccaucccauucugaacaugguugacaccaaaaaguccucucucaauaucagcggguacaacuuuucccugggagccgcugugaaagccggcgcuugcaugcuugaugggggaaauaugcuggagacaaucaaggugaccccucagacgauggacggcauucucaaaagcauccugaaggucaaaaagucucugggcauguucguguccgauacacccggggaaagaaacccuuaugagaacauucucuacaagaucugucugagcggagacggcuggccguauauugccucucggaccagcaucguugggcgcgcgugggaaaauacaaccguggaucuugaguccgacggaaaaccccagaaggucggcucugccgggagcaacaaaucccugcagagcgcuggauuuccuaccggccucacauacucucaacugaugacgcugaaggauuccaugaugcagcuugaccccagcgccaaaaccuggauugauaucgagggcagaccugaagaccccguggagaucgcucucuaccagccgaugucugggugcuauauucacuucuuucgggaaccuacagaccugaagcaguucaagcaagaugccaaauacucccauggaaucgacguugccgaucuguuucccgcucagccuggccucaccagcgcggugauugaggcccugcccagaaauaugguccuuacaugucagggguccgacgauaucaagcgccugcucgacucucagggacggaaagauauuaagcugaucgacaucgcucugagcaaagccgauuccagacgcuucgaaaacgccgugugggaccaaugcaaggaucuuugucacaugcauaccggcgucgugguugagaagaaaaagagagggggcaaagaggaaauuacgccccacugcgcucucauggacuguaucauguaugaugccgcggugucuggaggccugaauauuccuguccugcgggcugugcucccgcgcgacaugguuuuucggacaagcucccccaaggugguccugugaggacuagucccuguucccagagcccacuuuuuuuucuuuuuuugaaauaaaauagccugucuuucagaucucaaaggcucuuuucagagccaccaaaaaaaaaaaaaaaaaaaaaaaaaaaaaaaaaaaaaaaaaaaaaaaaaaaaaaaaaaaaaaaaaaaaaaaaaaaaaaaaaaaaaaaaaaaaaaaaaaaaa

SEQ ID NO: 21312 - RNA, 2052 nt, Artificial Sequence
  mRNA product Design a-2 (hSL-A100) comprising derived and/or modified sequence from LASV(Lassa virus/H.sapiens-wt/NGA/2016/ISTH_0009;Clade II)__AVO03572__SP-IgE_NP(2-569) (opt5)
aggagaguccgcucagccagguugcagaagcggcuuagcguguguccuaaucuucucucugcguguagguaggccugugccgcaaacaagcuuaccauggacuggaccuggauccuguuccucguggccgcugccacaagaguccacagcagcgccuccaaggaggugaaaucuuuccuguggacccagagccucagacgggaacuguccggcuacugcucuaacaucaaacuucaagucguuaaggacgcucaggcccugcuccacgggcuggauuuuagcgagguguccaaugugcagcgccuuaugagaaagcagaaacgggacgauucugaccugaagcgccucagagaucugaaccaagcggucaauaaccugguggaacucaagagcacacagcagaaauccauucugcggguuggaacgcuuaccagcgacgaucugcucacacuggcugccgaccuugagaagcugaaaucuaaggugauccgcaccgaaagaccccucuccagcggcgucuauauggggaaucugucuacacagcaacuggagcagcggcgcgcccuccugaacaugauuggaauggugggcggggcucagggaacccagccuggcagagauggcguugugcgggucugggacgugaaaaauccggaucuucugaacaaucaauucgggacaaugcccucccucacccuggccugucuuacgaagcagggacagguggaccugaacgaugcuguccucgcccugaccgaccugggccucaucuacacagcgaaguauccuaauagcucugaccuggaucgccuuucccaaagccaucccauucugaacaugguugacaccaaaaaguccucucucaauaucagcggguacaacuuuucccugggagccgcugugaaagccggcgcuugcaugcuugaugggggaaauaugcuggagacaaucaaggugaccccucagacgauggacggcauucucaaaagcauccugaaggucaaaaagucucugggcauguucguguccgauacacccggggaaagaaacccuuaugagaacauucucuacaagaucugucugagcggagacggcuggccguauauugccucucggaccagcaucguugggcgcgcgugggaaaauacaaccguggaucuugaguccgacggaaaaccccagaaggucggcucugccgggagcaacaaaucccugcagagcgcuggauuuccuaccggccucacauacucucaacugaugacgcugaaggauuccaugaugcagcuugaccccagcgccaaaaccuggauugauaucgagggcagaccugaagaccccguggagaucgcucucuaccagccgaugucugggugcuauauucacuucuuucgggaaccuacagaccugaagcaguucaagcaagaugccaaauacucccauggaaucgacguugccgaucuguuucccgcucagccuggccucaccagcgcggugauugaggcccugcccagaaauaugguccuuacaugucagggguccgacgauaucaagcgccugcucgacucucagggacggagagauauuaaacugaucgacaucgcucugagcaaggccgauucccgccgguucgaaaacgccgugugggaccaaugcaaagaucuuugucacaugcauaccggcgucgugguugagaagaagaaaagagggggcaaggaggaaauuacgccccacugcgcucucauggacuguaucauguaugaugccgcggugucuggaggccugaauauuccuguccugcgcgcugugcucccgcgggacaugguuuuuagaacaagcucccccaaagugguccugugaggacuagucccuguucccagagcccacuuuuuuuucuuuuuuugaaauaaaauagccugucuuucagaucucaaaggcucuuuucagagccaccaaaaaaaaaaaaaaaaaaaaaaaaaaaaaaaaaaaaaaaaaaaaaaaaaaaaaaaaaaaaaaaaaaaaaaaaaaaaaaaaaaaaaaaaaaaaaaaaaaaaa

SEQ ID NO: 21313 - RNA, 2052 nt, Artificial Sequence
  mRNA product Design a-2 (hSL-A100) comprising derived and/or modified sequence from LASV(Lassa virus/H.sapiens-wt/NGA/2016/ISTH_0017;Clade II)__AVO03568__SP-IgE_NP(2-569) (opt5)
aggagaguccgcucagccagguugcagaagcggcuuagcguguguccuaaucuucucucugcguguagguaggccugugccgcaaacaagcuuaccauggacuggaccuggauccuguuccucguggccgcugccacaagaguccacagcagcgccuccaaggaggugaaaucuuuccuguggacccagagccucagacgggaacuguccggcuacugcucuagcaucaaacuucaagucguuaaggacgcucaggcccugcuccacgggcuggauuuuuccgaggugucuaacgugcagcgccuuaugagaaagcagaaacgggacgauagcgaccugaagcgccucagagaucugaaucaagcggucaacaaucugguggaacucaaguccacacagcagaaaagcauucugcggguuggaacgcuuaccucugacgaucugcucacacuggcugccgaccuugagaagcugaaauccaaggugauccgcaccgaaagaccccucagcucuggcgucuauauggggaaccuguccacacagcaacuggagcagcggcgcgcccuccugaauaugauuggaauggcuggcggggcccagggaacccagccuggcagagauggcgugguucgggugugggacgucaaaaacccggaucuucugaauaaccaauucgggacaaugcccagccucacccuggcuugucuuacgaagcagggacagguggaccugaaugaugccgugcucgcgcugaccgaccugggccucaucuacacagccaaguauccuaacucuuccgaccuggaucgccuuagccaaucccaucccauucugaauauggucgacaccaaaaagucuagccucaacaucuccggguacaauuuuagccugggagcugccguuaaagcuggcgccugcaugcuugaugggggaaacaugcuggagacaaucaaggugaccccucagacgauggacggcauucucaaaucuauccugaaggugaaaagaucccugggcauguucgucagcgaugcgcccggggaacggaauccuuaugagaacauucucuacaagaucugucugucuggagacggcuggccguauauugccagccgcacauccaucguggggagagcuugggaaaacaccacaguugaucuugagucugacggaaagccccagaaagugggcgccaccgggagcaauaagucccugcagagcgcuggauuuccuaccggccucacauacucucaacugaugacgcugaaagauuccaugaugcagcuugaccccagcgccaagaccuggauugauaucgagggccggccugaagaccccgucgagguggcccucuaccagccgguuucugggugcuauauccacuucuuuagagaaccuacagaccugaaacaguucaagcaagaugcuaaguacucccauggaauugacguggcggaucuguuucccgcccagccuggccucaccagcgcugucaucgaggcccugccccgcaacauggugcuuacaugucagggguccgacgauauuaaaaagcugcucgacucucagggacggaaagauaucaagcugauugacaucgcccugagcaaagcugauuccagacgcuucgaaaaugccgucugggaccaaugcaaggaucuuugucacaugcauaccggcgugguuguggagaagaaaaagagagggggcaaagaggaaaucacgccccacugcgcgcucauggacuguauuauguaugaugcugccgucucuggaggccugaacaucccugugcugcgggccguucucccgcgcgacaugguguuucggacaagcucccccaaggucgugcugugaggacuagucccuguucccagagcccacuuuuuuuucuuuuuuugaaauaaaauagccugucuuucagaucucaaaggcucuuuucagagccaccaaaaaaaaaaaaaaaaaaaaaaaaaaaaaaaaaaaaaaaaaaaaaaaaaaaaaaaaaaaaaaaaaaaaaaaaaaaaaaaaaaaaaaaaaaaaaaaaaaaaa

SEQ ID NO: 21314 - RNA, 2052 nt, Artificial Sequence
  mRNA product Design a-2 (hSL-A100) comprising derived and/or modified sequence from LASV(Lassa virus/H.sapiens-wt/NGA/2018/ISTH_0959;Clade II)__AVV65100__SP-IgE_NP(2-569) (opt5)
aggagaguccgcucagccagguugcagaagcggcuuagcguguguccuaaucuucucucugcguguagguaggccugugccgcaaacaagcuuaccauggacuggaccuggauccuguuccucguggccgcugccacaagaguccacagcagcgccuccaaggaggugaaaucuuuccuguggacccagagccucagacgggaacuguccggcuacugcucuaacaucaaacuucaagucguuaaggacgcucaggcccugcuccacgggcuggauuuuagcgagguguccaaugugcagcgccuuaugagaaagcagaaacgggacgauucugaccugaagcgccucagagaucugaaccaagcggucaauaaccugguggaacucaagagcacccagcagaaauccauucugcggguuggaacgcuuaccagcgacgaucugcucacacuggcugccgaccuugagaagcugaaaucuaaggugauccgcaccgaaagaccccucuccagcggcgucuauauggggaaucugucuacacagcaacuggagcagcggcgcgcccuccugaaccuuauuggaauggugggcggggcucagggaacccagccuggcagagauggcguugugcgggucugggacgugaaaaauccggaucugcucaacaaucaauucgggacaaugcccucccugacccuugccugucugacgaagcagggacagguggaccucaacgaugucguucuggcucugaccgaccucggccugaucuacacagccaaguauccuaauagcucugaccuugaucgccugucccaaagccaucccauucucaacaugguggacaccaaaaaguccucucugaauaucagcggguuuaacuucucccuuggagcggccgugaaagcuggcgccugcaugcuggaugggggaaauaugcucgagacaaucaaggucaccccucagacgauggacggcauucugaaaagcauccugaaggugaaaaagucucucggcauguuuguuuccgauacacccggggaaagaaacccuuacgagaacauucuguauaagaucugucuuagcggagacggcuggccguacauugcuucucggaccagcaucguggggcgcgccugggaaaauacaaccgucgaucuggaguccgacggaaaaccccacaaggugggcaccgcggggucuaacaaaagccuccaguccgccggauucccuacaggccugacguauagccagcugaugacccuuaaggauucuaugaugcaacucgaccccuccgcuaaaacauggauugauaucgagggcagaccugaagaccccguugagaucgcccuguaccagccgaugagcgggugcuacauucacuuuuuccgggaaccuaccgaccugaagcaguuuaagcaggaugcuaaauauucucauggaaucgacguggccgaucucuuccccgcccaaccuggccugacauccgcugucauugaggcgcuucccagaaauauggugcugaccugucaggggagcgacgauaucaagcgccuccuggacucccagggacggaaagauauuaagcugaucgacaucgcccuuucuaaaacggauagcagacgcuuugaaaacgcugucugggaccagugcaaggaucucugucauaugcacacaggcgugguuguggagaagaaaaagagagggggcaaagaggaaauuacaccccacugcgcccugauggacuguaucauguacgaugccgcugucuccggaggccugaauauuccugugcuccgggccguucugccgcgcgacaugguguuccggaccucuagccccaaggucgugcuuugaggacuagucccuguucccagagcccacuuuuuuuucuuuuuuugaaauaaaauagccugucuuucagaucucaaaggcucuuuucagagccaccaaaaaaaaaaaaaaaaaaaaaaaaaaaaaaaaaaaaaaaaaaaaaaaaaaaaaaaaaaaaaaaaaaaaaaaaaaaaaaaaaaaaaaaaaaaaaaaaaaaaa

SEQ ID NO: 21315 - RNA, 2052 nt, Artificial Sequence
  mRNA product Design a-2 (hSL-A100) comprising derived and/or modified sequence from LASV(LASV003-NIG-2008;Clade II)__AIT17581__SP-IgE_NP(2-569) (opt5)
aggagaguccgcucagccagguugcagaagcggcuuagcguguguccuaaucuucucucugcguguagguaggccugugccgcaaacaagcuuaccauggacuggaccuggauccuguuccucguggccgcugccacaagaguccacagcagcgccuccaaggaggugaaaucuuuccuguggacccagagccucagacgggaacuguccggcuacugcucuagcaucaaacuucaagucguuaaggacgcucaggcccugcuccacgggcuggauuuuuccgaggugucuaacgugcagcgccuuaugagaaagcagaaacgggacgauagcgaccugaagcgccucagagaucugaaucaagcggucaacaaucugguggaacucaaguccacccagcagaaaagcguucugcgggugggaacgcuuaccucugacgaucugcucacacuggcugccgaccuugagaagcugaaauccaaggucauucgcaccgaaagaccccucagcucuggcguguauauggggaaccuguccgcccagcaacuggagcagcggcgcacacuccugaauaugaucggaaugguuggcggggcucagggaacccagccuggcagagauggcgugguccgggugugggacgugaaaaacccggaucuucugaauaaccaauucgggacaaugcccagccucacccuggccugucuuacgaagcagggacaggucgaccugaaugauguugugcucgcucugaccgaccugggccucauuuacacagccaaguauccuaacucuuccgaccuggaucgccuuagccaaucccaucccauccugucuaugguggacaccaaaaagagcucccucaauauuagcggguacaacuuuucucugggagcggccgucaaagcuggcgccugcaugcuugaugggggaaauaugcuggagacaaucaaggugaccccucagacgauggacggcauccucaaauccauucugaagguuaaaaagagccugggcauguucgugucugauacacccggggaaagaaacccuuaugagaauauccucuacaagauuugucugagcggagacggcuggccguauaucgcuucccggaccucuauugucgggcgcgccugggaaaacacaaccguggaucuugagagcgacggaaaaccccagaagguuggcaccgcgggguccaacaaaagccugcagucugccggauuuccuacaggccucacguacucccaacugaugacccugaaggauagcaugaugcagcuugaccccucugcuaaaacauggaucgauauugagggcagaccugaagaccccguggagaucgcccucuaccagccgauguccgggugcuauauccacuucuuucgggaaccuaccgaccugaagcaguucaagcaagaugcuaaauacagccauggaauugacgucacagaucuguuucccgcccagccuggccucaccuccgccgugaucgaggcucugcccagaaauaugguccuuacgugucaggggucugacgauauuaagcgccugcucgacagccagggacggagagauaucaaacugauugacaucgcgcuguccaaggccgauucucgccgguucgaaaacgcugugugggaccaaugcaaagaucuuugucacaugcauacaggcguuguggucgagaagaagaaaagagggggcaaggaggaaaucacaccccacugcgcccucauggacuguauuauguaugaugccgcugugagcggaggccugaauaucccuguucugcgcgccgugcucccgcgggacauggucuuuagaaccuccagccccaaaguggugcugugaggacuagucccuguucccagagcccacuuuuuuuucuuuuuuugaaauaaaauagccugucuuucagaucucaaaggcucuuuucagagccaccaaaaaaaaaaaaaaaaaaaaaaaaaaaaaaaaaaaaaaaaaaaaaaaaaaaaaaaaaaaaaaaaaaaaaaaaaaaaaaaaaaaaaaaaaaaaaaaaaaaaa

SEQ ID NO: 21316 - RNA, 2052 nt, Artificial Sequence
  mRNA product Design a-2 (hSL-A100) comprising derived and/or modified sequence from LASV(LASV035-NIG-2009;Clade II)__AIT17589__SP-IgE_NP(2-569) (opt5)
aggagaguccgcucagccagguugcagaagcggcuuagcguguguccuaaucuucucucugcguguagguaggccugugccgcaaacaagcuuaccauggacuggaccuggauccuguuccucguggccgcugccacaagaguccacagcagcgccuccaaggaggugaaaucuuuccuguggacccagagccucagacgggaacuguccggcuacugcucuagcaucaaacuucaagucguuaaagacgcucaggcccugcuccacgggcuggauuuuuccgaggugucuaacgugcagcgccuuaugagaaagcagaaacgggacgauagcgaccugaagcgccucagagaucugaaucaagcggucaacaaucugguggaacucaaguccacacagcagaaaagcauucugcggguuggaacgcuuaccucugacgaucugcucacacuggcugccgaccuugagaagcugaaauccaaggugauccgcaccgaaagaccccucagcucuggcgucuauauggggaaccuguccgcccagcaacuggagcagcggcgcgcucuccugaauaugauuggaauggugggcggggcccagggaacacagccuggcagagauggcguugugcgggucugggacgugaaaaacccggaucuucugaauaaccaauucgggaccaugcccagccucacacuggcuugucuuaccaagcagggacagguggaccugaaugaugccguccucgcgcugacggaccugggccucaucuacaccgccaaguauccuaacucuuccgaccuggaucgccuuagccaaucccaucccauucugaauaugguugacacaaagaagucuagccucaacaucuccggguacaauuuuagccugggagcugccgugaaagcuggcgccugcaugcuugaugggggaaacaugcuggagaccaucaaggugacaccucagaccauggacggcauucucaaaucuauccugaaggucaaaagaucccugggcauguucgugagcgauacgcccggggaacggaauccuuaugagaacauucucuacaagaucugucugucuggagacggcuggccguauauugcgagccgcacauccaucguugggagagccugggaaaacaccacaguggaucuugagucugacggaaagccccagaaagucggcaccaccgggagcaauaagucccugcagagcgcuggauuuccuacaggccucacguacucucaacugaugacccugaaagauuccaugaugcagcuugaccccagcgccaagacauggauugauaucgagggccggccugaagaccccguggagaucgcucucuaccagccgaugucugggugcuauauucacuucuuuagagaaccuaccgaccugaaacaguucaagcaagaugccaaguacucccauggaaucgacguugccgaucuguuucccgcucagccuggccucacaagcgcggugauugaggcccugccccgcaacaugguccuuaccugucagggguccgacgauaucaaaaagcugcucgacucucagggacggagagauauuaaacugaucgacaucgcucugagcaaggccgauucccgcaaauucgaaaaugccgugugggaccaaugcaaggaucuuugucacaugcauacgggcgucgugguugagaagaaaaagagagggggcaaagaggaaauuacaccccacugcgcucucauggacuguaucauguaugaugccgcggugucuggaggccugaacauuccuguccugcgggcugugcucccgcgcgacaugguuuuucggaccagcucccccaaggugguccugugaggacuagucccuguucccagagcccacuuuuuuuucuuuuuuugaaauaaaauagccugucuuucagaucucaaaggcucuuuucagagccaccaaaaaaaaaaaaaaaaaaaaaaaaaaaaaaaaaaaaaaaaaaaaaaaaaaaaaaaaaaaaaaaaaaaaaaaaaaaaaaaaaaaaaaaaaaaaaaaaaaaaa

SEQ ID NO: 21317 - RNA, 2052 nt, Artificial Sequence
  mRNA product Design a-2 (hSL-A100) comprising derived and/or modified sequence from LASV(LASV1000-NIG-2009;Clade II)__AIT17783__SP-IgE_NP(2-569) (opt5)
aggagaguccgcucagccagguugcagaagcggcuuagcguguguccuaaucuucucucugcguguagguaggccugugccgcaaacaagcuuaccauggacuggaccuggauccuguuccucguggccgcugccacaagaguccacagcagcgccuccaaggaggugaaaucuuuccuguggacccagagccucagacgggaacuguccggcuacugcucuaacaucaaacuucaagucguuaaggacgcucaggcccugcuccacgggcuggauuuuagcgagguguccaaugugcagcgccuuaugagaaagcagaaacgggacgauucugaccugaagcgccucagagaucugaaccaagcggucaauaaccugguggaacucaagagcacacagcagaaauccauucugcggguuggaacgcuuaccagcgacgaucugcucacacuggcugccgaccuugagaagcugaaaucuaaggugauccgcaccgaaagaccccucuccagcggcgucuauauggggaaucugucuacacagcaacuggagcagcggcgcgcccuccugaacaugauuggaauggugggcggggcucagggaacccagccuggcagagauggcguugugcgggucugggacgugaaaaauccggaucuucugaacaaucaauucgggacaaugcccucccucacccuggccugucuuacgaagcagggacagguggaccugaacgaugucguucucgcucugaccgaccugggccucaucuacacagccaaguauccuaauagcucugaccuggaucgccuuucccaaagccaucccauucugaacaugguggacaccaaaaaguccucucucaauaucagcggguacaacuuuucccugggagcggccgugaaagcuggcgccugcaugcuugaugggggaaauaugcuggagacaaucaaggucaccccucagacgauggacggcauucucaaaagcauccugaaggugaaaaagucucugggcauguucguuuccgauacacccggggaaagaaacccuuaugagaacauucucuacaagaucugucugagcggagacggcuggccguauauugcuucucggaccagcaucguggggcgcgccugggaaaauacaaccgucgaucuugaguccgacggaaaaccccagaaggugggcaccgcggggucuaacaaaagccugcaguccgccggauuuccuacaggccucacguacagccaacugaugacccugaaggauucuaugaugcagcuugaccccuccgcuaaaacauggauugauaucgagggcagaccugaagaccccguugagaucgcccucuaccagccggugagcgggugcuauauucacuucuuucgggaaccuaccgaccugaagcaguucaagcaagaugcuaaauacucucauggaaucgacgucgccgaucuguuucccgcccagccuggccucacauccgcugugauugaggcgcugcccagaaauaugguccuuaccugucaggggagcgacgauaucaagcgccugcucgacucccagggacggagagauauuaaacugaucgacaucgcccugucuaaggcugauagccgccgguucgaaaacgccgugugggaccaaugcaaagaucuuugucacaugcauacgggcguuguggucgagaagaagaaaagagggggcaaggaggaaauuacaccccacugcgcccucauggacuguaucauguaugaugcugccguguccggaggccugaauauuccuguucugcgcgcggugcucccgcgggacauggucuuuagaaccucuagccccaaaguggugcugugaggacuagucccuguucccagagcccacuuuuuuuucuuuuuuugaaauaaaauagccugucuuucagaucucaaaggcucuuuucagagccaccaaaaaaaaaaaaaaaaaaaaaaaaaaaaaaaaaaaaaaaaaaaaaaaaaaaaaaaaaaaaaaaaaaaaaaaaaaaaaaaaaaaaaaaaaaaaaaaaaaaaa

SEQ ID NO: 21318 - RNA, 2052 nt, Artificial Sequence
  mRNA product Design a-2 (hSL-A100) comprising derived and/or modified sequence from LASV(LASV221-NIG-2010;Clade II)__AIT17625__SP-IgE_NP(2-569) (opt5)
aggagaguccgcucagccagguugcagaagcggcuuagcguguguccuaaucuucucucugcguguagguaggccugugccgcaaacaagcuuaccauggacuggaccuggauccuguuccucguggccgcugccacaagaguccacagcagcgccuccaaggaggugaaaucuuuccuguggacccagagccucagacgggaacuguccggcuacugcucuagcaucaaacuucaagucguuaaggacgcucaggcccugcuccacgggcuggauuuuuccgaggugucuaacgugcagcgccuuaugagaaagcagcggcgcgacgauagcgaccugaaaagacuccgggaucugaaucaagcggucaacaaucugguggaacucaaguccacacagcaaaagagcauucugcgcguuggaacgcuuaccucugacgaucugcucacacuggcugccgaccuugagaaacugaaguccaaagugaucagaaccgaacggccccucagcucuggcgucuauauggggaaccuguccacacagcagcuggagcagcgcagagcccuccugaauaugauuggaauggugggcggggcucagggaacccagccuggccgggauggcguugugcgcgucugggacgugaagaacccggaucuucugaauaaccaauucgggacaaugcccagccucacccuggccugucuuacgaaacagggacagguggaccugaaugaugcuguccucgcccugaccgaccugggccucaucuacacagcgaaguauccuaacucuuccgaccuggauagacuuagccaaucccaucccauucugaauaugguugacaccaagaaaucuagccucaacaucuccggguacaauuuuagccugggagccgcugugaaggccggcgcuugcaugcuugaugggggaaacaugcuggagacaaucaaagugaccccucagacggucgacggcauucucaagucuauccugaaagugaagcggucccugggcauguucguuagcgauacacccggggaacgcaauccuuaugagaacauucucuacaaaaucugucugucuggagacggcuggccguauauugccagcagaaccuccaucguggggcgggcgugggaaaacacaaccgucgaucuugagucugacggaaagccccagaaggugggcaccgccgggagcaauaaaucccugcagagcgcuggauuuccuacaggccucacguacucucaacugaugacccugaaggauuccaugaugcagcuugaccccagcgccaaaacauggauugauaucgagggcagaccugaagaccccguugagaucgcucucuaccagccgaugucugggugcuauauucacuucuuucgcgaaccuaccgaccugaagcaguucaaacaagaugccaaguacucccauggaaucgacguggccgaucuguuucccgcucagccuggccucacaagcgcggucauugaggcccugccccggaacauggugcuuaccugucagggguccgacgauaucaagagacugcucgacucucagggacgccgggauauuaaacugaucgacaucgcucugagcaaggccgauuccagaaaauucgaaaaugccgucugggaccaaugcaaggaucuuugucacaugcauacgggcgugguuguggagaaaaagaagcgcgggggcaaagaggaaauuacaccccacugcgcucucauggacuguaucauguaugaugccgcggucucuggaggccugaacauuccugugcugcgggcuguucucccgagagacaugguguuucgcaccagcucccccaaggucgugcugugaggacuagucccuguucccagagcccacuuuuuuuucuuuuuuugaaauaaaauagccugucuuucagaucucaaaggcucuuuucagagccaccaaaaaaaaaaaaaaaaaaaaaaaaaaaaaaaaaaaaaaaaaaaaaaaaaaaaaaaaaaaaaaaaaaaaaaaaaaaaaaaaaaaaaaaaaaaaaaaaaaaaa

SEQ ID NO: 21319 - RNA, 2052 nt, Artificial Sequence
  mRNA product Design a-2 (hSL-A100) comprising derived and/or modified sequence from LASV(LASV237-NIG-2010;Clade II)__AIT17639__SP-IgE_NP(2-569) (opt5)
aggagaguccgcucagccagguugcagaagcggcuuagcguguguccuaaucuucucucugcguguagguaggccugugccgcaaacaagcuuaccauggacuggaccuggauccuguuccucguggccgcugccacaagaguccacagcagcgccuccaaggaggugaaaucuuuccuguggacccagagccucagacgggaacuguccggcuacugcucuaacaucaaacuucaagucguuaaggacgcucaggcccugcuccacgggcuggauuuuagcgagguguccaaugugcagcgccuuaugagaaagcagaaacgggacgauucugaccugaagcgccucagagaucugaaccaagcggucaauaaccugguggaacucaagagcacacagcagaaauccauucugcggguuggaacgcuuaccagcgacgaucugcucacacuggcugccgaccuugagaagcugaaaucuaaggugauccgcaccgaaagaccccucuccagcggcgucuauauggggaaucugucuacacagcaacuggagcagcggcgcgcccuccugaacaugauuggaauggugggcggggcucagggaacccagccuggcagagauggcguugugcgggucugggacgugaaaaauccggaucuucugaacaaucaauucgggacaaugcccucccucacccuggccugucuuacgaagcagggacagguggaccugaacgaugcuguccucgcccugaccgaccugggccucaucuacacagcgaaguauccuaauagcucugaccuggaucgccuuucccaaagccaucccauucugaacaugguugacaucaaaaaguccucucucaauaucagcggguacaacuuuucccugggagccgcugugaaagccggcgcuugcaugcuugaugggggaaauaugcuggagaccauuaaggugacaccucagaccauggacggcauccucaaaagcauucugaaggucaaaagaucucugggcauguucguguccgauacgcccggggaacggaacccuuaugagaacauccucuacaagauuugucugagcggagacggcuggccguauaucgccucucgcacaagcauuguugggagagcgugggaaaauaccacaguggaucuugaguccgacggaaagccccagaaagucggcucugccgggagcaacaagucccugcagagcgcuggauuuccuaccggccucaccuacucucaacugaugacacugaaagauuccaugaugcagcuugaccccagcgccaagacguggaucgauaucgagggccggccugaagaccccguggagauugcucucuaccagccgaugucugggugcuauauccacuucuuuagagaaccuaccgaccugaaacaguucaagcaagaugccaaguacucccauggaauugacguugccgaucuguuucccgcucagccuggccucacaagcgcggugaucgaggcccugccccgcaauaugguccuuaccugucagggguccgacgauauuaaacggcugcucgacucucagggaagacgcgauaucaagcugaucgacauugcucugagcaaagccgauucccggagauucgaaaacgccgugugggaccaaugcaaggaucuuugucacaugcauacaggcgucgugguugagaaaaagaagcgcgggggcaaagaggaaaucacgccccacugcgcucucauggacuguauuauguaugaugccgcggugucuggaggccugaauaucccuguccugcgggcugugcucccgagagacaugguuuuucgcaccagcucccccaaggugguccugugaggacuagucccuguucccagagcccacuuuuuuuucuuuuuuugaaauaaaauagccugucuuucagaucucaaaggcucuuuucagagccaccaaaaaaaaaaaaaaaaaaaaaaaaaaaaaaaaaaaaaaaaaaaaaaaaaaaaaaaaaaaaaaaaaaaaaaaaaaaaaaaaaaaaaaaaaaaaaaaaaaaaa

SEQ ID NO: 21320 - RNA, 2052 nt, Artificial Sequence
  mRNA product Design a-2 (hSL-A100) comprising derived and/or modified sequence from LASV(LASV253-NIG-2011;Clade II)__AIT17671__SP-IgE_NP(2-569) (opt5)
aggagaguccgcucagccagguugcagaagcggcuuagcguguguccuaaucuucucucugcguguagguaggccugugccgcaaacaagcuuaccauggacuggaccuggauccuguuccucguggccgcugccacaagaguccacagcagcgccuccaaggaggugaaaucuuuccuguggacccagagccucagacgggaacuguccggcuacugcucuagcaucaaacuucaagucguuaaggacgcucaggcccugcuccacgggcuggauuuuuccgaggugucuaacgugcagcgccuuaugagaaagcagaaacgggacgauagcgaccugaagcgccucagagaucugaaucaagcggucaacaaucugguggaacucaaguccacccagcagaaaagcguucugcgggugggaacgcuuaccucugacgaucugcucacacuggcugccgaccuugagaagcugaaauccaaggucauucgcaccgaaagaccccucagcucuggcguguauauggggaaccuguccacacagcaacuggagcagcggcgcgcccuccugaauaugaucggaaugguuggcggggcucagggaacccagccuggcagagauggcgugguccgggugugggacgugaaaaacccggaucuucugaauaaccaauucgggacaaugcccagccucacccuggccugucuuacgaagcagggacaggucgaccugaaugauguugugcucgcucugaccgaccugggccucauuuacacagccaaguauccuaacucuuccgaccuggaucgccuuagccaaucccaucccauccugaauaugguggacaccaaaaagucuagccucaacauuuccggguacaauuuuagccugggagcggccgucaaagcuggcgccugcaugcuugaugggggaaacaugcuggagacaaucaaggugaccccucagacgauggacggcauccucaaaucuauucugaagguuaaaaagucccugggcauguucgugagcgauacacccggggaaagaaauccuuaugagaacauccucuacaagauuugucugucuggagacggcuggccguauaucgcuagccggaccuccauugucgggcgcgccugggaaaacacaaccguggaucuugagucugacggaaaaccccagaagguuggcaccgcggggagcaauaaaucccugcagagcgccggauuuccuacaggccucacguacucucaacugaugacccugaaggauuccaugaugcagcuugaccccagcgcuaaaacauggaucgauauugagggcagaccugaagaccccguggagaucgcccucuaccagccgaugucugggugcuauauccacuucuuucgggaaccuaccgaccugaagcaguucaagcaagaugcuaaauacucccauggaauugacgucacagaucuguuucccgcccagccuggccucaccagcgccgugaucgaggcucugcccagaaacaugguccuuacgugucagggguccgacgauauuaagcgccugcucgacucucagggacggagagauaucaaacugauugacaucgcgcugagcaaggccgauucccgccgguucgaaaaugcugugugggaccaaugcaaagaucuuugucacaugcauacaggcguuguggucgagaagaagaaaagagggggcaaggaggaaaucacaccccacugcgcccucauggacuguauuauguaugaugccgcugugucuggaggccugaacaucccuguucugcgcgccgugcucccgcgggacauggucuuuagaaccagcucccccaaaguggugcugugaggacuagucccuguucccagagcccacuuuuuuuucuuuuuuugaaauaaaauagccugucuuucagaucucaaaggcucuuuucagagccaccaaaaaaaaaaaaaaaaaaaaaaaaaaaaaaaaaaaaaaaaaaaaaaaaaaaaaaaaaaaaaaaaaaaaaaaaaaaaaaaaaaaaaaaaaaaaaaaaaaaaa

SEQ ID NO: 21321 - RNA, 2052 nt, Artificial Sequence
  mRNA product Design a-2 (hSL-A100) comprising derived and/or modified sequence from LASV(LASV254-NIG-2011;Clade II)__AIT17675__SP-IgE_NP(2-569) (opt5)
aggagaguccgcucagccagguugcagaagcggcuuagcguguguccuaaucuucucucugcguguagguaggccugugccgcaaacaagcuuaccauggacuggaccuggauccuguuccucguggccgcugccacaagaguccacagcagcgccuccaaggaggugaaaucuuuccuguggacccagagccucagacgggaacuguccggcuacugcucuagcaucaaacuucaagucguuaaggacgcucaggcccugcuccacgggcuggauuuuuccgaggugucuaacgugcagcgccuuaugagaaagcagaaacgggacgauagcgaccugaagcgccucagagaucugaaucaagcggucaacaaucugguggaacucaaguccacacagcagaaaagcguucugcgggugggaacgcuuaccucugacgaucugcucacacuggcugccgaccuugagaagcugaaauccaaggucauucgcaccgaaagaccccucagcucuggcguguauauggggaaccuguccacacagcaacuggagcagcggcgcgcccuccugaauaugaucggaaugguuggcggggcucagggaacccagccuggcagagauggcgugguccgggugugggacgugaaaaacccggaucuucugaauaaccaauucgggacaaugcccagccucacccuggccugucuuacgaagcagggacaggucgaccugaaugaugcuguucucgcccugaccgaccugggccucauuuacacagcgaaguauccuaacucuuccgaccuggaucgccuuagccaaucccaucccauccugaauaugguggacaccaaaaagucuagccucaacauuuccggguacaauuuuagccugggagccgcugugaaagccggcgcuugcaugcuugaugggggaaacaugcuggagacaaucaaggucaccccucagacgauggacggcauccucaaaucuauucugaaggugaaaaagucccugggcauguucguuagcgauacacccggggaaagaaauccuuaugagaacauccucuacaagauuugucugucuggagacggcuggccguauaucgccagccggaccuccauuguggggcgcgcgugggaaaacacaaucgucgaucuugagucugacggaaaaccccagaaggugggcaccgccgggagcaauaaaucccugcagagcgcuggauuuccuaccggccucacauacucucaacugaugacgcugaaggauuccaugaugcagcuugaccccagcgccaaaaccuggauugauaucgagggcagaccugaagaccccguugagaucgcucucuaccagccgaugucugggugcuauauucacuucuuucgggaaccuacagaccugaagcaguucaagcaagaugccaaauacucccauggaaucgacguggccgaucuguuucccgcucagccuggccucaccagcgcggucauugaggcccugcccagaaacauggugcuuacaugucagggguccgacgauaucaagcgccugcucgacucucagggacggagagauauuaaacugaucgacaucgcucugagcaaggccgauucccgccgguucgaaaaugccgucugggaccaaugcaaagaucuuugucacaugcauaccggcgugguuguggagaagaagaaaagagggggcaaggaggaaauuacgccccacugcgcucucauggacuguaucauguaugaugccgcggucucuggaggccugaacauuccugugcugcgcgcuguucucccgcgggacaugguguuuagaacaagcucccccaaagucgugcugugaggacuagucccuguucccagagcccacuuuuuuuucuuuuuuugaaauaaaauagccugucuuucagaucucaaaggcucuuuucagagccaccaaaaaaaaaaaaaaaaaaaaaaaaaaaaaaaaaaaaaaaaaaaaaaaaaaaaaaaaaaaaaaaaaaaaaaaaaaaaaaaaaaaaaaaaaaaaaaaaaaaaa

SEQ ID NO: 21322 - RNA, 2052 nt, Artificial Sequence
  mRNA product Design a-2 (hSL-A100) comprising derived and/or modified sequence from LASV(Nig08-04;Clade II)__ADU56611__SP-IgE_NP(2-569) (opt5)
aggagaguccgcucagccagguugcagaagcggcuuagcguguguccuaaucuucucucugcguguagguaggccugugccgcaaacaagcuuaccauggacuggaccuggauccuguuccucguggccgcugccacaagaguccacagcagcgccuccaaggaggugaaaucuuuccuguggacccagagccucagacgggaacuguccggcuacugcucuaacaucaaacuucaagucguuaaggacgcucaggcccugcuccacgggcuggauuuuagcgagguguccaaugugcagcgccuuaugagaaagcagaaacgggacgauggagaccugaagcgccucagagaucugaaccaagcggucaauaaccugguggaacucaagucuacccagcagaaaagcguucugcgggugggcacgcuuaccuccgacgaucugcucacacuggcugccgaccuugagaagcugaaaagcaaggucauucgcaccgaaagaccccucucuuccgggguguauaugggaaaucugagcacacagcaacuggagcagcggaaagcccuccugucuaugaucggcaugguugggggagcucagggcacccagccuggccgcgaugggguggucagagugugggacgugaagaacccggaucuucugaauaaccaauucggaacaaugcccucccucacccuggccugucuuacgaagcagggccaggucgaccugaaugaugcuguucucgcccugaccgaccuggggcucauuuacacagcgaaauauccuaacagcucugaccuggaucggcuuucccaaagccaucccauccugaauaugguggacaccaagaaauccucucucaacauuagcggauacaauuuuucccugggcgccgcugugaaggccggggcuugcaugcuugauggaggcaacaugcuggagacaaucaaagucaccccucagacgauggacggcauccucaagagcauucugaaagugaagcgcucucuggggauguucguuuccgauacacccggagaaagaaauccuuaugagaacauccucuacaagauuugucugagcggcgacggguggccguauaucgccucucggaccagcauugugggacgcgcgugggaaaacacaaccgucgaucuugaguccgacggcaaaccccagaagguggggaccgccggaucuaauaaaagccugcaguccgcuggcuuuccuacaggccucacguacagccaacugaugacccugaaggauucuaugaugcagcuugaccccuccgccaaaacauggaucgauauugaggggagaccugaagaccccguugagaucgcucucuaccagccgaugagcggaugcuauauccacuucuuucgggaaccuaccgaccugaagcaguucaagcaagaugccaaauacucucauggcauugacgugacagaucuguuuuccgcccagcccgggcucaccagcgcugucaucgaggcgcugccuagaaacauggugcuuacgugucagggauccgacgauauuaagaaacugcucgacucucagggccgccgggauaucaagcugauugacaucagccugaauaaagccgauuccagacgcuucgaaaacgcugucugggaccaaugcaaggaucuuugucacaugcauacaggggugguuguggagaagaaaaagcggggcggaaaagaggaaaucacaccccacugcgcccucauggacuguauuauguuugaugccgcugucucuggcgggcugaauauccccauucugagagccgugcucccucgcgacaugguuuuccggaccagcuccccgaaggugguccugugaggacuagucccuguucccagagcccacuuuuuuuucuuuuuuugaaauaaaauagccugucuuucagaucucaaaggcucuuuucagagccaccaaaaaaaaaaaaaaaaaaaaaaaaaaaaaaaaaaaaaaaaaaaaaaaaaaaaaaaaaaaaaaaaaaaaaaaaaaaaaaaaaaaaaaaaaaaaaaaaaaaaa

SEQ ID NO: 21323 - RNA, 2055 nt, Artificial Sequence
  mRNA product Design a-2 (hSL-A100) comprising derived and/or modified sequence from LASV(GA391;Clade III)__AAA46284__SP-IgE_NP(2-570) (opt5)
aggagaguccgcucagccagguugcagaagcggcuuagcguguguccuaaucuucucucugcguguagguaggccugugccgcaaacaagcuuaccauggacuggaccuggauccuguuccucguggccgcugccacaagaguccacagcagcgccuccaaggaggugagaucuugccuguggacccagagccuccggcgcgaacuguccggcuacuguucuaacaucaaacuucaagucguuaaggacgcucaggcccugcuccacgggcuggauuucagcgagguguccaaugugcagagacuuaugcggaaacagaagcgcgacgauggagaccugaaaagacuccgggaucugaaccaagcggucaauaaccugguggaacucaagucuacacagcagaaaagcguucugcgcgugggcacgcuuuccagcgacgaucugcucauucuggcugccgaccuugagaaacugaagucuaaagucaccagaacagaacggccccucuccagcgggguguauaugggaaaucugucuucccagcaacuggaucagcgcagagcccuccugaacaugaucggcaugaccgggguuagcggaggcggcaagggggcuucuaauggaauugugcgggucugggacgugaaaaacgccgagcuucugaauaaccaguuuggcacaaugccuucccucacccuggcuugccuuacaaagcaggggcaaguggaucugaaugacgccguccaggcgcucaccgaucugggacugaucuacacggccaaguauccgaacagcuccgaccucgaccgccugucucagagccaucccauucuuaauaugaucgauaccaaaaaguccagccugaacaucucuggcuacaauuucucccucggggcugccguuaaagcuggagccuguaugcuggacggcggcaacaugcuugagacaauuaaggugagcccucaaaccauggaugggauccugaaaucuauucucaaggugaaaaagagccugggaauguuugucuccgacacacccggcgaaagaaacccuuaugagaauauccuguacaagauuugccucucuggggauggauggagcuauaucgcgucccggaccagcauugugggccgcgccugggaaaacacgguuguggaccuggagcaggauaauaaaccccagaagaucgggaacggaggcucuaauaaaucccuucagagcgcuggcuucgccgcugggcugaucuacucucaacucaugacacugaaggacuuuaaauguuucaaccugauuccuaaugccaagaccuggauggauaucgagggaagaccggaagaccccgucgagauugcccuuuaccagccuuccagcggcugcuaugugcacuuuuuccgggaacccacagaucucaagcaguuuaaacaggacgcuaaguacucccaugggagagacguuaccgaucuguucgcggcccaaccuggacugaccucugcugugaucgaggcccucccccgcaacauggucauuacaugucagggcagcgaagacauccggaaacugcuugagucccaggggagacgcgauaucaagcugauugacaucacgcucucuaaagccgauagccggaaguuugagaaugcugugugggaccaguucaaggaucugugccacaugcauaccggcgucgugguugaaaagaagaaaagaggaggcaaggaggaaauuacaccgcacugugcccugauggacugcaucauguuugaugcggcuguguccgggggacuugacgccaaaguccuccgcgugguucugccucgggauaugguguucagaaccagcacacccaaggucgugcugugaggacuagucccuguucccagagcccacuuuuuuuucuuuuuuugaaauaaaauagccugucuuucagaucucaaaggcucuuuucagagccaccaaaaaaaaaaaaaaaaaaaaaaaaaaaaaaaaaaaaaaaaaaaaaaaaaaaaaaaaaaaaaaaaaaaaaaaaaaaaaaaaaaaaaaaaaaaaaaaaaaaaa

SEQ ID NO: 21324 - RNA, 2052 nt, Artificial Sequence
  mRNA product Design a-2 (hSL-A100) comprising derived and/or modified sequence from LASV(Nig08-A19;Clade III)__ADU56619__SP-IgE_NP(2-569) (opt5)
aggagaguccgcucagccagguugcagaagcggcuuagcguguguccuaaucuucucucugcguguagguaggccugugccgcaaacaagcuuaccauggacuggaccuggauccuguuccucguggccgcugccacaagaguccacagcagcgccuccaaggaggugaaaucuuuccuguggacccagagccucagacgggaacuguccggcuacugcucuaacaucaaacuucaagucguuaaggacgcucaggcccugcuccacgggcuggauuuuagcgagguguccaaugugcagcgccuuaugagaaagcagaaacgggacgauggagaccugaagcgccucagagaucugaaccaagcggucaauaaccugguggaacucaagucuacacagcagaaaagcguucugcgggugggcacgcuuuccagcgacgaucugcucguccuggcugccgaccuugagaagcugaaaucuaaggugguucgcaccgaaagaccccucuccagcgggauuuauaugggaaaucugucuucccagcaacuggaucagcggaaagcccuccugaacaugaucggcaugacagggggaaauggcggccgcaacaccacaagcgacgggauugugagagucugggaugugaagaaugcugagcuucugaacaaucaguucggaaccaugccuucucucacacuggccugucuuaccaagcagggccaaguggaccugaacgaugcuguccaggcccucacggaccuggggcugaucuacaccgcgaaauaucccaauuccagcgaccucgaucggcuggcccagucccauccgauucuuaacaugaucgacacaaagaaaucuagccugaauaucuccggauacaacuuuagccucggcgcugccguuaaggcuggggccugcaugcuggauggaggcaacaugcuugagaccauuaaagugucuccucaaacaauggacggcauccugaaguccauucucaaagugaagcgcagccuggggauguucaucucugauacccccggagaaagaaauccuuaugagaacauucuguacaagaucugucucagcggcgacggguggcccuauauugcgucccggacgucuaucgucggacgcgccugggaaaauacagugguugaucuggagagcgacaacaaaccucagaagaccggcaaugggggauccaacaaaagccuucagucugcuggcuuugccgcuggccugacauacucccagcucaugacccugaaggauagcaugcugcaacuugacccgaaugccaaaaccuggauggauaucgaggggagacccgaagacccuguggagauugcccucuaccagcccucuuccggaugcuauauccacuucuuucgggaaccuacagaccugaagcaguucaagcaggaugcuaaauacagccauggcauugacgucacggaucuguuugcggcccaacccgggcucaccuccgcugugaucgaggcccugccgagaaacaugguuauuacaugucagggaucugaagacauccgcaaacuucuggagagccagggccggagagauaucaagcucauugacaucucccugucuaagguggauagccgcaaauucgagaaugccgucugggaccaguuuaaggaucugugccacaugcauaccgggauuguggucgaaaagaaaaagcggggcggaaaagaggaaaucacaccucacugugcucuuauggacugcauuauguucgaugccgcgguguccggcgggguugacgcuaaggugcucagagccguccugccccgcgauaugguguuucggaccagcacgccuaaaguugugcugugaggacuagucccuguucccagagcccacuuuuuuuucuuuuuuugaaauaaaauagccugucuuucagaucucaaaggcucuuuucagagccaccaaaaaaaaaaaaaaaaaaaaaaaaaaaaaaaaaaaaaaaaaaaaaaaaaaaaaaaaaaaaaaaaaaaaaaaaaaaaaaaaaaaaaaaaaaaaaaaaaaaaa

SEQ ID NO: 21325 - RNA, 2052 nt, Artificial Sequence
  mRNA product Design a-2 (hSL-A100) comprising derived and/or modified sequence from LASV(G1180-SLE-2010;Clade IV)__AIT17169__SP-IgE_NP(2-569) (opt5)
aggagaguccgcucagccagguugcagaagcggcuuagcguguguccuaaucuucucucugcguguagguaggccugugccgcaaacaagcuuaccauggacuggaccuggauccuguuccucguggccgcugccacaagaguccacagcagcgccuccaaggagaucaaaucuuuccuguggacccagagccucagacgggaacuguccggcuacugcucuaacauuaagcugcaaguggucaaagacgcucaggcccugcuccacgggcuggauuuuagcgagguuuccaaugugcagcgccuuaugagaaaggaacggcgcgacgauaacgaccugaaaagacuccgggaucugaaucaggcggugaacaaucuggucgagcucaagucuacacaacaaaagagcauccugcgcgugggaacgcuuaccuccgacgaucugcucauucuggcugccgaccuugaaaaacuuaagagcaaaguuaucagaacagagcggccccucucugccggcguguauauggggaaccuguccagccagcagcuggaucagcgcagagcucuccugucuaugauuggaauguccagcggcaaucagcgggcccaggcugggcgcgacggagucgugagaguuugggaugugaagaacgucgagcuucugaauaaccaguucggcaccaugccuucucucacacuggccugucuuaccaaacaaggccagguggaccugaaugaugcggugcaggcccucacagaccuggggcugaucuacaccgcuaaguauccgaacacguccgaccucgaucggcugacccaaagccaucccauccuuaauaugauugacacaaagaaauccucucugaacaucagcggauacaauuuuucccucggcgccgcugucaaggccggggcgugcaugcuggauggaggcaacaugcuugaaaccauuaaaguuagcccucagacaauggacgggauccugaagucuauucucaaagugaagaaagcccugggaauguucaucuccgauacccccggcgagcgcaacccuuaugaaaauauucuguacaagaucugucucagcggcgacggguggcccuauaucgcuucuagaacgagcauuacaggacgggccugggagaacaccguggucgaucuggaguccgacggcaagccucagaaagcugggucuaauaacagcaauaagucccuucagagcgugggauuuacagccggccugaccuacucucaacucaugacccugaaagaugccaugcugcagcuugacccgaacgcuaagacauggauggauaucgaagggagacccgaggacccuguugaaauugcgcucuaccagcccuccagcggaugcuauauccacuucuuucgcgagccuacggaccugaaacaguucaagcaagaugccaaguacucucauggcauugacgugaccgaucuguuugcugcccagcccggccucacauccgccgucaucgacgcucugccgcggaauauggugaucaccugucaggggagcgaugacauuagaaaacuucuggaaucccagggacgcaaggauaucaaacucauugacaucgcccugucuaagacagauagccggaaauaugagaacgcgguuugggaccaauacaaggaucugugccacaugcauaccggcguggucguggagaagaaaaagagagggggaaaagaagagauuacgccucacugugcucuuauggacugcaucauguucgaugccgccgucuccggcgggcucaauacaucugugcugcgcgcuguucugccccgggacaugguguuuagaaccagcaccccucgcgucgugcucugaggacuagucccuguucccagagcccacuuuuuuuucuuuuuuugaaauaaaauagccugucuuucagaucucaaaggcucuuuucagagccaccaaaaaaaaaaaaaaaaaaaaaaaaaaaaaaaaaaaaaaaaaaaaaaaaaaaaaaaaaaaaaaaaaaaaaaaaaaaaaaaaaaaaaaaaaaaaaaaaaaaaa

SEQ ID NO: 21326 - RNA, 2052 nt, Artificial Sequence
  mRNA product Design a-2 (hSL-A100) comprising derived and/or modified sequence from LASV(G1442-SLE-2011;Clade IV)__AIT17181__SP-IgE_NP(2-569) (opt5)
aggagaguccgcucagccagguugcagaagcggcuuagcguguguccuaaucuucucucugcguguagguaggccugugccgcaaacaagcuuaccauggacuggaccuggauccuguuccucguggccgcugccacaagaguccacagcagcgccuccaaggaggugaaaucuuuccuguggacccagagccucagacgggaacuguccggcuacugcucuaacaucaaacuucaagucguuaaggacgcucaggcccugcuccacgggcuggauuuuagcgagguguccaaugugcagcgccuuaugagaaagcagcggcgcgacgauaacgaccugaaaagacuccgggaucugaaucaagcggucaacaaucugguggaacucaagucuacacagcaaaagagcguucugcgcgugggaacgcuuaccuccgacgaucugcucguccuggcugccgaccuugagaaacuuaagagcaaagugauuagaacagaacggccccucucugccggcguuuauauggggaaccuguccagccagcagcuggaucagcgcagagcucuccugaauaugaucggaaugucuggcgggauucagggaacccggacaggccgcgacggcguggucagagugugggaugugaagaacgccgaccuucugaauaaccaguucgggaccaugccuucccucacacuggcuugucuuaccaaacaaggacaggucgaucugaaugacguugugcaggcccucacggaccugggccugaucuacaccgcgaaguauccgaacgccagcgaucucgaccggcugacacaaucucaucccauucuuaauaugaucgauaccaagaaauccagccugaacaucuccggguacaauuuuucucucggagcugccgugaaggcuggcgccugcaugcuggacgggggaaacaugcuugagacaauuaaagucagcccucagaccauggauggcauccugaaguccauucucaaagugaagaaaacgcugggcauguucaucagcgacacacccggggagcgcaacccuuaugaaaauauucuguacaagaucugucucucuggagauggcuggcccuauauugcguccagaaccagcaucacagggcgggccugggagaacaccguuguggaccuggaaucugauggaaagccucagaaagcuggcagcaauaacuccaauaagucucuucagagcgccggguuugcugccggacugaccuacucccaacucaugacacugaaagacgccaugcugcagcuugauccgaacgcuaagacguggauggacaucgagggcagacccgaggacccugucgaaauugcgcucuaccagcccagcucuggcugcuauauccacuucuuucgcgagccuaccgaucugaaacaguucaagcaagacgccaaguacucccaugggauugaugugacagaccuguuugcugcccagcccggacucaccagcgccguuaucgaagcucugccgcggaauauggugauuacaugucagggcucugaugacaucaaaaagcugcuggagucccaggggagaaaagauaucaagcucauugacaucgcccugagcaaaaccgauucccgcaaguaugaaaacgcggucugggaccaauacaaggaucugugccacaugcauacgggaguggucguggagaaaaagaaacggggcgggaaggaggaaauuacaccucacugugcucuuauggacugcaucauguucgaugccgccguuucuggcggacucaauacccuggugcugagagcuguccucccccgcgacaugguguuucggaccagcacaccuagaguugugcugugaggacuagucccuguucccagagcccacuuuuuuuucuuuuuuugaaauaaaauagccugucuuucagaucucaaaggcucuuuucagagccaccaaaaaaaaaaaaaaaaaaaaaaaaaaaaaaaaaaaaaaaaaaaaaaaaaaaaaaaaaaaaaaaaaaaaaaaaaaaaaaaaaaaaaaaaaaaaaaaaaaaaa

SEQ ID NO: 21327 - RNA, 2052 nt, Artificial Sequence
  mRNA product Design a-2 (hSL-A100) comprising derived and/or modified sequence from LASV(G3010-SLE-2013;Clade IV)__AIT17345__SP-IgE_NP(2-569) (opt5)
aggagaguccgcucagccagguugcagaagcggcuuagcguguguccuaaucuucucucugcguguagguaggccugugccgcaaacaagcuuaccauggacuggaccuggauccuguuccucguggccgcugccacaagaguccacagcagcgccuccaaggagaucaaaucuuuccuguggacccagagccucagacgggaacuguccggcuacugcucuaacauuaaacuucaaguggucaaagacgcucaggcccugcuccacgggcuggauuuuagcgagguuuccaaugugcagcgccuuaugagaaaggaacggcgcgacgauaacgaccugaaaagacuccgggaucugaaucaggcggugaacaaucuggucgagcucaagucuacacaacaaaagagcauccugcgcgugggaacgcuuaccuccgacgaucugcucauucuggcugccgaccuugaaaaacuuaagagcaaaguuacaagaaccgagcggccccucucugccggcguguauauggggaaccuguccagccagcagcuggaucagcgcagagcucuccugucuaugaucggaauguccagcggcguccagggggcccgggcuggacgcgacggcgugguuagagugugggaugucaagaaugccgagcuucugaacaaucaguucggcacaaugccuucucucacccuggcgugucuuacaaaacaggggcaaguggaccugaacgaugugguccaggcccucaccgaccugggacugauuuacacggcuaaguauccgaauaccuccgaccucgaucggcugacacagagccaucccauccuuaacaugaucgacaccaagaaauccucucugaauauuagcggcuacaacuuuucccucggggccgcuguuaaggccggagcgugcaugcuggauggcgggaauaugcuugaaacaaucaaagugagcccucaaaccauggacggcauucugaagucuauccucaaagugaagaaagcccugggaauguucauuuccgagacgcccggcgaacgcaacccuuaugagaacauccuguacaagauuugucucagcggggauggauggcccuauaucgcuucuagaacaagcaucaccggccgggccugggagaauacagucguggaccuggaauccgaugggaagccucagaaagcuggaucuaacaauagcaacaagucccuucagagcgccggcuuuaccgccgggcugaccuacucucagcucaugacacugaaagacgcuaugcugcaacuugauccgaaugcgaagacguggauggacauugagggaagacccgaagauccuguugagguggcccucuaccagcccuccagcggcugcuauauccacuucuuucgcgaaccuaccgaccugaaacaguucaagcaggacgcuaaguacucucauggcauugaugucacagaccuguuugccgcccaacccgggcucaccuccgcugugaucgaugcccugccgcggaacaugguuauuacaugucagggaagcgacgauaucaaaaagcugcuggagucccagggcagaaaagacaucaagcucauugauaucgcgcugucuaaaaccgacagccgcaaguaugagaaugcugugugggaucaguacaaggaccugugccacaugcauacgggggucguggucgaaaagaagaaacggggaggcaaggaggaaauuacaccucacugugcccuuauggauugcaucauguucgacgccgcuguguccgggggccucaacaccucuguucugagagccgugcugccccgcgauauggucuuucggaccagcacaccuagagugguucucugaggacuagucccuguucccagagcccacuuuuuuuucuuuuuuugaaauaaaauagccugucuuucagaucucaaaggcucuuuucagagccaccaaaaaaaaaaaaaaaaaaaaaaaaaaaaaaaaaaaaaaaaaaaaaaaaaaaaaaaaaaaaaaaaaaaaaaaaaaaaaaaaaaaaaaaaaaaaaaaaaaaaa

SEQ ID NO: 21328 - RNA, 2052 nt, Artificial Sequence
  mRNA product Design a-2 (hSL-A100) comprising derived and/or modified sequence from LASV(G502-SLE-2009;Clade IV)__AIT17127__SP-IgE_NP(2-569) (opt5)
aggagaguccgcucagccagguugcagaagcggcuuagcguguguccuaaucuucucucugcguguagguaggccugugccgcaaacaagcuuaccauggacuggaccuggauccuguuccucguggccgcugccacaagaguccacagcagcgccuccaaggagaucaaaucuuuccuguggacccagagccucagacgggaacuguccggcuacugcucuaacauuaagcugcaaguggucaaagacgcucaggcccugcuccacgggcuggauuuuagcgagguuuccaaugugcagcgccuuaugagaaaggaacggcgcgacgauaacgaccugaaaagacuccgggaucugaaucaggcggugaacaaucuggucgagcucaagucuacacaacaaaagagcauccugcgcgugggaacgcuuaccuccgacgaucugcucauucuggcugccgaccuugaaaaacuuaagagcaaaguuaucagaacagagcggccccucucugccggcguguauauggggaaccuguccagccagcagcuggaucagcgcagagcucuccugucuaugauuggaauguccggcgggaaucagggaguccgggccggcaaggacggcgugguucgcgugugggaugucaaaaacgcugagcuucugaauaaccaguucgggaccaugccuagccucacacuggccugucuuaccaagcagggacaaguggaccugaaugaugcggugcaggcccucacagaccugggccugaucuacaccgcuaaguauccgaacacgucugaccucgauagacugacccagucccaucccauccuuaauaugauugacaccaaaaagagcucccugaacaucucuggguacaauuuuagccucggagccgcugucaaagccggcgcgugcaugcuggaugggggaaacaugcuugaaacaauuaagguuuccccucaaacaauggacggcauccugaaaagcauucucaaggugaaaaaggcccugggcauguucaucucugauacccccggggagcggaacccuuaugaaaauauucuguacaagaucugucucuccggagacggcuggcccuauaucgcuagccgcacgucuauuacagggagagccugggagaacaccguggucgaucuggagagcgacggaaaaccucagaaggcuggcuccaauaacucuaauaaaagccuucaguccgccggguuuacagccggacugaccuacagccagcucaugacccugaaggaugcuaugcugcaacuugacccgaacacaaaaacguggauggauaucgaaggccggcccgaggacccuguggaaauugcgcucuaccagcccucuuccggcugcuauauccacuucuuuagagagccuaccgaccugaagcaguucaagcaggaugccaaauacagccaugggauugacguuacagaucuguuugcugcccaacccggacucaccucugccgugaucgacgcucugccgcgcaauauggucaucacaugucagggcuccgaugacauucggaaacuucuggaaagccaggggagaaaggauaucaagcucauugacaucgcccugaacaaaaccgauucccgcaaguaugagaaugcggugugggaccaguacaaggaucugugccacaugcauacgggaguuguggucgagaaaaagaaacggggcgggaaggaagagauuacaccucacugugcucuuauggacugcaucauguucgaugccgccgugucuggcggacucaacaccagcguccugagagcugugcugccccgcgacaugguuuuucggaccuccacaccuagagugguccucugaggacuagucccuguucccagagcccacuuuuuuuucuuuuuuugaaauaaaauagccugucuuucagaucucaaaggcucuuuucagagccaccaaaaaaaaaaaaaaaaaaaaaaaaaaaaaaaaaaaaaaaaaaaaaaaaaaaaaaaaaaaaaaaaaaaaaaaaaaaaaaaaaaaaaaaaaaaaaaaaaaaaa

SEQ ID NO: 21329 - RNA, 2052 nt, Artificial Sequence
  mRNA product Design a-2 (hSL-A100) comprising derived and/or modified sequence from LASV(G733-SLE-2010;Clade IV)__AIT17155__SP-IgE_NP(2-569) (opt5)
aggagaguccgcucagccagguugcagaagcggcuuagcguguguccuaaucuucucucugcguguagguaggccugugccgcaaacaagcuuaccauggacuggaccuggauccuguuccucguggccgcugccacaagaguccacagcagcgccuccaaggagaucaaaucuuuccuguggacccagagccucagacgggaacuguccggcuacugcucuaacauuaagcugcaaguggucaaagacgcucaggcccugcuccacgggcuggauuuuagcgagguuuccaaugugcagcgccuuaugagaaaggaacggcgcgacgauaacgaccugaaaagacuccgggaucugaaucaggcggugaacaaucuggucgagcucaagucuacacaacaaaagagcgugcugcgcguuggaacgcuuaccuccgacgaacugcucgugcuggcugccgaucuugagaaacuuaagagcaaagucaucagaacagagcggccccucucugccggcguguauauggggaaccuguccagccagcagcuggaccagcgcagagcucuccugucuaugauuggaauguccggcgggaaucagggagcccggaccggccgcgauggcguugugagagucugggacgugaagaacgcugaacuucugaauaaccaguucgggacaaugccuagccucacccuggccugucuuacaaaacagggacaaguggaucugaaugacgcgguccaggcccucaccgaucugggccugaucuacacggcuaaguauccgaacaccucugaccucgaccggcugacacagucccaucccauucuuaauaugaucgauaccaagaaaagcucccugaacaucucuggguacaauuuuagccucggagccgcuguuaaggccggcgcgugcaugcuggacgggggaaacaugcuugagacaauuaaaguguccccucaaaccauggauggcauccucaagagcauucugaaagugaagaaagcccugggcauguucaucucugacacgcccggggaacgcaacccuuaugagaauauucuguacaagaucugucucuccggagauggcuggcccuauauugcuagcagaacaucuaucaccgggcgggccugggagaacacagucguggaccuggaaagcgauggaaagccucagaaagcuggcuccaauaacucuaauaagagccuucaguccgccggguuuaccgccggacugaccuacagccagcucaugacacugaaagacgcuaugcugcaacuugauccgaacgcgaagacguggauggacaucgagggcagacccgaagauccuguugagauugcccucuaccagcccucuuccggcugcuauauccacuucuuucgcgaaccuaccgaccugaaacaguucaagcaggacgcuaaguacagccaugggauugaugugacagaccuguuugccgcccaacccggacucaccucugcugucaucgaugcccugccgcggaauauggugauuacaugucagggcuccgacgauaucagaaaacuucuggagagccaggggcgcaaggacaucaaacucauugauaucgcgcuguccaagauugacucucggaaauaugagaacgcuguuugggaucaguacaaggaccugugccacaugcauaccggaguggucguggaaaagaaaaagagaggcgggaaagaggaaaucacgccucacugugcccuuauggauugcauuauguucgacgccgcugucagcggcggacucaauucccuggugcugcgcgccguucucccccgggauaugguguuuagaacaucuaccccucgcgucgugcugugaggacuagucccuguucccagagcccacuuuuuuuucuuuuuuugaaauaaaauagccugucuuucagaucucaaaggcucuuuucagagccaccaaaaaaaaaaaaaaaaaaaaaaaaaaaaaaaaaaaaaaaaaaaaaaaaaaaaaaaaaaaaaaaaaaaaaaaaaaaaaaaaaaaaaaaaaaaaaaaaaaaaa

SEQ ID NO: 21330 - RNA, 2052 nt, Artificial Sequence
  mRNA product Design a-2 (hSL-A100) comprising derived and/or modified sequence from MOPV/LASV reassortant(IGS-1;Clade IV)__AFY05578__SP-IgE_NP(2-569) (opt5)
aggagaguccgcucagccagguugcagaagcggcuuagcguguguccuaaucuucucucugcguguagguaggccugugccgcaaacaagcuuaccauggacuggaccuggauccuguuccucguggccgcugccacaagaguccacagcagcgccuccaaggagaucaaaucuuuccuguggacccagagccucagacgggaacuguccggcuacugcucuaacauuaaacuucaaguggucaaggacgcucaggcccugcuccacgggcuggauuuuagcgagguuuccaaugugcagcgccuuaugagaaaggaacggcgcgacgauaacgaccugaaaagacuccgggaucugaaucaggcggugaacaaucuggucgagcucaagucuacacaacaaaagagcauccugcgcgugggaacgcuuaccuccgacgaucugcucauucuggcugccgaccuugaaaaacugagaagcaagguuauccggacagagcgcccccucucugccggcguguauauggggaaccuguccagccagcagcuggaucagagacgggcucuccugaauaugauuggaaugucuggcgggaaccagggagcccgcgcuggcagagacggcgucgugcggguuugggaugugaaaaaugccgagcuucuguccaaccaguucgggaccaugccuagccucacacuggcgugucuuaccaagcagggacaagucgaccugaaugaugccgugcaggcucucacagaccugggccugaucuacaccgccaaauauccgaacacgucugaccucgaucgccugacccagucccaucccauccuuaauaugauugacacaaagaaaagcucccugaacaucucuggguacaauuuuagccucggagcugccgugaaggcgggcgccugcaugcuggaugggggaaacaugcuugaaaccauuaaggucuccccucaaacaauggacggcauccugaaaagcauucucaagguuaaaaaggcucugggcauguucaucucugauacccccggggagagaaacccuuaugaaaauauucuguacaaaaucugucucuccggagacggcuggcccuauaucgccagccggacgucuauuacagggagagcuugggagaacaccgugguggaucuggagagcgacggaaagccucagaaggccgauuccaauaacucuagcaaaucccuucagagcgccggcuuuacagcugggcugaccuacucucagcucaugacccugaaggacgcgaugcugcaacuugauccgaaugccaaaacauggauggacaucgaaggacgccccgaggacccugucgaaauugcucucuaccagcccuccagcggcugcuauauccacuucuuucgggagccuacggaucugaagcaguucaaacaggacgccaaguacucucauggcauugaugugaccgaccuguuugccacacaacccgggcucaccuccgcuguuaucgaugcccugccgagaaacauggugaucacaugucagggaagcgacgauauucgcaaacuucuggaaucccagggccggaaggacaucaagcucauugauaucgaccugucuaaaaccgauagcagaaaguaugagaaugcggucugggaccaguacaaagaucugugccacaugcauacgggggugguuguggagaagaagaaacgcggaggcaaggaagagauuacaccucacugugcucuuauggacugcaucauguucgacgccgccgucuccgggggccucaacaccucugugcugcgggcuguccugcccagagauaugguguuucgcaccagcacaccucggguugugcucugaggacuagucccuguucccagagcccacuuuuuuuucuuuuuuugaaauaaaauagccugucuuucagaucucaaaggcucuuuucagagccaccaaaaaaaaaaaaaaaaaaaaaaaaaaaaaaaaaaaaaaaaaaaaaaaaaaaaaaaaaaaaaaaaaaaaaaaaaaaaaaaaaaaaaaaaaaaaaaaaaaaaa

SEQ ID NO: 21331 - RNA, 2052 nt, Artificial Sequence
  mRNA product Design a-2 (hSL-A100) comprising derived and/or modified sequence from LASV(LM765-SLE-2012;Clade IV)__AIT17815__SP-IgE_NP(2-569) (opt5)
aggagaguccgcucagccagguugcagaagcggcuuagcguguguccuaaucuucucucugcguguagguaggccugugccgcaaacaagcuuaccauggacuggaccuggauccuguuccucguggccgcugccacaagaguccacagcagcgccuccaaggagaucaaaucuuuccuguggacccagagccucagacgggaacuguccggcuacugcucuaacauuaagcugcaaguggucaaagacgcucaggcccugcuccacgggcuggauuuuagcgagguuuccaaugugcagcgccuuaugagaaaggaacggcgcgacgauaacgaccugaaaagacuccgggaucugaaucaggcggugaacaaucuggucgagcucaagucuacacaacaaaagagcauccugcgcgugggaacgcuuaccuccgacgaucugcucauucuggcugccgaccuugaaaaacuuaagagcaaaguuacaagaaccgagcggccccucucugccggcguguauauggggaaccuguccagccagcagcuggaucagcgcagagcucuccuggacaugaucggaaugucuggcuccaaucagggggcccgggcuggacgcgauggcgucgugagaguuugggacgugaagaacgccgagcuucugaauaaccaguucggcacaaugccuagccucacccuggcgugucuuacaaaacaggggcaagucgaucugaaugacgccgugcaggcucucaccgaccugggacugauuuacacggccaaguauccgaacaccucugaucucgaccggcugacacagucccaucccauccuuaauaugaucgauaccaagaaaagcucccugaacauuucuggcuacaauuuuagccucggggcugccgugaaggcgggagccugcaugcuggacggcgggaacaugcuugaaacaaucaaagucuccccucaaaccauggauggcauucucaagagcauccugaaaguuaagaaagcucugggaauguucauuucugacgcccccggcgagcgcaacccuuaugaaaauauccuguacaagauuugucucuccggggauggauggcccuauaucgcuagcagaacgucuaucacaggccgggccugggagaacaccgugguggaccuggagagcgaugggaagccucagaaagccggauccaauggcucuaacaagagccuucaguccgcuggguuuacagcgggacugaccuacagccagcucaugacccugaaagacgccaugcugcaacuugauccgaaugcuaagacauggauggacauugaaggcagacccgaggacccugucgaaaucgcccucuaccagcccucuuccggcugcuauauucacuucuuucgcgagccuacggaucugaaacaguucaagcaggacgccaaguacagccaugggaucgaugugaccgaccuguuugcugcccaacccggacucacaucugcgguuauugaugcucugccgcggaacauggugaucaccugucagggcuccgacgauaucagaaaacuuuucgaaagccaggggcgcaaggacauuaaacugaucgauauugcccucuccaagacagacucucggaaauaugagaaugccgucugggaucaguacaaggaccugugccacaugcauaccggaaucgugguugagaagaaaaagagaggcgggaaagaagagauuacgccucacugugcucugauggauugcaucauguuugacgccgcugugagcggcggacuuaacacauccguccuccgcgccgugcugccccgggacauggucuucagaaccucuaccccucgcgugguucugugaggacuagucccuguucccagagcccacuuuuuuuucuuuuuuugaaauaaaauagccugucuuucagaucucaaaggcucuuuucagagccaccaaaaaaaaaaaaaaaaaaaaaaaaaaaaaaaaaaaaaaaaaaaaaaaaaaaaaaaaaaaaaaaaaaaaaaaaaaaaaaaaaaaaaaaaaaaaaaaaaaaaa

SEQ ID NO: 21332 - RNA, 2052 nt, Artificial Sequence
  mRNA product Design a-2 (hSL-A100) comprising derived and/or modified sequence from LASV(LM776-SLE-2012;Clade IV)__AIT17825__SP-IgE_NP(2-569) (opt5)
aggagaguccgcucagccagguugcagaagcggcuuagcguguguccuaaucuucucucugcguguagguaggccugugccgcaaacaagcuuaccauggacuggaccuggauccuguuccucguggccgcugccacaagaguccacagcagcgccuccaaggagaucaaaucuuuccuguggacccagagccucagacgggaacuguccucuuacugcagcaacauuaaacuucaaguggucaaggacgcucaggcccugcuccacggccuggauuuuuccgagguuucuaaugugcagcgccuuaugagaaaggaacggcgcgacgauaacgaccugaaaagacuccgggaucugaaucaggcggugaacaaucuggucgagcucaagagcacacaacagaaguccauccugcgcguggggacgcuuaccagcgacgaucugcucauucuggcugccgaccuugaaaaacugaagucuaaaguuacaagaaccgagcggccccucuccgccggaguguauaugggcaaccugagcucucagcagcuggaucaacgcagagcucuccuguccaugaucgggaugagcggaucuaaucagggcgcccgggcugggcgcgacggagucgugagaguuugggaugugaagaacgccgagcuucugaauaaccaguucggcacaaugccuucccucacccuggcgugucuuacaaaacagggccaagucgaccugaaugaugccgugcaggcucucaccgaccuggggcugauuuacacggccaaguauccgaacaccagcgaccucgaucggcugacacagucccaucccauccuuaauaugaucgacaccaagaaaucuagccugaacauuuccggauacaauuuuagccucggcgcugccgugaaggcgggggccugcaugcuggauggaggcaacaugcuugaaacaaucaaagucucuccucaaaccauggacgggauucugaaguccauccucaaaguuaagaaagcucugggaauguucauuagcgauacgcccggcgagcgcaacccuuaugaaaauauccuguacaagauuugucucucuggcgacggguggcccuauaucgccagcagaacauccaucaccggacgggcuugggagaacacagugguggaucuggagucugacggcaagccucagaaagccgggagcaauaacuccaauaagagccuucagucugccggauuuaccgcuggccugaccuacucccagcucaugacacugaaagaugcgaugcugcaacuugacccgaacgccaagacguggauggauauugaagggagacccgaggacccugucgaaguggcucucuaccagcccagcucuggaugcuauauccacuucuuucgcgagccuaccgaccugaaacaguucaagcaggaugccaaguacucccauggcauugacguuacagaucuguuugccgcucaacccggccucaccagcgccgugaucgacgcgcugccgcggaauauggucauuacaugucagggguccgaugacaucagaaaacuucuggaaucucagggacgcaaggauaucaaacucauugacaucgcucugagcaagaccgauucccggaaauaugagaacgccgugugggaccaguacaaggaucugugccacaugcauacgggcguuguggucgagaagaaaaagagagggggaaaagaagagauuacaccucacugugcccuuauggacugcaucauguucgaugcugccgugucuggcgggcucaauaccagcguccugcgcgcugugcugccccgggacaugguuuuuagaaccuccacaccucgcgugguccucugaggacuagucccuguucccagagcccacuuuuuuuucuuuuuuugaaauaaaauagccugucuuucagaucucaaaggcucuuuucagagccaccaaaaaaaaaaaaaaaaaaaaaaaaaaaaaaaaaaaaaaaaaaaaaaaaaaaaaaaaaaaaaaaaaaaaaaaaaaaaaaaaaaaaaaaaaaaaaaaaaaaaa

SEQ ID NO: 21333 - RNA, 2052 nt, Artificial Sequence
  mRNA product Design a-2 (hSL-A100) comprising derived and/or modified sequence from LASV(Mad39;Clade IV)__ANH09723__SP-IgE_NP(2-569) (opt5)
aggagaguccgcucagccagguugcagaagcggcuuagcguguguccuaaucuucucucugcguguagguaggccugugccgcaaacaagcuuaccauggacuggaccuggauccuguuccucguggccgcugccacaagaguccacagcagcgccuccaaggagaucaaaucuuuccuguggacccagagccucagacgggaacuguccggcuacugcucuaacauuaagcugcaaguggucaaagacgcucaggcccugcuccacgggcuggauuuuagcgagguuuccaaugugcagcgccuuaugagaaagcagcggcgcgacgauaacgaccugaaaagacuccgggaucugaaucaagcggugaacaaucuggucgaacucaagucuacacagcaaaagagcgugcugcgcguuggaacgcuuaccuccgacgaucugcucacacuggcugccgaccuugagaaacuuaagagcaaagugaccagaacagaacggccccucaccgccggcgucuauauggggaaccugucuucccagcagcuggaucagcgcagagcucuccugaauaugaucggaaugagcggcgggaaccagggagcccggacaggccgcgacggcgugguuagagugugggaugucaagaaugcugagcuucugaacaaucaguucgggaccaugccuucucucacgcuggccugucuuaccaaacaaggacagguggaccugaacgaugugguccaggcgcucacagaccugggccugauuuacaccgccaaguauccgaauacauccgaccucgaucggcugacccaaagccaucccauccuuaacaugauugacacgaauaagucuucccugaacaucagcggguacaacuuuucccucggagcugccguuaaagcuggcgccugcaugcuggaugggggaaauaugcuugagacaaucaaggugucuccucagaccauggacggcauucugaaaagcauccucaaggugaaaaagucccugggcauguucauuagcgauacacccggggaacgcaacccuuaugagaauauccuguacaaaauuugucucucuggagacggcuggcccuauaucgcguccagaaccagcauuaccgggcgggccugggaaaacacagucguggaucuggagucuggaggcaagccucagaaggcugggagcaauaacuccaauaaaucucuucagagcgccggauuugcugccggccugacguacucccaacucaugacccugaaggacgccaugcugcagcuugauccgaacgcuaaaacauggauggacaucgagggcagacccgaagauccuguugagaucgcgcucuaccagcccauuagcgggugcuauauccacuucuuucgcgaaccuaccgaccugaagcaguucaaacaagacgccaaguacucucauggaauugaugugacagaccuguuugcugcccagcccggccucaccuccgccgucaucgaggcucugccgcggaauauggugauuacgugucaggggagcgaugacaucagaaaacuuuucgaaucucagggacgcaaggauaucaagcugauugacaucgcccucuccaaaacagauagccggaaguaugagaacgcgguuugggaccaauacaaagaucugugccacaugcauaccggcguggucguggagaagaagaaaaagggcgggaaagaagagauuaccccucacugugcucugauggacugcaucauguuugaugccgccgucuccggaggccuuaauacacucgugcugagagcuguucugccccgcgacaugguguuccggaccucuacaccuaaggucgugcucugaggacuagucccuguucccagagcccacuuuuuuuucuuuuuuugaaauaaaauagccugucuuucagaucucaaaggcucuuuucagagccaccaaaaaaaaaaaaaaaaaaaaaaaaaaaaaaaaaaaaaaaaaaaaaaaaaaaaaaaaaaaaaaaaaaaaaaaaaaaaaaaaaaaaaaaaaaaaaaaaaaaaa

SEQ ID NO: 21334 - RNA, 2052 nt, Artificial Sequence
  mRNA product Design a-2 (hSL-A100) comprising derived and/or modified sequence from LASV(Z0947-SLE-2011;Clade IV)__AIT17841__SP-IgE_NP(2-569) (opt5)
aggagaguccgcucagccagguugcagaagcggcuuagcguguguccuaaucuucucucugcguguagguaggccugugccgcaaacaagcuuaccauggacuggaccuggauccuguuccucguggccgcugccacaagaguccacagcagcgccuccaaggagaucaaaucuuuccuguggacccagagccucagacgggaacuguccggcuacugcucuaacauuaagcugcaaguggucaaagacgcucaggcccugcuccacgggcuggauuuuagcgagguuuccaaugugcagcgccuuaugagaaaggaacggcgcgacgauaacgaccugaaaagacuccgggaucugaaucaggcggugaacaaucuggucgagcucaagucuacacaacaaaagagcauccugcgcgugggaacgcuuaccuccgacgaucugcucauucuggcugccgaccuugaaaaacuuaagagcaaaguuacaagaaccgagcggccccucucugccggcguguauauggggaaccuguccagccagcagcuggaucagcgcagagcucuccugaauaugaucggaaugucuggcuccaaccagggggcccggacaggacgcgacggcgucgugagaguuugggaugugaagaaugcugagcuucugaacaaucaguucggcaccaugccuagccucacacuggccugucuuaccaaacaggggcaagucgaccugaacgaugcggugcaggcccucacggaccugggacugauuuacaccgcuaaguauccgaauacaucugaccucgaucggcugacccagucccaucccauccuuaacaugaucgacacaaagaaaagcucccugaauauuucuggcuacaacuuuagccucggggccgcugugaaggccggagcgugcaugcuggauggcgggaacaugcuugaaaccaucaaagucuccccucaaacgauggacggcauucucaagagcauccugaaaguuaagaaagcccugggaauguucauuucugaugcucccggcgagcgcaauccuuaugaaaacauccuguacaagauuugucucuccggggacggauggcccuauaucgccagcagaacaucuaucaccggccgggcuugggagaauacagugguggaucuggagagcgacgggaagccucagaaagccggauccaacggcucuaauaagagccuucaguccgccggguuuaccgcuggacugaccuacagccagcucaugacacugaaagaugcgaugcugcaacuugacccgaacgccaagacguggauggauauugaaggcagacccgaggacccugucgaaaucgcucucuaccagcccucuuccggcugcuauauucacuucuuucgcgagccuaccgaccugaaacaguucaagcaggaugccaaguacagccaugggaucgacgugacagaucuguuugccgcucaacccggacucaccucugccguuauugacgcgcugccgcggaauauggugaucacaugucagggcuccgaugacaucagaaaacuuuucgaaagccaggggcgcaaggauauuaaacugaucgacauugcucucuccaagaccgauucucggaaauaugagaacgccgucugggaccaguacaaggaucugugccacaugcauacgggaaucgugguugagaagaaaaagagaggcgggaaagaagagauuacaccucacugugcccugauggacugcaucauguuugaugcugccgugagcggcggacuuaauaccuccguccuccgcgcugugcugccccgggacauggucuucagaaccucuacaccucgcgugguucugugaggacuagucccuguucccagagcccacuuuuuuuucuuuuuuugaaauaaaauagccugucuuucagaucucaaaggcucuuuucagagccaccaaaaaaaaaaaaaaaaaaaaaaaaaaaaaaaaaaaaaaaaaaaaaaaaaaaaaaaaaaaaaaaaaaaaaaaaaaaaaaaaaaaaaaaaaaaaaaaaaaaaa

SEQ ID NO: 21335 - RNA, 2028 nt, Artificial Sequence
  mRNA product Design a-2 (A100) comprising derived and/or modified sequence from LASV(Josiah;Clade IV)__NP_694869__SP-IgE_NP(2-569) (opt1)
aggagaguccgcucagccagguugcagaagcggcuuagcguguguccuaaucuucucucugcguguagguaggccugugccgcaaacaagcuuaccauggacuggaccuggauccuguuccucguggccgccgcgacccgcguccacagcagcgccuccaaggagaucaagagcuuccuguggacccagucccuccgccgggagcugagcggcuacugcuccaacaucaagcuccagguggucaaggacgcccaggcgcugcugcacgggcuggacuucagcgagguguccaacgugcagcgccucaugcggaaggagcgccgggacgacaacgaccugaagcgccugcgggaccucaaccaggccgucaacaaccugguggagcucaagagcacccagcagaaguccauccugcgcgugggcacccugaccagcgacgaccugcucauccuggccgccgaccuggagaagcucaaguccaaggucauccggaccgagcgcccccugagcgccgggguguacaugggcaaccuguccagccagcagcucgaccagcggcgcgcgcugcugaacaugaucgggauguccggcggcaaccagggggcccgggccggccgcgacggggugguccgggugugggacgugaagaacgccgagcuccugaacaaccaguucggcaccaugccgagccugacgcucgcgugccugaccaagcaggggcaggucgaccugaacgacgccgugcaggcccucaccgaccugggccugaucuacaccgccaaguaccccaacacguccgaccucgaccgccugacccagagccaccccauccugaacaugaucgacaccaagaaguccagccucaacaucagcggcuacaacuucucccugggggccgcggugaaggccggcgccugcaugcuggacgggggcaacaugcucgagaccaucaaggucagcccccagacgauggacggcauccugaaguccauccugaaggugaagaaggcccucgggauguucaucagcgacaccccgggcgagcggaaccccuacgagaacauccuguacaagaucugccuguccggggacggcuggcccuacaucgccagccgcaccuccaucaccgggcgggcgugggagaacacgguggucgaccucgagagcgacggcaagccccagaaggccgacuccaacaacagcuccaagagccugcaguccgccggcuucaccgccgggcugaccuacagccagcucaugacccugaaggacgccaugcugcagcuggacccgaacgcgaagacguggauggacaucgagggccgccccgaggaccccguggagaucgcccucuaccagcccuccagcgggugcuacauccacuucuuccgggagccgaccgaccugaagcaguucaagcaggacgccaaguacucccacggcaucgacgugaccgaccuguucgccacccagcccgggcucacgagcgccgucaucgacgcgcugccccgcaacauggugaucacgugccagggcuccgacgacauccgcaagcugcucgagagccagggccggaaggacaucaagcugaucgacaucgcccugagcaagaccgacucccgcaaguacgagaacgccgugugggaccaguacaaggaccucugccacaugcacaccggggucguggucgagaagaagaagcggggcgggaaggaggagaucaccccgcacugcgcccugauggacugcaucauguucgacgcggccgugagcggcgggcugaacaccuccgugcuccgcgccguccugccccgggacaugguguuccgcaccagcacgccccgggugguccugugaggacuagucccuguucccagagcccacuuuuuuuucuuuuuuugaaauaaaauagccugucuuucagaucuaaaaaaaaaaaaaaaaaaaaaaaaaaaaaaaaaaaaaaaaaaaaaaaaaaaaaaaaaaaaaaaaaaaaaaaaaaaaaaaaaaaaaaaaaaaaaaaaaaaa

SEQ ID NO: 21336 - RNA, 2028 nt, Artificial Sequence
  mRNA product Design a-2 (A100) comprising derived and/or modified sequence from LASV(LP;Clade I)__AAF86702__SP-IgE_NP(2-569) (opt1)
aggagaguccgcucagccagguugcagaagcggcuuagcguguguccuaaucuucucucugcguguagguaggccugugccgcaaacaagcuuaccauggacuggaccuggauccuguuccucguggccgccgcgacccgcguccacagcagcaacuccaaggagaucaagagcuuccuguggacccagucccuccgccgggagcugagcggcuacugcuccaacaucaagcuccagguggucaaggacgcccaggcccugcugcacgggcuggacuucagcgagguguccaacgugcagcgccucaugcggaagcagaagcgcgacgacgcggaccugaagcggcugcgcgaccucaaccaggccgucaacaaccugguggagcucaagagcacccagcagaagaacgugcugcgggucggcacgcuguccagcgacgaccugaucacccucgccgccgaccuggagaagcugaaguccaaggugauccgcaccgagcggccccucagcuccgggguguacaugggcaaccugagcucccagcagcuggaccagcgccgggcccuccugagcaugaucgggauguccggcggcccgcaggggaaccgcaccggcggggacggcgucgugcgggugugggacgucaagaacgcggagcugcucaacaaccaguucgggacgaugcccagccugacccuggccugccucaccaagcagggccagguggaccugaacgacgccgugcaggcccugaccgaccucggccugaucuacacggcgaaguaccccaacuccagcgaccuggacaugcucacccagagccaccccauccuggggauggucgacaccaagaaguccagccugaacaucuccggcuacaacuucagccucggggccgccgugaaggccggcgccugcaugcuggacggcgggaacaugcuggagaccaucaagguguccccgcagacgauggacggcauccucaagagcauccugaaggucaagcgcucccuggggauguucaucagcgacacccccggcgagcggaaccccuacgagaacauccucuacaagaucugccuguccggggagggcuggcccuacaucgcgagccgcaccuccaucaccggccgggccugggagaacacgcugguggaccucgagagcgacaacaagccgcccaagcugaacuccgccgggagcaacaagucccugcaggccgccggccucaacgcggggcugaccuacagccagcugaugacccugaaggacugcaugcuccagcuggaccccuccagcaagaccuggaucgacaucgagggccgccccgaggacccgguggagaucgcccuguuccagcccuccagcgggugcuacauccacuucuuccgggagcccacggaccucaagcaguucaagcaggacgccaaguacagccacggcaucgacgucaccgaccuguucuccacccagcccggccugaccagcgccgugaucgaggcccucccgcgcaacauggugcugacgugccagggguccgacgacaucaagaagcugcucgagagccagggccggcgcgacaucaagcugaucgacaucucccugagcaaggcggacucccgcaaguucgagaacgccgucugggaccaguacaaggaccucugccacaugcacaccgggguggucguggagaagaagaagcggggcgggaaggaggagaucacgccccacugcgcccugcuggacugcaucauguucgacgccgccaccaccggcagccucaacaucaccacccugcgcgcggugcugccccgggacauggucuuccgcaccuccacgcccaagguggugcucugaggacuagucccuguucccagagcccacuuuuuuuucuuuuuuugaaauaaaauagccugucuuucagaucuaaaaaaaaaaaaaaaaaaaaaaaaaaaaaaaaaaaaaaaaaaaaaaaaaaaaaaaaaaaaaaaaaaaaaaaaaaaaaaaaaaaaaaaaaaaaaaaaaaaa

SEQ ID NO: 21337 - RNA, 2028 nt, Artificial Sequence
  mRNA product Design a-2 (A100) comprising derived and/or modified sequence from LASV(803213;Clade II)__AAF86704__SP-IgE_NP(2-569) (opt1)
aggagaguccgcucagccagguugcagaagcggcuuagcguguguccuaaucuucucucugcguguagguaggccugugccgcaaacaagcuuaccauggacuggaccuggauccuguuccucguggccgccgcgacccgcguccacagcagcgccuccaaggaggugaaguccuuccuguggacccagagccuccgccgggagcugagcggcuacugcuccaacaucaagcugcaggucgugaaggacgcccaggcgcuccugcacgggcuggacuucagcgaggugaacaacguccagcgccucaugcggaagcagaagcgcgacgacggcgaccugaagcggcugcgcgaccucaaccaggccgugaacaaccugguggagcugaaguccacccagcagaaguccauccuccgggucgggacgcugaccagcgacgaccugcucacccuggccgccgaccuggagaagcucaagagcaaggugauccgcaccgagcggccccuguccagcggcguguacauggggaaccuguccacgcagcagcucgagcagcgccgggcccugcugaacaugaucggcauggucggcggggcgcagggcacccagccggggcgcgacggcguggugcgggucugggacgugaagaaccccgaccuccugaacaaccaguucgggaccaugcccagccugacccucgccugccugacgaagcagggccagguggaccugaacgacgccguccucgcccugaccgaccugggccucaucuacaccgcgaaguaccccaacuccagcgaccuggaccgccugucccagagccacccgauccucaacaugguggacaccaagaaguccagccugaacaucagcggguacaacuucucccugggcgccgccgugaaggccggggccugcaugcucgacggcggcaacaugcuggagacgaucaaggucacgccccagaccauggacgggauccucaagagcauccugaaggugaagcggucccugggcauguucgugagcgacacccccggggagcgcaaccccuacgagaacauccuguacaagaucugccucuccggcgacggguggccguacaucgcgagccggaccuccaucgucggccgcgccugggagaacaccaccguggaccuggagagcgacggcaagccccagaagguggggaccgccggcuccaacaagagccugcaguccgccggguuccccacgggccucaccuacagccagcugaugacccugaaggacuccaugaugcagcuggaccccagcgccaagaccuggaucgacaucgaggggcggccggaggaccccgucgagaucgcgcucuaccagcccauguccggcugcuacauccacuucuuccgcgagcccacggaccugaagcaguucaagcaggacgccaaguacagccacggcaucgacguggccgaccuguucccggcccagcccgggcucaccuccgccgucaucgaggcgcugccccggaacauggugcugaccugccagggcagcgacgacaucaagaagcuccuggacucccaggggcgccgcgacaucaagcugaucgacaucagccucagcaagguggacucccggaaguucgagaacgccgucugggaccagugcaaggaccugugccacaugcacaccggcgugguggucgagaagaagaagcgcgggggcaaggaggagaucacgccccacugcgcccugauggacugcaucauguucgacgccgccgugagcggcgggcucaacaucccggugcugcgggcgguccugccccgcgacaugguguuccggaccuccagccccaaggugguccucugaggacuagucccuguucccagagcccacuuuuuuuucuuuuuuugaaauaaaauagccugucuuucagaucuaaaaaaaaaaaaaaaaaaaaaaaaaaaaaaaaaaaaaaaaaaaaaaaaaaaaaaaaaaaaaaaaaaaaaaaaaaaaaaaaaaaaaaaaaaaaaaaaaaaa

SEQ ID NO: 21338 - RNA, 2031 nt, Artificial Sequence
  mRNA product Design a-2 (A100) comprising derived and/or modified sequence from LASV(GA391;Clade III)__CAA36646__SP-IgE_NP(2-570) (opt1)
aggagaguccgcucagccagguugcagaagcggcuuagcguguguccuaaucuucucucugcguguagguaggccugugccgcaaacaagcuuaccauggacuggaccuggauccuguuccucguggccgccgcgacccgcguccacagcagcgccuccaaggaggugcgcagcuuccuguggacccagucccuccggcgcgagcugagcggcuacugcuccaacaucaagcugcaggucgugaaggacgcccaggcgcuccugcacgggcuggacuucagcgagguguccaacguccagcggcucaugcgcaagcagaagcgggacgacggcgaccugaagcgccugcgggaccucaaccaggccgugaacaaccugguggagcucaagagcacccagcagaaguccguccugcgcguggggacccugagcuccgacgaccugcucauccuggccgccgaccuggagaagcucaagagcaaggugacccggaccgagcgcccccuguccagcggcgucuacauggggaaccuguccagccagcagcucgaccagcggcgcgcccugcugaacaugaucggcaugaccggcguguccgggggcgggaagggcgcgagcgacgggaucgugcgggucugggacgugaagaacgccgagcuccugaacaaccaguucggcacgaugccgucccugacccucgccugccugaccaagcagggccagguggaccugaacgacgccguccaggcgcucaccgaccuggggcugaucuacacggccaaguaccccaacagcagcgaccucgaccgccugucccagagccaccccauccugaacaugaucgacaccaagaaguccagccucaacaucuccggcuacaacuucagccugggggccgccgugaaggccggcgcgugcaugcuggacggcgggaacaugcucgagaccaucaaggugagcccccagaccauggacggcauccucaaguccauccugaaggucaagaagucccuggggauguucgugagcgacacgccgggcgagcggaaccccuacgagaacauccuguacaagaucugccuguccggggacggcuggcccuacaucgccagccgcaccuccaucgugggccgggccugggagaacaccgucguggaccucgagcaggacaacaagccccagaagaucgggaacggcgggagcaacaagucccugcagagcgccggcuucgccgcggggcugaccuacucccagcucaugacgcugaaggacuucaagugcuucaaccugaucccgaacgccaagaccuggauggacaucgagggccgccccgaggaccccguggagaucgcccuguaccagcccagcuccggcugcuacguccacuucuuccgggagccgaccgaccucaagcaguucaagcaggacgccaaguacagccacgggaucgacgugaccgaccuguucgccgcgcagcccggccugacgagcgccgucaucgaggcccucccccgcaacauggugaucacgugccagggguccgaggacauccggaagcugcuggagagccagggccgccgcgacaucaagcucaucgacaucacccuguccaaggccgacagccggaaguucgagaacgccgugugggaccaguucaaggaccugugccacaugcacaccggggucgugguggagaagaagaagcgcggcggcaaggaggagaucacgccccacugcgcgcucauggacugcaucauguucgacgccgccgucuccgggggccuggacgccaaggugcugcgggugguccucccgcgcgacaugguguuccggaccagcacccccaaggugguccugugaggacuagucccuguucccagagcccacuuuuuuuucuuuuuuugaaauaaaauagccugucuuucagaucuaaaaaaaaaaaaaaaaaaaaaaaaaaaaaaaaaaaaaaaaaaaaaaaaaaaaaaaaaaaaaaaaaaaaaaaaaaaaaaaaaaaaaaaaaaaaaaaaaaaa

SEQ ID NO: 21339 - RNA, 2028 nt, Artificial Sequence
  mRNA product Design a-2 (A100) comprising derived and/or modified sequence from LASV(AV;Clade V)__CCA30315__SP-IgE_NP(2-569) (opt1)
aggagaguccgcucagccagguugcagaagcggcuuagcguguguccuaaucuucucucugcguguagguaggccugugccgcaaacaagcuuaccauggacuggaccuggauccuguuccucguggccgccgcgacccgcguccacagcagcgccuccaaggaggugaaguccuuccuguggacccagagccuccgccgggagcugagcggcuacugcuccaacaucaagcugcaggucgugaaggacgcccaggcgcuccugcacgggcuggacuucagcgagguguccaacguccagcgccucaugcggaagcagcgccgggacgacagcgaccugaagcgccugcgggaccucaaccaggccgugaacaaccugguggagcugaaguccacccagcagaaguccguccuccgcgugggcacgcugagcagcgacgaccugcucacccuggccgccgaccuggagaagcucaaguccaaggugacccggaccgagcgcccccugagcuccggggucuacaugggcaaccugagcucccagcagcucgaccagcggcgcgcccugcugaaccucaucgggaugacgaacggcagccagggcucccaggcggggcgggacggcguggugcgcgucugggacgugaagaacgccgagcugcugaacaaccaguucgggaccaugccgagccucacccuggccugccugaccaagcagggccagguggaccucaacgacgucgugcaggcccugacggaccuggggcucaucuacaccgcgaaguaccccaacaccagcgaccuggaccggcugacccagucccaccccauccucaacaugaucgacacgaagaaguccagccugaacaucagcggcuacaacuucucccugggcgccgccgugaaggccggggccugcaugcucgacggcgggaacaugcuggagaccaucaaggucagcccccaguccauggacggcauccucaagagcauccugaaggugaagcgcgcgcugggcauguucguguccgacaccccgggggagcggaaccccuacgagaacauccuguacaagaucugccucagcggcgacggguggcccuacaucgccucccgcaccagcaucgucggccgggccugggagaacacggugguggaccuggagaccgacgggaagccccagaagaucggcuccggcaacagcaacaagucccugcagagcgccggguucuccgccggccucaccuacagccagcugaugacccugaaggacgcgaugcugcagcucgacccgaacgccaagacguggauggacaucgaggggcgccccgaggaccccgucgagguggcccuguaccagcccaucuccggcugcuacauccacuucuuccgggagccgaccgaccugaagcaguucaagcaggacgccaaguacagccacgggaucgacaucgccgaccucuucgcggcccagcccggccugaccagcgccgucaucgaggcccugccccgcaacauggugaucacgugccagggcuccgaggacaucaagaagcuccuggagagccaggggcgcaaggacaucaagcugaucgacaucgcccucuccaagaucgacagccggaaguucgagaacgcggugugggaccaguacaaggaccugugccacaugcacaccggcgucgugguggagaagaagaagcgcgggggcaaggaggagaucaccccgcacugcgcccugauggacugcaucauguucgacgccgccgucuccgggggccucaacacccuggugcugcgggcggugcucccccgcgacauggucuuccggaccagcacgccccgcguggugcugugaggacuagucccuguucccagagcccacuuuuuuuucuuuuuuugaaauaaaauagccugucuuucagaucuaaaaaaaaaaaaaaaaaaaaaaaaaaaaaaaaaaaaaaaaaaaaaaaaaaaaaaaaaaaaaaaaaaaaaaaaaaaaaaaaaaaaaaaaaaaaaaaaaaaa

SEQ ID NO: 21340 - RNA, 2028 nt, Artificial Sequence
  mRNA product Design a-2 (A100) comprising derived and/or modified sequence from LASV(Togo/2016/7082;Clade VI)__AMR44578__SP-IgE_NP(2-569) (opt1)
aggagaguccgcucagccagguugcagaagcggcuuagcguguguccuaaucuucucucugcguguagguaggccugugccgcaaacaagcuuaccauggacuggaccuggauccuguuccucguggccgccgcgacccgcguccacagcagcaacuccaaggaggugaaguccuuccuguggacccagagccuccgccgggagcugagcggcuacugcuccaacaucaagcugcaggucgugaaggacgcccaggcccuccugcacgggcuggacuucagcgagguguccaacguccagcgccucaugcggaagcagaagcgcgacgacggcgaccugaagcggcugcgcgaccucaaccaggcggugaacaaccugguggagcucaagagcguccagcagaaguccauccugcggguggggacccugaccagcgacgaccugcucacccuggccgccgaccuggagaagcucaaguccaaggugacccgcaccgagcggccccugagcuccggcgucuacauggggaaccugagcucccagcagcucgaccagcgccgggcccugcugagcaugaucggcauguccggcgggaaccagaacagccagccgaagggcgacgggguggugcgcgucugggacgugaagaacgccgaccuccugaacaaccaguucggcacgaugcccucccugacccucgcgugccugaccaagcagggccagguggaccugaacgacgccguccaggcccucaccgaccuggggcugaucuacacggccaaguaccccaacagcagcgaccucgaccggcugucccagagccaccccauccugaacaugaucgacaccaagaaguccagccucaacaucuccggcuacaacuucagccugggggcggccaucaagaccggcgccugcaugcuggacgggggcaacaugcucgagaccaucaaggugacgccgcagaccauggacggcauccugaaguccauccugaaggugaagcgcagccucgggauguucaucuccgacacccccggcgagcggaaccccuacgagaacauccuguacaagaucugccugagcggggacggcuggcccuacaucgccucccgcaccgccaucaucgggcgggcgugggagaacacggucguggaccucgagagcgacuccaagccgcagaagaucggcagcaacggcuccaacaagagccugcaguccgccggguucgcccccggccugaccuacagccagcucaugacccugaaggacuccaugcugcagcuggaccccaacgccaagaccuggaucgacaucgaggggcgccccgaggacccgguggaggucgcccucuuccagcccaucagcggcugcuacauccacuucuuccgggagcccacggaccugaagcaguucaagcaggacgcgaaguacagccacgggaucgacgugaccgaccuguucgccgcccagcccggccucaccuccgccgugaucgaggcccugccgcgcaacaugguccugaccugccagggcagcgacgacaucaagaagcuccuggacucccaggggcggcgcgacaucaagcugaucgacgugagccucaacaagaucgacucccgcaaguucgagaacgcggucugggaccaguacaaggaccugugccacaugcacacgggcgugguggucgagaagaagaagaagggcgggaaggaggagaucacgccccacugcgcccugcucgacugcaucauguucgacgccgccgugagcgggggccugaacgccaccgugcugcgggcgguccucccccgcgacaugguguuccggaccuccagccccaaggugguccugugaggacuagucccuguucccagagcccacuuuuuuuucuuuuuuugaaauaaaauagccugucuuucagaucuaaaaaaaaaaaaaaaaaaaaaaaaaaaaaaaaaaaaaaaaaaaaaaaaaaaaaaaaaaaaaaaaaaaaaaaaaaaaaaaaaaaaaaaaaaaaaaaaaaaa

SEQ ID NO: 21341 - RNA, 2028 nt, Artificial Sequence
  mRNA product Design a-2 (A100) comprising derived and/or modified sequence from LASV(KAK-428;Clade n.d. (VII))__ANH09741__SP-IgE_NP(2-569) (opt1)
aggagaguccgcucagccagguugcagaagcggcuuagcguguguccuaaucuucucucugcguguagguaggccugugccgcaaacaagcuuaccauggacuggaccuggauccuguuccucguggccgccgcgacccgcguccacagcagcaacuccaaggaggugaaguccuuccuguggacccagagccuccgccgggagcugagcggcuacugcaccaacaucaagcugcaggucgugaaggacgcccaggcccuccugcacgggcuggacuucuccgaggugagcaacguccagcgccucaugcggaagcagaagcgcgacgacaacgaccugaagcggcugcgcgaccucaaccaggcggugaacaaccugguggagcugaaguccguccagcagaaguccgugcucaaggugggcacgcugaacagcgacgaccugcucacccuggccgccgaccuggagaagcucaagagcaaggucgugcggaccgagcgcccccuguccagcgggguguacaugggcaaccuguccagccagcagcucgaccagcggcgcgcccugcugaacaugaucgggauggccggcggcucccaggggaaccagccgagccgggacggcgucgugcgcgugugggacgucaagaacgcggaccuccugaacaaccaguucgggaccaugcccucccugacgcucgccugccugaccaagcagggccagguggaccugaacgacgugguccucgcccugaccgaccuggggcucaucuacaccgccaaguaccccaacagcuccgaccuggaccggcugagccagaaccaccccgugcucaacaugaucgacgugaacaagagcucccugaacaucagcggcuacaacuucucccugggcgcggccgucaaggccggggccugcaugcucgacggcgggaacaugcuggagacgaucaagaucagcccgcagaccguggacggcauccugaaguccauccucaaggugaagcgcgcccugggcauguucgucagcgacacccccggggagcggaaccccuacgagaacauccuguacaaggugugccucuccggcaacggguggcccuacaucgcgagccgcaccuccaucgucggccgggccugggagaacacggugguggaccuggagagcaacaagaaccagccgaaggucgggaacaacggcuccaacaagaugcugcagagcuccggcuucgccaccgggcucaccuacagccagcugaugacccugcgcgacuccaugcugcagcucgaccccacggccaagaccuggaucgacaucgagggccggcccgaggaccccguggagcuggcccuguuccagccgagcuccgggugcuacauccacuucuuccgcgagcccaccgaccucaagcaguucaagcaggacgcgaaguacagccacggcaucgacgugaacgaccuguucuccgcccagcccgggcugaccagcgccguccucgaggcccugccccggaacauggugcugacgugccagggcagcgacgacauccgcaagcuccuggacucccaggaccgcaaggacaucaagcugaucgacaucagccucuccaaggccgacgcgcggaaguucgagaacgacgugugggaccaguucaaggaccugugccacaugcacaccggcaucgucguggagaagaagaagaagggcgggaagcaggagaugaccccgcacugcgcccugcucgacugcaucauguucgacgccgccgugagcgggggccugaacguccccacccugcgcgccgugcuccccacggacaugguguuccggaccaucaccaccaaggucgugcugugaggacuagucccuguucccagagcccacuuuuuuuucuuuuuuugaaauaaaauagccugucuuucagaucuaaaaaaaaaaaaaaaaaaaaaaaaaaaaaaaaaaaaaaaaaaaaaaaaaaaaaaaaaaaaaaaaaaaaaaaaaaaaaaaaaaaaaaaaaaaaaaaaaaaa

SEQ ID NO: 21342 - RNA, 2028 nt, Artificial Sequence; identical to SEQ ID NO: 21336
  mRNA product Design a-2 (A100) comprising derived and/or modified sequence from LASV(Pinneo-NIG-1969;Clade I)__AIT17837__SP-IgE_NP(2-569) (opt1)

SEQ ID NO: 21343 - RNA, 2028 nt, Artificial Sequence
  mRNA product Design a-2 (A100) comprising derived and/or modified sequence from LASV(ISTH0009-NIG-2011;Clade II)__AIT17405__SP-IgE_NP(2-569) (opt1)
aggagaguccgcucagccagguugcagaagcggcuuagcguguguccuaaucuucucucugcguguagguaggccugugccgcaaacaagcuuaccauggacuggaccuggauccuguuccucguggccgccgcgacccgcguccacagcagcguguccaaggaggucaagagcuuccuguggacccagucccuccgccgggagcugagcggcuacugcuccaacaucaagcuccagguggugaaggacgcccaggcccugcugcacgggcuggacuucagcgaggucuccaacgugcagcgccucaugcggaagcagaagcgcgacgacagcgaccugaagcggcugcgcgaccucaaccaggcggugaacaaccuggucgagcugaaguccacccagcagaaguccauccuccgggugggcacccugaccagcgacgaccugcucacccuggccgccgaccuggagaagcucaagagcaaggugauccgcaccgagcggccccuguccagcggggucuacaugggcaaccuguccacgcagcagcucgagcagcgccgggcccugcugaacaugaucgggauggugggcggcgcccaggggacccagccgggccgcgacggggugguccgggugugggacgugaagaaccccgaccuccugaacaaccaguucggcaccaugcccagccugacccucgcgugccugacgaagcaggggcaggucgaccugaacgacgccgugcucgcccugaccgaccugggccucaucuacaccgccaaguaccccaacuccagcgaccuggaccgccugucccagagccacccgauccucaacaugguggacaucaagaaguccagccugaacaucagcggcuacaacuucucccugggggcggccgucaaggccggcgccugcaugcucgacgggggcaacaugcuggagaccaucaaggugacgccccagaccauggacggcauccucaagagcauccugaaggugaagcggucccuggggauguucgucagcgacacccccggcgagcgcaaccccuacgagaacauccuguacaagaucugccucuccggggacggcuggccguacaucgccagccggaccuccaucguggggcgcgcgugggagaacacgaccguggaccuggagagcgacggcaagccccagaaggucggcuccgccgggagcaacaagucccugcagagcgccggcuuccccaccgggcucaccuacucccagcugaugacgcugaaggacagcaugaugcagcuggaccccuccgccaagaccuggaucgacaucgagggccggccggaggaccccguggagaucgcccucuaccagcccaugagcgggugcuacauccacuucuuccgcgagcccaccgaccugaagcaguucaagcaggacgcgaaguacucccacggcaucgacgucgccgaccuguucccggcccagcccggccucaccagcgccgugaucgaggcccugccccggaacauggugcugacgugccaggggagcgacgacaucaagcgccuccuggacucccagggccgccgggacaucaagcugaucgacaucgcgcucagcaaggccgacucccgccgguucgagaacgccgucugggaccagugcaaggaccugugccacaugcacaccggggugguggucgagaagaagaagcgcggcgggaaggaggagaucacgccccacugcgcccugauggacugcaucauguacgacgccgcggugagcggcggccucaacaucccggugcugcgggccguccugccccgcgacaugguguuccggaccuccagccccaaggugguccucugaggacuagucccuguucccagagcccacuuuuuuuucuuuuuuugaaauaaaauagccugucuuucagaucuaaaaaaaaaaaaaaaaaaaaaaaaaaaaaaaaaaaaaaaaaaaaaaaaaaaaaaaaaaaaaaaaaaaaaaaaaaaaaaaaaaaaaaaaaaaaaaaaaaaa

SEQ ID NO: 21344 - RNA, 2028 nt, Artificial Sequence
  mRNA product Design a-2 (A100) comprising derived and/or modified sequence from LASV(ISTH2010-NIG-2012;Clade II)__AIT17483__SP-IgE_NP(2-569) (opt1)
aggagaguccgcucagccagguugcagaagcggcuuagcguguguccuaaucuucucucugcguguagguaggccugugccgcaaacaagcuuaccauggacuggaccuggauccuguuccucguggccgccgcgacccgcguccacagcagcgccuccaaggaggugaaguccuuccuguggacccagagccuccgccgggagcugagcggcuacugcuccaacaucaagcugcaggucgugaaggacgcccaggcgcuccugcacgggcuggacuucagcgagguguccaacguccagcgccucaugcggaagcagaagcgcgacgacagcgaccugaagcggcugcgcgaccucaaccaggccgugaacaaccugguggagcugaaguccacccagcagaaguccauccuccgggucggcacgcugaccagcgacgaccugcucacccuggccgccgaccuggagaagcucaagagcaaggugauccgcaccgagcggccccuguccagcgggguguacaugggcaaccuguccacgcagcagcucgagcagcgccgggcccugcugaaccucaucgggauggucggcggcgcgcaggggacccagccgggccgcgacgggguggugcgggucugggacgugaagaaccccgaccugcugaacaaccaguucggcaccaugcccagccucacccuggccugccugacgaagcagggccagguggaccucaacgacgccguccuggcccugaccgaccucgggcugaucuacaccgcgaaguaccccaacuccagcgaccuggaccgccucucccagagccacccgauccugaacaugguggacaccaagaaguccagccugaacaucagcggcuucaacuucucccucggggccgccgugaaggccggcgccugcaugcuggacgggggcaacaugcuggagacgaucaaggucacgccccagaccauggacggcauccucaagagcauccugaaggugaagaagucccuggggauguucgugagcgacacccccggcgagcggaaccccuacgagaacauccucuacaagaucugccuguccggggacggcuggccguacaucgcgagccgcaccuccaucgucgggcgggccugggagaacaccaccguggaccuggagagcgacggcaagccccacaaggugggcaccgccggguccaacaagagccuccaguccgccggcuuccccacggggcugaccuacagccagcugaugacccugaaggacuccaugaugcagcucgaccccagcgccaagaccuggaucgacaucgagggccgcccggaggaccccgucgagaucgcgcuguaccagcccauguccgggugcuacauccacuucuuccgggagcccacggaccugaagcaguucaagcaggacgccaaguacagccacggcaucgacguggccgaccucuucccggcccagcccggccugaccuccgccgucaucgaggcgcugccccgcaacauggugcugaccugccaggggagcgacgacaucaagcggcuccuggacagccagggccgccgcgacaucaagcucaucgacaucgcccuguccaaggccgacagccggcgcuucgagaacgccgugugggaccagugcaaggaccugugccacaugcacaccggggucgugguggagaagaagaagcggggcgggaaggaggagaucacgccccacugcgcccucauggacugcaucauguacgacgcggccgucuccggcggccugaacaucccggugcugcgcgccgugcucccccgggacauggucuuccgcaccagcucccccaagguggugcugugaggacuagucccuguucccagagcccacuuuuuuuucuuuuuuugaaauaaaauagccugucuuucagaucuaaaaaaaaaaaaaaaaaaaaaaaaaaaaaaaaaaaaaaaaaaaaaaaaaaaaaaaaaaaaaaaaaaaaaaaaaaaaaaaaaaaaaaaaaaaaaaaaaaaa

SEQ ID NO: 21345 - RNA, 2028 nt, Artificial Sequence
  mRNA product Design a-2 (A100) comprising derived and/or modified sequence from LASV(Lassa virus/H.sapiens-wt/NGA/2015/ISTH_0543;Clade II)__AVO03640__SP-IgE_NP(2-569) (opt1)
aggagaguccgcucagccagguugcagaagcggcuuagcguguguccuaaucuucucucugcguguagguaggccugugccgcaaacaagcuuaccauggacuggaccuggauccuguuccucguggccgccgcgacccgcguccacagcagcgccuccaaggaggugaaguccuuccuguggacccagagccuccgccgggagcugagcggcuacugcuccaacaucaagcugcaggucgugaaggacgcccaggcgcuccugcacgggcuggacuucagcgagguguccaacguccagcgccucaugcggaagcagaagcgcgacgacagcgaccugaagcggcugcgcgaccucaaccaggccgugaacaaccugguggagcugaaguccacccagcagaaguccauccuccgggucggcacgcugaccagcgacgaccugcucacccuggccgccgaccuggagaagcucaagagcaaggugauccgcaccgagcggccccuguccagcgggguguacaugggcaaccuguccacgcagcagcucgagcagcgccgggcccugcugaacaugaucgggauggucggcggcgcgcaggggacccagccgggccgcgacgggguggugcgggucugggacgugaagaaccccgaccuccugaacaaccaguucggcaccaugcccagccugacccucgccugccugacgaagcagggccagguggaccugaacgacgccguccucgcccugaccgaccuggggcucaucuacaccgcgaaguaccccaacuccagcgaccuggaccgccugucccagagccacccgauccucaacaugguggacaccaagaaguccagccugaacaucagcggcuacaacuucucccugggggccgccgugaaggccggcgccugcaugcucgacgggggcaacaugcuggagacgaucaaggucacgccccagaccauggacggcauccucaagagcauccugaaggugaagaagucccuggggauguucgugagcgacacccccggcgagcggaaccccuacgagaacauccuguacaagaucugccucuccggggacggcuggccguacaucgcgagccgcaccuccaucgucgggcgggccugggagaacaccaccguggaccuggagagcgacggcaagccccagaaggugggcuccgccgggagcaacaagucccugcagagcgccggcuuccccaccgggcucacguacucccagcugaugacccugaaggacagcaugaugcagcuggaccccuccgccaagaccuggaucgacaucgagggccgcccggaggaccccgucgagaucgcgcucuaccagcccaugagcgggugcuacauccacuucuuccgggagcccaccgaccugaagcaguucaagcaggacgccaaguacucccacggcaucgacguggccgaccuguucccggcccagcccggccucacgagcgccgucaucgaggcgcugccccgcaacauggugcugaccugccaggggagcgacgacaucaagcggcuccuggacucccagggccgcaaggacaucaagcugaucgacaucgcccucagcaaggccgacucccgccgguucgagaacgccgugugggaccagugcaaggaccugugccacaugcacaccggggucgugguggagaagaagaagcgcggcgggaaggaggagaucacgccccacugcgcccugauggacugcaucauguacgacgcggccgucagcggcggccucaacaucccggugcugcgggccgugcugccccgcgacauggucuuccggaccuccagccccaagguggugcucugaggacuagucccuguucccagagcccacuuuuuuuucuuuuuuugaaauaaaauagccugucuuucagaucuaaaaaaaaaaaaaaaaaaaaaaaaaaaaaaaaaaaaaaaaaaaaaaaaaaaaaaaaaaaaaaaaaaaaaaaaaaaaaaaaaaaaaaaaaaaaaaaaaaaa

SEQ ID NO: 21346 - RNA, 2028 nt, Artificial Sequence
  mRNA product Design a-2 (A100) comprising derived and/or modified sequence from LASV(Lassa virus/H.sapiens-wt/NGA/2016/ISTH_0009;Clade II)__AVO03572__SP-IgE_NP(2-569) (opt1)
aggagaguccgcucagccagguugcagaagcggcuuagcguguguccuaaucuucucucugcguguagguaggccugugccgcaaacaagcuuaccauggacuggaccuggauccuguuccucguggccgccgcgacccgcguccacagcagcgccuccaaggaggugaaguccuuccuguggacccagagccuccgccgggagcugagcggcuacugcuccaacaucaagcugcaggucgugaaggacgcccaggcgcuccugcacgggcuggacuucagcgagguguccaacguccagcgccucaugcggaagcagaagcgcgacgacagcgaccugaagcggcugcgcgaccucaaccaggccgugaacaaccugguggagcugaaguccacccagcagaaguccauccuccgggucggcacgcugaccagcgacgaccugcucacccuggccgccgaccuggagaagcucaagagcaaggugauccgcaccgagcggccccuguccagcgggguguacaugggcaaccuguccacgcagcagcucgagcagcgccgggcccugcugaacaugaucgggauggucggcggcgcgcaggggacccagccgggccgcgacgggguggugcgggucugggacgugaagaaccccgaccuccugaacaaccaguucggcaccaugcccagccugacccucgccugccugacgaagcagggccagguggaccugaacgacgccguccucgcccugaccgaccuggggcucaucuacaccgcgaaguaccccaacuccagcgaccuggaccgccugucccagagccacccgauccucaacaugguggacaccaagaaguccagccugaacaucagcggcuacaacuucucccugggggccgccgugaaggccggcgccugcaugcucgacgggggcaacaugcuggagacgaucaaggucacgccccagaccauggacggcauccucaagagcauccugaaggugaagaagucccuggggauguucgugagcgacacccccggcgagcggaaccccuacgagaacauccuguacaagaucugccucuccggggacggcuggccguacaucgcgagccgcaccuccaucgucgggcgggccugggagaacaccaccguggaccuggagagcgacggcaagccccagaaggugggcuccgccgggagcaacaagucccugcagagcgccggcuuccccaccgggcucacguacucccagcugaugacccugaaggacagcaugaugcagcuggaccccuccgccaagaccuggaucgacaucgagggccgcccggaggaccccgucgagaucgcgcucuaccagcccaugagcgggugcuacauccacuucuuccgggagcccaccgaccugaagcaguucaagcaggacgccaaguacucccacggcaucgacguggccgaccuguucccggcccagcccggccucacgagcgccgucaucgaggcgcugccccgcaacauggugcugaccugccaggggagcgacgacaucaagcggcuccuggacucccagggccgccgcgacaucaagcugaucgacaucgcccucagcaaggccgacucccggcgcuucgagaacgccgugugggaccagugcaaggaccugugccacaugcacaccggggucgugguggagaagaagaagcggggcgggaaggaggagaucacgccccacugcgcccugauggacugcaucauguacgacgcggccgucagcggcggccucaacaucccggugcugcgcgccgugcugccccgggacauggucuuccgcaccuccagccccaagguggugcucugaggacuagucccuguucccagagcccacuuuuuuuucuuuuuuugaaauaaaauagccugucuuucagaucuaaaaaaaaaaaaaaaaaaaaaaaaaaaaaaaaaaaaaaaaaaaaaaaaaaaaaaaaaaaaaaaaaaaaaaaaaaaaaaaaaaaaaaaaaaaaaaaaaaaa

SEQ ID NO: 21347 - RNA, 2028 nt, Artificial Sequence
  mRNA product Design a-2 (A100) comprising derived and/or modified sequence from LASV(Lassa virus/H.sapiens-wt/NGA/2016/ISTH_0017;Clade II)__AVO03568__SP-IgE_NP(2-569) (opt1)
aggagaguccgcucagccagguugcagaagcggcuuagcguguguccuaaucuucucucugcguguagguaggccugugccgcaaacaagcuuaccauggacuggaccuggauccuguuccucguggccgccgcgacccgcguccacagcagcgccuccaaggaggugaaguccuuccuguggacccagagccuccgccgggagcugagcggcuacugcuccagcaucaagcugcaggucgugaaggacgcccaggcgcuccugcacgggcuggacuucuccgaggugagcaacguccagcgccucaugcggaagcagaagcgcgacgacuccgaccugaagcggcugcgcgaccucaaccaggccgugaacaaccugguggagcucaagagcacccagcagaaguccauccugcgggucggcacgcugaccagcgacgaccugcucacccuggccgccgaccuggagaagcucaaguccaaggugauccgcaccgagcggccccugagcuccgggguguacaugggcaaccugagcacgcagcagcucgagcagcgccgggcccugcugaacaugaucgggauggcgggcggcgcccaggggacccagccgggccgcgacggggucgugcgggugugggacgucaagaaccccgaccuccugaacaaccaguucggcaccaugcccucccugacccucgccugccugacgaagcagggccagguggaccugaacgacgccgugcucgcgcugaccgaccuggggcucaucuacaccgccaaguaccccaacagcuccgaccuggaccgccugagccagagccacccgauccucaacauggucgacaccaagaaguccagccugaacaucuccggcuacaacuucagccugggggccgccgugaaggccggcgcgugcaugcucgacgggggcaacaugcuggagacgaucaaggugacgccccagaccauggacggcauccugaaguccauccucaaggucaagcggagccuggggauguucguguccgacgcccccggcgagcgcaaccccuacgagaacauccuguacaagaucugccucagcggggacggcuggccguacaucgccucccggaccagcaucguggggcgcgccugggagaacaccaccgucgaccuggaguccgacggcaagccccagaaggugggcgccaccgggagcaacaagucccugcagagcgcgggcuuccccaccgggcucacguacucccagcugaugacccugaaggacagcaugaugcagcuggaccccuccgccaagaccuggaucgacaucgagggccggccggaggaccccguggaggucgcccucuaccagcccgugagcgggugcuacauccacuucuuccgcgagcccaccgaccugaagcaguucaagcaggacgccaaguacucccacggcaucgacgucgccgaccuguucccggcgcagcccggccucacgagcgccgugaucgaggcccugccccggaacauggugcugaccugccaggggagcgacgacaucaagaagcuccuggacucccagggccgcaaggacaucaagcugaucgacaucgcccucagcaaggccgacucccgccgguucgagaacgcggucugggaccagugcaaggaccugugccacaugcacaccggggugguggucgagaagaagaagcgcggcgggaaggaggagaucacgccccacugcgcccugauggacugcaucauguacgacgccgccgugagcggcggccucaacaucccggugcugcgggcgguccugccccgcgacaugguguuccggaccuccagccccaaggugguccucugaggacuagucccuguucccagagcccacuuuuuuuucuuuuuuugaaauaaaauagccugucuuucagaucuaaaaaaaaaaaaaaaaaaaaaaaaaaaaaaaaaaaaaaaaaaaaaaaaaaaaaaaaaaaaaaaaaaaaaaaaaaaaaaaaaaaaaaaaaaaaaaaaaaaa

SEQ ID NO: 21348 - RNA, 2028 nt, Artificial Sequence
  mRNA product Design a-2 (A100) comprising derived and/or modified sequence from LASV(Lassa virus/H.sapiens-wt/NGA/2018/ISTH_0959;Clade II)__AVV65100__SP-IgE_NP(2-569) (opt1)
aggagaguccgcucagccagguugcagaagcggcuuagcguguguccuaaucuucucucugcguguagguaggccugugccgcaaacaagcuuaccauggacuggaccuggauccuguuccucguggccgccgcgacccgcguccacagcagcgccuccaaggaggugaaguccuuccuguggacccagagccuccgccgggagcugagcggcuacugcuccaacaucaagcugcaggucgugaaggacgcccaggcgcuccugcacgggcuggacuucagcgagguguccaacguccagcgccucaugcggaagcagaagcgcgacgacagcgaccugaagcggcugcgcgaccucaaccaggccgugaacaaccugguggagcugaaguccacccagcagaaguccauccuccgggucggcacccugaccagcgacgaccugcucacccuggccgccgaccuggagaagcucaagagcaaggugauccgcaccgagcggccccuguccagcgggguguacaugggcaaccuguccacgcagcagcucgagcagcgccgggcccugcugaaccucaucgggauggucggcggcgcgcaggggacccagccgggccgcgacgggguggugcgggucugggacgugaagaaccccgaccugcugaacaaccaguucggcaccaugcccagccucacccuggccugccugacgaagcagggccagguggaccucaacgacgucgugcuggcccugaccgaccucgggcugaucuacaccgccaaguaccccaacuccagcgaccuggaccgccucucccagagccacccgauccugaacaugguggacaccaagaaguccagccugaacaucagcggcuucaacuucucccucggggcggccgucaaggccggcgccugcaugcuggacgggggcaacaugcuggagacgaucaaggugacgccccagaccauggacggcauccucaagagcauccugaaggugaagaagucccuggggauguucgucagcgacacccccggcgagcggaaccccuacgagaacauccucuacaagaucugccuguccggggacggcuggccguacaucgccagccgcaccuccaucguggggcgggcgugggagaacaccaccguggaccuggagagcgacggcaagccccacaaggucggcaccgccggguccaacaagagccuccaguccgccggcuuccccacggggcugaccuacagccagcugaugacccugaaggacuccaugaugcagcucgaccccagcgccaagaccuggaucgacaucgagggccgcccggaggaccccguggagaucgcccuguaccagcccauguccgggugcuacauccacuucuuccgggagcccacggaccugaagcaguucaagcaggacgcgaaguacagccacggcaucgacgucgccgaccucuucccggcccagcccggccugaccuccgccgugaucgaggcccugccccgcaacauggugcugaccugccaggggagcgacgacaucaagcggcuccuggacagccagggccgcaaggacaucaagcucaucgacaucgcgcuguccaagaccgacagccgccgguucgagaacgccgucugggaccagugcaaggaccugugccacaugcacacgggggugguggucgagaagaagaagcgcggcgggaaggaggagaucacgccccacugcgcccucauggacugcaucauguacgacgccgccguguccggcggccugaacaucccggugcugcgggcgguccucccccgcgacaugguguuccggaccagcucccccaaggugguccugugaggacuagucccuguucccagagcccacuuuuuuuucuuuuuuugaaauaaaauagccugucuuucagaucuaaaaaaaaaaaaaaaaaaaaaaaaaaaaaaaaaaaaaaaaaaaaaaaaaaaaaaaaaaaaaaaaaaaaaaaaaaaaaaaaaaaaaaaaaaaaaaaaaaaa

SEQ ID NO: 21349 - RNA, 2028 nt, Artificial Sequence
  mRNA product Design a-2 (A100) comprising derived and/or modified sequence from LASV(LASV003-NIG-2008;Clade II)__AIT17581__SP-IgE_NP(2-569) (opt1)
aggagaguccgcucagccagguugcagaagcggcuuagcguguguccuaaucuucucucugcguguagguaggccugugccgcaaacaagcuuaccauggacuggaccuggauccuguuccucguggccgccgcgacccgcguccacagcagcgccuccaaggaggugaaguccuuccuguggacccagagccuccgccgggagcugagcggcuacugcuccagcaucaagcugcaggucgugaaggacgcccaggcgcuccugcacgggcuggacuucuccgaggugagcaacguccagcgccucaugcggaagcagaagcgcgacgacuccgaccugaagcggcugcgcgaccucaaccaggccgugaacaaccugguggagcucaagagcacccagcagaaguccguccugcgggugggcacccugaccagcgacgaccugcucacccuggccgccgaccuggagaagcucaaguccaaggugauccgcaccgagcggccccugagcuccggggucuacaugggcaaccugagcgcccagcagcucgagcagcgccggacgcugcugaacaugaucgggauggugggcggcgcgcaggggacccagccgggccgcgacggggugguccgggugugggacgugaagaaccccgaccuccugaacaaccaguucggcaccaugcccucccugacccucgccugccugacgaagcaggggcaggucgaccugaacgacguggugcucgcccugaccgaccugggccucaucuacaccgccaaguaccccaacagcuccgaccuggaccgccugagccagagccacccgauccucuccauggucgacaccaagaaguccagccugaacaucagcggcuacaacuucucccugggggcggccgugaaggccggcgccugcaugcucgacgggggcaacaugcuggagacgaucaaggugacgccccagaccauggacggcauccucaagagcauccugaaggucaagaagucccuggggauguucgugagcgacacccccggcgagcggaaccccuacgagaacauccuguacaagaucugccucuccggggacggcuggccguacaucgccagccgcaccuccaucguggggcgggcgugggagaacaccaccgucgaccuggagagcgacggcaagccccagaaggugggcaccgccggguccaacaagagccugcaguccgccggcuuccccacggggcucaccuacagccagcugaugacccugaaggacuccaugaugcagcuggaccccagcgccaagaccuggaucgacaucgagggccgcccggaggaccccgucgagaucgcccucuaccagcccauguccgggugcuacauccacuucuuccgggagcccacggaccugaagcaguucaagcaggacgcgaaguacagccacggcaucgacgugaccgaccuguucccggcccagcccggccucaccagcgccgugaucgaggcccugccccgcaacaugguccugaccugccagggguccgacgacaucaagcggcuccuggacagccagggccgccgcgacaucaagcugaucgacaucgcccucuccaaggcggacagccggcgcuucgagaacgccgugugggaccagugcaaggaccugugccacaugcacacggggguggucguggagaagaagaagcggggcgggaaggaggagaucacgccccacugcgcccugauggacugcaucauguacgacgccgccguguccggcggccucaacaucccgguccugcgcgcggugcugccccgggacaugguguuccgcaccagcucccccaaggucgugcucugaggacuagucccuguucccagagcccacuuuuuuuucuuuuuuugaaauaaaauagccugucuuucagaucuaaaaaaaaaaaaaaaaaaaaaaaaaaaaaaaaaaaaaaaaaaaaaaaaaaaaaaaaaaaaaaaaaaaaaaaaaaaaaaaaaaaaaaaaaaaaaaaaaaaa

SEQ ID NO: 21350 - RNA, 2028 nt, Artificial Sequence
  mRNA product Design a-2 (A100) comprising derived and/or modified sequence from LASV(LASV035-NIG-2009;Clade II)__AIT17589__SP-IgE_NP(2-569) (opt1)
aggagaguccgcucagccagguugcagaagcggcuuagcguguguccuaaucuucucucugcguguagguaggccugugccgcaaacaagcuuaccauggacuggaccuggauccuguuccucguggccgccgcgacccgcguccacagcagcgccuccaaggaggugaaguccuuccuguggacccagagccuccgccgggagcugagcggcuacugcuccagcaucaagcugcaggucgugaaggacgcccaggcgcuccugcacgggcuggacuucuccgaggugagcaacguccagcgccucaugcggaagcagaagcgcgacgacuccgaccugaagcggcugcgcgaccucaaccaggccgugaacaaccugguggagcucaagagcacccagcagaaguccauccugcgggucggcacgcugaccagcgacgaccugcucacccuggccgccgaccuggagaagcucaaguccaaggugauccgcaccgagcggccccugagcuccgggguguacaugggcaaccugagcgcccagcagcucgagcagcgccgggcgcugcugaacaugaucgggauggucggcggcgcccaggggacgcagccgggccgcgacgggguggugcgggucugggacgugaagaaccccgaccuccugaacaaccaguucggcaccaugcccucccugacccucgccugccugaccaagcagggccagguggaccugaacgacgccguccucgcgcugacggaccuggggcucaucuacaccgccaaguaccccaacagcuccgaccuggaccgccugagccagagccacccgauccucaacaugguggacaccaagaaguccagccugaacaucuccggcuacaacuucagccugggggccgccgugaaggccggcgcgugcaugcucgacgggggcaacaugcuggagaccaucaaggucacgccccagaccauggacggcauccugaaguccauccucaaggugaagcggagccuggggauguucguguccgacacccccggcgagcgcaaccccuacgagaacauccuguacaagaucugccucagcggggacggcuggccguacaucgccucccggaccagcaucgucgggcgcgccugggagaacacgaccguggaccuggaguccgacggcaagccccagaaggugggcaccaccgggagcaacaagucccugcagagcgccggcuuccccacggggcucaccuacucccagcugaugacccugaaggacagcaugaugcagcuggaccccuccgccaagaccuggaucgacaucgagggccggccggaggaccccgucgagaucgcgcucuaccagcccaugagcgggugcuacauccacuucuuccgcgagcccacggaccugaagcaguucaagcaggacgccaaguacucccacggcaucgacguggccgaccuguucccggcccagcccggccucaccagcgccgucaucgaggcgcugccccggaacauggugcugaccugccaggggagcgacgacaucaagaagcuccuggacucccagggccgccgcgacaucaagcugaucgacaucgcccucagcaaggccgacucccggaaguucgagaacgccgugugggaccagugcaaggaccugugccacaugcacaccggggucgugguggagaagaagaagcgcggcgggaaggaggagaucacgccccacugcgcccugauggacugcaucauguacgacgcggccgucagcggcggccucaacaucccggugcugcgggccgugcugccccgcgacauggucuuccggaccuccagccccaagguggugcucugaggacuagucccuguucccagagcccacuuuuuuuucuuuuuuugaaauaaaauagccugucuuucagaucuaaaaaaaaaaaaaaaaaaaaaaaaaaaaaaaaaaaaaaaaaaaaaaaaaaaaaaaaaaaaaaaaaaaaaaaaaaaaaaaaaaaaaaaaaaaaaaaaaaaa

SEQ ID NO: 21351 - RNA, 2028 nt, Artificial Sequence
  mRNA product Design a-2 (A100) comprising derived and/or modified sequence from LASV(LASV1000-NIG-2009;Clade II)__AIT17783__SP-IgE_NP(2-569) (opt1)
aggagaguccgcucagccagguugcagaagcggcuuagcguguguccuaaucuucucucugcguguagguaggccugugccgcaaacaagcuuaccauggacuggaccuggauccuguuccucguggccgccgcgacccgcguccacagcagcgccuccaaggaggugaaguccuuccuguggacccagagccuccgccgggagcugagcggcuacugcuccaacaucaagcugcaggucgugaaggacgcccaggcgcuccugcacgggcuggacuucagcgagguguccaacguccagcgccucaugcggaagcagaagcgcgacgacagcgaccugaagcggcugcgcgaccucaaccaggccgugaacaaccugguggagcugaaguccacccagcagaaguccauccuccgggucggcacgcugaccagcgacgaccugcucacccuggccgccgaccuggagaagcucaagagcaaggugauccgcaccgagcggccccuguccagcgggguguacaugggcaaccuguccacgcagcagcucgagcagcgccgggcccugcugaacaugaucgggauggucggcggcgcgcaggggacccagccgggccgcgacgggguggugcgggucugggacgugaagaaccccgaccuccugaacaaccaguucggcaccaugcccagccugacccucgccugccugacgaagcagggccagguggaccugaacgacgucgugcucgcccugaccgaccuggggcucaucuacaccgccaaguaccccaacuccagcgaccuggaccgccugucccagagccacccgauccucaacaugguggacaccaagaaguccagccugaacaucagcggcuacaacuucucccugggggcggccgucaaggccggcgccugcaugcucgacgggggcaacaugcuggagacgaucaaggugacgccccagaccauggacggcauccucaagagcauccugaaggugaagaagucccuggggauguucgucagcgacacccccggcgagcggaaccccuacgagaacauccuguacaagaucugccucuccggggacggcuggccguacaucgccagccgcaccuccaucguggggcgggcgugggagaacaccaccguggaccuggagagcgacggcaagccccagaaggucggcaccgccggguccaacaagagccugcaguccgccggcuuccccacggggcucaccuacagccagcugaugacccugaaggacuccaugaugcagcuggaccccagcgccaagaccuggaucgacaucgagggccgcccggaggaccccguggagaucgcccucuaccagcccgucuccgggugcuacauccacuucuuccgggagcccacggaccugaagcaguucaagcaggacgcgaaguacagccacggcaucgacguggccgaccuguucccggcccagcccggccucaccuccgccgugaucgaggcccugccccgcaacaugguccugaccugccaggggagcgacgacaucaagcggcuccuggacagccagggccgccgcgacaucaagcugaucgacaucgcgcucuccaaggccgacagccggcgcuucgagaacgccgugugggaccagugcaaggaccugugccacaugcacaccgggguggucguggagaagaagaagcggggcgggaaggaggagaucacgccccacugcgcccugauggacugcaucauguacgacgccgcgguguccggcggccucaacaucccgguccugcgcgccgugcugccccgggacaugguguuccgcaccagcucccccaaggucgugcucugaggacuagucccuguucccagagcccacuuuuuuuucuuuuuuugaaauaaaauagccugucuuucagaucuaaaaaaaaaaaaaaaaaaaaaaaaaaaaaaaaaaaaaaaaaaaaaaaaaaaaaaaaaaaaaaaaaaaaaaaaaaaaaaaaaaaaaaaaaaaaaaaaaaaa

SEQ ID NO: 21352 - RNA, 2028 nt, Artificial Sequence
  mRNA product Design a-2 (A100) comprising derived and/or modified sequence from LASV(LASV221-NIG-2010;Clade II)__AIT17625__SP-IgE_NP(2-569) (opt1)
aggagaguccgcucagccagguugcagaagcggcuuagcguguguccuaaucuucucucugcguguagguaggccugugccgcaaacaagcuuaccauggacuggaccuggauccuguuccucguggccgccgcgacccgcguccacagcagcgccuccaaggaggugaaguccuuccuguggacccagagccuccgccgggagcugagcggcuacugcuccagcaucaagcugcaggucgugaaggacgcccaggcgcuccugcacgggcuggacuucuccgaggugagcaacguccagcgccucaugcggaagcagcgccgggacgacuccgaccugaagcgccugcgggaccucaaccaggccgugaacaaccugguggagcucaagagcacccagcagaaguccauccugcgcgucggcacgcugaccagcgacgaccugcucacccuggccgccgaccuggagaagcucaaguccaaggugauccggaccgagcgcccccugagcuccgggguguacaugggcaaccugagcacgcagcagcucgagcagcggcgcgcccugcugaacaugaucgggauggucggcggcgcgcaggggacccagccgggccgggacgggguggugcgcgucugggacgugaagaaccccgaccuccugaacaaccaguucggcaccaugcccucccugacccucgccugccugacgaagcagggccagguggaccugaacgacgccguccucgcccugaccgaccuggggcucaucuacaccgcgaaguaccccaacagcuccgaccuggaccggcugagccagagccacccgauccucaacaugguggacaccaagaaguccagccugaacaucuccggcuacaacuucagccugggggccgccgugaaggccggcgccugcaugcucgacgggggcaacaugcuggagacgaucaaggucacgccccagaccguggacggcauccugaaguccauccucaaggugaagcgcagccuggggauguucgucuccgacacccccggcgagcggaaccccuacgagaacauccuguacaagaucugccucagcggggacggcuggccguacaucgcgucccgcaccagcaucguggggcgggccugggagaacaccaccguggaccuggaguccgacggcaagccccagaaggucggcaccgccgggagcaacaagucccugcagagcgccggcuuccccacggggcucaccuacucccagcugaugacccugaaggacagcaugaugcagcuggaccccuccgccaagaccuggaucgacaucgagggccgcccggaggaccccguggagaucgcgcucuaccagcccaugagcgggugcuacauccacuucuuccgggagcccacggaccugaagcaguucaagcaggacgccaaguacucccacggcaucgacgucgccgaccuguucccggcccagcccggccucaccagcgccgugaucgaggcgcugccccgcaacauggugcugaccugccaggggagcgacgacaucaagcgccuccuggacucccagggccggcgcgacaucaagcugaucgacaucgcccucagcaaggccgacucccggaaguucgagaacgccgucugggaccagugcaaggaccugugccacaugcacaccggggugguggucgagaagaagaagcgcggcgggaaggaggagaucacgccccacugcgcccugauggacugcaucauguacgacgcggccgugagcggcggccucaacaucccggugcugcgggccguccugccccgcgacaugguguuccggaccuccagccccaaggugguccucugaggacuagucccuguucccagagcccacuuuuuuuucuuuuuuugaaauaaaauagccugucuuucagaucuaaaaaaaaaaaaaaaaaaaaaaaaaaaaaaaaaaaaaaaaaaaaaaaaaaaaaaaaaaaaaaaaaaaaaaaaaaaaaaaaaaaaaaaaaaaaaaaaaaaa

SEQ ID NO: 21353 - RNA, 2028 nt, Artificial Sequence
  mRNA product Design a-2 (A100) comprising derived and/or modified sequence from LASV(LASV237-NIG-2010;Clade II)__AIT17639__SP-IgE_NP(2-569) (opt1)
aggagaguccgcucagccagguugcagaagcggcuuagcguguguccuaaucuucucucugcguguagguaggccugugccgcaaacaagcuuaccauggacuggaccuggauccuguuccucguggccgccgcgacccgcguccacagcagcgccuccaaggaggugaaguccuuccuguggacccagagccuccgccgggagcugagcggcuacugcuccaacaucaagcugcaggucgugaaggacgcccaggcgcuccugcacgggcuggacuucagcgagguguccaacguccagcgccucaugcggaagcagaagcgcgacgacagcgaccugaagcggcugcgcgaccucaaccaggccgugaacaaccugguggagcugaaguccacccagcagaaguccauccuccgggucggcacccugaccagcgacgaccugcucacccuggccgccgaccuggagaagcucaagagcaaggugauccgcaccgagcggccccuguccagcgggguguacaugggcaaccuguccacgcagcagcucgagcagcgccgggcccugcugaacaugaucgggauggucggcggcgcgcaggggacccagccgggccgcgacgggguggugcgggucugggacgugaagaaccccgaccuccugaacaaccaguucggcaccaugcccagccugacccucgccugccugacgaagcagggccagguggaccugaacgacgccguccucgcccugaccgaccuggggcucaucuacaccgcgaaguaccccaacuccagcgaccuggaccgccugucccagagccacccgauccucaacaugguggacaucaagaaguccagccugaacaucagcggcuacaacuucucccugggggccgccgugaaggccggcgccugcaugcucgacgggggcaacaugcuggagaccaucaaggucacgccccagaccauggacggcauccucaagagcauccugaaggugaagcggucccuggggauguucgugagcgacacccccggcgagcgcaaccccuacgagaacauccuguacaagaucugccucuccggggacggcuggccguacaucgcgagccggaccuccaucgucgggcgcgccugggagaacacgaccguggaccuggagagcgacggcaagccccagaaggugggcuccgccgggagcaacaagucccugcagagcgccggcuuccccaccgggcucaccuacucccagcugaugacgcugaaggacagcaugaugcagcuggaccccuccgccaagaccuggaucgacaucgagggccggccggaggaccccgucgagaucgcgcucuaccagcccaugagcgggugcuacauccacuucuuccgcgagcccaccgaccugaagcaguucaagcaggacgccaaguacucccacggcaucgacguggccgaccuguucccggcccagcccggccucaccagcgccgucaucgaggcgcugccccggaacauggugcugacgugccaggggagcgacgacaucaagcgccuccuggacucccagggccgccgggacaucaagcugaucgacaucgcccucagcaaggccgacucccgccgguucgagaacgccgugugggaccagugcaaggaccugugccacaugcacaccggggucgugguggagaagaagaagcgcggcgggaaggaggagaucacgccccacugcgcccugauggacugcaucauguacgacgcggccgucagcggcggccucaacaucccggugcugcgggccgugcugccccgcgacauggucuuccggaccuccagccccaagguggugcucugaggacuagucccuguucccagagcccacuuuuuuuucuuuuuuugaaauaaaauagccugucuuucagaucuaaaaaaaaaaaaaaaaaaaaaaaaaaaaaaaaaaaaaaaaaaaaaaaaaaaaaaaaaaaaaaaaaaaaaaaaaaaaaaaaaaaaaaaaaaaaaaaaaaaa

SEQ ID NO: 21354 - RNA, 2028 nt, Artificial Sequence
  mRNA product Design a-2 (A100) comprising derived and/or modified sequence from LASV(LASV253-NIG-2011;Clade II)__AIT17671__SP-IgE_NP(2-569) (opt1)
aggagaguccgcucagccagguugcagaagcggcuuagcguguguccuaaucuucucucugcguguagguaggccugugccgcaaacaagcuuaccauggacuggaccuggauccuguuccucguggccgccgcgacccgcguccacagcagcgccuccaaggaggugaaguccuuccuguggacccagagccuccgccgggagcugagcggcuacugcuccagcaucaagcugcaggucgugaaggacgcccaggcgcuccugcacgggcuggacuucuccgaggugagcaacguccagcgccucaugcggaagcagaagcgcgacgacuccgaccugaagcggcugcgcgaccucaaccaggccgugaacaaccugguggagcucaagagcacccagcagaaguccguccugcgggugggcacccugaccagcgacgaccugcucacccuggccgccgaccuggagaagcucaaguccaaggugauccgcaccgagcggccccugagcuccggggucuacaugggcaaccugagcacgcagcagcucgagcagcgccgggcccugcugaacaugaucgggauggugggcggcgcgcaggggacccagccgggccgcgacggggugguccgggugugggacgugaagaaccccgaccuccugaacaaccaguucggcaccaugcccucccugacccucgccugccugacgaagcaggggcaggucgaccugaacgacguggugcucgcccugaccgaccugggccucaucuacaccgccaaguaccccaacagcuccgaccuggaccgccugagccagagccacccgauccucaacauggucgacaccaagaaguccagccugaacaucuccggcuacaacuucagccugggggcggccgugaaggccggcgccugcaugcucgacgggggcaacaugcuggagacgaucaaggugacgccccagaccauggacggcauccugaaguccauccucaaggucaagaagucccuggggauguucgugagcgacacccccggcgagcggaaccccuacgagaacauccuguacaagaucugccucagcggggacggcuggccguacaucgccucccgcaccagcaucguggggcgggcgugggagaacaccaccgucgaccuggaguccgacggcaagccccagaaggugggcaccgccgggagcaacaagucccugcagagcgccggcuuccccacggggcucaccuacucccagcugaugacccugaaggacagcaugaugcagcuggaccccuccgccaagaccuggaucgacaucgagggccgcccggaggaccccgucgagaucgcccucuaccagcccaugagcgggugcuacauccacuucuuccgggagcccacggaccugaagcaguucaagcaggacgcgaaguacucccacggcaucgacgugaccgaccuguucccggcccagcccggccucaccagcgccgugaucgaggcccugccccgcaacaugguccugaccugccaggggagcgacgacaucaagcggcuccuggacucccagggccgccgcgacaucaagcugaucgacaucgcccucagcaaggcggacucccggcgcuucgagaacgccgugugggaccagugcaaggaccugugccacaugcacacggggguggucguggagaagaagaagcggggcgggaaggaggagaucacgccccacugcgcccugauggacugcaucauguacgacgccgccgugagcggcggccucaacaucccgguccugcgcgcggugcugccccgggacaugguguuccgcaccuccagccccaaggucgugcucugaggacuagucccuguucccagagcccacuuuuuuuucuuuuuuugaaauaaaauagccugucuuucagaucuaaaaaaaaaaaaaaaaaaaaaaaaaaaaaaaaaaaaaaaaaaaaaaaaaaaaaaaaaaaaaaaaaaaaaaaaaaaaaaaaaaaaaaaaaaaaaaaaaaaa

SEQ ID NO: 21355 - RNA, 2028 nt, Artificial Sequence
  mRNA product Design a-2 (A100) comprising derived and/or modified sequence from LASV(LASV254-NIG-2011;Clade II)__AIT17675__SP-IgE_NP(2-569) (opt1)
aggagaguccgcucagccagguugcagaagcggcuuagcguguguccuaaucuucucucugcguguagguaggccugugccgcaaacaagcuuaccauggacuggaccuggauccuguuccucguggccgccgcgacccgcguccacagcagcgccuccaaggaggugaaguccuuccuguggacccagagccuccgccgggagcugagcggcuacugcuccagcaucaagcugcaggucgugaaggacgcccaggcgcuccugcacgggcuggacuucuccgaggugagcaacguccagcgccucaugcggaagcagaagcgcgacgacuccgaccugaagcggcugcgcgaccucaaccaggccgugaacaaccugguggagcucaagagcacccagcagaaguccguccugcgggugggcacgcugaccagcgacgaccugcucacccuggccgccgaccuggagaagcucaaguccaaggugauccgcaccgagcggccccugagcuccggggucuacaugggcaaccugagcacgcagcagcucgagcagcgccgggcccugcugaacaugaucgggauggugggcggcgcgcaggggacccagccgggccgcgacggggugguccgggugugggacgugaagaaccccgaccuccugaacaaccaguucggcaccaugcccucccugacccucgccugccugacgaagcaggggcaggucgaccugaacgacgccgugcucgcccugaccgaccugggccucaucuacaccgcgaaguaccccaacagcuccgaccuggaccgccugagccagagccacccgauccucaacaugguggacaccaagaaguccagccugaacaucuccggcuacaacuucagccugggggccgccgucaaggccggcgccugcaugcucgacgggggcaacaugcuggagacgaucaaggugacgccccagaccauggacggcauccugaaguccauccucaaggugaagaagucccuggggauguucgucagcgacacccccggcgagcggaaccccuacgagaacauccuguacaagaucugccucagcggggacggcuggccguacaucgcgucccgcaccagcaucguggggcgggccugggagaacaccaucguggaccuggaguccgacggcaagccccagaaggucggcaccgccgggagcaacaagucccugcagagcgccggcuuccccaccgggcucacguacucccagcugaugacccugaaggacagcaugaugcagcuggaccccuccgccaagaccuggaucgacaucgagggccgcccggaggaccccguggagaucgcgcucuaccagcccaugagcgggugcuacauccacuucuuccgggagcccaccgaccugaagcaguucaagcaggacgccaaguacucccacggcaucgacgucgccgaccuguucccggcccagcccggccucacgagcgccgugaucgaggcgcugccccgcaacauggugcugaccugccaggggagcgacgacaucaagcggcuccuggacucccagggccgccgcgacaucaagcugaucgacaucgcccucagcaaggccgacucccggcgcuucgagaacgccgucugggaccagugcaaggaccugugccacaugcacaccggggugguggucgagaagaagaagcggggcgggaaggaggagaucacgccccacugcgcccugauggacugcaucauguacgacgcggccgugagcggcggccucaacaucccggugcugcgcgccguccugccccgggacaugguguuccgcaccuccagccccaaggugguccucugaggacuagucccuguucccagagcccacuuuuuuuucuuuuuuugaaauaaaauagccugucuuucagaucuaaaaaaaaaaaaaaaaaaaaaaaaaaaaaaaaaaaaaaaaaaaaaaaaaaaaaaaaaaaaaaaaaaaaaaaaaaaaaaaaaaaaaaaaaaaaaaaaaaaa

SEQ ID NO: 21356 - RNA, 2028 nt, Artificial Sequence
  mRNA product Design a-2 (A100) comprising derived and/or modified sequence from LASV(Nig08-04;Clade II)__ADU56611__SP-IgE_NP(2-569) (opt1)
aggagaguccgcucagccagguugcagaagcggcuuagcguguguccuaaucuucucucugcguguagguaggccugugccgcaaacaagcuuaccauggacuggaccuggauccuguuccucguggccgccgcgacccgcguccacagcagcgccuccaaggaggugaaguccuuccuguggacccagagccuccgccgggagcugagcggcuacugcuccaacaucaagcugcaggucgugaaggacgcccaggcgcuccugcacgggcuggacuucagcgagguguccaacguccagcgccucaugcggaagcagaagcgcgacgacggcgaccugaagcggcugcgcgaccucaaccaggccgugaacaaccugguggagcucaagagcacccagcagaaguccguccugcggguggggacccugaccagcgacgaccugcucacccuggccgccgaccuggagaagcucaaguccaaggugauccgcaccgagcggccccugagcuccggcgucuacauggggaaccugagcacgcagcagcucgagcagcgcaaggcccugcuguccaugaucggcauggugggcggggcgcagggcacccagccggggcgggacggcgugguccgcgugugggacgugaagaaccccgaccuccugaacaaccaguucgggaccaugcccagccugacccucgccugccugacgaagcagggccaggucgaccugaacgacgccgugcucgcccugaccgaccugggccucaucuacaccgcgaaguaccccaacuccagcgaccuggaccggcugucccagagccacccgauccucaacaugguggacaccaagaaguccagccugaacaucagcggguacaacuucucccugggcgccgccgucaaggccggggccugcaugcucgacggcggcaacaugcuggagacgaucaaggugacgccccagaccauggacgggauccucaagagcauccugaaggugaagcgcucccugggcauguucgucagcgacacccccggggagcggaaccccuacgagaacauccuguacaagaucugccucuccggcgacggguggccguacaucgcgagccgcaccuccaucgugggccgggccugggagaacaccaccguggaccuggagagcgacggcaagccccagaaggucgggaccgccggcuccaacaagagccugcaguccgccggguuccccacgggccucaccuacagccagcugaugacccugaaggacuccaugaugcagcuggaccccagcgccaagaccuggaucgacaucgaggggcgcccggaggaccccguggagaucgcgcucuaccagcccauguccggcugcuacauccacuucuuccgggagcccacggaccugaagcaguucaagcaggacgccaaguacagccacggcaucgacgucaccgaccuguucuccgcccagccggggcucaccagcgccgugaucgaggcccugccccgcaacauggugcugaccugccagggcagcgacgacaucaagaagcuccuggacucccaggggcggcgcgacaucaagcugaucgacaucagccucaacaaggcggacucccgccgguucgagaacgccgucugggaccagugcaaggaccugugccacaugcacacgggcgugguggucgagaagaagaagcgcgggggcaaggaggagaucacgccccacugcgcccugauggacugcaucauguucgacgccgccgugagcggcgggcucaacauccccauccugcgggcggugcugccgcgcgacauggucuuccggaccuccagccccaagguggugcucugaggacuagucccuguucccagagcccacuuuuuuuucuuuuuuugaaauaaaauagccugucuuucagaucuaaaaaaaaaaaaaaaaaaaaaaaaaaaaaaaaaaaaaaaaaaaaaaaaaaaaaaaaaaaaaaaaaaaaaaaaaaaaaaaaaaaaaaaaaaaaaaaaaaaa

SEQ ID NO: 21357 - RNA, 2031 nt, Artificial Sequence
  mRNA product Design a-2 (A100) comprising derived and/or modified sequence from LASV(GA391;Clade III)__AAA46284__SP-IgE_NP(2-570) (opt1)
aggagaguccgcucagccagguugcagaagcggcuuagcguguguccuaaucuucucucugcguguagguaggccugugccgcaaacaagcuuaccauggacuggaccuggauccuguuccucguggccgccgcgacccgcguccacagcagcgccuccaaggaggugcgcagcugccuguggacccagucccuccggcgcgagcugagcggcuacugcuccaacaucaagcugcaggucgugaaggacgcccaggcgcuccugcacgggcuggacuucagcgagguguccaacguccagcggcucaugcgcaagcagaagcgggacgacggcgaccugaagcgccugcgggaccucaaccaggccgugaacaaccugguggagcugaaguccacccagcagaaguccguccuccgcguggggacgcugagcuccgacgaccugcucauccuggccgccgaccuggagaagcucaagagcaaggugacccggaccgagcgcccccuguccagcggcgucuacauggggaaccuguccagccagcagcucgaccagcggcgcgcccugcugaacaugaucggcaugaccggcguguccgggggcgggaagggcgcgagcaacgggaucgugcgggucugggacgugaagaacgccgagcuccugaacaaccaguucggcacgaugccgucccugacccucgccugccugaccaagcagggccagguggaccugaacgacgccguccaggcgcucaccgaccuggggcugaucuacacggccaaguaccccaacagcagcgaccucgaccgccugucccagagccaccccauccugaacaugaucgacaccaagaaguccagccucaacaucuccggcuacaacuucagccugggggccgccgugaaggccggcgcgugcaugcuggacggcgggaacaugcucgagaccaucaaggugagcccccagaccauggacggcauccucaagagcauccugaaggucaagaagucccuggggauguucgugagcgacacgccgggcgagcggaaccccuacgagaacauccuguacaagaucugccuguccggggacggcuggagcuacaucgccucccgcaccagcaucgugggccgggccugggagaacaccgucguggaccucgagcaggacaacaagccccagaagaucgggaacggcggguccaacaagagccugcaguccgccggcuucgccgcggggcugaucuacagccagcucaugacccugaaggacuucaagugcuucaaccugauccccaacgccaagacguggauggacaucgagggccgcccggaggaccccguggagaucgcccuguaccagcccuccagcggcugcuacguccacuucuuccgggagcccaccgaccucaagcaguucaagcaggacgccaaguacagccacgggcgcgacgugaccgaccuguucgccgcgcagccgggccugaccuccgccgucaucgaggcccucccccggaacauggugaucacgugccaggggagcgaggacauccgcaagcugcuggagucccagggccgccgggacaucaagcucaucgacaucacccugagcaaggccgacucccgcaaguucgagaacgccgugugggaccaguucaaggaccugugccacaugcacaccggggucgugguggagaagaagaagcggggcggcaaggaggagaucacgccccacugcgcgcucauggacugcaucauguucgacgccgccgucagcgggggccuggacgccaaggugcugcgcgugguccucccccgggacaugguguuccgcaccuccaccccgaaggugguccugugaggacuagucccuguucccagagcccacuuuuuuuucuuuuuuugaaauaaaauagccugucuuucagaucuaaaaaaaaaaaaaaaaaaaaaaaaaaaaaaaaaaaaaaaaaaaaaaaaaaaaaaaaaaaaaaaaaaaaaaaaaaaaaaaaaaaaaaaaaaaaaaaaaaaa

SEQ ID NO: 21358 - RNA, 2028 nt, Artificial Sequence
  mRNA product Design a-2 (A100) comprising derived and/or modified sequence from LASV(Nig08-A19;Clade III)__ADU56619__SP-IgE_NP(2-569) (opt1)
aggagaguccgcucagccagguugcagaagcggcuuagcguguguccuaaucuucucucugcguguagguaggccugugccgcaaacaagcuuaccauggacuggaccuggauccuguuccucguggccgccgcgacccgcguccacagcagcgccuccaaggaggugaaguccuuccuguggacccagucccuccgccgggagcugagcggcuacugcuccaacaucaagcugcaggucgugaaggacgcccaggcgcuccugcacgggcuggacuucagcgagguguccaacguccagcgccucaugcggaagcagaagcgcgacgacggcgaccugaagcggcugcgcgaccucaaccaggccgugaacaaccugguggagcucaagagcacccagcagaaguccguccugcggguggggacccugagcuccgacgaccugcucgugcuggccgccgaccuggagaagcucaagagcaaggucgugcgcaccgagcggccccuguccagcggcaucuacauggggaaccuguccagccagcagcucgaccagcgcaaggcccugcugaacaugaucggcaugaccggcgggaacggcgggcggaacaccacguccgacggcaucgugcgcgucugggacgugaagaacgcggagcuccugaacaaccaguucgggaccaugccgagccugacccucgccugccugaccaagcagggccagguggaccugaacgacgccguccaggcccucacggaccugggccugaucuacaccgcgaaguaccccaacuccagcgaccucgaccggcuggcccagagccaccccauccugaacaugaucgacaccaagaaguccagccucaacaucuccggguacaacuucagccugggcgccgccgugaaggccggggcgugcaugcuggacggcggcaacaugcucgagaccaucaaggugagcccccagacgauggacgggauccucaagagcauccugaaggucaagcgcucccugggcauguucaucagcgacaccccgggggagcggaaccccuacgagaacauccuguacaagaucugccuguccggcgacggguggcccuacaucgccagccgcaccuccaucgugggccgggccugggagaacaccguggucgaccucgagagcgacaacaagccccagaagacgggcaacgggggcuccaacaagagccugcaguccgccggguucgccgcgggccugaccuacagccagcucaugacccugaaggacuccaugcugcagcuggacccgaacgccaagaccuggauggacaucgaggggcgccccgaggaccccguggagaucgcccucuaccagcccagcuccggcugcuacauccacuucuuccgggagccgacggaccugaagcaguucaagcaggacgccaaguacagccacggcaucgacgugaccgaccuguucgccgcgcagcccgggcucaccagcgccgucaucgaggcccugccccgcaacauggugaucacgugccagggcuccgaggacauccggaagcugcucgagagccaggggcgccgcgacaucaagcugaucgacaucucccugagcaaggucgacucccggaaguucgagaacgccgugugggaccaguucaaggaccucugccacaugcacaccggcaucguggucgagaagaagaagcgcgggggcaaggaggagaucacgccccacugcgcccugauggacugcaucauguucgacgcggccgugagcggcgggguggacgccaagguccugcgggccgugcucccgcgcgacaugguguuccggaccuccacccccaaggucgugcugugaggacuagucccuguucccagagcccacuuuuuuuucuuuuuuugaaauaaaauagccugucuuucagaucuaaaaaaaaaaaaaaaaaaaaaaaaaaaaaaaaaaaaaaaaaaaaaaaaaaaaaaaaaaaaaaaaaaaaaaaaaaaaaaaaaaaaaaaaaaaaaaaaaaaa

SEQ ID NO: 21359 - RNA, 2028 nt, Artificial Sequence
  mRNA product Design a-2 (A100) comprising derived and/or modified sequence from LASV(G1180-SLE-2010;Clade IV)__AIT17169__SP-IgE_NP(2-569) (opt1)
aggagaguccgcucagccagguugcagaagcggcuuagcguguguccuaaucuucucucugcguguagguaggccugugccgcaaacaagcuuaccauggacuggaccuggauccuguuccucguggccgccgcgacccgcguccacagcagcgccuccaaggagaucaagagcuuccuguggacccagucccuccgccgggagcugagcggcuacugcuccaacaucaagcuccagguggucaaggacgcccaggcgcugcugcacgggcuggacuucagcgagguguccaacgugcagcgccucaugcggaaggagcgccgggacgacaacgaccugaagcgccugcgggaccucaaccaggccgucaacaaccugguggagcucaagagcacccagcagaaguccauccugcgcgugggcacccugaccagcgacgaccugcucauccuggccgccgaccuggagaagcucaaguccaaggucauccggaccgagcgcccccugagcgccgggguguacaugggcaaccuguccagccagcagcucgaccagcggcgcgcgcugcuguccaugaucgggaugagcuccggcaaccagcgggcccaggccggccgcgacggggugguccgggugugggacgugaagaacgucgagcuccugaacaaccaguucggcaccaugccgagccugacgcucgccugccugaccaagcagggccagguggaccugaacgacgcggugcaggcccucaccgaccuggggcugaucuacaccgccaaguaccccaacacguccgaccucgaccgccugacccagagccaccccauccugaacaugaucgacaccaagaaguccagccucaacaucagcggguacaacuucucccugggcgccgccgucaaggcgggcgccugcaugcuggacgggggcaacaugcucgagaccaucaaggugagcccccagacgauggacgggauccugaaguccauccugaaggugaagaaggcccucggcauguucaucagcgacaccccgggcgagcggaaccccuacgagaacauccuguacaagaucugccuguccggggacggcuggcccuacaucgccagccgcaccuccaucaccgggcgggccugggagaacacggucguggaccucgagagcgacggcaagccccagaaggcgggguccaacaacagcaacaagucccugcagagcgugggcuucaccgccggccugaccuacucccagcucaugacccugaaggacgccaugcugcagcuggacccgaacgccaagacguggauggacaucgaggggcgccccgaggaccccgucgagaucgcccucuaccagcccagcuccggcugcuacauccacuucuuccgggagccgaccgaccugaagcaguucaagcaggacgcgaaguacagccacgggaucgacgugaccgaccuguucgccgcccagcccggccucaccuccgccgugaucgacgcccugccccgcaacauggucaucacgugccaggggagcgacgacauccgcaagcugcucgagagccagggccggaaggacaucaagcugaucgacaucgcgcuguccaagaccgacagccgcaaguacgagaacgccgugugggaccaguacaaggaccucugccacaugcacaccggcgucgugguggagaagaagaagcgcgggggcaaggaggagaucacgccccacugcgcccugauggacugcaucauguucgacgccgcggucuccgggggccugaacaccagcgugcuccgggccgugcugccgcgggacauggucuuccgcaccuccacgccccggguggugcugugaggacuagucccuguucccagagcccacuuuuuuuucuuuuuuugaaauaaaauagccugucuuucagaucuaaaaaaaaaaaaaaaaaaaaaaaaaaaaaaaaaaaaaaaaaaaaaaaaaaaaaaaaaaaaaaaaaaaaaaaaaaaaaaaaaaaaaaaaaaaaaaaaaaaa

SEQ ID NO: 21360 - RNA, 2028 nt, Artificial Sequence
  mRNA product Design a-2 (A100) comprising derived and/or modified sequence from LASV(G1442-SLE-2011;Clade IV)__AIT17181__SP-IgE_NP(2-569) (opt1)
aggagaguccgcucagccagguugcagaagcggcuuagcguguguccuaaucuucucucugcguguagguaggccugugccgcaaacaagcuuaccauggacuggaccuggauccuguuccucguggccgccgcgacccgcguccacagcagcgccuccaaggaggugaaguccuuccuguggacccagagccuccgccgggagcugagcggcuacugcuccaacaucaagcugcaggucgugaaggacgcccaggcgcuccugcacgggcuggacuucagcgagguguccaacguccagcgccucaugcggaagcagcgccgggacgacaacgaccugaagcgccugcgggaccucaaccaggccgugaacaaccugguggagcucaagagcacccagcagaaguccguccugcgcgugggcacccugaccagcgacgaccugcucgugcuggccgccgaccuggagaagcucaaguccaaggucauccggaccgagcgcccccugagcgccgggguguacaugggcaaccuguccagccagcagcucgaccagcggcgcgcgcugcugaacaugaucgggauguccggcggcauccaggggacccggacgggccgcgacggggugguccgggugugggacgugaagaacgccgaccuccugaacaaccaguucggcaccaugccgagccugacccucgccugccugaccaagcaggggcaggucgaccugaacgacguggugcaggcccucacggaccugggccugaucuacaccgcgaaguaccccaacgccuccgaccucgaccgccugacccagagccaccccauccugaacaugaucgacaccaagaaguccagccucaacaucagcggcuacaacuucucccugggggccgccgucaaggccggcgcgugcaugcuggacgggggcaacaugcucgagacgaucaaggugagcccccagaccauggacggcauccugaaguccauccugaaggugaagaagacccucgggauguucaucagcgacaccccgggcgagcggaaccccuacgagaacauccuguacaagaucugccuguccggggacggcuggcccuacaucgccagccgcacguccaucaccgggcgggccugggagaacaccgucguggaccucgagagcgacggcaagccccagaaggccggcuccaacaacagcaacaagucccugcagagcgccggguucgcggccggccugaccuacucccagcucaugacgcugaaggacgccaugcugcagcuggacccgaacgccaagaccuggauggacaucgaggggcgccccgaggaccccguggagaucgcccucuaccagcccagcuccggcugcuacauccacuucuuccgggagccgaccgaccugaagcaguucaagcaggacgcgaaguacagccacgggaucgacgucaccgaccuguucgccgcccagcccggccucacguccgccgugaucgaggcccugccccgcaacauggucaucacgugccagggcagcgacgacaucaagaagcugcucgagucccaggggcgcaaggacaucaagcugaucgacaucgcgcugagcaagaccgacagccggaaguacgagaacgccgugugggaccaguacaaggaccucugccacaugcacaccggcguggucguggagaagaagaagcgcgggggcaaggaggagaucaccccgcacugcgcccugauggacugcaucauguucgacgccgcgguguccgggggccugaacacccucguccugcgggccgugcugccccgcgacaugguguuccggaccagcacgccccgcgucgugcucugaggacuagucccuguucccagagcccacuuuuuuuucuuuuuuugaaauaaaauagccugucuuucagaucuaaaaaaaaaaaaaaaaaaaaaaaaaaaaaaaaaaaaaaaaaaaaaaaaaaaaaaaaaaaaaaaaaaaaaaaaaaaaaaaaaaaaaaaaaaaaaaaaaaaa

SEQ ID NO: 21361 - RNA, 2028 nt, Artificial Sequence
  mRNA product Design a-2 (A100) comprising derived and/or modified sequence from LASV(G3010-SLE-2013;Clade IV)__AIT17345__SP-IgE_NP(2-569) (opt1)
aggagaguccgcucagccagguugcagaagcggcuuagcguguguccuaaucuucucucugcguguagguaggccugugccgcaaacaagcuuaccauggacuggaccuggauccuguuccucguggccgccgcgacccgcguccacagcagcgccuccaaggagaucaagagcuuccuguggacccagucccuccgccgggagcugagcggcuacugcuccaacaucaagcuccagguggucaaggacgcccaggcgcugcugcacgggcuggacuucagcgagguguccaacgugcagcgccucaugcggaaggagcgccgggacgacaacgaccugaagcgccugcgggaccucaaccaggccgucaacaaccugguggagcucaagagcacccagcagaaguccauccugcgcgugggcacccugaccagcgacgaccugcucauccuggccgccgaccuggagaagcucaaguccaaggucacccggaccgagcgcccccugagcgccgggguguacaugggcaaccuguccagccagcagcucgaccagcggcgcgcgcugcuguccaugaucgggaugagcuccggcgugcagggcgcccgggccgggcgcgacggcgucgugcgggugugggacgucaagaacgccgagcuccugaacaaccaguucgggacgaugccgagccugacccucgcgugccugaccaagcagggccagguggaccugaacgacgugguccaggcccucaccgaccuggggcugaucuacacggccaaguaccccaacaccuccgaccucgaccgccugacccagagccaccccauccugaacaugaucgacaccaagaaguccagccucaacaucagcggcuacaacuucucccugggcgccgccgugaaggcgggggccugcaugcuggacggcgggaacaugcucgagacgaucaaggugagcccccagaccauggacggcauccugaaguccauccugaaggucaagaaggcccucggcauguucaucagcgagaccccgggggagcggaaccccuacgagaacauccuguacaagaucugccuguccggcgacggguggcccuacaucgccagccgcaccuccaucacgggccgggccugggagaacaccgugguggaccucgagagcgacgggaagccccagaaggcgggcuccaacaacagcaacaagucccugcagagcgccggcuucaccgccgggcugaccuacucccagcucaugacgcugaaggacgccaugcugcagcuggacccgaacgccaagaccuggauggacaucgagggccgccccgaggaccccgucgagguggcgcucuaccagcccagcuccgggugcuacauccacuucuuccgggagccgaccgaccugaagcaguucaagcaggacgccaaguacagccacggcaucgacgugaccgaccuguucgccgcccagcccgggcucacguccgccgucaucgacgcgcugccccgcaacauggugaucacgugccagggcagcgacgacaucaagaagcugcucgagagccagggccgcaaggacaucaagcugaucgacaucgcccuguccaagaccgacagccggaaguacgagaacgccgucugggaccaguacaaggaccucugccacaugcacaccggggugguggucgagaagaagaagcgcggcgggaaggaggagaucaccccgcacugcgcccugauggacugcaucauguucgacgcggccguguccggcgggcugaacaccagcgugcuccgggccguccugccccgcgacaugguguuccggaccuccacgccccgcgugguccugugaggacuagucccuguucccagagcccacuuuuuuuucuuuuuuugaaauaaaauagccugucuuucagaucuaaaaaaaaaaaaaaaaaaaaaaaaaaaaaaaaaaaaaaaaaaaaaaaaaaaaaaaaaaaaaaaaaaaaaaaaaaaaaaaaaaaaaaaaaaaaaaaaaaaa

SEQ ID NO: 21362 - RNA, 2028 nt, Artificial Sequence
  mRNA product Design a-2 (A100) comprising derived and/or modified sequence from LASV(G502-SLE-2009;Clade IV)__AIT17127__SP-IgE_NP(2-569) (opt1)
aggagaguccgcucagccagguugcagaagcggcuuagcguguguccuaaucuucucucugcguguagguaggccugugccgcaaacaagcuuaccauggacuggaccuggauccuguuccucguggccgccgcgacccgcguccacagcagcgccuccaaggagaucaagagcuuccuguggacccagucccuccgccgggagcugagcggcuacugcuccaacaucaagcuccagguggucaaggacgcccaggcgcugcugcacgggcuggacuucagcgagguguccaacgugcagcgccucaugcggaaggagcgccgggacgacaacgaccugaagcgccugcgggaccucaaccaggccgucaacaaccugguggagcucaagagcacccagcagaaguccauccugcgcgugggcacccugaccagcgacgaccugcucauccuggccgccgaccuggagaagcucaaguccaaggucauccggaccgagcgcccccugagcgccgggguguacaugggcaaccuguccagccagcagcucgaccagcggcgcgcgcugcuguccaugaucgggaugagcggcggcaaccagggggugcgggccggcaaggacggggucgugcgcgugugggacgucaagaacgccgagcuccugaacaaccaguucggcaccaugccgucccugacgcucgccugccugaccaagcagggccagguggaccugaacgacgcggugcaggcccucaccgaccuggggcugaucuacaccgccaaguaccccaacacgagcgaccucgaccggcugacccagucccaccccauccugaacaugaucgacaccaagaaguccagccucaacaucuccggcuacaacuucagccugggggccgccgucaaggcgggcgccugcaugcuggacgggggcaacaugcucgagaccaucaaggugagcccccagacgauggacggcauccucaagagcauccugaaggugaagaaggcccuggggauguucaucuccgacaccccgggcgagcgcaaccccuacgagaacauccuguacaagaucugccugagcggggacggcuggcccuacaucgccucccggaccagcaucaccgggcgcgccugggagaacacggucguggaccucgaguccgacggcaagccccagaaggcgggcagcaacaacuccaacaagagccugcaguccgccggguucaccgccggccugaccuacagccagcucaugacccugaaggacgccaugcugcagcuggacccgaacacgaagaccuggauggacaucgaggggcggcccgaggaccccguggagaucgcccucuaccagcccuccagcggcugcuacauccacuucuuccgcgagccgaccgaccugaagcaguucaagcaggacgcgaaguacucccacgggaucgacgucaccgaccuguucgccgcccagcccggccucacgagcgccgugaucgacgcccugccccggaacauggugaucacgugccagggcuccgacgacauccgcaagcugcucgagagccaggggcgcaaggacaucaagcugaucgacaucgcgcugaacaagaccgacagccggaaguacgagaacgccgucugggaccaguacaaggaccucugccacaugcacaccggcguggucguggagaagaagaagcgcgggggcaaggaggagaucaccccgcacugcgcccugauggacugcaucauguucgacgccgcgguguccgggggccugaacaccagcguccuccgggccgugcugccccgcgacaugguguuccggaccuccacgccccgcgucgugcugugaggacuagucccuguucccagagcccacuuuuuuuucuuuuuuugaaauaaaauagccugucuuucagaucuaaaaaaaaaaaaaaaaaaaaaaaaaaaaaaaaaaaaaaaaaaaaaaaaaaaaaaaaaaaaaaaaaaaaaaaaaaaaaaaaaaaaaaaaaaaaaaaaaaaa

SEQ ID NO: 21363 - RNA, 2028 nt, Artificial Sequence
  mRNA product Design a-2 (A100) comprising derived and/or modified sequence from LASV(G733-SLE-2010;Clade IV)__AIT17155__SP-IgE_NP(2-569) (opt1)
aggagaguccgcucagccagguugcagaagcggcuuagcguguguccuaaucuucucucugcguguagguaggccugugccgcaaacaagcuuaccauggacuggaccuggauccuguuccucguggccgccgcgacccgcguccacagcagcgccuccaaggagaucaagagcuuccuguggacccagucccuccgccgggagcugagcggcuacugcuccaacaucaagcuccagguggucaaggacgcccaggcgcugcugcacgggcuggacuucagcgagguguccaacgugcagcgccucaugcggaaggagcgccgggacgacaacgaccugaagcgccugcgggaccucaaccaggccgucaacaaccugguggagcucaagagcacccagcagaaguccgugcugcgcgucggcacccugaccagcgacgagcugcucgugcuggccgccgaccuggagaagcucaaguccaaggugauccggaccgagcgcccccugagcgccggggucuacaugggcaaccuguccagccagcagcucgaccagcggcgcgcgcugcuguccaugaucgggaugagcggcggcaaccagggggcccggaccggccgcgacgggguggugcgggucugggacgugaagaacgccgagcuccugaacaaccaguucggcaccaugccgucccugacccucgccugccugaccaagcagggccagguggaccugaacgacgcgguccaggcccucaccgaccuggggcugaucuacacggccaaguaccccaacaccagcgaccucgaccgccugacccagucccaccccauccugaacaugaucgacaccaagaaguccagccucaacaucuccggcuacaacuucagccugggggccgccgugaaggcgggcgccugcaugcuggacgggggcaacaugcucgagacgaucaaggugagcccccagaccauggacggcauccucaagagcauccugaaggucaagaaggcccuggggauguucaucuccgacaccccgggcgagcggaaccccuacgagaacauccuguacaagaucugccugagcggggacggcuggcccuacaucgccucccgcaccagcaucacggggcgggccugggagaacaccgugguggaccucgaguccgacggcaagccccagaaggcgggcagcaacaacuccaacaagagccugcaguccgccggguucaccgccggccugaccuacagccagcucaugacgcugaaggacgccaugcugcagcuggacccgaacgccaagaccuggauggacaucgaggggcgccccgaggaccccgucgagaucgcgcucuaccagcccuccagcggcugcuacauccacuucuuccgggagccgaccgaccugaagcaguucaagcaggacgccaaguacucccacgggaucgacgugaccgaccuguucgccgcccagcccggccucacgagcgccgugaucgacgcgcugccccgcaacauggucaucacgugccagggcuccgacgacauccgcaagcugcucgagagccaggggcggaaggacaucaagcugaucgacaucgcccugagcaagaucgacucccgcaaguacgagaacgccgugugggaccaguacaaggaccucugccacaugcacaccggcgucgugguggagaagaagaagcgcgggggcaaggaggagaucacgccccacugcgcccugauggacugcaucauguucgacgcggccgucagcgggggccugaacucccucgugcugcgggccgugcugccgcgggacauggucuuccgcaccagcacgccccggguggugcucugaggacuagucccuguucccagagcccacuuuuuuuucuuuuuuugaaauaaaauagccugucuuucagaucuaaaaaaaaaaaaaaaaaaaaaaaaaaaaaaaaaaaaaaaaaaaaaaaaaaaaaaaaaaaaaaaaaaaaaaaaaaaaaaaaaaaaaaaaaaaaaaaaaaaa

SEQ ID NO: 21364 - RNA, 2028 nt, Artificial Sequence
  mRNA product Design a-2 (A100) comprising derived and/or modified sequence from MOPV/LASV reassortant(IGS-1;Clade IV)__AFY05578__SP-IgE_NP(2-569) (opt1)
aggagaguccgcucagccagguugcagaagcggcuuagcguguguccuaaucuucucucugcguguagguaggccugugccgcaaacaagcuuaccauggacuggaccuggauccuguuccucguggccgccgcgacccgcguccacagcagcgccuccaaggagaucaagagcuuccuguggacccagucccuccgccgggagcugagcggcuacugcuccaacaucaagcuccagguggucaaggacgcccaggcgcugcugcacgggcuggacuucagcgagguguccaacgugcagcgccucaugcggaaggagcgccgggacgacaacgaccugaagcgccugcgggaccucaaccaggccgucaacaaccugguggagcucaagagcacccagcagaaguccauccugcgcgugggcacccugaccagcgacgaccugcucauccuggccgccgaccuggagaagcuccgguccaaggucauccgcaccgagcggccccugagcgccgggguguacaugggcaaccuguccagccagcagcucgaccagcgccgggcgcugcugaacaugaucgggauguccggcggcaaccagggggcccgcgccggccgggacggggugguccgcgugugggacgugaagaacgccgagcuccugagcaaccaguucggcaccaugccgucccugacgcucgcgugccugaccaagcaggggcaggucgaccugaacgacgccgugcaggcccucaccgaccugggccugaucuacaccgccaaguaccccaacacgagcgaccucgaccggcugacccagucccaccccauccugaacaugaucgacaccaagaaguccagccucaacaucuccggcuacaacuucagccugggggccgcggugaaggccggcgccugcaugcuggacgggggcaacaugcucgagaccaucaaggucagcccccagacgauggacggcauccucaagagcauccugaaggugaagaaggcccuggggauguucaucuccgacaccccgggcgagcgcaaccccuacgagaacauccuguacaagaucugccugagcggggacggcuggcccuacaucgccucccggaccagcaucaccgggcgcgcgugggagaacacgguggucgaccucgaguccgacggcaagccccagaaggccgacagcaacaacuccagcaagucccugcagagcgccggcuucaccgccgggcugaccuacucccagcucaugacccugaaggacgccaugcugcagcuggacccgaacgcgaagacguggauggacaucgagggccggcccgaggaccccguggagaucgcccucuaccagcccagcuccgggugcuacauccacuucuuccgcgagccgaccgaccugaagcaguucaagcaggacgccaaguacagccacggcaucgacgugaccgaccuguucgccacccagcccgggcucacguccgccgucaucgacgcgcugccccgcaacauggugaucacgugccagggcagcgacgacauccggaagcugcucgagagccagggccgcaaggacaucaagcugaucgacaucgaccuguccaagaccgacagccggaaguacgagaacgccgugugggaccaguacaaggaccucugccacaugcacaccggggucguggucgagaagaagaagcgcggcgggaaggaggagaucaccccgcacugcgcccugauggacugcaucauguucgacgccgcgguguccggcgggcugaacaccagcgugcuccgggccguccugccccgcgacaugguguuccggaccuccacgccccgcgugguccugugaggacuagucccuguucccagagcccacuuuuuuuucuuuuuuugaaauaaaauagccugucuuucagaucuaaaaaaaaaaaaaaaaaaaaaaaaaaaaaaaaaaaaaaaaaaaaaaaaaaaaaaaaaaaaaaaaaaaaaaaaaaaaaaaaaaaaaaaaaaaaaaaaaaaa

SEQ ID NO: 21365 - RNA, 2028 nt, Artificial Sequence
  mRNA product Design a-2 (A100) comprising derived and/or modified sequence from LASV(LM765-SLE-2012;Clade IV)__AIT17815__SP-IgE_NP(2-569) (opt1)
aggagaguccgcucagccagguugcagaagcggcuuagcguguguccuaaucuucucucugcguguagguaggccugugccgcaaacaagcuuaccauggacuggaccuggauccuguuccucguggccgccgcgacccgcguccacagcagcgccuccaaggagaucaagagcuuccuguggacccagucccuccgccgggagcugagcggcuacugcuccaacaucaagcuccagguggucaaggacgcccaggcgcugcugcacgggcuggacuucagcgagguguccaacgugcagcgccucaugcggaaggagcgccgggacgacaacgaccugaagcgccugcgggaccucaaccaggccgucaacaaccugguggagcucaagagcacccagcagaaguccauccugcgcgugggcacccugaccagcgacgaccugcucauccuggccgccgaccuggagaagcucaaguccaaggucacccggaccgagcgcccccugagcgccgggguguacaugggcaaccuguccagccagcagcucgaccagcggcgcgcgcugcuggacaugaucgggauguccggcagcaaccagggcgcccgggccgggcgcgacggcgugguccgggugugggacgugaagaacgccgagcuccugaacaaccaguucgggacgaugccgucccugacccucgcgugccugaccaagcagggccaggucgaccugaacgacgccgugcaggcccucaccgaccuggggcugaucuacacggccaaguaccccaacaccagcgaccucgaccgccugacccagucccaccccauccugaacaugaucgacaccaagaaguccagccucaacaucuccggcuacaacuucagccugggcgccgcggugaaggccggggccugcaugcuggacggcgggaacaugcucgagacgaucaaggucagcccccagaccauggacggcauccucaagagcauccugaaggugaagaaggcccugggcauguucaucuccgacgccccgggggagcggaaccccuacgagaacauccuguacaagaucugccugagcggcgacggguggcccuacaucgcgucccgcaccagcaucaccggccgggccugggagaacacgguggucgaccucgaguccgacgggaagccccagaaggccggcagcaacggcuccaacaagagccugcaguccgccggguucaccgccggccugaccuacagccagcucaugacccugaaggacgcgaugcugcagcuggacccgaacgccaagacguggauggacaucgaggggcgccccgaggaccccguggagaucgcccucuaccagcccuccagcggcugcuacauccacuucuuccgggagccgaccgaccugaagcaguucaagcaggacgccaaguacucccacgggaucgacgugaccgaccuguucgccgcgcagcccggccucaccagcgccgucaucgacgcccugccccgcaacauggugaucacgugccagggcuccgacgacauccgcaagcuguucgagagccaggggcggaaggacaucaagcucaucgacaucgcccugagcaagaccgacucccgcaaguacgagaacgcggugugggaccaguacaaggaccugugccacaugcacaccggcaucgucguggagaagaagaagcgcgggggcaaggaggagaucacgccccacugcgcccucauggacugcaucauguucgacgccgccgucagcgggggccugaacaccuccgugcugcgggccgugcucccgcgggacauggucuuccgcaccagcacgccccggguggugcugugaggacuagucccuguucccagagcccacuuuuuuuucuuuuuuugaaauaaaauagccugucuuucagaucuaaaaaaaaaaaaaaaaaaaaaaaaaaaaaaaaaaaaaaaaaaaaaaaaaaaaaaaaaaaaaaaaaaaaaaaaaaaaaaaaaaaaaaaaaaaaaaaaaaaa

SEQ ID NO: 21366 - RNA, 2028 nt, Artificial Sequence
  mRNA product Design a-2 (A100) comprising derived and/or modified sequence from LASV(LM776-SLE-2012;Clade IV)__AIT17825__SP-IgE_NP(2-569) (opt1)
aggagaguccgcucagccagguugcagaagcggcuuagcguguguccuaaucuucucucugcguguagguaggccugugccgcaaacaagcuuaccauggacuggaccuggauccuguuccucguggccgccgcgacccgcguccacagcagcgccuccaaggagaucaagagcuuccuguggacccagucccuccgccgggagcugagcuccuacugcagcaacaucaagcuccagguggucaaggacgcccaggcgcugcugcacggccuggacuucuccgaggugagcaacgugcagcgccucaugcggaaggagcgccgggacgacaacgaccugaagcgccugcgggaccucaaccaggccgucaacaaccugguggagcugaaguccacccagcagaaguccauccuccgcguggggacccugaccuccgacgaccugcucauccuggccgccgaccuggagaagcucaagagcaaggucacccggaccgagcgcccccuguccgccggcguguacauggggaaccugagcucccagcagcucgaccagcggcgcgcgcugcugagcaugaucggcauguccgggagcaaccagggcgcccgggccggccgcgacggggugguccgggugugggacgugaagaacgccgagcuccugaacaaccaguucggcacgaugccgucccugacccucgcgugccugaccaagcaggggcaggucgaccugaacgacgccgugcaggcccucaccgaccugggccugaucuacacggccaaguaccccaacaccagcgaccucgaccgccugacccagagccaccccauccugaacaugaucgacaccaagaaguccagccucaacaucuccggguacaacuucagccugggcgccgcggugaaggccggcgccugcaugcuggacgggggcaacaugcucgagacgaucaaggucagcccccagaccauggacgggauccucaagagcauccugaaggugaagaaggcccugggcauguucaucuccgacaccccgggcgagcggaaccccuacgagaacauccuguacaagaucugccugagcggggacggcuggcccuacaucgccucccgcaccagcaucacggggcgggcgugggagaacaccguggucgaccucgaguccgacggcaagccccagaaggccgggagcaacaacuccaacaagagccugcaguccgccggcuucaccgccggccugaccuacagccagcucaugacgcugaaggacgccaugcugcagcuggacccgaacgcgaagaccuggauggacaucgaggggcgccccgaggaccccguggagguggcccucuaccagcccuccagcggcugcuacauccacuucuuccgggagccgaccgaccugaagcaguucaagcaggacgccaaguacucccacgggaucgacgucaccgaccuguucgccgcccagcccggccucacgagcgcggugaucgacgcccugccccgcaacauggugaucacgugccaggggagcgacgacauccgcaagcugcucgagucccagggccggaaggacaucaagcugaucgacaucgcccugagcaagaccgacucccgcaaguacgagaacgccgucugggaccaguacaaggaccucugccacaugcacaccggcguggucguggagaagaagaagcgcgggggcaaggaggagaucaccccgcacugcgcgcugauggacugcaucauguucgacgccgccgugagcgggggccugaacaccuccguccuccgggccgugcugccccgggacaugguguuccgcaccagcacgccccgggucgugcugugaggacuagucccuguucccagagcccacuuuuuuuucuuuuuuugaaauaaaauagccugucuuucagaucuaaaaaaaaaaaaaaaaaaaaaaaaaaaaaaaaaaaaaaaaaaaaaaaaaaaaaaaaaaaaaaaaaaaaaaaaaaaaaaaaaaaaaaaaaaaaaaaaaaaa

SEQ ID NO: 21367 - RNA, 2028 nt, Artificial Sequence
  mRNA product Design a-2 (A100) comprising derived and/or modified sequence from LASV(Mad39;Clade IV)__ANH09723__SP-IgE_NP(2-569) (opt1)
aggagaguccgcucagccagguugcagaagcggcuuagcguguguccuaaucuucucucugcguguagguaggccugugccgcaaacaagcuuaccauggacuggaccuggauccuguuccucguggccgccgcgacccgcguccacagcagcgccuccaaggagaucaagagcuuccuguggacccagucccuccgccgggagcugagcggcuacugcuccaacaucaagcuccagguggucaaggacgcccaggcgcugcugcacgggcuggacuucagcgagguguccaacgugcagcgccucaugcggaagcagcgccgggacgacaacgaccugaagcgccugcgggaccucaaccaggccgucaacaaccugguggagcugaaguccacccagcagaaguccgugcuccgcgucggcacgcugaccagcgacgaccugcucacccuggccgccgaccuggagaagcucaaguccaaggugacccggacggagcgcccccugaccgccgggguguacaugggcaaccugagcucccagcagcucgaccagcggcgcgcgcugcugaacaugaucgggaugagcggcggcaaccagggggcccggaccggccgcgacggggucgugcgggugugggacgucaagaacgccgagcuccugaacaaccaguucggcaccaugccgucccugacgcucgccugccugaccaagcagggccagguggaccugaacgacgugguccaggcgcucaccgaccuggggcugaucuacaccgccaaguaccccaacacgagcgaccucgaccgccugacccagucccaccccauccugaacaugaucgacaccaacaagagcucccucaacaucagcggcuacaacuucagccugggggccgccgugaaggccggcgcgugcaugcuggacgggggcaacaugcucgagaccaucaaggugagcccccagacgauggacggcauccucaagagcauccugaaggucaagaagucccuggggauguucaucagcgacaccccgggcgagcggaaccccuacgagaacauccuguacaagaucugccuguccggggacggcuggcccuacaucgccagccgcaccuccaucaccgggcgggccugggagaacacggugguggaccucgagagcggcggcaagccccagaaggccggguccaacaacagcaacaagucccugcagagcgccggcuucgcggccgggcugaccuacucccagcucaugacccugaaggacgccaugcugcagcuggacccgaacgccaagaccuggauggacaucgagggccgccccgaggaccccgucgagaucgcccucuaccagcccaucagcgggugcuacauccacuucuuccgggagccgacggaccugaagcaguucaagcaggacgcgaaguacucccacggcaucgacgugaccgaccuguucgccgcccagcccggccucaccagcgccgugaucgaggcccugccccgcaacauggucaucacgugccagggguccgacgacauccgcaagcuguucgagagccagggccggaaggacaucaagcucaucgacaucgcgcuguccaagaccgacagccgcaaguacgagaacgccgugugggaccaguacaaggaccugugccacaugcacaccggggucgugguggagaagaagaagaagggcgggaaggaggagaucacgccccacugcgcccucauggacugcaucauguucgacgccgcggucagcggcggccugaacacccuggugcuccgggccgugcugccgcgcgacauggucuuccggaccuccacccccaagguggugcugugaggacuagucccuguucccagagcccacuuuuuuuucuuuuuuugaaauaaaauagccugucuuucagaucuaaaaaaaaaaaaaaaaaaaaaaaaaaaaaaaaaaaaaaaaaaaaaaaaaaaaaaaaaaaaaaaaaaaaaaaaaaaaaaaaaaaaaaaaaaaaaaaaaaaa

SEQ ID NO: 21368 - RNA, 2028 nt, Artificial Sequence
  mRNA product Design a-2 (A100) comprising derived and/or modified sequence from LASV(Z0947-SLE-2011;Clade IV)__AIT17841__SP-IgE_NP(2-569) (opt1)
aggagaguccgcucagccagguugcagaagcggcuuagcguguguccuaaucuucucucugcguguagguaggccugugccgcaaacaagcuuaccauggacuggaccuggauccuguuccucguggccgccgcgacccgcguccacagcagcgccuccaaggagaucaagagcuuccuguggacccagucccuccgccgggagcugagcggcuacugcuccaacaucaagcuccagguggucaaggacgcccaggcgcugcugcacgggcuggacuucagcgagguguccaacgugcagcgccucaugcggaaggagcgccgggacgacaacgaccugaagcgccugcgggaccucaaccaggccgucaacaaccugguggagcucaagagcacccagcagaaguccauccugcgcgugggcacccugaccagcgacgaccugcucauccuggccgccgaccuggagaagcucaaguccaaggucacccggaccgagcgcccccugagcgccgggguguacaugggcaaccuguccagccagcagcucgaccagcggcgcgcgcugcugaacaugaucgggauguccggcagcaaccagggcgcccggacggggcgcgacggcgugguccgggugugggacgugaagaacgccgagcuccugaacaaccaguucgggaccaugccgucccugacccucgccugccugaccaagcagggccaggucgaccugaacgacgcggugcaggcccucacggaccuggggcugaucuacaccgccaaguaccccaacaccagcgaccucgaccgccugacccagucccaccccauccugaacaugaucgacacgaagaaguccagccucaacaucuccggcuacaacuucagccugggcgccgccgugaaggcgggggccugcaugcuggacggcgggaacaugcucgagaccaucaaggucagcccccagaccauggacggcauccucaagagcauccugaaggugaagaaggcccugggcauguucaucuccgacgccccgggggagcggaaccccuacgagaacauccuguacaagaucugccugagcggcgacggguggcccuacaucgccucccgcaccagcaucacgggccgggcgugggagaacaccguggucgaccucgaguccgacgggaagccccagaaggccggcagcaacggcuccaacaagagccugcaguccgccggguucaccgccggccugaccuacagccagcucaugacgcugaaggacgccaugcugcagcuggacccgaacgcgaagaccuggauggacaucgaggggcgccccgaggaccccguggagaucgcccucuaccagcccuccagcggcugcuacauccacuucuuccgggagccgaccgaccugaagcaguucaagcaggacgccaaguacucccacgggaucgacgugaccgaccuguucgccgcccagcccggccucacgagcgcggucaucgacgcccugccccgcaacauggugaucacgugccagggcuccgacgacauccgcaagcuguucgagagccaggggcggaaggacaucaagcucaucgacaucgcccugagcaagaccgacucccgcaaguacgagaacgccgugugggaccaguacaaggaccugugccacaugcacaccggcaucgucguggagaagaagaagcgcgggggcaaggaggagaucaccccgcacugcgcgcucauggacugcaucauguucgacgccgccgucagcgggggccugaacaccuccgugcugcgggccgugcucccccgggacauggucuuccgcaccagcacgccccggguggugcugugaggacuagucccuguucccagagcccacuuuuuuuucuuuuuuugaaauaaaauagccugucuuucagaucuaaaaaaaaaaaaaaaaaaaaaaaaaaaaaaaaaaaaaaaaaaaaaaaaaaaaaaaaaaaaaaaaaaaaaaaaaaaaaaaaaaaaaaaaaaaaaaaaaaaa

SEQ ID NO: 21369 - RNA, 2028 nt, Artificial Sequence
  mRNA product Design a-2 (A100) comprising derived and/or modified sequence from LASV(Josiah;Clade IV)__NP_694869__SP-IgE_NP(2-569) (opt4)
aggagaguccgcucagccagguugcagaagcggcuuagcguguguccuaaucuucucucugcguguagguaggccugugccgcaaacaagcuuaccauggacuggaccuggauccuguuccugguggccgccgccaccagagugcacagcagcgccagcaaggagaucaagagcuuccuguggacccagagccugagaagagagcugagcggcuacugcagcaacaucaagcugcagguggugaaggacgcccaggcccugcugcacggccuggacuucagcgaggugagcaacgugcagagacugaugagaaaggagagaagagacgacaacgaccugaagagacugagagaccugaaccaggccgugaacaaccugguggagcugaagagcacccagcagaagagcauccugagagugggcacccugaccagcgacgaccugcugauccuggccgccgaccuggagaagcugaagagcaaggugaucagaaccgagagaccccugagcgccggcguguacaugggcaaccugagcagccagcagcuggaccagagaagagcccugcugaacaugaucggcaugagcggcggcaaccagggcgccagagccggcagagacggcguggugagagugugggacgugaagaacgccgagcugcugaacaaccaguucggcaccaugcccagccugacccuggccugccugaccaagcagggccagguggaccugaacgacgccgugcaggcccugaccgaccugggccugaucuacaccgccaaguaccccaacaccagcgaccuggacagacugacccagagccaccccauccugaacaugaucgacaccaagaagagcagccugaacaucagcggcuacaacuucagccugggcgccgccgugaaggccggcgccugcaugcuggacggcggcaacaugcuggagaccaucaaggugagcccccagaccauggacggcauccugaagagcauccugaaggugaagaaggcccugggcauguucaucagcgacacccccggcgagagaaaccccuacgagaacauccuguacaagaucugccugagcggcgacggcuggcccuacaucgccagcagaaccagcaucaccggcagagccugggagaacaccgugguggaccuggagagcgacggcaagccccagaaggccgacagcaacaacagcagcaagagccugcagagcgccggcuucaccgccggccugaccuacagccagcugaugacccugaaggacgccaugcugcagcuggaccccaacgccaagaccuggauggacaucgagggcagacccgaggaccccguggagaucgcccuguaccagcccagcagcggcugcuacauccacuucuucagagagcccaccgaccugaagcaguucaagcaggacgccaaguacagccacggcaucgacgugaccgaccuguucgccacccagcccggccugaccagcgccgugaucgacgcccugcccagaaacauggugaucaccugccagggcagcgacgacaucagaaagcugcuggagagccagggcagaaaggacaucaagcugaucgacaucgcccugagcaagaccgacagcagaaaguacgagaacgccgugugggaccaguacaaggaccugugccacaugcacaccggcguggugguggagaagaagaagagaggcggcaaggaggagaucaccccccacugcgcccugauggacugcaucauguucgacgccgccgugagcggcggccugaacaccagcgugcugagagccgugcugcccagagacaugguguucagaaccagcacccccagaguggugcugugaggacuagucccuguucccagagcccacuuuuuuuucuuuuuuugaaauaaaauagccugucuuucagaucuaaaaaaaaaaaaaaaaaaaaaaaaaaaaaaaaaaaaaaaaaaaaaaaaaaaaaaaaaaaaaaaaaaaaaaaaaaaaaaaaaaaaaaaaaaaaaaaaaaaa

SEQ ID NO: 21370 - RNA, 2028 nt, Artificial Sequence
  mRNA product Design a-2 (A100) comprising derived and/or modified sequence from LASV(LP;Clade I)__AAF86702__SP-IgE_NP(2-569) (opt4)
aggagaguccgcucagccagguugcagaagcggcuuagcguguguccuaaucuucucucugcguguagguaggccugugccgcaaacaagcuuaccauggacuggaccuggauccuguuccugguggccgccgccaccagagugcacagcagcaacagcaaggagaucaagagcuuccuguggacccagagccugagaagagagcugagcggcuacugcagcaacaucaagcugcagguggugaaggacgcccaggcccugcugcacggccuggacuucagcgaggugagcaacgugcagagacugaugagaaagcagaagagagacgacgccgaccugaagagacugagagaccugaaccaggccgugaacaaccugguggagcugaagagcacccagcagaagaacgugcugagagugggcacccugagcagcgacgaccugaucacccuggccgccgaccuggagaagcugaagagcaaggugaucagaaccgagagaccccugagcagcggcguguacaugggcaaccugagcagccagcagcuggaccagagaagagcccugcugagcaugaucggcaugagcggcggcccccagggcaacagaaccggcggcgacggcguggugagagugugggacgugaagaacgccgagcugcugaacaaccaguucggcaccaugcccagccugacccuggccugccugaccaagcagggccagguggaccugaacgacgccgugcaggcccugaccgaccugggccugaucuacaccgccaaguaccccaacagcagcgaccuggacaugcugacccagagccaccccauccugggcaugguggacaccaagaagagcagccugaacaucagcggcuacaacuucagccugggcgccgccgugaaggccggcgccugcaugcuggacggcggcaacaugcuggagaccaucaaggugagcccccagaccauggacggcauccugaagagcauccugaaggugaagagaagccugggcauguucaucagcgacacccccggcgagagaaaccccuacgagaacauccuguacaagaucugccugagcggcgagggcuggcccuacaucgccagcagaaccagcaucaccggcagagccugggagaacacccugguggaccuggagagcgacaacaagccccccaagcugaacagcgccggcagcaacaagagccugcaggccgccggccugaacgccggccugaccuacagccagcugaugacccugaaggacugcaugcugcagcuggaccccagcagcaagaccuggaucgacaucgagggcagacccgaggaccccguggagaucgcccuguuccagcccagcagcggcugcuacauccacuucuucagagagcccaccgaccugaagcaguucaagcaggacgccaaguacagccacggcaucgacgugaccgaccuguucagcacccagcccggccugaccagcgccgugaucgaggcccugcccagaaacauggugcugaccugccagggcagcgacgacaucaagaagcugcuggagagccagggcagaagagacaucaagcugaucgacaucagccugagcaaggccgacagcagaaaguucgagaacgccgugugggaccaguacaaggaccugugccacaugcacaccggcguggugguggagaagaagaagagaggcggcaaggaggagaucaccccccacugcgcccugcuggacugcaucauguucgacgccgccaccaccggcagccugaacaucaccacccugagagccgugcugcccagagacaugguguucagaaccagcacccccaagguggugcugugaggacuagucccuguucccagagcccacuuuuuuuucuuuuuuugaaauaaaauagccugucuuucagaucuaaaaaaaaaaaaaaaaaaaaaaaaaaaaaaaaaaaaaaaaaaaaaaaaaaaaaaaaaaaaaaaaaaaaaaaaaaaaaaaaaaaaaaaaaaaaaaaaaaaa

SEQ ID NO: 21371 - RNA, 2028 nt, Artificial Sequence
  mRNA product Design a-2 (A100) comprising derived and/or modified sequence from LASV(803213;Clade II)__AAF86704__SP-IgE_NP(2-569) (opt4)
aggagaguccgcucagccagguugcagaagcggcuuagcguguguccuaaucuucucucugcguguagguaggccugugccgcaaacaagcuuaccauggacuggaccuggauccuguuccugguggccgccgccaccagagugcacagcagcgccagcaaggaggugaagagcuuccuguggacccagagccugagaagagagcugagcggcuacugcagcaacaucaagcugcagguggugaaggacgcccaggcccugcugcacggccuggacuucagcgaggugaacaacgugcagagacugaugagaaagcagaagagagacgacggcgaccugaagagacugagagaccugaaccaggccgugaacaaccugguggagcugaagagcacccagcagaagagcauccugagagugggcacccugaccagcgacgaccugcugacccuggccgccgaccuggagaagcugaagagcaaggugaucagaaccgagagaccccugagcagcggcguguacaugggcaaccugagcacccagcagcuggagcagagaagagcccugcugaacaugaucggcauggugggcggcgcccagggcacccagcccggcagagacggcguggugagagugugggacgugaagaaccccgaccugcugaacaaccaguucggcaccaugcccagccugacccuggccugccugaccaagcagggccagguggaccugaacgacgccgugcuggcccugaccgaccugggccugaucuacaccgccaaguaccccaacagcagcgaccuggacagacugagccagagccaccccauccugaacaugguggacaccaagaagagcagccugaacaucagcggcuacaacuucagccugggcgccgccgugaaggccggcgccugcaugcuggacggcggcaacaugcuggagaccaucaaggugaccccccagaccauggacggcauccugaagagcauccugaaggugaagagaagccugggcauguucgugagcgacacccccggcgagagaaaccccuacgagaacauccuguacaagaucugccugagcggcgacggcuggcccuacaucgccagcagaaccagcaucgugggcagagccugggagaacaccaccguggaccuggagagcgacggcaagccccagaaggugggcaccgccggcagcaacaagagccugcagagcgccggcuuccccaccggccugaccuacagccagcugaugacccugaaggacagcaugaugcagcuggaccccagcgccaagaccuggaucgacaucgagggcagacccgaggaccccguggagaucgcccuguaccagcccaugagcggcugcuacauccacuucuucagagagcccaccgaccugaagcaguucaagcaggacgccaaguacagccacggcaucgacguggccgaccuguuccccgcccagcccggccugaccagcgccgugaucgaggcccugcccagaaacauggugcugaccugccagggcagcgacgacaucaagaagcugcuggacagccagggcagaagagacaucaagcugaucgacaucagccugagcaagguggacagcagaaaguucgagaacgccgugugggaccagugcaaggaccugugccacaugcacaccggcguggugguggagaagaagaagagaggcggcaaggaggagaucaccccccacugcgcccugauggacugcaucauguucgacgccgccgugagcggcggccugaacauccccgugcugagagccgugcugcccagagacaugguguucagaaccagcagccccaagguggugcugugaggacuagucccuguucccagagcccacuuuuuuuucuuuuuuugaaauaaaauagccugucuuucagaucuaaaaaaaaaaaaaaaaaaaaaaaaaaaaaaaaaaaaaaaaaaaaaaaaaaaaaaaaaaaaaaaaaaaaaaaaaaaaaaaaaaaaaaaaaaaaaaaaaaaa

SEQ ID NO: 21372 - RNA, 2031 nt, Artificial Sequence
  mRNA product Design a-2 (A100) comprising derived and/or modified sequence from LASV(GA391;Clade III)__CAA36646__SP-IgE_NP(2-570) (opt4)
aggagaguccgcucagccagguugcagaagcggcuuagcguguguccuaaucuucucucugcguguagguaggccugugccgcaaacaagcuuaccauggacuggaccuggauccuguuccugguggccgccgccaccagagugcacagcagcgccagcaaggaggugagaagcuuccuguggacccagagccugagaagagagcugagcggcuacugcagcaacaucaagcugcagguggugaaggacgcccaggcccugcugcacggccuggacuucagcgaggugagcaacgugcagagacugaugagaaagcagaagagagacgacggcgaccugaagagacugagagaccugaaccaggccgugaacaaccugguggagcugaagagcacccagcagaagagcgugcugagagugggcacccugagcagcgacgaccugcugauccuggccgccgaccuggagaagcugaagagcaaggugaccagaaccgagagaccccugagcagcggcguguacaugggcaaccugagcagccagcagcuggaccagagaagagcccugcugaacaugaucggcaugaccggcgugagcggcggcggcaagggcgccagcgacggcaucgugagagugugggacgugaagaacgccgagcugcugaacaaccaguucggcaccaugcccagccugacccuggccugccugaccaagcagggccagguggaccugaacgacgccgugcaggcccugaccgaccugggccugaucuacaccgccaaguaccccaacagcagcgaccuggacagacugagccagagccaccccauccugaacaugaucgacaccaagaagagcagccugaacaucagcggcuacaacuucagccugggcgccgccgugaaggccggcgccugcaugcuggacggcggcaacaugcuggagaccaucaaggugagcccccagaccauggacggcauccugaagagcauccugaaggugaagaagagccugggcauguucgugagcgacacccccggcgagagaaaccccuacgagaacauccuguacaagaucugccugagcggcgacggcuggcccuacaucgccagcagaaccagcaucgugggcagagccugggagaacaccgugguggaccuggagcaggacaacaagccccagaagaucggcaacggcggcagcaacaagagccugcagagcgccggcuucgccgccggccugaccuacagccagcugaugacccugaaggacuucaagugcuucaaccugauccccaacgccaagaccuggauggacaucgagggcagacccgaggaccccguggagaucgcccuguaccagcccagcagcggcugcuacgugcacuucuucagagagcccaccgaccugaagcaguucaagcaggacgccaaguacagccacggcaucgacgugaccgaccuguucgccgcccagcccggccugaccagcgccgugaucgaggcccugcccagaaacauggugaucaccugccagggcagcgaggacaucagaaagcugcuggagagccagggcagaagagacaucaagcugaucgacaucacccugagcaaggccgacagcagaaaguucgagaacgccgugugggaccaguucaaggaccugugccacaugcacaccggcguggugguggagaagaagaagagaggcggcaaggaggagaucaccccccacugcgcccugauggacugcaucauguucgacgccgccgugagcggcggccuggacgccaaggugcugagaguggugcugcccagagacaugguguucagaaccagcacccccaagguggugcugugaggacuagucccuguucccagagcccacuuuuuuuucuuuuuuugaaauaaaauagccugucuuucagaucuaaaaaaaaaaaaaaaaaaaaaaaaaaaaaaaaaaaaaaaaaaaaaaaaaaaaaaaaaaaaaaaaaaaaaaaaaaaaaaaaaaaaaaaaaaaaaaaaaaaa

SEQ ID NO: 21373 - RNA, 2028 nt, Artificial Sequence
  mRNA product Design a-2 (A100) comprising derived and/or modified sequence from LASV(AV;Clade V)__CCA30315__SP-IgE_NP(2-569) (opt4)
aggagaguccgcucagccagguugcagaagcggcuuagcguguguccuaaucuucucucugcguguagguaggccugugccgcaaacaagcuuaccauggacuggaccuggauccuguuccugguggccgccgccaccagagugcacagcagcgccagcaaggaggugaagagcuuccuguggacccagagccugagaagagagcugagcggcuacugcagcaacaucaagcugcagguggugaaggacgcccaggcccugcugcacggccuggacuucagcgaggugagcaacgugcagagacugaugagaaagcagagaagagacgacagcgaccugaagagacugagagaccugaaccaggccgugaacaaccugguggagcugaagagcacccagcagaagagcgugcugagagugggcacccugagcagcgacgaccugcugacccuggccgccgaccuggagaagcugaagagcaaggugaccagaaccgagagaccccugagcagcggcguguacaugggcaaccugagcagccagcagcuggaccagagaagagcccugcugaaccugaucggcaugaccaacggcagccagggcagccaggccggcagagacggcguggugagagugugggacgugaagaacgccgagcugcugaacaaccaguucggcaccaugcccagccugacccuggccugccugaccaagcagggccagguggaccugaacgacguggugcaggcccugaccgaccugggccugaucuacaccgccaaguaccccaacaccagcgaccuggacagacugacccagagccaccccauccugaacaugaucgacaccaagaagagcagccugaacaucagcggcuacaacuucagccugggcgccgccgugaaggccggcgccugcaugcuggacggcggcaacaugcuggagaccaucaaggugagcccccagagcauggacggcauccugaagagcauccugaaggugaagagagcccugggcauguucgugagcgacacccccggcgagagaaaccccuacgagaacauccuguacaagaucugccugagcggcgacggcuggcccuacaucgccagcagaaccagcaucgugggcagagccugggagaacaccgugguggaccuggagaccgacggcaagccccagaagaucggcagcggcaacagcaacaagagccugcagagcgccggcuucagcgccggccugaccuacagccagcugaugacccugaaggacgccaugcugcagcuggaccccaacgccaagaccuggauggacaucgagggcagacccgaggaccccguggagguggcccuguaccagcccaucagcggcugcuacauccacuucuucagagagcccaccgaccugaagcaguucaagcaggacgccaaguacagccacggcaucgacaucgccgaccuguucgccgcccagcccggccugaccagcgccgugaucgaggcccugcccagaaacauggugaucaccugccagggcagcgaggacaucaagaagcugcuggagagccagggcagaaaggacaucaagcugaucgacaucgcccugagcaagaucgacagcagaaaguucgagaacgccgugugggaccaguacaaggaccugugccacaugcacaccggcguggugguggagaagaagaagagaggcggcaaggaggagaucaccccccacugcgcccugauggacugcaucauguucgacgccgccgugagcggcggccugaacacccuggugcugagagccgugcugcccagagacaugguguucagaaccagcacccccagaguggugcugugaggacuagucccuguucccagagcccacuuuuuuuucuuuuuuugaaauaaaauagccugucuuucagaucuaaaaaaaaaaaaaaaaaaaaaaaaaaaaaaaaaaaaaaaaaaaaaaaaaaaaaaaaaaaaaaaaaaaaaaaaaaaaaaaaaaaaaaaaaaaaaaaaaaaa

SEQ ID NO: 21374 - RNA, 2028 nt, Artificial Sequence
  mRNA product Design a-2 (A100) comprising derived and/or modified sequence from LASV(Togo/2016/7082;Clade VI)__AMR44578__SP-IgE_NP(2-569) (opt4)
aggagaguccgcucagccagguugcagaagcggcuuagcguguguccuaaucuucucucugcguguagguaggccugugccgcaaacaagcuuaccauggacuggaccuggauccuguuccugguggccgccgccaccagagugcacagcagcaacagcaaggaggugaagagcuuccuguggacccagagccugagaagagagcugagcggcuacugcagcaacaucaagcugcagguggugaaggacgcccaggcccugcugcacggccuggacuucagcgaggugagcaacgugcagagacugaugagaaagcagaagagagacgacggcgaccugaagagacugagagaccugaaccaggccgugaacaaccugguggagcugaagagcgugcagcagaagagcauccugagagugggcacccugaccagcgacgaccugcugacccuggccgccgaccuggagaagcugaagagcaaggugaccagaaccgagagaccccugagcagcggcguguacaugggcaaccugagcagccagcagcuggaccagagaagagcccugcugagcaugaucggcaugagcggcggcaaccagaacagccagcccaagggcgacggcguggugagagugugggacgugaagaacgccgaccugcugaacaaccaguucggcaccaugcccagccugacccuggccugccugaccaagcagggccagguggaccugaacgacgccgugcaggcccugaccgaccugggccugaucuacaccgccaaguaccccaacagcagcgaccuggacagacugagccagagccaccccauccugaacaugaucgacaccaagaagagcagccugaacaucagcggcuacaacuucagccugggcgccgccaucaagaccggcgccugcaugcuggacggcggcaacaugcuggagaccaucaaggugaccccccagaccauggacggcauccugaagagcauccugaaggugaagagaagccugggcauguucaucagcgacacccccggcgagagaaaccccuacgagaacauccuguacaagaucugccugagcggcgacggcuggcccuacaucgccagcagaaccgccaucaucggcagagccugggagaacaccgugguggaccuggagagcgacagcaagccccagaagaucggcagcaacggcagcaacaagagccugcagagcgccggcuucgcccccggccugaccuacagccagcugaugacccugaaggacagcaugcugcagcuggaccccaacgccaagaccuggaucgacaucgagggcagacccgaggaccccguggagguggcccuguuccagcccaucagcggcugcuacauccacuucuucagagagcccaccgaccugaagcaguucaagcaggacgccaaguacagccacggcaucgacgugaccgaccuguucgccgcccagcccggccugaccagcgccgugaucgaggcccugcccagaaacauggugcugaccugccagggcagcgacgacaucaagaagcugcuggacagccagggcagaagagacaucaagcugaucgacgugagccugaacaagaucgacagcagaaaguucgagaacgccgugugggaccaguacaaggaccugugccacaugcacaccggcguggugguggagaagaagaagaagggcggcaaggaggagaucaccccccacugcgcccugcuggacugcaucauguucgacgccgccgugagcggcggccugaacgccaccgugcugagagccgugcugcccagagacaugguguucagaaccagcagccccaagguggugcugugaggacuagucccuguucccagagcccacuuuuuuuucuuuuuuugaaauaaaauagccugucuuucagaucuaaaaaaaaaaaaaaaaaaaaaaaaaaaaaaaaaaaaaaaaaaaaaaaaaaaaaaaaaaaaaaaaaaaaaaaaaaaaaaaaaaaaaaaaaaaaaaaaaaaa

SEQ ID NO: 21375 - RNA, 2028 nt, Artificial Sequence
  mRNA product Design a-2 (A100) comprising derived and/or modified sequence from LASV(KAK-428;Clade n.d. (VII))__ANH09741__SP-IgE_NP(2-569) (opt4)
aggagaguccgcucagccagguugcagaagcggcuuagcguguguccuaaucuucucucugcguguagguaggccugugccgcaaacaagcuuaccauggacuggaccuggauccuguuccugguggccgccgccaccagagugcacagcagcaacagcaaggaggugaagagcuuccuguggacccagagccugagaagagagcugagcggcuacugcaccaacaucaagcugcagguggugaaggacgcccaggcccugcugcacggccuggacuucagcgaggugagcaacgugcagagacugaugagaaagcagaagagagacgacaacgaccugaagagacugagagaccugaaccaggccgugaacaaccugguggagcugaagagcgugcagcagaagagcgugcugaaggugggcacccugaacagcgacgaccugcugacccuggccgccgaccuggagaagcugaagagcaagguggugagaaccgagagaccccugagcagcggcguguacaugggcaaccugagcagccagcagcuggaccagagaagagcccugcugaacaugaucggcauggccggcggcagccagggcaaccagcccagcagagacggcguggugagagugugggacgugaagaacgccgaccugcugaacaaccaguucggcaccaugcccagccugacccuggccugccugaccaagcagggccagguggaccugaacgacguggugcuggcccugaccgaccugggccugaucuacaccgccaaguaccccaacagcagcgaccuggacagacugagccagaaccaccccgugcugaacaugaucgacgugaacaagagcagccugaacaucagcggcuacaacuucagccugggcgccgccgugaaggccggcgccugcaugcuggacggcggcaacaugcuggagaccaucaagaucagcccccagaccguggacggcauccugaagagcauccugaaggugaagagagcccugggcauguucgugagcgacacccccggcgagagaaaccccuacgagaacauccuguacaaggugugccugagcggcaacggcuggcccuacaucgccagcagaaccagcaucgugggcagagccugggagaacaccgugguggaccuggagagcaacaagaaccagcccaaggugggcaacaacggcagcaacaagaugcugcagagcagcggcuucgccaccggccugaccuacagccagcugaugacccugagagacagcaugcugcagcuggaccccaccgccaagaccuggaucgacaucgagggcagacccgaggaccccguggagcuggcccuguuccagcccagcagcggcugcuacauccacuucuucagagagcccaccgaccugaagcaguucaagcaggacgccaaguacagccacggcaucgacgugaacgaccuguucagcgcccagcccggccugaccagcgccgugcuggaggcccugcccagaaacauggugcugaccugccagggcagcgacgacaucagaaagcugcuggacagccaggacagaaaggacaucaagcugaucgacaucagccugagcaaggccgacgccagaaaguucgagaacgacgugugggaccaguucaaggaccugugccacaugcacaccggcaucgugguggagaagaagaagaagggcggcaagcaggagaugaccccccacugcgcccugcuggacugcaucauguucgacgccgccgugagcggcggccugaacgugcccacccugagagccgugcugcccaccgacaugguguucagaaccaucaccaccaagguggugcugugaggacuagucccuguucccagagcccacuuuuuuuucuuuuuuugaaauaaaauagccugucuuucagaucuaaaaaaaaaaaaaaaaaaaaaaaaaaaaaaaaaaaaaaaaaaaaaaaaaaaaaaaaaaaaaaaaaaaaaaaaaaaaaaaaaaaaaaaaaaaaaaaaaaaa

SEQ ID NO: 21376 - RNA, 2028 nt, Artificial Sequence; identical to SEQ ID NO: 21370
  mRNA product Design a-2 (A100) comprising derived and/or modified sequence from LASV(Pinneo-NIG-1969;Clade I)__AIT17837__SP-IgE_NP(2-569) (opt4)

SEQ ID NO: 21377 - RNA, 2028 nt, Artificial Sequence
  mRNA product Design a-2 (A100) comprising derived and/or modified sequence from LASV(ISTH0009-NIG-2011;Clade II)__AIT17405__SP-IgE_NP(2-569) (opt4)
aggagaguccgcucagccagguugcagaagcggcuuagcguguguccuaaucuucucucugcguguagguaggccugugccgcaaacaagcuuaccauggacuggaccuggauccuguuccugguggccgccgccaccagagugcacagcagcgugagcaaggaggugaagagcuuccuguggacccagagccugagaagagagcugagcggcuacugcagcaacaucaagcugcagguggugaaggacgcccaggcccugcugcacggccuggacuucagcgaggugagcaacgugcagagacugaugagaaagcagaagagagacgacagcgaccugaagagacugagagaccugaaccaggccgugaacaaccugguggagcugaagagcacccagcagaagagcauccugagagugggcacccugaccagcgacgaccugcugacccuggccgccgaccuggagaagcugaagagcaaggugaucagaaccgagagaccccugagcagcggcguguacaugggcaaccugagcacccagcagcuggagcagagaagagcccugcugaacaugaucggcauggugggcggcgcccagggcacccagcccggcagagacggcguggugagagugugggacgugaagaaccccgaccugcugaacaaccaguucggcaccaugcccagccugacccuggccugccugaccaagcagggccagguggaccugaacgacgccgugcuggcccugaccgaccugggccugaucuacaccgccaaguaccccaacagcagcgaccuggacagacugagccagagccaccccauccugaacaugguggacaucaagaagagcagccugaacaucagcggcuacaacuucagccugggcgccgccgugaaggccggcgccugcaugcuggacggcggcaacaugcuggagaccaucaaggugaccccccagaccauggacggcauccugaagagcauccugaaggugaagagaagccugggcauguucgugagcgacacccccggcgagagaaaccccuacgagaacauccuguacaagaucugccugagcggcgacggcuggcccuacaucgccagcagaaccagcaucgugggcagagccugggagaacaccaccguggaccuggagagcgacggcaagccccagaaggugggcagcgccggcagcaacaagagccugcagagcgccggcuuccccaccggccugaccuacagccagcugaugacccugaaggacagcaugaugcagcuggaccccagcgccaagaccuggaucgacaucgagggcagacccgaggaccccguggagaucgcccuguaccagcccaugagcggcugcuacauccacuucuucagagagcccaccgaccugaagcaguucaagcaggacgccaaguacagccacggcaucgacguggccgaccuguuccccgcccagcccggccugaccagcgccgugaucgaggcccugcccagaaacauggugcugaccugccagggcagcgacgacaucaagagacugcuggacagccagggcagaagagacaucaagcugaucgacaucgcccugagcaaggccgacagcagaagauucgagaacgccgugugggaccagugcaaggaccugugccacaugcacaccggcguggugguggagaagaagaagagaggcggcaaggaggagaucaccccccacugcgcccugauggacugcaucauguacgacgccgccgugagcggcggccugaacauccccgugcugagagccgugcugcccagagacaugguguucagaaccagcagccccaagguggugcugugaggacuagucccuguucccagagcccacuuuuuuuucuuuuuuugaaauaaaauagccugucuuucagaucuaaaaaaaaaaaaaaaaaaaaaaaaaaaaaaaaaaaaaaaaaaaaaaaaaaaaaaaaaaaaaaaaaaaaaaaaaaaaaaaaaaaaaaaaaaaaaaaaaaaa

SEQ ID NO: 21378 - RNA, 2028 nt, Artificial Sequence
  mRNA product Design a-2 (A100) comprising derived and/or modified sequence from LASV(ISTH2010-NIG-2012;Clade II)__AIT17483__SP-IgE_NP(2-569) (opt4)
aggagaguccgcucagccagguugcagaagcggcuuagcguguguccuaaucuucucucugcguguagguaggccugugccgcaaacaagcuuaccauggacuggaccuggauccuguuccugguggccgccgccaccagagugcacagcagcgccagcaaggaggugaagagcuuccuguggacccagagccugagaagagagcugagcggcuacugcagcaacaucaagcugcagguggugaaggacgcccaggcccugcugcacggccuggacuucagcgaggugagcaacgugcagagacugaugagaaagcagaagagagacgacagcgaccugaagagacugagagaccugaaccaggccgugaacaaccugguggagcugaagagcacccagcagaagagcauccugagagugggcacccugaccagcgacgaccugcugacccuggccgccgaccuggagaagcugaagagcaaggugaucagaaccgagagaccccugagcagcggcguguacaugggcaaccugagcacccagcagcuggagcagagaagagcccugcugaaccugaucggcauggugggcggcgcccagggcacccagcccggcagagacggcguggugagagugugggacgugaagaaccccgaccugcugaacaaccaguucggcaccaugcccagccugacccuggccugccugaccaagcagggccagguggaccugaacgacgccgugcuggcccugaccgaccugggccugaucuacaccgccaaguaccccaacagcagcgaccuggacagacugagccagagccaccccauccugaacaugguggacaccaagaagagcagccugaacaucagcggcuucaacuucagccugggcgccgccgugaaggccggcgccugcaugcuggacggcggcaacaugcuggagaccaucaaggugaccccccagaccauggacggcauccugaagagcauccugaaggugaagaagagccugggcauguucgugagcgacacccccggcgagagaaaccccuacgagaacauccuguacaagaucugccugagcggcgacggcuggcccuacaucgccagcagaaccagcaucgugggcagagccugggagaacaccaccguggaccuggagagcgacggcaagccccacaaggugggcaccgccggcagcaacaagagccugcagagcgccggcuuccccaccggccugaccuacagccagcugaugacccugaaggacagcaugaugcagcuggaccccagcgccaagaccuggaucgacaucgagggcagacccgaggaccccguggagaucgcccuguaccagcccaugagcggcugcuacauccacuucuucagagagcccaccgaccugaagcaguucaagcaggacgccaaguacagccacggcaucgacguggccgaccuguuccccgcccagcccggccugaccagcgccgugaucgaggcccugcccagaaacauggugcugaccugccagggcagcgacgacaucaagagacugcuggacagccagggcagaagagacaucaagcugaucgacaucgcccugagcaaggccgacagcagaagauucgagaacgccgugugggaccagugcaaggaccugugccacaugcacaccggcguggugguggagaagaagaagagaggcggcaaggaggagaucaccccccacugcgcccugauggacugcaucauguacgacgccgccgugagcggcggccugaacauccccgugcugagagccgugcugcccagagacaugguguucagaaccagcagccccaagguggugcugugaggacuagucccuguucccagagcccacuuuuuuuucuuuuuuugaaauaaaauagccugucuuucagaucuaaaaaaaaaaaaaaaaaaaaaaaaaaaaaaaaaaaaaaaaaaaaaaaaaaaaaaaaaaaaaaaaaaaaaaaaaaaaaaaaaaaaaaaaaaaaaaaaaaaa

SEQ ID NO: 21379 - RNA, 2028 nt, Artificial Sequence
  mRNA product Design a-2 (A100) comprising derived and/or modified sequence from LASV(Lassa virus/H.sapiens-wt/NGA/2015/ISTH_0543;Clade II)__AVO03640__SP-IgE_NP(2-569) (opt4)
aggagaguccgcucagccagguugcagaagcggcuuagcguguguccuaaucuucucucugcguguagguaggccugugccgcaaacaagcuuaccauggacuggaccuggauccuguuccugguggccgccgccaccagagugcacagcagcgccagcaaggaggugaagagcuuccuguggacccagagccugagaagagagcugagcggcuacugcagcaacaucaagcugcagguggugaaggacgcccaggcccugcugcacggccuggacuucagcgaggugagcaacgugcagagacugaugagaaagcagaagagagacgacagcgaccugaagagacugagagaccugaaccaggccgugaacaaccugguggagcugaagagcacccagcagaagagcauccugagagugggcacccugaccagcgacgaccugcugacccuggccgccgaccuggagaagcugaagagcaaggugaucagaaccgagagaccccugagcagcggcguguacaugggcaaccugagcacccagcagcuggagcagagaagagcccugcugaacaugaucggcauggugggcggcgcccagggcacccagcccggcagagacggcguggugagagugugggacgugaagaaccccgaccugcugaacaaccaguucggcaccaugcccagccugacccuggccugccugaccaagcagggccagguggaccugaacgacgccgugcuggcccugaccgaccugggccugaucuacaccgccaaguaccccaacagcagcgaccuggacagacugagccagagccaccccauccugaacaugguggacaccaagaagagcagccugaacaucagcggcuacaacuucagccugggcgccgccgugaaggccggcgccugcaugcuggacggcggcaacaugcuggagaccaucaaggugaccccccagaccauggacggcauccugaagagcauccugaaggugaagaagagccugggcauguucgugagcgacacccccggcgagagaaaccccuacgagaacauccuguacaagaucugccugagcggcgacggcuggcccuacaucgccagcagaaccagcaucgugggcagagccugggagaacaccaccguggaccuggagagcgacggcaagccccagaaggugggcagcgccggcagcaacaagagccugcagagcgccggcuuccccaccggccugaccuacagccagcugaugacccugaaggacagcaugaugcagcuggaccccagcgccaagaccuggaucgacaucgagggcagacccgaggaccccguggagaucgcccuguaccagcccaugagcggcugcuacauccacuucuucagagagcccaccgaccugaagcaguucaagcaggacgccaaguacagccacggcaucgacguggccgaccuguuccccgcccagcccggccugaccagcgccgugaucgaggcccugcccagaaacauggugcugaccugccagggcagcgacgacaucaagagacugcuggacagccagggcagaaaggacaucaagcugaucgacaucgcccugagcaaggccgacagcagaagauucgagaacgccgugugggaccagugcaaggaccugugccacaugcacaccggcguggugguggagaagaagaagagaggcggcaaggaggagaucaccccccacugcgcccugauggacugcaucauguacgacgccgccgugagcggcggccugaacauccccgugcugagagccgugcugcccagagacaugguguucagaaccagcagccccaagguggugcugugaggacuagucccuguucccagagcccacuuuuuuuucuuuuuuugaaauaaaauagccugucuuucagaucuaaaaaaaaaaaaaaaaaaaaaaaaaaaaaaaaaaaaaaaaaaaaaaaaaaaaaaaaaaaaaaaaaaaaaaaaaaaaaaaaaaaaaaaaaaaaaaaaaaaa

SEQ ID NO: 21380 - RNA, 2028 nt, Artificial Sequence
  mRNA product Design a-2 (A100) comprising derived and/or modified sequence from LASV(Lassa virus/H.sapiens-wt/NGA/2016/ISTH_0009;Clade II)__AVO03572__SP-IgE_NP(2-569) (opt4)
aggagaguccgcucagccagguugcagaagcggcuuagcguguguccuaaucuucucucugcguguagguaggccugugccgcaaacaagcuuaccauggacuggaccuggauccuguuccugguggccgccgccaccagagugcacagcagcgccagcaaggaggugaagagcuuccuguggacccagagccugagaagagagcugagcggcuacugcagcaacaucaagcugcagguggugaaggacgcccaggcccugcugcacggccuggacuucagcgaggugagcaacgugcagagacugaugagaaagcagaagagagacgacagcgaccugaagagacugagagaccugaaccaggccgugaacaaccugguggagcugaagagcacccagcagaagagcauccugagagugggcacccugaccagcgacgaccugcugacccuggccgccgaccuggagaagcugaagagcaaggugaucagaaccgagagaccccugagcagcggcguguacaugggcaaccugagcacccagcagcuggagcagagaagagcccugcugaacaugaucggcauggugggcggcgcccagggcacccagcccggcagagacggcguggugagagugugggacgugaagaaccccgaccugcugaacaaccaguucggcaccaugcccagccugacccuggccugccugaccaagcagggccagguggaccugaacgacgccgugcuggcccugaccgaccugggccugaucuacaccgccaaguaccccaacagcagcgaccuggacagacugagccagagccaccccauccugaacaugguggacaccaagaagagcagccugaacaucagcggcuacaacuucagccugggcgccgccgugaaggccggcgccugcaugcuggacggcggcaacaugcuggagaccaucaaggugaccccccagaccauggacggcauccugaagagcauccugaaggugaagaagagccugggcauguucgugagcgacacccccggcgagagaaaccccuacgagaacauccuguacaagaucugccugagcggcgacggcuggcccuacaucgccagcagaaccagcaucgugggcagagccugggagaacaccaccguggaccuggagagcgacggcaagccccagaaggugggcagcgccggcagcaacaagagccugcagagcgccggcuuccccaccggccugaccuacagccagcugaugacccugaaggacagcaugaugcagcuggaccccagcgccaagaccuggaucgacaucgagggcagacccgaggaccccguggagaucgcccuguaccagcccaugagcggcugcuacauccacuucuucagagagcccaccgaccugaagcaguucaagcaggacgccaaguacagccacggcaucgacguggccgaccuguuccccgcccagcccggccugaccagcgccgugaucgaggcccugcccagaaacauggugcugaccugccagggcagcgacgacaucaagagacugcuggacagccagggcagaagagacaucaagcugaucgacaucgcccugagcaaggccgacagcagaagauucgagaacgccgugugggaccagugcaaggaccugugccacaugcacaccggcguggugguggagaagaagaagagaggcggcaaggaggagaucaccccccacugcgcccugauggacugcaucauguacgacgccgccgugagcggcggccugaacauccccgugcugagagccgugcugcccagagacaugguguucagaaccagcagccccaagguggugcugugaggacuagucccuguucccagagcccacuuuuuuuucuuuuuuugaaauaaaauagccugucuuucagaucuaaaaaaaaaaaaaaaaaaaaaaaaaaaaaaaaaaaaaaaaaaaaaaaaaaaaaaaaaaaaaaaaaaaaaaaaaaaaaaaaaaaaaaaaaaaaaaaaaaaa

SEQ ID NO: 21381 - RNA, 2028 nt, Artificial Sequence
  mRNA product Design a-2 (A100) comprising derived and/or modified sequence from LASV(Lassa virus/H.sapiens-wt/NGA/2016/ISTH_0017;Clade II)__AVO03568__SP-IgE_NP(2-569) (opt4)
aggagaguccgcucagccagguugcagaagcggcuuagcguguguccuaaucuucucucugcguguagguaggccugugccgcaaacaagcuuaccauggacuggaccuggauccuguuccugguggccgccgccaccagagugcacagcagcgccagcaaggaggugaagagcuuccuguggacccagagccugagaagagagcugagcggcuacugcagcagcaucaagcugcagguggugaaggacgcccaggcccugcugcacggccuggacuucagcgaggugagcaacgugcagagacugaugagaaagcagaagagagacgacagcgaccugaagagacugagagaccugaaccaggccgugaacaaccugguggagcugaagagcacccagcagaagagcauccugagagugggcacccugaccagcgacgaccugcugacccuggccgccgaccuggagaagcugaagagcaaggugaucagaaccgagagaccccugagcagcggcguguacaugggcaaccugagcacccagcagcuggagcagagaagagcccugcugaacaugaucggcauggccggcggcgcccagggcacccagcccggcagagacggcguggugagagugugggacgugaagaaccccgaccugcugaacaaccaguucggcaccaugcccagccugacccuggccugccugaccaagcagggccagguggaccugaacgacgccgugcuggcccugaccgaccugggccugaucuacaccgccaaguaccccaacagcagcgaccuggacagacugagccagagccaccccauccugaacaugguggacaccaagaagagcagccugaacaucagcggcuacaacuucagccugggcgccgccgugaaggccggcgccugcaugcuggacggcggcaacaugcuggagaccaucaaggugaccccccagaccauggacggcauccugaagagcauccugaaggugaagagaagccugggcauguucgugagcgacgcccccggcgagagaaaccccuacgagaacauccuguacaagaucugccugagcggcgacggcuggcccuacaucgccagcagaaccagcaucgugggcagagccugggagaacaccaccguggaccuggagagcgacggcaagccccagaaggugggcgccaccggcagcaacaagagccugcagagcgccggcuuccccaccggccugaccuacagccagcugaugacccugaaggacagcaugaugcagcuggaccccagcgccaagaccuggaucgacaucgagggcagacccgaggaccccguggagguggcccuguaccagcccgugagcggcugcuacauccacuucuucagagagcccaccgaccugaagcaguucaagcaggacgccaaguacagccacggcaucgacguggccgaccuguuccccgcccagcccggccugaccagcgccgugaucgaggcccugcccagaaacauggugcugaccugccagggcagcgacgacaucaagaagcugcuggacagccagggcagaaaggacaucaagcugaucgacaucgcccugagcaaggccgacagcagaagauucgagaacgccgugugggaccagugcaaggaccugugccacaugcacaccggcguggugguggagaagaagaagagaggcggcaaggaggagaucaccccccacugcgcccugauggacugcaucauguacgacgccgccgugagcggcggccugaacauccccgugcugagagccgugcugcccagagacaugguguucagaaccagcagccccaagguggugcugugaggacuagucccuguucccagagcccacuuuuuuuucuuuuuuugaaauaaaauagccugucuuucagaucuaaaaaaaaaaaaaaaaaaaaaaaaaaaaaaaaaaaaaaaaaaaaaaaaaaaaaaaaaaaaaaaaaaaaaaaaaaaaaaaaaaaaaaaaaaaaaaaaaaaa

SEQ ID NO: 21382 - RNA, 2028 nt, Artificial Sequence
  mRNA product Design a-2 (A100) comprising derived and/or modified sequence from LASV(Lassa virus/H.sapiens-wt/NGA/2018/ISTH_0959;Clade II)__AVV65100__SP-IgE_NP(2-569) (opt4)
aggagaguccgcucagccagguugcagaagcggcuuagcguguguccuaaucuucucucugcguguagguaggccugugccgcaaacaagcuuaccauggacuggaccuggauccuguuccugguggccgccgccaccagagugcacagcagcgccagcaaggaggugaagagcuuccuguggacccagagccugagaagagagcugagcggcuacugcagcaacaucaagcugcagguggugaaggacgcccaggcccugcugcacggccuggacuucagcgaggugagcaacgugcagagacugaugagaaagcagaagagagacgacagcgaccugaagagacugagagaccugaaccaggccgugaacaaccugguggagcugaagagcacccagcagaagagcauccugagagugggcacccugaccagcgacgaccugcugacccuggccgccgaccuggagaagcugaagagcaaggugaucagaaccgagagaccccugagcagcggcguguacaugggcaaccugagcacccagcagcuggagcagagaagagcccugcugaaccugaucggcauggugggcggcgcccagggcacccagcccggcagagacggcguggugagagugugggacgugaagaaccccgaccugcugaacaaccaguucggcaccaugcccagccugacccuggccugccugaccaagcagggccagguggaccugaacgacguggugcuggcccugaccgaccugggccugaucuacaccgccaaguaccccaacagcagcgaccuggacagacugagccagagccaccccauccugaacaugguggacaccaagaagagcagccugaacaucagcggcuucaacuucagccugggcgccgccgugaaggccggcgccugcaugcuggacggcggcaacaugcuggagaccaucaaggugaccccccagaccauggacggcauccugaagagcauccugaaggugaagaagagccugggcauguucgugagcgacacccccggcgagagaaaccccuacgagaacauccuguacaagaucugccugagcggcgacggcuggcccuacaucgccagcagaaccagcaucgugggcagagccugggagaacaccaccguggaccuggagagcgacggcaagccccacaaggugggcaccgccggcagcaacaagagccugcagagcgccggcuuccccaccggccugaccuacagccagcugaugacccugaaggacagcaugaugcagcuggaccccagcgccaagaccuggaucgacaucgagggcagacccgaggaccccguggagaucgcccuguaccagcccaugagcggcugcuacauccacuucuucagagagcccaccgaccugaagcaguucaagcaggacgccaaguacagccacggcaucgacguggccgaccuguuccccgcccagcccggccugaccagcgccgugaucgaggcccugcccagaaacauggugcugaccugccagggcagcgacgacaucaagagacugcuggacagccagggcagaaaggacaucaagcugaucgacaucgcccugagcaagaccgacagcagaagauucgagaacgccgugugggaccagugcaaggaccugugccacaugcacaccggcguggugguggagaagaagaagagaggcggcaaggaggagaucaccccccacugcgcccugauggacugcaucauguacgacgccgccgugagcggcggccugaacauccccgugcugagagccgugcugcccagagacaugguguucagaaccagcagccccaagguggugcugugaggacuagucccuguucccagagcccacuuuuuuuucuuuuuuugaaauaaaauagccugucuuucagaucuaaaaaaaaaaaaaaaaaaaaaaaaaaaaaaaaaaaaaaaaaaaaaaaaaaaaaaaaaaaaaaaaaaaaaaaaaaaaaaaaaaaaaaaaaaaaaaaaaaaa

SEQ ID NO: 21383 - RNA, 2028 nt, Artificial Sequence
  mRNA product Design a-2 (A100) comprising derived and/or modified sequence from LASV(LASV003-NIG-2008;Clade II)__AIT17581__SP-IgE_NP(2-569) (opt4)
aggagaguccgcucagccagguugcagaagcggcuuagcguguguccuaaucuucucucugcguguagguaggccugugccgcaaacaagcuuaccauggacuggaccuggauccuguuccugguggccgccgccaccagagugcacagcagcgccagcaaggaggugaagagcuuccuguggacccagagccugagaagagagcugagcggcuacugcagcagcaucaagcugcagguggugaaggacgcccaggcccugcugcacggccuggacuucagcgaggugagcaacgugcagagacugaugagaaagcagaagagagacgacagcgaccugaagagacugagagaccugaaccaggccgugaacaaccugguggagcugaagagcacccagcagaagagcgugcugagagugggcacccugaccagcgacgaccugcugacccuggccgccgaccuggagaagcugaagagcaaggugaucagaaccgagagaccccugagcagcggcguguacaugggcaaccugagcgcccagcagcuggagcagagaagaacccugcugaacaugaucggcauggugggcggcgcccagggcacccagcccggcagagacggcguggugagagugugggacgugaagaaccccgaccugcugaacaaccaguucggcaccaugcccagccugacccuggccugccugaccaagcagggccagguggaccugaacgacguggugcuggcccugaccgaccugggccugaucuacaccgccaaguaccccaacagcagcgaccuggacagacugagccagagccaccccauccugagcaugguggacaccaagaagagcagccugaacaucagcggcuacaacuucagccugggcgccgccgugaaggccggcgccugcaugcuggacggcggcaacaugcuggagaccaucaaggugaccccccagaccauggacggcauccugaagagcauccugaaggugaagaagagccugggcauguucgugagcgacacccccggcgagagaaaccccuacgagaacauccuguacaagaucugccugagcggcgacggcuggcccuacaucgccagcagaaccagcaucgugggcagagccugggagaacaccaccguggaccuggagagcgacggcaagccccagaaggugggcaccgccggcagcaacaagagccugcagagcgccggcuuccccaccggccugaccuacagccagcugaugacccugaaggacagcaugaugcagcuggaccccagcgccaagaccuggaucgacaucgagggcagacccgaggaccccguggagaucgcccuguaccagcccaugagcggcugcuacauccacuucuucagagagcccaccgaccugaagcaguucaagcaggacgccaaguacagccacggcaucgacgugaccgaccuguuccccgcccagcccggccugaccagcgccgugaucgaggcccugcccagaaacauggugcugaccugccagggcagcgacgacaucaagagacugcuggacagccagggcagaagagacaucaagcugaucgacaucgcccugagcaaggccgacagcagaagauucgagaacgccgugugggaccagugcaaggaccugugccacaugcacaccggcguggugguggagaagaagaagagaggcggcaaggaggagaucaccccccacugcgcccugauggacugcaucauguacgacgccgccgugagcggcggccugaacauccccgugcugagagccgugcugcccagagacaugguguucagaaccagcagccccaagguggugcugugaggacuagucccuguucccagagcccacuuuuuuuucuuuuuuugaaauaaaauagccugucuuucagaucuaaaaaaaaaaaaaaaaaaaaaaaaaaaaaaaaaaaaaaaaaaaaaaaaaaaaaaaaaaaaaaaaaaaaaaaaaaaaaaaaaaaaaaaaaaaaaaaaaaaa

SEQ ID NO: 21384 - RNA, 2028 nt, Artificial Sequence
  mRNA product Design a-2 (A100) comprising derived and/or modified sequence from LASV(LASV035-NIG-2009;Clade II)__AIT17589__SP-IgE_NP(2-569) (opt4)
aggagaguccgcucagccagguugcagaagcggcuuagcguguguccuaaucuucucucugcguguagguaggccugugccgcaaacaagcuuaccauggacuggaccuggauccuguuccugguggccgccgccaccagagugcacagcagcgccagcaaggaggugaagagcuuccuguggacccagagccugagaagagagcugagcggcuacugcagcagcaucaagcugcagguggugaaggacgcccaggcccugcugcacggccuggacuucagcgaggugagcaacgugcagagacugaugagaaagcagaagagagacgacagcgaccugaagagacugagagaccugaaccaggccgugaacaaccugguggagcugaagagcacccagcagaagagcauccugagagugggcacccugaccagcgacgaccugcugacccuggccgccgaccuggagaagcugaagagcaaggugaucagaaccgagagaccccugagcagcggcguguacaugggcaaccugagcgcccagcagcuggagcagagaagagcccugcugaacaugaucggcauggugggcggcgcccagggcacccagcccggcagagacggcguggugagagugugggacgugaagaaccccgaccugcugaacaaccaguucggcaccaugcccagccugacccuggccugccugaccaagcagggccagguggaccugaacgacgccgugcuggcccugaccgaccugggccugaucuacaccgccaaguaccccaacagcagcgaccuggacagacugagccagagccaccccauccugaacaugguggacaccaagaagagcagccugaacaucagcggcuacaacuucagccugggcgccgccgugaaggccggcgccugcaugcuggacggcggcaacaugcuggagaccaucaaggugaccccccagaccauggacggcauccugaagagcauccugaaggugaagagaagccugggcauguucgugagcgacacccccggcgagagaaaccccuacgagaacauccuguacaagaucugccugagcggcgacggcuggcccuacaucgccagcagaaccagcaucgugggcagagccugggagaacaccaccguggaccuggagagcgacggcaagccccagaaggugggcaccaccggcagcaacaagagccugcagagcgccggcuuccccaccggccugaccuacagccagcugaugacccugaaggacagcaugaugcagcuggaccccagcgccaagaccuggaucgacaucgagggcagacccgaggaccccguggagaucgcccuguaccagcccaugagcggcugcuacauccacuucuucagagagcccaccgaccugaagcaguucaagcaggacgccaaguacagccacggcaucgacguggccgaccuguuccccgcccagcccggccugaccagcgccgugaucgaggcccugcccagaaacauggugcugaccugccagggcagcgacgacaucaagaagcugcuggacagccagggcagaagagacaucaagcugaucgacaucgcccugagcaaggccgacagcagaaaguucgagaacgccgugugggaccagugcaaggaccugugccacaugcacaccggcguggugguggagaagaagaagagaggcggcaaggaggagaucaccccccacugcgcccugauggacugcaucauguacgacgccgccgugagcggcggccugaacauccccgugcugagagccgugcugcccagagacaugguguucagaaccagcagccccaagguggugcugugaggacuagucccuguucccagagcccacuuuuuuuucuuuuuuugaaauaaaauagccugucuuucagaucuaaaaaaaaaaaaaaaaaaaaaaaaaaaaaaaaaaaaaaaaaaaaaaaaaaaaaaaaaaaaaaaaaaaaaaaaaaaaaaaaaaaaaaaaaaaaaaaaaaaa

SEQ ID NO: 21385 - RNA, 2028 nt, Artificial Sequence
  mRNA product Design a-2 (A100) comprising derived and/or modified sequence from LASV(LASV1000-NIG-2009;Clade II)__AIT17783__SP-IgE_NP(2-569) (opt4)
aggagaguccgcucagccagguugcagaagcggcuuagcguguguccuaaucuucucucugcguguagguaggccugugccgcaaacaagcuuaccauggacuggaccuggauccuguuccugguggccgccgccaccagagugcacagcagcgccagcaaggaggugaagagcuuccuguggacccagagccugagaagagagcugagcggcuacugcagcaacaucaagcugcagguggugaaggacgcccaggcccugcugcacggccuggacuucagcgaggugagcaacgugcagagacugaugagaaagcagaagagagacgacagcgaccugaagagacugagagaccugaaccaggccgugaacaaccugguggagcugaagagcacccagcagaagagcauccugagagugggcacccugaccagcgacgaccugcugacccuggccgccgaccuggagaagcugaagagcaaggugaucagaaccgagagaccccugagcagcggcguguacaugggcaaccugagcacccagcagcuggagcagagaagagcccugcugaacaugaucggcauggugggcggcgcccagggcacccagcccggcagagacggcguggugagagugugggacgugaagaaccccgaccugcugaacaaccaguucggcaccaugcccagccugacccuggccugccugaccaagcagggccagguggaccugaacgacguggugcuggcccugaccgaccugggccugaucuacaccgccaaguaccccaacagcagcgaccuggacagacugagccagagccaccccauccugaacaugguggacaccaagaagagcagccugaacaucagcggcuacaacuucagccugggcgccgccgugaaggccggcgccugcaugcuggacggcggcaacaugcuggagaccaucaaggugaccccccagaccauggacggcauccugaagagcauccugaaggugaagaagagccugggcauguucgugagcgacacccccggcgagagaaaccccuacgagaacauccuguacaagaucugccugagcggcgacggcuggcccuacaucgccagcagaaccagcaucgugggcagagccugggagaacaccaccguggaccuggagagcgacggcaagccccagaaggugggcaccgccggcagcaacaagagccugcagagcgccggcuuccccaccggccugaccuacagccagcugaugacccugaaggacagcaugaugcagcuggaccccagcgccaagaccuggaucgacaucgagggcagacccgaggaccccguggagaucgcccuguaccagcccgugagcggcugcuacauccacuucuucagagagcccaccgaccugaagcaguucaagcaggacgccaaguacagccacggcaucgacguggccgaccuguuccccgcccagcccggccugaccagcgccgugaucgaggcccugcccagaaacauggugcugaccugccagggcagcgacgacaucaagagacugcuggacagccagggcagaagagacaucaagcugaucgacaucgcccugagcaaggccgacagcagaagauucgagaacgccgugugggaccagugcaaggaccugugccacaugcacaccggcguggugguggagaagaagaagagaggcggcaaggaggagaucaccccccacugcgcccugauggacugcaucauguacgacgccgccgugagcggcggccugaacauccccgugcugagagccgugcugcccagagacaugguguucagaaccagcagccccaagguggugcugugaggacuagucccuguucccagagcccacuuuuuuuucuuuuuuugaaauaaaauagccugucuuucagaucuaaaaaaaaaaaaaaaaaaaaaaaaaaaaaaaaaaaaaaaaaaaaaaaaaaaaaaaaaaaaaaaaaaaaaaaaaaaaaaaaaaaaaaaaaaaaaaaaaaaa

SEQ ID NO: 21386 - RNA, 2028 nt, Artificial Sequence
  mRNA product Design a-2 (A100) comprising derived and/or modified sequence from LASV(LASV221-NIG-2010;Clade II)__AIT17625__SP-IgE_NP(2-569) (opt4)
aggagaguccgcucagccagguugcagaagcggcuuagcguguguccuaaucuucucucugcguguagguaggccugugccgcaaacaagcuuaccauggacuggaccuggauccuguuccugguggccgccgccaccagagugcacagcagcgccagcaaggaggugaagagcuuccuguggacccagagccugagaagagagcugagcggcuacugcagcagcaucaagcugcagguggugaaggacgcccaggcccugcugcacggccuggacuucagcgaggugagcaacgugcagagacugaugagaaagcagagaagagacgacagcgaccugaagagacugagagaccugaaccaggccgugaacaaccugguggagcugaagagcacccagcagaagagcauccugagagugggcacccugaccagcgacgaccugcugacccuggccgccgaccuggagaagcugaagagcaaggugaucagaaccgagagaccccugagcagcggcguguacaugggcaaccugagcacccagcagcuggagcagagaagagcccugcugaacaugaucggcauggugggcggcgcccagggcacccagcccggcagagacggcguggugagagugugggacgugaagaaccccgaccugcugaacaaccaguucggcaccaugcccagccugacccuggccugccugaccaagcagggccagguggaccugaacgacgccgugcuggcccugaccgaccugggccugaucuacaccgccaaguaccccaacagcagcgaccuggacagacugagccagagccaccccauccugaacaugguggacaccaagaagagcagccugaacaucagcggcuacaacuucagccugggcgccgccgugaaggccggcgccugcaugcuggacggcggcaacaugcuggagaccaucaaggugaccccccagaccguggacggcauccugaagagcauccugaaggugaagagaagccugggcauguucgugagcgacacccccggcgagagaaaccccuacgagaacauccuguacaagaucugccugagcggcgacggcuggcccuacaucgccagcagaaccagcaucgugggcagagccugggagaacaccaccguggaccuggagagcgacggcaagccccagaaggugggcaccgccggcagcaacaagagccugcagagcgccggcuuccccaccggccugaccuacagccagcugaugacccugaaggacagcaugaugcagcuggaccccagcgccaagaccuggaucgacaucgagggcagacccgaggaccccguggagaucgcccuguaccagcccaugagcggcugcuacauccacuucuucagagagcccaccgaccugaagcaguucaagcaggacgccaaguacagccacggcaucgacguggccgaccuguuccccgcccagcccggccugaccagcgccgugaucgaggcccugcccagaaacauggugcugaccugccagggcagcgacgacaucaagagacugcuggacagccagggcagaagagacaucaagcugaucgacaucgcccugagcaaggccgacagcagaaaguucgagaacgccgugugggaccagugcaaggaccugugccacaugcacaccggcguggugguggagaagaagaagagaggcggcaaggaggagaucaccccccacugcgcccugauggacugcaucauguacgacgccgccgugagcggcggccugaacauccccgugcugagagccgugcugcccagagacaugguguucagaaccagcagccccaagguggugcugugaggacuagucccuguucccagagcccacuuuuuuuucuuuuuuugaaauaaaauagccugucuuucagaucuaaaaaaaaaaaaaaaaaaaaaaaaaaaaaaaaaaaaaaaaaaaaaaaaaaaaaaaaaaaaaaaaaaaaaaaaaaaaaaaaaaaaaaaaaaaaaaaaaaaa

SEQ ID NO: 21387 - RNA, 2028 nt, Artificial Sequence
  mRNA product Design a-2 (A100) comprising derived and/or modified sequence from LASV(LASV237-NIG-2010;Clade II)__AIT17639__SP-IgE_NP(2-569) (opt4)
aggagaguccgcucagccagguugcagaagcggcuuagcguguguccuaaucuucucucugcguguagguaggccugugccgcaaacaagcuuaccauggacuggaccuggauccuguuccugguggccgccgccaccagagugcacagcagcgccagcaaggaggugaagagcuuccuguggacccagagccugagaagagagcugagcggcuacugcagcaacaucaagcugcagguggugaaggacgcccaggcccugcugcacggccuggacuucagcgaggugagcaacgugcagagacugaugagaaagcagaagagagacgacagcgaccugaagagacugagagaccugaaccaggccgugaacaaccugguggagcugaagagcacccagcagaagagcauccugagagugggcacccugaccagcgacgaccugcugacccuggccgccgaccuggagaagcugaagagcaaggugaucagaaccgagagaccccugagcagcggcguguacaugggcaaccugagcacccagcagcuggagcagagaagagcccugcugaacaugaucggcauggugggcggcgcccagggcacccagcccggcagagacggcguggugagagugugggacgugaagaaccccgaccugcugaacaaccaguucggcaccaugcccagccugacccuggccugccugaccaagcagggccagguggaccugaacgacgccgugcuggcccugaccgaccugggccugaucuacaccgccaaguaccccaacagcagcgaccuggacagacugagccagagccaccccauccugaacaugguggacaucaagaagagcagccugaacaucagcggcuacaacuucagccugggcgccgccgugaaggccggcgccugcaugcuggacggcggcaacaugcuggagaccaucaaggugaccccccagaccauggacggcauccugaagagcauccugaaggugaagagaagccugggcauguucgugagcgacacccccggcgagagaaaccccuacgagaacauccuguacaagaucugccugagcggcgacggcuggcccuacaucgccagcagaaccagcaucgugggcagagccugggagaacaccaccguggaccuggagagcgacggcaagccccagaaggugggcagcgccggcagcaacaagagccugcagagcgccggcuuccccaccggccugaccuacagccagcugaugacccugaaggacagcaugaugcagcuggaccccagcgccaagaccuggaucgacaucgagggcagacccgaggaccccguggagaucgcccuguaccagcccaugagcggcugcuacauccacuucuucagagagcccaccgaccugaagcaguucaagcaggacgccaaguacagccacggcaucgacguggccgaccuguuccccgcccagcccggccugaccagcgccgugaucgaggcccugcccagaaacauggugcugaccugccagggcagcgacgacaucaagagacugcuggacagccagggcagaagagacaucaagcugaucgacaucgcccugagcaaggccgacagcagaagauucgagaacgccgugugggaccagugcaaggaccugugccacaugcacaccggcguggugguggagaagaagaagagaggcggcaaggaggagaucaccccccacugcgcccugauggacugcaucauguacgacgccgccgugagcggcggccugaacauccccgugcugagagccgugcugcccagagacaugguguucagaaccagcagccccaagguggugcugugaggacuagucccuguucccagagcccacuuuuuuuucuuuuuuugaaauaaaauagccugucuuucagaucuaaaaaaaaaaaaaaaaaaaaaaaaaaaaaaaaaaaaaaaaaaaaaaaaaaaaaaaaaaaaaaaaaaaaaaaaaaaaaaaaaaaaaaaaaaaaaaaaaaaa

SEQ ID NO: 21388 - RNA, 2028 nt, Artificial Sequence
  mRNA product Design a-2 (A100) comprising derived and/or modified sequence from LASV(LASV253-NIG-2011;Clade II)__AIT17671__SP-IgE_NP(2-569) (opt4)
aggagaguccgcucagccagguugcagaagcggcuuagcguguguccuaaucuucucucugcguguagguaggccugugccgcaaacaagcuuaccauggacuggaccuggauccuguuccugguggccgccgccaccagagugcacagcagcgccagcaaggaggugaagagcuuccuguggacccagagccugagaagagagcugagcggcuacugcagcagcaucaagcugcagguggugaaggacgcccaggcccugcugcacggccuggacuucagcgaggugagcaacgugcagagacugaugagaaagcagaagagagacgacagcgaccugaagagacugagagaccugaaccaggccgugaacaaccugguggagcugaagagcacccagcagaagagcgugcugagagugggcacccugaccagcgacgaccugcugacccuggccgccgaccuggagaagcugaagagcaaggugaucagaaccgagagaccccugagcagcggcguguacaugggcaaccugagcacccagcagcuggagcagagaagagcccugcugaacaugaucggcauggugggcggcgcccagggcacccagcccggcagagacggcguggugagagugugggacgugaagaaccccgaccugcugaacaaccaguucggcaccaugcccagccugacccuggccugccugaccaagcagggccagguggaccugaacgacguggugcuggcccugaccgaccugggccugaucuacaccgccaaguaccccaacagcagcgaccuggacagacugagccagagccaccccauccugaacaugguggacaccaagaagagcagccugaacaucagcggcuacaacuucagccugggcgccgccgugaaggccggcgccugcaugcuggacggcggcaacaugcuggagaccaucaaggugaccccccagaccauggacggcauccugaagagcauccugaaggugaagaagagccugggcauguucgugagcgacacccccggcgagagaaaccccuacgagaacauccuguacaagaucugccugagcggcgacggcuggcccuacaucgccagcagaaccagcaucgugggcagagccugggagaacaccaccguggaccuggagagcgacggcaagccccagaaggugggcaccgccggcagcaacaagagccugcagagcgccggcuuccccaccggccugaccuacagccagcugaugacccugaaggacagcaugaugcagcuggaccccagcgccaagaccuggaucgacaucgagggcagacccgaggaccccguggagaucgcccuguaccagcccaugagcggcugcuacauccacuucuucagagagcccaccgaccugaagcaguucaagcaggacgccaaguacagccacggcaucgacgugaccgaccuguuccccgcccagcccggccugaccagcgccgugaucgaggcccugcccagaaacauggugcugaccugccagggcagcgacgacaucaagagacugcuggacagccagggcagaagagacaucaagcugaucgacaucgcccugagcaaggccgacagcagaagauucgagaacgccgugugggaccagugcaaggaccugugccacaugcacaccggcguggugguggagaagaagaagagaggcggcaaggaggagaucaccccccacugcgcccugauggacugcaucauguacgacgccgccgugagcggcggccugaacauccccgugcugagagccgugcugcccagagacaugguguucagaaccagcagccccaagguggugcugugaggacuagucccuguucccagagcccacuuuuuuuucuuuuuuugaaauaaaauagccugucuuucagaucuaaaaaaaaaaaaaaaaaaaaaaaaaaaaaaaaaaaaaaaaaaaaaaaaaaaaaaaaaaaaaaaaaaaaaaaaaaaaaaaaaaaaaaaaaaaaaaaaaaaa

SEQ ID NO: 21389 - RNA, 2028 nt, Artificial Sequence
  mRNA product Design a-2 (A100) comprising derived and/or modified sequence from LASV(LASV254-NIG-2011;Clade II)__AIT17675__SP-IgE_NP(2-569) (opt4)
aggagaguccgcucagccagguugcagaagcggcuuagcguguguccuaaucuucucucugcguguagguaggccugugccgcaaacaagcuuaccauggacuggaccuggauccuguuccugguggccgccgccaccagagugcacagcagcgccagcaaggaggugaagagcuuccuguggacccagagccugagaagagagcugagcggcuacugcagcagcaucaagcugcagguggugaaggacgcccaggcccugcugcacggccuggacuucagcgaggugagcaacgugcagagacugaugagaaagcagaagagagacgacagcgaccugaagagacugagagaccugaaccaggccgugaacaaccugguggagcugaagagcacccagcagaagagcgugcugagagugggcacccugaccagcgacgaccugcugacccuggccgccgaccuggagaagcugaagagcaaggugaucagaaccgagagaccccugagcagcggcguguacaugggcaaccugagcacccagcagcuggagcagagaagagcccugcugaacaugaucggcauggugggcggcgcccagggcacccagcccggcagagacggcguggugagagugugggacgugaagaaccccgaccugcugaacaaccaguucggcaccaugcccagccugacccuggccugccugaccaagcagggccagguggaccugaacgacgccgugcuggcccugaccgaccugggccugaucuacaccgccaaguaccccaacagcagcgaccuggacagacugagccagagccaccccauccugaacaugguggacaccaagaagagcagccugaacaucagcggcuacaacuucagccugggcgccgccgugaaggccggcgccugcaugcuggacggcggcaacaugcuggagaccaucaaggugaccccccagaccauggacggcauccugaagagcauccugaaggugaagaagagccugggcauguucgugagcgacacccccggcgagagaaaccccuacgagaacauccuguacaagaucugccugagcggcgacggcuggcccuacaucgccagcagaaccagcaucgugggcagagccugggagaacaccaucguggaccuggagagcgacggcaagccccagaaggugggcaccgccggcagcaacaagagccugcagagcgccggcuuccccaccggccugaccuacagccagcugaugacccugaaggacagcaugaugcagcuggaccccagcgccaagaccuggaucgacaucgagggcagacccgaggaccccguggagaucgcccuguaccagcccaugagcggcugcuacauccacuucuucagagagcccaccgaccugaagcaguucaagcaggacgccaaguacagccacggcaucgacguggccgaccuguuccccgcccagcccggccugaccagcgccgugaucgaggcccugcccagaaacauggugcugaccugccagggcagcgacgacaucaagagacugcuggacagccagggcagaagagacaucaagcugaucgacaucgcccugagcaaggccgacagcagaagauucgagaacgccgugugggaccagugcaaggaccugugccacaugcacaccggcguggugguggagaagaagaagagaggcggcaaggaggagaucaccccccacugcgcccugauggacugcaucauguacgacgccgccgugagcggcggccugaacauccccgugcugagagccgugcugcccagagacaugguguucagaaccagcagccccaagguggugcugugaggacuagucccuguucccagagcccacuuuuuuuucuuuuuuugaaauaaaauagccugucuuucagaucuaaaaaaaaaaaaaaaaaaaaaaaaaaaaaaaaaaaaaaaaaaaaaaaaaaaaaaaaaaaaaaaaaaaaaaaaaaaaaaaaaaaaaaaaaaaaaaaaaaaa

SEQ ID NO: 21390 - RNA, 2028 nt, Artificial Sequence
  mRNA product Design a-2 (A100) comprising derived and/or modified sequence from LASV(Nig08-04;Clade II)__ADU56611__SP-IgE_NP(2-569) (opt4)
aggagaguccgcucagccagguugcagaagcggcuuagcguguguccuaaucuucucucugcguguagguaggccugugccgcaaacaagcuuaccauggacuggaccuggauccuguuccugguggccgccgccaccagagugcacagcagcgccagcaaggaggugaagagcuuccuguggacccagagccugagaagagagcugagcggcuacugcagcaacaucaagcugcagguggugaaggacgcccaggcccugcugcacggccuggacuucagcgaggugagcaacgugcagagacugaugagaaagcagaagagagacgacggcgaccugaagagacugagagaccugaaccaggccgugaacaaccugguggagcugaagagcacccagcagaagagcgugcugagagugggcacccugaccagcgacgaccugcugacccuggccgccgaccuggagaagcugaagagcaaggugaucagaaccgagagaccccugagcagcggcguguacaugggcaaccugagcacccagcagcuggagcagagaaaggcccugcugagcaugaucggcauggugggcggcgcccagggcacccagcccggcagagacggcguggugagagugugggacgugaagaaccccgaccugcugaacaaccaguucggcaccaugcccagccugacccuggccugccugaccaagcagggccagguggaccugaacgacgccgugcuggcccugaccgaccugggccugaucuacaccgccaaguaccccaacagcagcgaccuggacagacugagccagagccaccccauccugaacaugguggacaccaagaagagcagccugaacaucagcggcuacaacuucagccugggcgccgccgugaaggccggcgccugcaugcuggacggcggcaacaugcuggagaccaucaaggugaccccccagaccauggacggcauccugaagagcauccugaaggugaagagaagccugggcauguucgugagcgacacccccggcgagagaaaccccuacgagaacauccuguacaagaucugccugagcggcgacggcuggcccuacaucgccagcagaaccagcaucgugggcagagccugggagaacaccaccguggaccuggagagcgacggcaagccccagaaggugggcaccgccggcagcaacaagagccugcagagcgccggcuuccccaccggccugaccuacagccagcugaugacccugaaggacagcaugaugcagcuggaccccagcgccaagaccuggaucgacaucgagggcagacccgaggaccccguggagaucgcccuguaccagcccaugagcggcugcuacauccacuucuucagagagcccaccgaccugaagcaguucaagcaggacgccaaguacagccacggcaucgacgugaccgaccuguucagcgcccagcccggccugaccagcgccgugaucgaggcccugcccagaaacauggugcugaccugccagggcagcgacgacaucaagaagcugcuggacagccagggcagaagagacaucaagcugaucgacaucagccugaacaaggccgacagcagaagauucgagaacgccgugugggaccagugcaaggaccugugccacaugcacaccggcguggugguggagaagaagaagagaggcggcaaggaggagaucaccccccacugcgcccugauggacugcaucauguucgacgccgccgugagcggcggccugaacauccccauccugagagccgugcugcccagagacaugguguucagaaccagcagccccaagguggugcugugaggacuagucccuguucccagagcccacuuuuuuuucuuuuuuugaaauaaaauagccugucuuucagaucuaaaaaaaaaaaaaaaaaaaaaaaaaaaaaaaaaaaaaaaaaaaaaaaaaaaaaaaaaaaaaaaaaaaaaaaaaaaaaaaaaaaaaaaaaaaaaaaaaaaa

SEQ ID NO: 21391 - RNA, 2031 nt, Artificial Sequence
  mRNA product Design a-2 (A100) comprising derived and/or modified sequence from LASV(GA391;Clade III)__AAA46284__SP-IgE_NP(2-570) (opt4)
aggagaguccgcucagccagguugcagaagcggcuuagcguguguccuaaucuucucucugcguguagguaggccugugccgcaaacaagcuuaccauggacuggaccuggauccuguuccugguggccgccgccaccagagugcacagcagcgccagcaaggaggugagaagcugccuguggacccagagccugagaagagagcugagcggcuacugcagcaacaucaagcugcagguggugaaggacgcccaggcccugcugcacggccuggacuucagcgaggugagcaacgugcagagacugaugagaaagcagaagagagacgacggcgaccugaagagacugagagaccugaaccaggccgugaacaaccugguggagcugaagagcacccagcagaagagcgugcugagagugggcacccugagcagcgacgaccugcugauccuggccgccgaccuggagaagcugaagagcaaggugaccagaaccgagagaccccugagcagcggcguguacaugggcaaccugagcagccagcagcuggaccagagaagagcccugcugaacaugaucggcaugaccggcgugagcggcggcggcaagggcgccagcaacggcaucgugagagugugggacgugaagaacgccgagcugcugaacaaccaguucggcaccaugcccagccugacccuggccugccugaccaagcagggccagguggaccugaacgacgccgugcaggcccugaccgaccugggccugaucuacaccgccaaguaccccaacagcagcgaccuggacagacugagccagagccaccccauccugaacaugaucgacaccaagaagagcagccugaacaucagcggcuacaacuucagccugggcgccgccgugaaggccggcgccugcaugcuggacggcggcaacaugcuggagaccaucaaggugagcccccagaccauggacggcauccugaagagcauccugaaggugaagaagagccugggcauguucgugagcgacacccccggcgagagaaaccccuacgagaacauccuguacaagaucugccugagcggcgacggcuggagcuacaucgccagcagaaccagcaucgugggcagagccugggagaacaccgugguggaccuggagcaggacaacaagccccagaagaucggcaacggcggcagcaacaagagccugcagagcgccggcuucgccgccggccugaucuacagccagcugaugacccugaaggacuucaagugcuucaaccugauccccaacgccaagaccuggauggacaucgagggcagacccgaggaccccguggagaucgcccuguaccagcccagcagcggcugcuacgugcacuucuucagagagcccaccgaccugaagcaguucaagcaggacgccaaguacagccacggcagagacgugaccgaccuguucgccgcccagcccggccugaccagcgccgugaucgaggcccugcccagaaacauggugaucaccugccagggcagcgaggacaucagaaagcugcuggagagccagggcagaagagacaucaagcugaucgacaucacccugagcaaggccgacagcagaaaguucgagaacgccgugugggaccaguucaaggaccugugccacaugcacaccggcguggugguggagaagaagaagagaggcggcaaggaggagaucaccccccacugcgcccugauggacugcaucauguucgacgccgccgugagcggcggccuggacgccaaggugcugagaguggugcugcccagagacaugguguucagaaccagcacccccaagguggugcugugaggacuagucccuguucccagagcccacuuuuuuuucuuuuuuugaaauaaaauagccugucuuucagaucuaaaaaaaaaaaaaaaaaaaaaaaaaaaaaaaaaaaaaaaaaaaaaaaaaaaaaaaaaaaaaaaaaaaaaaaaaaaaaaaaaaaaaaaaaaaaaaaaaaaa

SEQ ID NO: 21392 - RNA, 2028 nt, Artificial Sequence
  mRNA product Design a-2 (A100) comprising derived and/or modified sequence from LASV(Nig08-A19;Clade III)__ADU56619__SP-IgE_NP(2-569) (opt4)
aggagaguccgcucagccagguugcagaagcggcuuagcguguguccuaaucuucucucugcguguagguaggccugugccgcaaacaagcuuaccauggacuggaccuggauccuguuccugguggccgccgccaccagagugcacagcagcgccagcaaggaggugaagagcuuccuguggacccagagccugagaagagagcugagcggcuacugcagcaacaucaagcugcagguggugaaggacgcccaggcccugcugcacggccuggacuucagcgaggugagcaacgugcagagacugaugagaaagcagaagagagacgacggcgaccugaagagacugagagaccugaaccaggccgugaacaaccugguggagcugaagagcacccagcagaagagcgugcugagagugggcacccugagcagcgacgaccugcuggugcuggccgccgaccuggagaagcugaagagcaagguggugagaaccgagagaccccugagcagcggcaucuacaugggcaaccugagcagccagcagcuggaccagagaaaggcccugcugaacaugaucggcaugaccggcggcaacggcggcagaaacaccaccagcgacggcaucgugagagugugggacgugaagaacgccgagcugcugaacaaccaguucggcaccaugcccagccugacccuggccugccugaccaagcagggccagguggaccugaacgacgccgugcaggcccugaccgaccugggccugaucuacaccgccaaguaccccaacagcagcgaccuggacagacuggcccagagccaccccauccugaacaugaucgacaccaagaagagcagccugaacaucagcggcuacaacuucagccugggcgccgccgugaaggccggcgccugcaugcuggacggcggcaacaugcuggagaccaucaaggugagcccccagaccauggacggcauccugaagagcauccugaaggugaagagaagccugggcauguucaucagcgacacccccggcgagagaaaccccuacgagaacauccuguacaagaucugccugagcggcgacggcuggcccuacaucgccagcagaaccagcaucgugggcagagccugggagaacaccgugguggaccuggagagcgacaacaagccccagaagaccggcaacggcggcagcaacaagagccugcagagcgccggcuucgccgccggccugaccuacagccagcugaugacccugaaggacagcaugcugcagcuggaccccaacgccaagaccuggauggacaucgagggcagacccgaggaccccguggagaucgcccuguaccagcccagcagcggcugcuacauccacuucuucagagagcccaccgaccugaagcaguucaagcaggacgccaaguacagccacggcaucgacgugaccgaccuguucgccgcccagcccggccugaccagcgccgugaucgaggcccugcccagaaacauggugaucaccugccagggcagcgaggacaucagaaagcugcuggagagccagggcagaagagacaucaagcugaucgacaucagccugagcaagguggacagcagaaaguucgagaacgccgugugggaccaguucaaggaccugugccacaugcacaccggcaucgugguggagaagaagaagagaggcggcaaggaggagaucaccccccacugcgcccugauggacugcaucauguucgacgccgccgugagcggcggcguggacgccaaggugcugagagccgugcugcccagagacaugguguucagaaccagcacccccaagguggugcugugaggacuagucccuguucccagagcccacuuuuuuuucuuuuuuugaaauaaaauagccugucuuucagaucuaaaaaaaaaaaaaaaaaaaaaaaaaaaaaaaaaaaaaaaaaaaaaaaaaaaaaaaaaaaaaaaaaaaaaaaaaaaaaaaaaaaaaaaaaaaaaaaaaaaa

SEQ ID NO: 21393 - RNA, 2028 nt, Artificial Sequence
  mRNA product Design a-2 (A100) comprising derived and/or modified sequence from LASV(G1180-SLE-2010;Clade IV)__AIT17169__SP-IgE_NP(2-569) (opt4)
aggagaguccgcucagccagguugcagaagcggcuuagcguguguccuaaucuucucucugcguguagguaggccugugccgcaaacaagcuuaccauggacuggaccuggauccuguuccugguggccgccgccaccagagugcacagcagcgccagcaaggagaucaagagcuuccuguggacccagagccugagaagagagcugagcggcuacugcagcaacaucaagcugcagguggugaaggacgcccaggcccugcugcacggccuggacuucagcgaggugagcaacgugcagagacugaugagaaaggagagaagagacgacaacgaccugaagagacugagagaccugaaccaggccgugaacaaccugguggagcugaagagcacccagcagaagagcauccugagagugggcacccugaccagcgacgaccugcugauccuggccgccgaccuggagaagcugaagagcaaggugaucagaaccgagagaccccugagcgccggcguguacaugggcaaccugagcagccagcagcuggaccagagaagagcccugcugagcaugaucggcaugagcagcggcaaccagagagcccaggccggcagagacggcguggugagagugugggacgugaagaacguggagcugcugaacaaccaguucggcaccaugcccagccugacccuggccugccugaccaagcagggccagguggaccugaacgacgccgugcaggcccugaccgaccugggccugaucuacaccgccaaguaccccaacaccagcgaccuggacagacugacccagagccaccccauccugaacaugaucgacaccaagaagagcagccugaacaucagcggcuacaacuucagccugggcgccgccgugaaggccggcgccugcaugcuggacggcggcaacaugcuggagaccaucaaggugagcccccagaccauggacggcauccugaagagcauccugaaggugaagaaggcccugggcauguucaucagcgacacccccggcgagagaaaccccuacgagaacauccuguacaagaucugccugagcggcgacggcuggcccuacaucgccagcagaaccagcaucaccggcagagccugggagaacaccgugguggaccuggagagcgacggcaagccccagaaggccggcagcaacaacagcaacaagagccugcagagcgugggcuucaccgccggccugaccuacagccagcugaugacccugaaggacgccaugcugcagcuggaccccaacgccaagaccuggauggacaucgagggcagacccgaggaccccguggagaucgcccuguaccagcccagcagcggcugcuacauccacuucuucagagagcccaccgaccugaagcaguucaagcaggacgccaaguacagccacggcaucgacgugaccgaccuguucgccgcccagcccggccugaccagcgccgugaucgacgcccugcccagaaacauggugaucaccugccagggcagcgacgacaucagaaagcugcuggagagccagggcagaaaggacaucaagcugaucgacaucgcccugagcaagaccgacagcagaaaguacgagaacgccgugugggaccaguacaaggaccugugccacaugcacaccggcguggugguggagaagaagaagagaggcggcaaggaggagaucaccccccacugcgcccugauggacugcaucauguucgacgccgccgugagcggcggccugaacaccagcgugcugagagccgugcugcccagagacaugguguucagaaccagcacccccagaguggugcugugaggacuagucccuguucccagagcccacuuuuuuuucuuuuuuugaaauaaaauagccugucuuucagaucuaaaaaaaaaaaaaaaaaaaaaaaaaaaaaaaaaaaaaaaaaaaaaaaaaaaaaaaaaaaaaaaaaaaaaaaaaaaaaaaaaaaaaaaaaaaaaaaaaaaa

SEQ ID NO: 21394 - RNA, 2028 nt, Artificial Sequence
  mRNA product Design a-2 (A100) comprising derived and/or modified sequence from LASV(G1442-SLE-2011;Clade IV)__AIT17181__SP-IgE_NP(2-569) (opt4)
aggagaguccgcucagccagguugcagaagcggcuuagcguguguccuaaucuucucucugcguguagguaggccugugccgcaaacaagcuuaccauggacuggaccuggauccuguuccugguggccgccgccaccagagugcacagcagcgccagcaaggaggugaagagcuuccuguggacccagagccugagaagagagcugagcggcuacugcagcaacaucaagcugcagguggugaaggacgcccaggcccugcugcacggccuggacuucagcgaggugagcaacgugcagagacugaugagaaagcagagaagagacgacaacgaccugaagagacugagagaccugaaccaggccgugaacaaccugguggagcugaagagcacccagcagaagagcgugcugagagugggcacccugaccagcgacgaccugcuggugcuggccgccgaccuggagaagcugaagagcaaggugaucagaaccgagagaccccugagcgccggcguguacaugggcaaccugagcagccagcagcuggaccagagaagagcccugcugaacaugaucggcaugagcggcggcauccagggcaccagaaccggcagagacggcguggugagagugugggacgugaagaacgccgaccugcugaacaaccaguucggcaccaugcccagccugacccuggccugccugaccaagcagggccagguggaccugaacgacguggugcaggcccugaccgaccugggccugaucuacaccgccaaguaccccaacgccagcgaccuggacagacugacccagagccaccccauccugaacaugaucgacaccaagaagagcagccugaacaucagcggcuacaacuucagccugggcgccgccgugaaggccggcgccugcaugcuggacggcggcaacaugcuggagaccaucaaggugagcccccagaccauggacggcauccugaagagcauccugaaggugaagaagacccugggcauguucaucagcgacacccccggcgagagaaaccccuacgagaacauccuguacaagaucugccugagcggcgacggcuggcccuacaucgccagcagaaccagcaucaccggcagagccugggagaacaccgugguggaccuggagagcgacggcaagccccagaaggccggcagcaacaacagcaacaagagccugcagagcgccggcuucgccgccggccugaccuacagccagcugaugacccugaaggacgccaugcugcagcuggaccccaacgccaagaccuggauggacaucgagggcagacccgaggaccccguggagaucgcccuguaccagcccagcagcggcugcuacauccacuucuucagagagcccaccgaccugaagcaguucaagcaggacgccaaguacagccacggcaucgacgugaccgaccuguucgccgcccagcccggccugaccagcgccgugaucgaggcccugcccagaaacauggugaucaccugccagggcagcgacgacaucaagaagcugcuggagagccagggcagaaaggacaucaagcugaucgacaucgcccugagcaagaccgacagcagaaaguacgagaacgccgugugggaccaguacaaggaccugugccacaugcacaccggcguggugguggagaagaagaagagaggcggcaaggaggagaucaccccccacugcgcccugauggacugcaucauguucgacgccgccgugagcggcggccugaacacccuggugcugagagccgugcugcccagagacaugguguucagaaccagcacccccagaguggugcugugaggacuagucccuguucccagagcccacuuuuuuuucuuuuuuugaaauaaaauagccugucuuucagaucuaaaaaaaaaaaaaaaaaaaaaaaaaaaaaaaaaaaaaaaaaaaaaaaaaaaaaaaaaaaaaaaaaaaaaaaaaaaaaaaaaaaaaaaaaaaaaaaaaaaa

SEQ ID NO: 21395 - RNA, 2028 nt, Artificial Sequence
  mRNA product Design a-2 (A100) comprising derived and/or modified sequence from LASV(G3010-SLE-2013;Clade IV)__AIT17345__SP-IgE_NP(2-569) (opt4)
aggagaguccgcucagccagguugcagaagcggcuuagcguguguccuaaucuucucucugcguguagguaggccugugccgcaaacaagcuuaccauggacuggaccuggauccuguuccugguggccgccgccaccagagugcacagcagcgccagcaaggagaucaagagcuuccuguggacccagagccugagaagagagcugagcggcuacugcagcaacaucaagcugcagguggugaaggacgcccaggcccugcugcacggccuggacuucagcgaggugagcaacgugcagagacugaugagaaaggagagaagagacgacaacgaccugaagagacugagagaccugaaccaggccgugaacaaccugguggagcugaagagcacccagcagaagagcauccugagagugggcacccugaccagcgacgaccugcugauccuggccgccgaccuggagaagcugaagagcaaggugaccagaaccgagagaccccugagcgccggcguguacaugggcaaccugagcagccagcagcuggaccagagaagagcccugcugagcaugaucggcaugagcagcggcgugcagggcgccagagccggcagagacggcguggugagagugugggacgugaagaacgccgagcugcugaacaaccaguucggcaccaugcccagccugacccuggccugccugaccaagcagggccagguggaccugaacgacguggugcaggcccugaccgaccugggccugaucuacaccgccaaguaccccaacaccagcgaccuggacagacugacccagagccaccccauccugaacaugaucgacaccaagaagagcagccugaacaucagcggcuacaacuucagccugggcgccgccgugaaggccggcgccugcaugcuggacggcggcaacaugcuggagaccaucaaggugagcccccagaccauggacggcauccugaagagcauccugaaggugaagaaggcccugggcauguucaucagcgagacccccggcgagagaaaccccuacgagaacauccuguacaagaucugccugagcggcgacggcuggcccuacaucgccagcagaaccagcaucaccggcagagccugggagaacaccgugguggaccuggagagcgacggcaagccccagaaggccggcagcaacaacagcaacaagagccugcagagcgccggcuucaccgccggccugaccuacagccagcugaugacccugaaggacgccaugcugcagcuggaccccaacgccaagaccuggauggacaucgagggcagacccgaggaccccguggagguggcccuguaccagcccagcagcggcugcuacauccacuucuucagagagcccaccgaccugaagcaguucaagcaggacgccaaguacagccacggcaucgacgugaccgaccuguucgccgcccagcccggccugaccagcgccgugaucgacgcccugcccagaaacauggugaucaccugccagggcagcgacgacaucaagaagcugcuggagagccagggcagaaaggacaucaagcugaucgacaucgcccugagcaagaccgacagcagaaaguacgagaacgccgugugggaccaguacaaggaccugugccacaugcacaccggcguggugguggagaagaagaagagaggcggcaaggaggagaucaccccccacugcgcccugauggacugcaucauguucgacgccgccgugagcggcggccugaacaccagcgugcugagagccgugcugcccagagacaugguguucagaaccagcacccccagaguggugcugugaggacuagucccuguucccagagcccacuuuuuuuucuuuuuuugaaauaaaauagccugucuuucagaucuaaaaaaaaaaaaaaaaaaaaaaaaaaaaaaaaaaaaaaaaaaaaaaaaaaaaaaaaaaaaaaaaaaaaaaaaaaaaaaaaaaaaaaaaaaaaaaaaaaaa

SEQ ID NO: 21396 - RNA, 2028 nt, Artificial Sequence
  mRNA product Design a-2 (A100) comprising derived and/or modified sequence from LASV(G502-SLE-2009;Clade IV)__AIT17127__SP-IgE_NP(2-569) (opt4)
aggagaguccgcucagccagguugcagaagcggcuuagcguguguccuaaucuucucucugcguguagguaggccugugccgcaaacaagcuuaccauggacuggaccuggauccuguuccugguggccgccgccaccagagugcacagcagcgccagcaaggagaucaagagcuuccuguggacccagagccugagaagagagcugagcggcuacugcagcaacaucaagcugcagguggugaaggacgcccaggcccugcugcacggccuggacuucagcgaggugagcaacgugcagagacugaugagaaaggagagaagagacgacaacgaccugaagagacugagagaccugaaccaggccgugaacaaccugguggagcugaagagcacccagcagaagagcauccugagagugggcacccugaccagcgacgaccugcugauccuggccgccgaccuggagaagcugaagagcaaggugaucagaaccgagagaccccugagcgccggcguguacaugggcaaccugagcagccagcagcuggaccagagaagagcccugcugagcaugaucggcaugagcggcggcaaccagggcgugagagccggcaaggacggcguggugagagugugggacgugaagaacgccgagcugcugaacaaccaguucggcaccaugcccagccugacccuggccugccugaccaagcagggccagguggaccugaacgacgccgugcaggcccugaccgaccugggccugaucuacaccgccaaguaccccaacaccagcgaccuggacagacugacccagagccaccccauccugaacaugaucgacaccaagaagagcagccugaacaucagcggcuacaacuucagccugggcgccgccgugaaggccggcgccugcaugcuggacggcggcaacaugcuggagaccaucaaggugagcccccagaccauggacggcauccugaagagcauccugaaggugaagaaggcccugggcauguucaucagcgacacccccggcgagagaaaccccuacgagaacauccuguacaagaucugccugagcggcgacggcuggcccuacaucgccagcagaaccagcaucaccggcagagccugggagaacaccgugguggaccuggagagcgacggcaagccccagaaggccggcagcaacaacagcaacaagagccugcagagcgccggcuucaccgccggccugaccuacagccagcugaugacccugaaggacgccaugcugcagcuggaccccaacaccaagaccuggauggacaucgagggcagacccgaggaccccguggagaucgcccuguaccagcccagcagcggcugcuacauccacuucuucagagagcccaccgaccugaagcaguucaagcaggacgccaaguacagccacggcaucgacgugaccgaccuguucgccgcccagcccggccugaccagcgccgugaucgacgcccugcccagaaacauggugaucaccugccagggcagcgacgacaucagaaagcugcuggagagccagggcagaaaggacaucaagcugaucgacaucgcccugaacaagaccgacagcagaaaguacgagaacgccgugugggaccaguacaaggaccugugccacaugcacaccggcguggugguggagaagaagaagagaggcggcaaggaggagaucaccccccacugcgcccugauggacugcaucauguucgacgccgccgugagcggcggccugaacaccagcgugcugagagccgugcugcccagagacaugguguucagaaccagcacccccagaguggugcugugaggacuagucccuguucccagagcccacuuuuuuuucuuuuuuugaaauaaaauagccugucuuucagaucuaaaaaaaaaaaaaaaaaaaaaaaaaaaaaaaaaaaaaaaaaaaaaaaaaaaaaaaaaaaaaaaaaaaaaaaaaaaaaaaaaaaaaaaaaaaaaaaaaaaa

SEQ ID NO: 21397 - RNA, 2028 nt, Artificial Sequence
  mRNA product Design a-2 (A100) comprising derived and/or modified sequence from LASV(G733-SLE-2010;Clade IV)__AIT17155__SP-IgE_NP(2-569) (opt4)
aggagaguccgcucagccagguugcagaagcggcuuagcguguguccuaaucuucucucugcguguagguaggccugugccgcaaacaagcuuaccauggacuggaccuggauccuguuccugguggccgccgccaccagagugcacagcagcgccagcaaggagaucaagagcuuccuguggacccagagccugagaagagagcugagcggcuacugcagcaacaucaagcugcagguggugaaggacgcccaggcccugcugcacggccuggacuucagcgaggugagcaacgugcagagacugaugagaaaggagagaagagacgacaacgaccugaagagacugagagaccugaaccaggccgugaacaaccugguggagcugaagagcacccagcagaagagcgugcugagagugggcacccugaccagcgacgagcugcuggugcuggccgccgaccuggagaagcugaagagcaaggugaucagaaccgagagaccccugagcgccggcguguacaugggcaaccugagcagccagcagcuggaccagagaagagcccugcugagcaugaucggcaugagcggcggcaaccagggcgccagaaccggcagagacggcguggugagagugugggacgugaagaacgccgagcugcugaacaaccaguucggcaccaugcccagccugacccuggccugccugaccaagcagggccagguggaccugaacgacgccgugcaggcccugaccgaccugggccugaucuacaccgccaaguaccccaacaccagcgaccuggacagacugacccagagccaccccauccugaacaugaucgacaccaagaagagcagccugaacaucagcggcuacaacuucagccugggcgccgccgugaaggccggcgccugcaugcuggacggcggcaacaugcuggagaccaucaaggugagcccccagaccauggacggcauccugaagagcauccugaaggugaagaaggcccugggcauguucaucagcgacacccccggcgagagaaaccccuacgagaacauccuguacaagaucugccugagcggcgacggcuggcccuacaucgccagcagaaccagcaucaccggcagagccugggagaacaccgugguggaccuggagagcgacggcaagccccagaaggccggcagcaacaacagcaacaagagccugcagagcgccggcuucaccgccggccugaccuacagccagcugaugacccugaaggacgccaugcugcagcuggaccccaacgccaagaccuggauggacaucgagggcagacccgaggaccccguggagaucgcccuguaccagcccagcagcggcugcuacauccacuucuucagagagcccaccgaccugaagcaguucaagcaggacgccaaguacagccacggcaucgacgugaccgaccuguucgccgcccagcccggccugaccagcgccgugaucgacgcccugcccagaaacauggugaucaccugccagggcagcgacgacaucagaaagcugcuggagagccagggcagaaaggacaucaagcugaucgacaucgcccugagcaagaucgacagcagaaaguacgagaacgccgugugggaccaguacaaggaccugugccacaugcacaccggcguggugguggagaagaagaagagaggcggcaaggaggagaucaccccccacugcgcccugauggacugcaucauguucgacgccgccgugagcggcggccugaacagccuggugcugagagccgugcugcccagagacaugguguucagaaccagcacccccagaguggugcugugaggacuagucccuguucccagagcccacuuuuuuuucuuuuuuugaaauaaaauagccugucuuucagaucuaaaaaaaaaaaaaaaaaaaaaaaaaaaaaaaaaaaaaaaaaaaaaaaaaaaaaaaaaaaaaaaaaaaaaaaaaaaaaaaaaaaaaaaaaaaaaaaaaaaa

SEQ ID NO: 21398 - RNA, 2028 nt, Artificial Sequence
  mRNA product Design a-2 (A100) comprising derived and/or modified sequence from MOPV/LASV reassortant(IGS-1;Clade IV)__AFY05578__SP-IgE_NP(2-569) (opt4)
aggagaguccgcucagccagguugcagaagcggcuuagcguguguccuaaucuucucucugcguguagguaggccugugccgcaaacaagcuuaccauggacuggaccuggauccuguuccugguggccgccgccaccagagugcacagcagcgccagcaaggagaucaagagcuuccuguggacccagagccugagaagagagcugagcggcuacugcagcaacaucaagcugcagguggugaaggacgcccaggcccugcugcacggccuggacuucagcgaggugagcaacgugcagagacugaugagaaaggagagaagagacgacaacgaccugaagagacugagagaccugaaccaggccgugaacaaccugguggagcugaagagcacccagcagaagagcauccugagagugggcacccugaccagcgacgaccugcugauccuggccgccgaccuggagaagcugagaagcaaggugaucagaaccgagagaccccugagcgccggcguguacaugggcaaccugagcagccagcagcuggaccagagaagagcccugcugaacaugaucggcaugagcggcggcaaccagggcgccagagccggcagagacggcguggugagagugugggacgugaagaacgccgagcugcugagcaaccaguucggcaccaugcccagccugacccuggccugccugaccaagcagggccagguggaccugaacgacgccgugcaggcccugaccgaccugggccugaucuacaccgccaaguaccccaacaccagcgaccuggacagacugacccagagccaccccauccugaacaugaucgacaccaagaagagcagccugaacaucagcggcuacaacuucagccugggcgccgccgugaaggccggcgccugcaugcuggacggcggcaacaugcuggagaccaucaaggugagcccccagaccauggacggcauccugaagagcauccugaaggugaagaaggcccugggcauguucaucagcgacacccccggcgagagaaaccccuacgagaacauccuguacaagaucugccugagcggcgacggcuggcccuacaucgccagcagaaccagcaucaccggcagagccugggagaacaccgugguggaccuggagagcgacggcaagccccagaaggccgacagcaacaacagcagcaagagccugcagagcgccggcuucaccgccggccugaccuacagccagcugaugacccugaaggacgccaugcugcagcuggaccccaacgccaagaccuggauggacaucgagggcagacccgaggaccccguggagaucgcccuguaccagcccagcagcggcugcuacauccacuucuucagagagcccaccgaccugaagcaguucaagcaggacgccaaguacagccacggcaucgacgugaccgaccuguucgccacccagcccggccugaccagcgccgugaucgacgcccugcccagaaacauggugaucaccugccagggcagcgacgacaucagaaagcugcuggagagccagggcagaaaggacaucaagcugaucgacaucgaccugagcaagaccgacagcagaaaguacgagaacgccgugugggaccaguacaaggaccugugccacaugcacaccggcguggugguggagaagaagaagagaggcggcaaggaggagaucaccccccacugcgcccugauggacugcaucauguucgacgccgccgugagcggcggccugaacaccagcgugcugagagccgugcugcccagagacaugguguucagaaccagcacccccagaguggugcugugaggacuagucccuguucccagagcccacuuuuuuuucuuuuuuugaaauaaaauagccugucuuucagaucuaaaaaaaaaaaaaaaaaaaaaaaaaaaaaaaaaaaaaaaaaaaaaaaaaaaaaaaaaaaaaaaaaaaaaaaaaaaaaaaaaaaaaaaaaaaaaaaaaaaa

SEQ ID NO: 21399 - RNA, 2028 nt, Artificial Sequence
  mRNA product Design a-2 (A100) comprising derived and/or modified sequence from LASV(LM765-SLE-2012;Clade IV)__AIT17815__SP-IgE_NP(2-569) (opt4)
aggagaguccgcucagccagguugcagaagcggcuuagcguguguccuaaucuucucucugcguguagguaggccugugccgcaaacaagcuuaccauggacuggaccuggauccuguuccugguggccgccgccaccagagugcacagcagcgccagcaaggagaucaagagcuuccuguggacccagagccugagaagagagcugagcggcuacugcagcaacaucaagcugcagguggugaaggacgcccaggcccugcugcacggccuggacuucagcgaggugagcaacgugcagagacugaugagaaaggagagaagagacgacaacgaccugaagagacugagagaccugaaccaggccgugaacaaccugguggagcugaagagcacccagcagaagagcauccugagagugggcacccugaccagcgacgaccugcugauccuggccgccgaccuggagaagcugaagagcaaggugaccagaaccgagagaccccugagcgccggcguguacaugggcaaccugagcagccagcagcuggaccagagaagagcccugcuggacaugaucggcaugagcggcagcaaccagggcgccagagccggcagagacggcguggugagagugugggacgugaagaacgccgagcugcugaacaaccaguucggcaccaugcccagccugacccuggccugccugaccaagcagggccagguggaccugaacgacgccgugcaggcccugaccgaccugggccugaucuacaccgccaaguaccccaacaccagcgaccuggacagacugacccagagccaccccauccugaacaugaucgacaccaagaagagcagccugaacaucagcggcuacaacuucagccugggcgccgccgugaaggccggcgccugcaugcuggacggcggcaacaugcuggagaccaucaaggugagcccccagaccauggacggcauccugaagagcauccugaaggugaagaaggcccugggcauguucaucagcgacgcccccggcgagagaaaccccuacgagaacauccuguacaagaucugccugagcggcgacggcuggcccuacaucgccagcagaaccagcaucaccggcagagccugggagaacaccgugguggaccuggagagcgacggcaagccccagaaggccggcagcaacggcagcaacaagagccugcagagcgccggcuucaccgccggccugaccuacagccagcugaugacccugaaggacgccaugcugcagcuggaccccaacgccaagaccuggauggacaucgagggcagacccgaggaccccguggagaucgcccuguaccagcccagcagcggcugcuacauccacuucuucagagagcccaccgaccugaagcaguucaagcaggacgccaaguacagccacggcaucgacgugaccgaccuguucgccgcccagcccggccugaccagcgccgugaucgacgcccugcccagaaacauggugaucaccugccagggcagcgacgacaucagaaagcuguucgagagccagggcagaaaggacaucaagcugaucgacaucgcccugagcaagaccgacagcagaaaguacgagaacgccgugugggaccaguacaaggaccugugccacaugcacaccggcaucgugguggagaagaagaagagaggcggcaaggaggagaucaccccccacugcgcccugauggacugcaucauguucgacgccgccgugagcggcggccugaacaccagcgugcugagagccgugcugcccagagacaugguguucagaaccagcacccccagaguggugcugugaggacuagucccuguucccagagcccacuuuuuuuucuuuuuuugaaauaaaauagccugucuuucagaucuaaaaaaaaaaaaaaaaaaaaaaaaaaaaaaaaaaaaaaaaaaaaaaaaaaaaaaaaaaaaaaaaaaaaaaaaaaaaaaaaaaaaaaaaaaaaaaaaaaaa

SEQ ID NO: 21400 - RNA, 2028 nt, Artificial Sequence
  mRNA product Design a-2 (A100) comprising derived and/or modified sequence from LASV(LM776-SLE-2012;Clade IV)__AIT17825__SP-IgE_NP(2-569) (opt4)
aggagaguccgcucagccagguugcagaagcggcuuagcguguguccuaaucuucucucugcguguagguaggccugugccgcaaacaagcuuaccauggacuggaccuggauccuguuccugguggccgccgccaccagagugcacagcagcgccagcaaggagaucaagagcuuccuguggacccagagccugagaagagagcugagcagcuacugcagcaacaucaagcugcagguggugaaggacgcccaggcccugcugcacggccuggacuucagcgaggugagcaacgugcagagacugaugagaaaggagagaagagacgacaacgaccugaagagacugagagaccugaaccaggccgugaacaaccugguggagcugaagagcacccagcagaagagcauccugagagugggcacccugaccagcgacgaccugcugauccuggccgccgaccuggagaagcugaagagcaaggugaccagaaccgagagaccccugagcgccggcguguacaugggcaaccugagcagccagcagcuggaccagagaagagcccugcugagcaugaucggcaugagcggcagcaaccagggcgccagagccggcagagacggcguggugagagugugggacgugaagaacgccgagcugcugaacaaccaguucggcaccaugcccagccugacccuggccugccugaccaagcagggccagguggaccugaacgacgccgugcaggcccugaccgaccugggccugaucuacaccgccaaguaccccaacaccagcgaccuggacagacugacccagagccaccccauccugaacaugaucgacaccaagaagagcagccugaacaucagcggcuacaacuucagccugggcgccgccgugaaggccggcgccugcaugcuggacggcggcaacaugcuggagaccaucaaggugagcccccagaccauggacggcauccugaagagcauccugaaggugaagaaggcccugggcauguucaucagcgacacccccggcgagagaaaccccuacgagaacauccuguacaagaucugccugagcggcgacggcuggcccuacaucgccagcagaaccagcaucaccggcagagccugggagaacaccgugguggaccuggagagcgacggcaagccccagaaggccggcagcaacaacagcaacaagagccugcagagcgccggcuucaccgccggccugaccuacagccagcugaugacccugaaggacgccaugcugcagcuggaccccaacgccaagaccuggauggacaucgagggcagacccgaggaccccguggagguggcccuguaccagcccagcagcggcugcuacauccacuucuucagagagcccaccgaccugaagcaguucaagcaggacgccaaguacagccacggcaucgacgugaccgaccuguucgccgcccagcccggccugaccagcgccgugaucgacgcccugcccagaaacauggugaucaccugccagggcagcgacgacaucagaaagcugcuggagagccagggcagaaaggacaucaagcugaucgacaucgcccugagcaagaccgacagcagaaaguacgagaacgccgugugggaccaguacaaggaccugugccacaugcacaccggcguggugguggagaagaagaagagaggcggcaaggaggagaucaccccccacugcgcccugauggacugcaucauguucgacgccgccgugagcggcggccugaacaccagcgugcugagagccgugcugcccagagacaugguguucagaaccagcacccccagaguggugcugugaggacuagucccuguucccagagcccacuuuuuuuucuuuuuuugaaauaaaauagccugucuuucagaucuaaaaaaaaaaaaaaaaaaaaaaaaaaaaaaaaaaaaaaaaaaaaaaaaaaaaaaaaaaaaaaaaaaaaaaaaaaaaaaaaaaaaaaaaaaaaaaaaaaaa

SEQ ID NO: 21401 - RNA, 2028 nt, Artificial Sequence
  mRNA product Design a-2 (A100) comprising derived and/or modified sequence from LASV(Mad39;Clade IV)__ANH09723__SP-IgE_NP(2-569) (opt4)
aggagaguccgcucagccagguugcagaagcggcuuagcguguguccuaaucuucucucugcguguagguaggccugugccgcaaacaagcuuaccauggacuggaccuggauccuguuccugguggccgccgccaccagagugcacagcagcgccagcaaggagaucaagagcuuccuguggacccagagccugagaagagagcugagcggcuacugcagcaacaucaagcugcagguggugaaggacgcccaggcccugcugcacggccuggacuucagcgaggugagcaacgugcagagacugaugagaaagcagagaagagacgacaacgaccugaagagacugagagaccugaaccaggccgugaacaaccugguggagcugaagagcacccagcagaagagcgugcugagagugggcacccugaccagcgacgaccugcugacccuggccgccgaccuggagaagcugaagagcaaggugaccagaaccgagagaccccugaccgccggcguguacaugggcaaccugagcagccagcagcuggaccagagaagagcccugcugaacaugaucggcaugagcggcggcaaccagggcgccagaaccggcagagacggcguggugagagugugggacgugaagaacgccgagcugcugaacaaccaguucggcaccaugcccagccugacccuggccugccugaccaagcagggccagguggaccugaacgacguggugcaggcccugaccgaccugggccugaucuacaccgccaaguaccccaacaccagcgaccuggacagacugacccagagccaccccauccugaacaugaucgacaccaacaagagcagccugaacaucagcggcuacaacuucagccugggcgccgccgugaaggccggcgccugcaugcuggacggcggcaacaugcuggagaccaucaaggugagcccccagaccauggacggcauccugaagagcauccugaaggugaagaagagccugggcauguucaucagcgacacccccggcgagagaaaccccuacgagaacauccuguacaagaucugccugagcggcgacggcuggcccuacaucgccagcagaaccagcaucaccggcagagccugggagaacaccgugguggaccuggagagcggcggcaagccccagaaggccggcagcaacaacagcaacaagagccugcagagcgccggcuucgccgccggccugaccuacagccagcugaugacccugaaggacgccaugcugcagcuggaccccaacgccaagaccuggauggacaucgagggcagacccgaggaccccguggagaucgcccuguaccagcccaucagcggcugcuacauccacuucuucagagagcccaccgaccugaagcaguucaagcaggacgccaaguacagccacggcaucgacgugaccgaccuguucgccgcccagcccggccugaccagcgccgugaucgaggcccugcccagaaacauggugaucaccugccagggcagcgacgacaucagaaagcuguucgagagccagggcagaaaggacaucaagcugaucgacaucgcccugagcaagaccgacagcagaaaguacgagaacgccgugugggaccaguacaaggaccugugccacaugcacaccggcguggugguggagaagaagaagaagggcggcaaggaggagaucaccccccacugcgcccugauggacugcaucauguucgacgccgccgugagcggcggccugaacacccuggugcugagagccgugcugcccagagacaugguguucagaaccagcacccccaagguggugcugugaggacuagucccuguucccagagcccacuuuuuuuucuuuuuuugaaauaaaauagccugucuuucagaucuaaaaaaaaaaaaaaaaaaaaaaaaaaaaaaaaaaaaaaaaaaaaaaaaaaaaaaaaaaaaaaaaaaaaaaaaaaaaaaaaaaaaaaaaaaaaaaaaaaaa

SEQ ID NO: 21402 - RNA, 2028 nt, Artificial Sequence
  mRNA product Design a-2 (A100) comprising derived and/or modified sequence from LASV(Z0947-SLE-2011;Clade IV)__AIT17841__SP-IgE_NP(2-569) (opt4)
aggagaguccgcucagccagguugcagaagcggcuuagcguguguccuaaucuucucucugcguguagguaggccugugccgcaaacaagcuuaccauggacuggaccuggauccuguuccugguggccgccgccaccagagugcacagcagcgccagcaaggagaucaagagcuuccuguggacccagagccugagaagagagcugagcggcuacugcagcaacaucaagcugcagguggugaaggacgcccaggcccugcugcacggccuggacuucagcgaggugagcaacgugcagagacugaugagaaaggagagaagagacgacaacgaccugaagagacugagagaccugaaccaggccgugaacaaccugguggagcugaagagcacccagcagaagagcauccugagagugggcacccugaccagcgacgaccugcugauccuggccgccgaccuggagaagcugaagagcaaggugaccagaaccgagagaccccugagcgccggcguguacaugggcaaccugagcagccagcagcuggaccagagaagagcccugcugaacaugaucggcaugagcggcagcaaccagggcgccagaaccggcagagacggcguggugagagugugggacgugaagaacgccgagcugcugaacaaccaguucggcaccaugcccagccugacccuggccugccugaccaagcagggccagguggaccugaacgacgccgugcaggcccugaccgaccugggccugaucuacaccgccaaguaccccaacaccagcgaccuggacagacugacccagagccaccccauccugaacaugaucgacaccaagaagagcagccugaacaucagcggcuacaacuucagccugggcgccgccgugaaggccggcgccugcaugcuggacggcggcaacaugcuggagaccaucaaggugagcccccagaccauggacggcauccugaagagcauccugaaggugaagaaggcccugggcauguucaucagcgacgcccccggcgagagaaaccccuacgagaacauccuguacaagaucugccugagcggcgacggcuggcccuacaucgccagcagaaccagcaucaccggcagagccugggagaacaccgugguggaccuggagagcgacggcaagccccagaaggccggcagcaacggcagcaacaagagccugcagagcgccggcuucaccgccggccugaccuacagccagcugaugacccugaaggacgccaugcugcagcuggaccccaacgccaagaccuggauggacaucgagggcagacccgaggaccccguggagaucgcccuguaccagcccagcagcggcugcuacauccacuucuucagagagcccaccgaccugaagcaguucaagcaggacgccaaguacagccacggcaucgacgugaccgaccuguucgccgcccagcccggccugaccagcgccgugaucgacgcccugcccagaaacauggugaucaccugccagggcagcgacgacaucagaaagcuguucgagagccagggcagaaaggacaucaagcugaucgacaucgcccugagcaagaccgacagcagaaaguacgagaacgccgugugggaccaguacaaggaccugugccacaugcacaccggcaucgugguggagaagaagaagagaggcggcaaggaggagaucaccccccacugcgcccugauggacugcaucauguucgacgccgccgugagcggcggccugaacaccagcgugcugagagccgugcugcccagagacaugguguucagaaccagcacccccagaguggugcugugaggacuagucccuguucccagagcccacuuuuuuuucuuuuuuugaaauaaaauagccugucuuucagaucuaaaaaaaaaaaaaaaaaaaaaaaaaaaaaaaaaaaaaaaaaaaaaaaaaaaaaaaaaaaaaaaaaaaaaaaaaaaaaaaaaaaaaaaaaaaaaaaaaaaa

SEQ ID NO: 21403 - RNA, 2028 nt, Artificial Sequence
  mRNA product Design a-2 (A100) comprising derived and/or modified sequence from LASV(Josiah;Clade IV)__NP_694869__SP-IgE_NP(2-569) (opt5)
aggagaguccgcucagccagguugcagaagcggcuuagcguguguccuaaucuucucucugcguguagguaggccugugccgcaaacaagcuuaccauggacuggaccuggauccuguuccucguggccgcugccacaagaguccacagcagcgccuccaaggagaucaaaucuuuccuguggacccagagccucagacgggaacuguccggcuacugcucuaacauuaagcugcaaguggucaaagacgcucaggcccugcuccacgggcuggauuuuagcgagguuuccaaugugcagcgccuuaugagaaaggaacggcgcgacgauaacgaccugaaaagacuccgggaucugaaucaggcggugaacaaucuggucgagcucaagucuacacaacaaaagagcauccugcgcgugggaacgcuuaccuccgacgaucugcucauucuggcugccgaccuugaaaaacuuaagagcaaaguuaucagaacagagcggccccucucugccggcguguauauggggaaccuguccagccagcagcuggaucagcgcagagcucuccugaauaugauuggaaugucuggcgggaaccagggagcccgggcuggccgcgacggcgucgugagaguuugggaugugaagaaugccgagcuucugaacaaucaguucgggaccaugccuucccucacacuggcgugucuuaccaaacagggacaagucgaccugaacgaugccgugcaggcucucacagaccugggccugaucuacaccgccaaguauccgaauacgagcgaccucgaucggcugacccagucucaucccauccuuaacaugauugacacaaagaaauccagccugaauaucuccggguacaacuuuucucucggagcugccgugaaggcgggcgccugcaugcuggaugggggaaacaugcuugaaaccauuaaagucagcccucaaacaauggacggcauccugaaguccauucucaaaguuaagaaagcucugggcauguucaucagcgauacccccggggagcgcaauccuuaugaaaacauucuguacaagaucugucucucuggagacggcuggcccuauaucgccuccagaacgagcauuacagggcgggcuugggagaauaccgugguggaucuggagucugacggaaagccucagaaagccgauagcaacaauuccucuaagagccuucaguccgccggcuuuacagcugggcugaccuacagccagcucaugacccugaaagacgcgaugcugcaacuugauccgaacgccaagacauggauggacaucgaaggaagacccgaggacccugucgaaauugcucucuaccagcccucuuccggcugcuauauccacuucuuucgcgagccuacggaucugaaacaguucaagcaggacgccaaguacagccauggcauugaugugaccgaccuguuugccacacaacccgggcucaccucugcuguuaucgaugcccugccgcggaauauggugaucacaugucagggauccgacgauauuagaaaacuucuggaaagccagggccgcaaggacaucaaacucauugauaucgcgcuguccaagaccgacucucggaaauaugagaacgcugucugggaucaguacaaggaccugugccacaugcauacgggggugguuguggagaagaaaaagagaggaggcaaagaagagauuacaccucacugugcccuuauggauugcaucauguucgacgccgcugucagcgggggccucaauaccuccgugcugcgcgccguccugccccgggacaugguguuuagaaccucuacaccucgcguugugcucugaggacuagucccuguucccagagcccacuuuuuuuucuuuuuuugaaauaaaauagccugucuuucagaucuaaaaaaaaaaaaaaaaaaaaaaaaaaaaaaaaaaaaaaaaaaaaaaaaaaaaaaaaaaaaaaaaaaaaaaaaaaaaaaaaaaaaaaaaaaaaaaaaaaaa

SEQ ID NO: 21404 - RNA, 2028 nt, Artificial Sequence
  mRNA product Design a-2 (A100) comprising derived and/or modified sequence from LASV(LP;Clade I)__AAF86702__SP-IgE_NP(2-569) (opt5)
aggagaguccgcucagccagguugcagaagcggcuuagcguguguccuaaucuucucucugcguguagguaggccugugccgcaaacaagcuuaccauggacuggaccuggauccuguuccucguggccgcugccacaagaguccacagcagcaacuccaaggagaucaaaucuuuccuguggacccagagccucagacgggaacuguccggcuacugcucuaauauuaagcuccaaguggucaaagacgcccaggcucugcuccacgggcuggauuuuagcgagguuuccaacgugcagcgccuuaugagaaagcagaaacgggacgaugccgaccugaagcgccucagagaucugaaucaagcggugaacaaucuggucgaacucaagucuacacagcagaaaaacgugcugcggguuggaacgcuuagcuccgacgaucugaucacccucgcugccgaccuggagaaacuuaaaagcaaggugauucgcacagaaagaccccugucuuccggcgucuauauggggaaucucagcucucagcaacuggaucagcggcgcgcccugcucuccaugaucggaaugagcggcgggccucagggaaacagaaccggcggcgacggggugguucgggugugggaugucaaaaaugcugagcugcuuaacaaucaguucggaacaaugccgucucugacccucgccugucugacaaagcaaggccagguggaccuuaacgaugcugugcaggcccugaccgaccucgggcugauuuacacggcgaaguaucccaauuccagcgaccuggauaugcucacccaaucccauccuauccugggaauggucgacacaaagaagucuagccuuaacaucuccggcuacaauuuuagccugggggccgcuguuaaagccggagcuugcaugcucgauggcggcaacaugcuggagaccauuaaggugucuccccagacaauggacgggauccuuaaauccauucugaaggugaaacgcagccucggaauguucaucucugauaccccuggcgaaagaaaccccuaugagaauauucuguacaagaucugucugagcggggaaggauggccuuauauugccucccggacgucuaucacaggccgcgcgugggagaacacccucgucgaccuggagagcgauaauaagccgcccaaacuuaacuccgccgggagcaauaagucucugcaggcugccggacucaacgcuggccugacauacucccagcugaugacccuuaaagacugcaugcuccaacuggauccuagcucuaagaccuggaucgacauugaaggcagacccgaggauccuguggaaaucgcccuguuucagcccuccagcggguguuacauucacuucuuucgggagccgacagaccucaaacaguucaagcaggacgccaaguauucccauggaaucgauguuacggaccuguuuucuacccaaccuggccuuacaagcgcugugauugaagcgcugcccagaaauaugguccuuaccugccagggguccgaugacaucaaaaagcugcuggagucucagggacgccgggauaucaaacuuauugacaucagccucuccaaggccgauagcagaaaauucgagaacgcugugugggaccaguacaaggaucugugucacaugcauacaggcguuguggucgaaaagaaaaagcgcgggggcaaagaggaaauuaccccucacugcgcccugcucgacuguaucauguuugaugccgcuacgacaggaucucugaauauuaccacccuucgggccgugcugcccagagacauggucuuccgcacauccacccccaaggugguucucugaggacuagucccuguucccagagcccacuuuuuuuucuuuuuuugaaauaaaauagccugucuuucagaucuaaaaaaaaaaaaaaaaaaaaaaaaaaaaaaaaaaaaaaaaaaaaaaaaaaaaaaaaaaaaaaaaaaaaaaaaaaaaaaaaaaaaaaaaaaaaaaaaaaaa

SEQ ID NO: 21405 - RNA, 2028 nt, Artificial Sequence
  mRNA product Design a-2 (A100) comprising derived and/or modified sequence from LASV(803213;Clade II)__AAF86704__SP-IgE_NP(2-569) (opt5)
aggagaguccgcucagccagguugcagaagcggcuuagcguguguccuaaucuucucucugcguguagguaggccugugccgcaaacaagcuuaccauggacuggaccuggauccuguuccucguggccgcugccacaagaguccacagcagcgccuccaaggaggugaaaucuuuccuguggacccagagccucagacgggaacuguccggcuacugcucuaacaucaaacuucaagucguuaaggacgcucaggcccugcuccacgggcuggauuuuagcgaggugaauaacgugcagcgccuuaugagaaagcagaaacgggacgauggagaccugaagcgccucagagaucugaaucaagcggucaacaaucugguggaacucaaguccacacagcagaaaucuauucugcggguuggcacgcuuaccagcgacgaucugcucacacuggcugccgaccuugagaagcugaaauccaaggugauccgcaccgaaagaccccucagcucuggggucuauaugggaaaccuguccacacagcaacuggagcagcggcgcgcccuccugaauaugauuggcauggugggaggagcucagggcacccagccuggcagagaugggguugugcgggucugggacgugaaaaacccggaucuucugaauaaccaauucggaacaaugcccagccucacccuggccugucuuacgaagcagggccagguggaccugaaugaugcuguccucgcccugaccgaccuggggcucaucuacacagcgaaguauccuaacucuuccgaccuggaucgccuuagccaaucucaucccauucugaauaugguugacaccaaaaaguccagccucaacaucuccggauacaauuuuucucugggcgccgcugugaaagccggggcuugcaugcuugauggaggcaacaugcuggagacaaucaaggugaccccucagacgauggacggcauucucaaaagcauccugaaggucaaaagaucccuggggauguucgugagcgauacacccggagaacggaacccuuaugagaauauucucuacaagaucugucugucuggcgacggguggccguauauugccucccgcaccagcaucguugggagagcgugggaaaacacaaccguggaucuugagucugacggcaagccccagaaagucgggaccgccggaagcaauaagucccugcagucugcuggcuuuccuacaggccucacguacagccaacugaugacccugaaagauuccaugaugcagcuugaccccagcgccaagacauggauugauaucgaggggcggccugaagaccccguggagaucgcucucuaccagccgaugucuggaugcuauauucacuucuuuagagaaccuaccgaccugaaacaguucaagcaagaugccaaguacucccauggcaucgacguugccgaucuguuucccgcucagccugggcucacaagcgcggugauugaggcccugccccgcaacaugguccuuaccugucagggaucugacgauaucaaaaagcugcucgacucccagggccggagagauauuaaacugaucgacaucagccuguccaagguggauucucgcaaauucgaaaaugcugucugggaccaaugcaaggaucuuugucacaugcauacgggggugguuguggagaagaaaaagcggggcggaaaagaggaaauuacaccccacugcgcccucauggacuguaucauguuugaugccgcugucagcggcgggcugaacauuccugugcugagagccguucucccgcgcgacaugguguuccggaccuccucucccaaggucgugcugugaggacuagucccuguucccagagcccacuuuuuuuucuuuuuuugaaauaaaauagccugucuuucagaucuaaaaaaaaaaaaaaaaaaaaaaaaaaaaaaaaaaaaaaaaaaaaaaaaaaaaaaaaaaaaaaaaaaaaaaaaaaaaaaaaaaaaaaaaaaaaaaaaaaaa

SEQ ID NO: 21406 - RNA, 2031 nt, Artificial Sequence
  mRNA product Design a-2 (A100) comprising derived and/or modified sequence from LASV(GA391;Clade III)__CAA36646__SP-IgE_NP(2-570) (opt5)
aggagaguccgcucagccagguugcagaagcggcuuagcguguguccuaaucuucucucugcguguagguaggccugugccgcaaacaagcuuaccauggacuggaccuggauccuguuccucguggccgcugccacaagaguccacagcagcgccuccaaggaggugagaucuuuccuguggacccagagccuccggcgcgaacuguccggcuacugcucuaacaucaaacuucaagucguuaaggacgcucaggcccugcuccacgggcuggauuuuagcgagguguccaaugugcagagacuuaugcggaaacagaagcgcgacgauggagaccugaaaagacuccgggaucugaaccaagcggucaauaaccugguggaacucaagucuacacagcagaaaagcguucugcgcgugggcacgcuuuccagcgacgaucugcucauucuggcugccgaccuugagaaacugaagucuaaagucaccagaacagaacggccccucuccagcgggguguauaugggaaaucugucuucccagcaacuggaucagcgcagagcccuccugaacaugaucggcaugaccgggguuagcggaggcggcaagggggcuucugacggaauugugcgggucugggaugugaaaaaugccgagcuucugaacaaucaguucggcacaaugccuucccucacccuggcuugucuuacaaagcaggggcaaguggaccugaacgaugccguccaggcgcucaccgaccugggacugaucuacacggccaaguauccgaauagcuccgaccucgaucgccugucucagagccaucccauucuuaacaugaucgacaccaaaaaguccagccugaauaucucuggcuacaacuuuucccucggggcugccguuaaagcuggagccugcaugcuggauggcggcaauaugcuugagacaauuaaggugagcccucaaaccauggacgggauccugaaaucuauucucaaggugaaaaagagccugggaauguucgucuccgauacacccggcgaaagaaacccuuaugagaacauccuguacaagauuugucucucuggggacggauggcccuauaucgcgagccggaccuccauugugggccgcgccugggaaaauacgguuguggaucuggagcaggacaacaaaccucagaagaucgggaauggaggcagcaacaaaucucuucaguccgcuggcuuugccgcugggcugacauacagccaacucaugacccugaaggauuucaaaugcuuuaaucugaucccgaacgccaagacauggauggacauugagggaagacccgaagauccugucgagaucgcccuuuaccagcccucuuccggcuguuaugugcacuucuuucgggaaccuaccgaccucaagcaguucaaacaggacgcuaaguacagccaugggauugauguuaccgaccuguuugcggcccaacccggacugacauccgcugugaucgaggcccucccgagaaauauggucauuacgugccagggcucugaagauauccgcaaacugcuugagagccaggggcggagagacaucaagcugauugauaucacccucuccaaagccgacucucgcaaguucgagaacgcugugugggaucaguuuaaggaccugugucacaugcauacaggcgucgugguugaaaagaagaaacggggaggcaaggaggaaauuaccccucacugcgcccugauggauuguaucauguucgacgcggcugugagcgggggacuugaugccaaaguccucagagugguucugccccgcgacaugguguuccggacauccaccccuaaggucgugcugugaggacuagucccuguucccagagcccacuuuuuuuucuuuuuuugaaauaaaauagccugucuuucagaucuaaaaaaaaaaaaaaaaaaaaaaaaaaaaaaaaaaaaaaaaaaaaaaaaaaaaaaaaaaaaaaaaaaaaaaaaaaaaaaaaaaaaaaaaaaaaaaaaaaaa

SEQ ID NO: 21407 - RNA, 2028 nt, Artificial Sequence
  mRNA product Design a-2 (A100) comprising derived and/or modified sequence from LASV(AV;Clade V)__CCA30315__SP-IgE_NP(2-569) (opt5)
aggagaguccgcucagccagguugcagaagcggcuuagcguguguccuaaucuucucucugcguguagguaggccugugccgcaaacaagcuuaccauggacuggaccuggauccuguuccucguggccgcugccacaagaguccacagcagcgccuccaaggaggugaaaucuuuccuguggacccagagccucagacgggaacuguccggcuacugcucuaacaucaaacuucaagucguuaaggacgcucaggcccugcuccacgggcuggauuuuagcgagguguccaaugugcagcgccuuaugagaaagcagcggcgcgacgauucugaccugaaaagacuccgggaucugaaccaagcggucaauaaccugguggaacucaagagcacacagcagaaguccguucugcgcgugggaacgcuuagcucugacgaucugcucacccuggcugccgaccuugagaaacugaaguccaaagucacaagaaccgaacggccccucagcucuggcguguauauggggaaucuguccagccagcaacuggaucagcgcagagcccuccugaaccuuauuggaaugacaaauggcucucaggggucccaggcuggacgggacggcguugugcgcgucugggaugugaagaacgccgagcugcucaauaaccaauucggcaccaugccuagccugacacuugcuugucugaccaaacagggacagguggaccucaaugaugucguucaagcccugacggaccuggggcucaucuacaccgcgaaguauccgaacacauccgaccuggauagacuuacccagucucaucccauucugaauaugaucgacacaaagaaaagcucccucaacauuagcggcuacaauuuuucucugggggccgcugugaaggccggagcuugcaugcuugauggcgggaacaugcuggagaccaucaaaguguccccucagagcauggacggaauccucaagucuauucugaaagucaagcgggcccugggcauguucgugagcgauacgcccggcgaacgcaacccuuaugagaauauccucuacaaaauuugucuguccggggacggauggcccuauaucgcgucuagaacaagcauuguuggccgggccugggaaaacaccguggucgaucuugagacagacgggaagccucagaagaucggauccggcaauagcaacaaaucucugcaauccgcuggguuuagcgccggacucaccuacucucagcugaugacccugaaggaugcuaugcuucagcucgacccgaaugccaaaacauggauggauauugagggcagacccgaagacccuguggagguugcccuguaccagcccaucuccggcugcuauauccacuucuuucgcgaaccuacggaccugaagcaauucaaacaggaugcuaaguacagccaugggauugacaucgcggaucucuuugccgcucagcccggacugaccuccgccgugauugaggcccuuccgcggaacauggucaucacaugucagggcucugaagacauuaagaaacugcucgagagccaagggagaaaggauaucaaacugaucgacauugcucuguccaagaucgauucucgcaaauucgagaaugccgugugggaccaguauaaggaucuuugccacaugcauaccggagucgugguugaaaagaaaaagcggggcgggaaagaggaaauuacaccucacugugcgcucauggacugcaucauguuugaugcugccgugagcggcggacugaacacccugguccucagagccgugcugccccgcgacaugguuuuccggacguccacaccuagagugguccuuugaggacuagucccuguucccagagcccacuuuuuuuucuuuuuuugaaauaaaauagccugucuuucagaucuaaaaaaaaaaaaaaaaaaaaaaaaaaaaaaaaaaaaaaaaaaaaaaaaaaaaaaaaaaaaaaaaaaaaaaaaaaaaaaaaaaaaaaaaaaaaaaaaaaaa

SEQ ID NO: 21408 - RNA, 2028 nt, Artificial Sequence
  mRNA product Design a-2 (A100) comprising derived and/or modified sequence from LASV(Togo/2016/7082;Clade VI)__AMR44578__SP-IgE_NP(2-569) (opt5)
aggagaguccgcucagccagguugcagaagcggcuuagcguguguccuaaucuucucucugcguguagguaggccugugccgcaaacaagcuuaccauggacuggaccuggauccuguuccucguggccgcugccacaagaguccacagcagcaacuccaaggaggugaaaucuuuccuguggacccagagccucagacgggaacuguccggcuacugcucuaauaucaaacuucaagucguuaaagacgcccaggcucugcuccacgggcuggauuuuagcgagguguccaacgugcagcgccuuaugagaaagcagaaacgggacgauggagaccugaagcgccucagagaucugaaucaagccgucaacaaucugguggaacucaagucuguucagcagaaaagcauucugcgggugggcacacuuacguccgacgaucugcucacccuggcggcugaccuugagaagcugaaaagcaaggucacacgcaccgaaagaccccucucuuccgggguguauaugggaaaccugagcucucagcaacuggaucagcggcgcgcccuccuguccaugaucggcaugagcgggggaaaucagaacucucagccuaaaggcgacggcguugugagagucugggaugugaagaaugccgaccuucugaacaaucaauucgggacaaugccgucccucacccuggcuugucuuacaaagcagggacagguggaucugaacgacgccguccaagcucucaccgaccugggccugauuuacacggccaaauaucccaauagcuccgaucucgaccggcugucucagagccauccuauccuuaacaugauugauaccaagaaauccagccugaauaucucuggguacaacuuuucccucggagcggccaucaagacaggcgcuugcaugcuggacgggggaaacaugcuugagaccauuaaaguuacaccccagaccauggauggcauccucaagagcauucugaaagugaagcgcucucugggcauguucaucagcgacacgccuggggagagaaaucccuaugaaaacauucuguacaagaucugucucuccggagauggcuggccuuauauugccucucggacagcuaucaucgggcgcgccugggagaauaccguggucgaccuggaaagcgauuccaaaccgcagaagauuggaagcaacggcucuaauaaaucccuucaaagcgcgggguuugcccccggacugacauacucucagcucaugacccugaaggacuccaugcugcagcuugauccuaacgcuaaaaccuggaucgacauugagggcagacccgaggacccuguggaaguugcccucuuccagcccaucagcggcugcuacauucacuuuuuccgggagccgacagaucugaagcaauuuaagcaggacgcuaaauauucccaugggaucgaugugacggaccuguucgccgcccagccuggacucaccucugcugucaucgaagcgcugcccagaaauauggugcuuacaugucagggcagcgaugacauuaagaaacugcucgauucccaagggcgccgggacaucaagcugauugauguuucucugaacaaaaucgacagcagaaaguuugagaaugccgugugggaucaguacaaggaccuuugccacaugcauaccggagucguggucgaaaagaagaaaaagggcgggaaagaggagauuacaccucacugugcucuccuggauugcaucauguucgacgccgccguguccggcggacugaacgcuaccguucuccgcgccgugcugccccgggacauggucuuuagaacgagcucucccaaggugguucuuugaggacuagucccuguucccagagcccacuuuuuuuucuuuuuuugaaauaaaauagccugucuuucagaucuaaaaaaaaaaaaaaaaaaaaaaaaaaaaaaaaaaaaaaaaaaaaaaaaaaaaaaaaaaaaaaaaaaaaaaaaaaaaaaaaaaaaaaaaaaaaaaaaaaaa

SEQ ID NO: 21409 - RNA, 2028 nt, Artificial Sequence
  mRNA product Design a-2 (A100) comprising derived and/or modified sequence from LASV(KAK-428;Clade n.d. (VII))__ANH09741__SP-IgE_NP(2-569) (opt5)
aggagaguccgcucagccagguugcagaagcggcuuagcguguguccuaaucuucucucugcguguagguaggccugugccgcaaacaagcuuaccauggacuggaccuggauccuguuccucguggccgcugccacaagaguccacagcagcaacuccaaggaggugaaaucuuuccuguggacccagagccucagacgggaacuguccggcuacugcacaaauaucaaacuucaagucguuaaggacgcccaggcucugcuccacgggcuggauuuuucugaggugagcaacgugcagcgccuuaugagaaagcagaaacgggacgauaaugaccugaagcgccucagagaucugaaccaagccgucaauaaccugguggaacucaaguccguucagcagaaaucugugcugaaggucggaacgcuuaauagcgacgaucugcucacccuggcggcugaccuugagaaacugaaguccaaagugguucggacagaacgcccccucagcucuggcguguauauggggaaccuguccagccagcaacuggaucagagacgggcccuccugaauaugauuggaauggccggcgggucucagggaaaccagccuucccgcgacggcgucgugagagugugggaugucaagaaugcugaccuucugaacaaucaauucggcaccaugccgagccucacacuggccugucuuaccaagcaggggcagguugaucugaacgacguggugcucgcucugacagaccugggacucaucuacaccgccaaauaucccaauucuuccgaucuggaccggcuuagccaaaaccauccuguccugaacaugauugaugugaauaaguccucucucaacaucagcggcuacaauuuuucccugggggcggccguuaaagcuggagccugcaugcuugacggcgggaacaugcuggagacgauuaagaucagcccccagaccguggauggaauccucaaaucuauucugaaggucaaacgcgcucugggcauguucguguccgacacaccuggcgagagaaaucccuaugaaaacauccucuacaagguuugucugagcgggaauggauggccuuauauugccucucggaccagcaucgugggccgcgcgugggagaacacagucguggaucuugaauccaauaagaaccagccgaaagucgggaauaacggaucuaauaagaugcugcagagcuccggcuuugccaccgggcucacguacagccaacugaugacacugagagacucuaugcuucagcucgaucccaccgcuaaaacauggauugacaucgagggacggccugaggaucccguggaacuggcccuguuccagccuuccagcggcugcuacauucacuuuuucagagagcccaccgaccucaagcaguuuaaacaagacgcuaaguauucucauggcaucgauguuaacgaccuguucuccgcccagccggggcuuaccagcgccgugcuggaagcucucccucgcaauaugguccugacaugucagggauccgaugacauccggaagcugcuugauucucaggacagaaaagauauuaagcucaucgacauuagccuguccaaagcggaugcccgcaaguuugagaacgacgugugggaucaauucaaagaccugugccacaugcauacgggcaucguuguggaaaagaagaaaaagggagggaaacaggagaugacaccccacugugcucuccuggauugcauuauguuugacgccgccgucucuggcgggcuuaacgugccuacccugcgggcugugcuccccaccgacaugguuuucagaacaaucaccacgaaggucgugcugugaggacuagucccuguucccagagcccacuuuuuuuucuuuuuuugaaauaaaauagccugucuuucagaucuaaaaaaaaaaaaaaaaaaaaaaaaaaaaaaaaaaaaaaaaaaaaaaaaaaaaaaaaaaaaaaaaaaaaaaaaaaaaaaaaaaaaaaaaaaaaaaaaaaaa

SEQ ID NO: 21410 - RNA, 2028 nt, Artificial Sequence; identical to SEQ ID NO: 21404
  mRNA product Design a-2 (A100) comprising derived and/or modified sequence from LASV(Pinneo-NIG-1969;Clade I)__AIT17837__SP-IgE_NP(2-569) (opt5)

SEQ ID NO: 21411 - RNA, 2028 nt, Artificial Sequence
  mRNA product Design a-2 (A100) comprising derived and/or modified sequence from LASV(ISTH0009-NIG-2011;Clade II)__AIT17405__SP-IgE_NP(2-569) (opt5)
aggagaguccgcucagccagguugcagaagcggcuuagcguguguccuaaucuucucucugcguguagguaggccugugccgcaaacaagcuuaccauggacuggaccuggauccuguuccucguggccgcugccacaagaguccacagcagcguguccaaggaggucaaaucuuuccuguggacccagagccucagacgggaacuguccggcuacugcucuaacaucaaacuucaaguugugaaggacgcccaggcucugcuccacgggcuggauuuuagcgagguguccaauguccagcgccuuaugagaaagcagaaacgggacgauucugaccugaagcgccucagagaucugaaccaagccgugaauaaccugguugaacucaagagcacacagcagaaauccauucugcgggugggaacgcuuaccagcgacgaucugcucacacuggcggcugaccuugagaagcugaaaucuaaggucauccgcaccgaaagaccccucuccagcggcguguauauggggaaucugucuacacagcaacuggagcagcggcgcgcccuccugaacaugauuggaaugguuggcggggcccagggaacccagccuggcagagauggcgugguccgggugugggacgugaaaaauccggaucuucugaacaaucaauucgggacaaugcccucccucacccuggcuugucuuacgaagcagggacaggucgaccugaacgaugccguucucgcucugaccgaccugggccucaucuacacagccaaguauccuaauagcucugaccuggaucgccuuucccaaagccaucccauucugaacaugguggacaucaaaaaguccucucucaauaucagcggguacaacuuuucccugggagcggccgugaaagcuggcgccugcaugcuugaugggggaaauaugcuggagaccauuaaggucacaccucagaccauggacggcauccucaaaagcauucugaaggugaaaagaucucugggcauguucguuuccgauacgcccggggaacggaacccuuaugagaacauccucuacaagauuugucugagcggagacggcuggccguauaucgcuucucgcacaagcauuguggggagagccugggaaaauaccacagucgaucuugaguccgacggaaagccccagaaagugggcucugcggggagcaacaagucccugcagagcgccggauuuccuaccggccucaccuacucucaacugaugacacugaaagauuccaugaugcagcuugaccccagcgcuaagacguggaucgauaucgagggccggccugaagaccccguugagauugcccucuaccagccgaugucugggugcuauauccacuucuuuagagaaccuaccgaccugaaacaguucaagcaagaugcuaaguacucccauggaauugacguggccgaucuguuucccgcccagccuggccucacaagcgcugucaucgaggcgcugccccgcaauauggugcuuaccugucagggguccgacgauauuaaacggcugcucgacucucagggaagacgcgauaucaagcugaucgacauugcccugagcaaagcugauucccggagauucgaaaacgccgucugggaccaaugcaaggaucuuugucacaugcauacaggcgugguuguggagaaaaagaagcgcgggggcaaagaggaaaucacgccccacugcgcccucauggacuguauuauguaugaugcugccgucucuggaggccugaauaucccugugcugcgggcgguucucccgagagacaugguguuucgcaccagcucccccaaggucgugcugugaggacuagucccuguucccagagcccacuuuuuuuucuuuuuuugaaauaaaauagccugucuuucagaucuaaaaaaaaaaaaaaaaaaaaaaaaaaaaaaaaaaaaaaaaaaaaaaaaaaaaaaaaaaaaaaaaaaaaaaaaaaaaaaaaaaaaaaaaaaaaaaaaaaaa

SEQ ID NO: 21412 - RNA, 2028 nt, Artificial Sequence
  mRNA product Design a-2 (A100) comprising derived and/or modified sequence from LASV(ISTH2010-NIG-2012;Clade II)__AIT17483__SP-IgE_NP(2-569) (opt5)
aggagaguccgcucagccagguugcagaagcggcuuagcguguguccuaaucuucucucugcguguagguaggccugugccgcaaacaagcuuaccauggacuggaccuggauccuguuccucguggccgcugccacaagaguccacagcagcgccuccaaggaggugaaaucuuuccuguggacccagagccucagacgggaacuguccggcuacugcucuaacaucaaacuucaagucguuaaggacgcucaggcccugcuccacgggcuggauuuuagcgagguguccaaugugcagcgccuuaugagaaagcagaaacgggacgauucugaccugaagcgccucagagaucugaaccaagcggucaauaaccugguggaacucaagagcacacagcagaaauccauucugcggguuggaacgcuuaccagcgacgaucugcucacacuggcugccgaccuugagaagcugaaaucuaaggugauccgcaccgaaagaccccucuccagcggcgucuauauggggaaucugucuacacagcaacuggagcagcggcgcgcccuccugaaccuuauuggaauggugggcggggcucagggaacccagccuggcagagauggcguugugcgggucugggacgugaaaaauccggaucugcucaacaaucaauucgggacaaugcccucccugacccuugccugucugacgaagcagggacagguggaccucaacgaugcuguccuggcccugaccgaccucggccugaucuacacagcgaaguauccuaauagcucugaccuugaucgccugucccaaagccaucccauucucaacaugguugacaccaaaaaguccucucugaauaucagcggguuuaacuucucccuuggagccgcugugaaagccggcgcuugcaugcuggaugggggaaauaugcucgagacaaucaaggugaccccucagacgauggacggcauucugaaaagcauccugaaggucaaaaagucucucggcauguuuguguccgauacacccggggaaagaaacccuuacgagaacauucuguauaagaucugucuuagcggagacggcuggccguacauugccucucggaccagcaucguugggcgcgcgugggaaaauacaaccguggaucuggaguccgacggaaaaccccacaaggucggcaccgccgggucuaacaaaagccuccaguccgcuggauucccuacaggccugacguauagccagcugaugacccuuaaggauucuaugaugcaacucgaccccuccgccaaaacauggauugauaucgagggcagaccugaagaccccguggagaucgcucuguaccagccgaugagcgggugcuacauucacuuuuuccgggaaccuaccgaccugaagcaguuuaagcaggaugccaaauauucucauggaaucgacguugccgaucucuuccccgcucaaccuggccugacauccgcggugauugaggcccuucccagaaauaugguccugaccugucaggggagcgacgauaucaagcgccuccuggacucccagggacggagagauauuaaacugaucgacaucgcucuuucuaaggccgauagccgccgguuugaaaacgccgugugggaccagugcaaagaucucugucauaugcacacgggcgucgugguugagaagaagaaaagagggggcaaggaggaaauuacaccccacugcgcucugauggacuguaucauguacgaugccgcgguguccggaggccugaauauuccuguccuccgcgcugugcugccgcgggacaugguuuucagaaccucuagccccaaagugguccuuugaggacuagucccuguucccagagcccacuuuuuuuucuuuuuuugaaauaaaauagccugucuuucagaucuaaaaaaaaaaaaaaaaaaaaaaaaaaaaaaaaaaaaaaaaaaaaaaaaaaaaaaaaaaaaaaaaaaaaaaaaaaaaaaaaaaaaaaaaaaaaaaaaaaaa

SEQ ID NO: 21413 - RNA, 2028 nt, Artificial Sequence
  mRNA product Design a-2 (A100) comprising derived and/or modified sequence from LASV(Lassa virus/H.sapiens-wt/NGA/2015/ISTH_0543;Clade II)__AVO03640__SP-IgE_NP(2-569) (opt5)
aggagaguccgcucagccagguugcagaagcggcuuagcguguguccuaaucuucucucugcguguagguaggccugugccgcaaacaagcuuaccauggacuggaccuggauccuguuccucguggccgcugccacaagaguccacagcagcgccuccaaggaggugaaaucuuuccuguggacccagagccucagacgggaacuguccggcuacugcucuaacaucaaacuucaagucguuaaggacgcucaggcccugcuccacgggcuggauuuuagcgagguguccaaugugcagcgccuuaugagaaagcagaaacgggacgauucugaccugaagcgccucagagaucugaaccaagcggucaauaaccugguggaacucaagagcacacagcagaaauccauucugcggguuggaacgcuuaccagcgacgaucugcucacacuggcugccgaccuugagaagcugaaaucuaaggugauccgcaccgaaagaccccucuccagcggcgucuauauggggaaucugucuacacagcaacuggagcagcggcgcgcccuccugaacaugauuggaauggugggcggggcucagggaacccagccuggcagagauggcguugugcgggucugggacgugaaaaauccggaucuucugaacaaucaauucgggacaaugcccucccucacccuggccugucuuacgaagcagggacagguggaccugaacgaugcuguccucgcccugaccgaccugggccucaucuacacagcgaaguauccuaauagcucugaccuggaucgccuuucccaaagccaucccauucugaacaugguugacaccaaaaaguccucucucaauaucagcggguacaacuuuucccugggagccgcugugaaagccggcgcuugcaugcuugaugggggaaauaugcuggagacaaucaaggugaccccucagacgauggacggcauucucaaaagcauccugaaggucaaaaagucucugggcauguucguguccgauacacccggggaaagaaacccuuaugagaacauucucuacaagaucugucugagcggagacggcuggccguauauugccucucggaccagcaucguugggcgcgcgugggaaaauacaaccguggaucuugaguccgacggaaaaccccagaaggucggcucugccgggagcaacaaaucccugcagagcgcuggauuuccuaccggccucacauacucucaacugaugacgcugaaggauuccaugaugcagcuugaccccagcgccaaaaccuggauugauaucgagggcagaccugaagaccccguggagaucgcucucuaccagccgaugucugggugcuauauucacuucuuucgggaaccuacagaccugaagcaguucaagcaagaugccaaauacucccauggaaucgacguugccgaucuguuucccgcucagccuggccucaccagcgcggugauugaggcccugcccagaaauaugguccuuacaugucagggguccgacgauaucaagcgccugcucgacucucagggacggaaagauauuaagcugaucgacaucgcucugagcaaagccgauuccagacgcuucgaaaacgccgugugggaccaaugcaaggaucuuugucacaugcauaccggcgucgugguugagaagaaaaagagagggggcaaagaggaaauuacgccccacugcgcucucauggacuguaucauguaugaugccgcggugucuggaggccugaauauuccuguccugcgggcugugcucccgcgcgacaugguuuuucggacaagcucccccaaggugguccugugaggacuagucccuguucccagagcccacuuuuuuuucuuuuuuugaaauaaaauagccugucuuucagaucuaaaaaaaaaaaaaaaaaaaaaaaaaaaaaaaaaaaaaaaaaaaaaaaaaaaaaaaaaaaaaaaaaaaaaaaaaaaaaaaaaaaaaaaaaaaaaaaaaaaa

SEQ ID NO: 21414 - RNA, 2028 nt, Artificial Sequence
  mRNA product Design a-2 (A100) comprising derived and/or modified sequence from LASV(Lassa virus/H.sapiens-wt/NGA/2016/ISTH_0009;Clade II)__AVO03572__SP-IgE_NP(2-569) (opt5)
aggagaguccgcucagccagguugcagaagcggcuuagcguguguccuaaucuucucucugcguguagguaggccugugccgcaaacaagcuuaccauggacuggaccuggauccuguuccucguggccgcugccacaagaguccacagcagcgccuccaaggaggugaaaucuuuccuguggacccagagccucagacgggaacuguccggcuacugcucuaacaucaaacuucaagucguuaaggacgcucaggcccugcuccacgggcuggauuuuagcgagguguccaaugugcagcgccuuaugagaaagcagaaacgggacgauucugaccugaagcgccucagagaucugaaccaagcggucaauaaccugguggaacucaagagcacacagcagaaauccauucugcggguuggaacgcuuaccagcgacgaucugcucacacuggcugccgaccuugagaagcugaaaucuaaggugauccgcaccgaaagaccccucuccagcggcgucuauauggggaaucugucuacacagcaacuggagcagcggcgcgcccuccugaacaugauuggaauggugggcggggcucagggaacccagccuggcagagauggcguugugcgggucugggacgugaaaaauccggaucuucugaacaaucaauucgggacaaugcccucccucacccuggccugucuuacgaagcagggacagguggaccugaacgaugcuguccucgcccugaccgaccugggccucaucuacacagcgaaguauccuaauagcucugaccuggaucgccuuucccaaagccaucccauucugaacaugguugacaccaaaaaguccucucucaauaucagcggguacaacuuuucccugggagccgcugugaaagccggcgcuugcaugcuugaugggggaaauaugcuggagacaaucaaggugaccccucagacgauggacggcauucucaaaagcauccugaaggucaaaaagucucugggcauguucguguccgauacacccggggaaagaaacccuuaugagaacauucucuacaagaucugucugagcggagacggcuggccguauauugccucucggaccagcaucguugggcgcgcgugggaaaauacaaccguggaucuugaguccgacggaaaaccccagaaggucggcucugccgggagcaacaaaucccugcagagcgcuggauuuccuaccggccucacauacucucaacugaugacgcugaaggauuccaugaugcagcuugaccccagcgccaaaaccuggauugauaucgagggcagaccugaagaccccguggagaucgcucucuaccagccgaugucugggugcuauauucacuucuuucgggaaccuacagaccugaagcaguucaagcaagaugccaaauacucccauggaaucgacguugccgaucuguuucccgcucagccuggccucaccagcgcggugauugaggcccugcccagaaauaugguccuuacaugucagggguccgacgauaucaagcgccugcucgacucucagggacggagagauauuaaacugaucgacaucgcucugagcaaggccgauucccgccgguucgaaaacgccgugugggaccaaugcaaagaucuuugucacaugcauaccggcgucgugguugagaagaagaaaagagggggcaaggaggaaauuacgccccacugcgcucucauggacuguaucauguaugaugccgcggugucuggaggccugaauauuccuguccugcgcgcugugcucccgcgggacaugguuuuuagaacaagcucccccaaagugguccugugaggacuagucccuguucccagagcccacuuuuuuuucuuuuuuugaaauaaaauagccugucuuucagaucuaaaaaaaaaaaaaaaaaaaaaaaaaaaaaaaaaaaaaaaaaaaaaaaaaaaaaaaaaaaaaaaaaaaaaaaaaaaaaaaaaaaaaaaaaaaaaaaaaaaa

SEQ ID NO: 21415 - RNA, 2028 nt, Artificial Sequence
  mRNA product Design a-2 (A100) comprising derived and/or modified sequence from LASV(Lassa virus/H.sapiens-wt/NGA/2016/ISTH_0017;Clade II)__AVO03568__SP-IgE_NP(2-569) (opt5)
aggagaguccgcucagccagguugcagaagcggcuuagcguguguccuaaucuucucucugcguguagguaggccugugccgcaaacaagcuuaccauggacuggaccuggauccuguuccucguggccgcugccacaagaguccacagcagcgccuccaaggaggugaaaucuuuccuguggacccagagccucagacgggaacuguccggcuacugcucuagcaucaaacuucaagucguuaaggacgcucaggcccugcuccacgggcuggauuuuuccgaggugucuaacgugcagcgccuuaugagaaagcagaaacgggacgauagcgaccugaagcgccucagagaucugaaucaagcggucaacaaucugguggaacucaaguccacacagcagaaaagcauucugcggguuggaacgcuuaccucugacgaucugcucacacuggcugccgaccuugagaagcugaaauccaaggugauccgcaccgaaagaccccucagcucuggcgucuauauggggaaccuguccacacagcaacuggagcagcggcgcgcccuccugaauaugauuggaauggcuggcggggcccagggaacccagccuggcagagauggcgugguucgggugugggacgucaaaaacccggaucuucugaauaaccaauucgggacaaugcccagccucacccuggcuugucuuacgaagcagggacagguggaccugaaugaugccgugcucgcgcugaccgaccugggccucaucuacacagccaaguauccuaacucuuccgaccuggaucgccuuagccaaucccaucccauucugaauauggucgacaccaaaaagucuagccucaacaucuccggguacaauuuuagccugggagcugccguuaaagcuggcgccugcaugcuugaugggggaaacaugcuggagacaaucaaggugaccccucagacgauggacggcauucucaaaucuauccugaaggugaaaagaucccugggcauguucgucagcgaugcgcccggggaacggaauccuuaugagaacauucucuacaagaucugucugucuggagacggcuggccguauauugccagccgcacauccaucguggggagagcuugggaaaacaccacaguugaucuugagucugacggaaagccccagaaagugggcgccaccgggagcaauaagucccugcagagcgcuggauuuccuaccggccucacauacucucaacugaugacgcugaaagauuccaugaugcagcuugaccccagcgccaagaccuggauugauaucgagggccggccugaagaccccgucgagguggcccucuaccagccgguuucugggugcuauauccacuucuuuagagaaccuacagaccugaaacaguucaagcaagaugcuaaguacucccauggaauugacguggcggaucuguuucccgcccagccuggccucaccagcgcugucaucgaggcccugccccgcaacauggugcuuacaugucagggguccgacgauauuaaaaagcugcucgacucucagggacggaaagauaucaagcugauugacaucgcccugagcaaagcugauuccagacgcuucgaaaaugccgucugggaccaaugcaaggaucuuugucacaugcauaccggcgugguuguggagaagaaaaagagagggggcaaagaggaaaucacgccccacugcgcgcucauggacuguauuauguaugaugcugccgucucuggaggccugaacaucccugugcugcgggccguucucccgcgcgacaugguguuucggacaagcucccccaaggucgugcugugaggacuagucccuguucccagagcccacuuuuuuuucuuuuuuugaaauaaaauagccugucuuucagaucuaaaaaaaaaaaaaaaaaaaaaaaaaaaaaaaaaaaaaaaaaaaaaaaaaaaaaaaaaaaaaaaaaaaaaaaaaaaaaaaaaaaaaaaaaaaaaaaaaaaa

SEQ ID NO: 21416 - RNA, 2028 nt, Artificial Sequence
  mRNA product Design a-2 (A100) comprising derived and/or modified sequence from LASV(Lassa virus/H.sapiens-wt/NGA/2018/ISTH_0959;Clade II)__AVV65100__SP-IgE_NP(2-569) (opt5)
aggagaguccgcucagccagguugcagaagcggcuuagcguguguccuaaucuucucucugcguguagguaggccugugccgcaaacaagcuuaccauggacuggaccuggauccuguuccucguggccgcugccacaagaguccacagcagcgccuccaaggaggugaaaucuuuccuguggacccagagccucagacgggaacuguccggcuacugcucuaacaucaaacuucaagucguuaaggacgcucaggcccugcuccacgggcuggauuuuagcgagguguccaaugugcagcgccuuaugagaaagcagaaacgggacgauucugaccugaagcgccucagagaucugaaccaagcggucaauaaccugguggaacucaagagcacccagcagaaauccauucugcggguuggaacgcuuaccagcgacgaucugcucacacuggcugccgaccuugagaagcugaaaucuaaggugauccgcaccgaaagaccccucuccagcggcgucuauauggggaaucugucuacacagcaacuggagcagcggcgcgcccuccugaaccuuauuggaauggugggcggggcucagggaacccagccuggcagagauggcguugugcgggucugggacgugaaaaauccggaucugcucaacaaucaauucgggacaaugcccucccugacccuugccugucugacgaagcagggacagguggaccucaacgaugucguucuggcucugaccgaccucggccugaucuacacagccaaguauccuaauagcucugaccuugaucgccugucccaaagccaucccauucucaacaugguggacaccaaaaaguccucucugaauaucagcggguuuaacuucucccuuggagcggccgugaaagcuggcgccugcaugcuggaugggggaaauaugcucgagacaaucaaggucaccccucagacgauggacggcauucugaaaagcauccugaaggugaaaaagucucucggcauguuuguuuccgauacacccggggaaagaaacccuuacgagaacauucuguauaagaucugucuuagcggagacggcuggccguacauugcuucucggaccagcaucguggggcgcgccugggaaaauacaaccgucgaucuggaguccgacggaaaaccccacaaggugggcaccgcggggucuaacaaaagccuccaguccgccggauucccuacaggccugacguauagccagcugaugacccuuaaggauucuaugaugcaacucgaccccuccgcuaaaacauggauugauaucgagggcagaccugaagaccccguugagaucgcccuguaccagccgaugagcgggugcuacauucacuuuuuccgggaaccuaccgaccugaagcaguuuaagcaggaugcuaaauauucucauggaaucgacguggccgaucucuuccccgcccaaccuggccugacauccgcugucauugaggcgcuucccagaaauauggugcugaccugucaggggagcgacgauaucaagcgccuccuggacucccagggacggaaagauauuaagcugaucgacaucgcccuuucuaaaacggauagcagacgcuuugaaaacgcugucugggaccagugcaaggaucucugucauaugcacacaggcgugguuguggagaagaaaaagagagggggcaaagaggaaauuacaccccacugcgcccugauggacuguaucauguacgaugccgcugucuccggaggccugaauauuccugugcuccgggccguucugccgcgcgacaugguguuccggaccucuagccccaaggucgugcuuugaggacuagucccuguucccagagcccacuuuuuuuucuuuuuuugaaauaaaauagccugucuuucagaucuaaaaaaaaaaaaaaaaaaaaaaaaaaaaaaaaaaaaaaaaaaaaaaaaaaaaaaaaaaaaaaaaaaaaaaaaaaaaaaaaaaaaaaaaaaaaaaaaaaaa

SEQ ID NO: 21417 - RNA, 2028 nt, Artificial Sequence
  mRNA product Design a-2 (A100) comprising derived and/or modified sequence from LASV(LASV003-NIG-2008;Clade II)__AIT17581__SP-IgE_NP(2-569) (opt5)
aggagaguccgcucagccagguugcagaagcggcuuagcguguguccuaaucuucucucugcguguagguaggccugugccgcaaacaagcuuaccauggacuggaccuggauccuguuccucguggccgcugccacaagaguccacagcagcgccuccaaggaggugaaaucuuuccuguggacccagagccucagacgggaacuguccggcuacugcucuagcaucaaacuucaagucguuaaggacgcucaggcccugcuccacgggcuggauuuuuccgaggugucuaacgugcagcgccuuaugagaaagcagaaacgggacgauagcgaccugaagcgccucagagaucugaaucaagcggucaacaaucugguggaacucaaguccacccagcagaaaagcguucugcgggugggaacgcuuaccucugacgaucugcucacacuggcugccgaccuugagaagcugaaauccaaggucauucgcaccgaaagaccccucagcucuggcguguauauggggaaccuguccgcccagcaacuggagcagcggcgcacacuccugaauaugaucggaaugguuggcggggcucagggaacccagccuggcagagauggcgugguccgggugugggacgugaaaaacccggaucuucugaauaaccaauucgggacaaugcccagccucacccuggccugucuuacgaagcagggacaggucgaccugaaugauguugugcucgcucugaccgaccugggccucauuuacacagccaaguauccuaacucuuccgaccuggaucgccuuagccaaucccaucccauccugucuaugguggacaccaaaaagagcucccucaauauuagcggguacaacuuuucucugggagcggccgucaaagcuggcgccugcaugcuugaugggggaaauaugcuggagacaaucaaggugaccccucagacgauggacggcauccucaaauccauucugaagguuaaaaagagccugggcauguucgugucugauacacccggggaaagaaacccuuaugagaauauccucuacaagauuugucugagcggagacggcuggccguauaucgcuucccggaccucuauugucgggcgcgccugggaaaacacaaccguggaucuugagagcgacggaaaaccccagaagguuggcaccgcgggguccaacaaaagccugcagucugccggauuuccuacaggccucacguacucccaacugaugacccugaaggauagcaugaugcagcuugaccccucugcuaaaacauggaucgauauugagggcagaccugaagaccccguggagaucgcccucuaccagccgauguccgggugcuauauccacuucuuucgggaaccuaccgaccugaagcaguucaagcaagaugcuaaauacagccauggaauugacgucacagaucuguuucccgcccagccuggccucaccuccgccgugaucgaggcucugcccagaaauaugguccuuacgugucaggggucugacgauauuaagcgccugcucgacagccagggacggagagauaucaaacugauugacaucgcgcuguccaaggccgauucucgccgguucgaaaacgcugugugggaccaaugcaaagaucuuugucacaugcauacaggcguuguggucgagaagaagaaaagagggggcaaggaggaaaucacaccccacugcgcccucauggacuguauuauguaugaugccgcugugagcggaggccugaauaucccuguucugcgcgccgugcucccgcgggacauggucuuuagaaccuccagccccaaaguggugcugugaggacuagucccuguucccagagcccacuuuuuuuucuuuuuuugaaauaaaauagccugucuuucagaucuaaaaaaaaaaaaaaaaaaaaaaaaaaaaaaaaaaaaaaaaaaaaaaaaaaaaaaaaaaaaaaaaaaaaaaaaaaaaaaaaaaaaaaaaaaaaaaaaaaaa

SEQ ID NO: 21418 - RNA, 2028 nt, Artificial Sequence
  mRNA product Design a-2 (A100) comprising derived and/or modified sequence from LASV(LASV035-NIG-2009;Clade II)__AIT17589__SP-IgE_NP(2-569) (opt5)
aggagaguccgcucagccagguugcagaagcggcuuagcguguguccuaaucuucucucugcguguagguaggccugugccgcaaacaagcuuaccauggacuggaccuggauccuguuccucguggccgcugccacaagaguccacagcagcgccuccaaggaggugaaaucuuuccuguggacccagagccucagacgggaacuguccggcuacugcucuagcaucaaacuucaagucguuaaagacgcucaggcccugcuccacgggcuggauuuuuccgaggugucuaacgugcagcgccuuaugagaaagcagaaacgggacgauagcgaccugaagcgccucagagaucugaaucaagcggucaacaaucugguggaacucaaguccacacagcagaaaagcauucugcggguuggaacgcuuaccucugacgaucugcucacacuggcugccgaccuugagaagcugaaauccaaggugauccgcaccgaaagaccccucagcucuggcgucuauauggggaaccuguccgcccagcaacuggagcagcggcgcgcucuccugaauaugauuggaauggugggcggggcccagggaacacagccuggcagagauggcguugugcgggucugggacgugaaaaacccggaucuucugaauaaccaauucgggaccaugcccagccucacacuggcuugucuuaccaagcagggacagguggaccugaaugaugccguccucgcgcugacggaccugggccucaucuacaccgccaaguauccuaacucuuccgaccuggaucgccuuagccaaucccaucccauucugaauaugguugacacaaagaagucuagccucaacaucuccggguacaauuuuagccugggagcugccgugaaagcuggcgccugcaugcuugaugggggaaacaugcuggagaccaucaaggugacaccucagaccauggacggcauucucaaaucuauccugaaggucaaaagaucccugggcauguucgugagcgauacgcccggggaacggaauccuuaugagaacauucucuacaagaucugucugucuggagacggcuggccguauauugcgagccgcacauccaucguugggagagccugggaaaacaccacaguggaucuugagucugacggaaagccccagaaagucggcaccaccgggagcaauaagucccugcagagcgcuggauuuccuacaggccucacguacucucaacugaugacccugaaagauuccaugaugcagcuugaccccagcgccaagacauggauugauaucgagggccggccugaagaccccguggagaucgcucucuaccagccgaugucugggugcuauauucacuucuuuagagaaccuaccgaccugaaacaguucaagcaagaugccaaguacucccauggaaucgacguugccgaucuguuucccgcucagccuggccucacaagcgcggugauugaggcccugccccgcaacaugguccuuaccugucagggguccgacgauaucaaaaagcugcucgacucucagggacggagagauauuaaacugaucgacaucgcucugagcaaggccgauucccgcaaauucgaaaaugccgugugggaccaaugcaaggaucuuugucacaugcauacgggcgucgugguugagaagaaaaagagagggggcaaagaggaaauuacaccccacugcgcucucauggacuguaucauguaugaugccgcggugucuggaggccugaacauuccuguccugcgggcugugcucccgcgcgacaugguuuuucggaccagcucccccaaggugguccugugaggacuagucccuguucccagagcccacuuuuuuuucuuuuuuugaaauaaaauagccugucuuucagaucuaaaaaaaaaaaaaaaaaaaaaaaaaaaaaaaaaaaaaaaaaaaaaaaaaaaaaaaaaaaaaaaaaaaaaaaaaaaaaaaaaaaaaaaaaaaaaaaaaaaa

SEQ ID NO: 21419 - RNA, 2028 nt, Artificial Sequence
  mRNA product Design a-2 (A100) comprising derived and/or modified sequence from LASV(LASV1000-NIG-2009;Clade II)__AIT17783__SP-IgE_NP(2-569) (opt5)
aggagaguccgcucagccagguugcagaagcggcuuagcguguguccuaaucuucucucugcguguagguaggccugugccgcaaacaagcuuaccauggacuggaccuggauccuguuccucguggccgcugccacaagaguccacagcagcgccuccaaggaggugaaaucuuuccuguggacccagagccucagacgggaacuguccggcuacugcucuaacaucaaacuucaagucguuaaggacgcucaggcccugcuccacgggcuggauuuuagcgagguguccaaugugcagcgccuuaugagaaagcagaaacgggacgauucugaccugaagcgccucagagaucugaaccaagcggucaauaaccugguggaacucaagagcacacagcagaaauccauucugcggguuggaacgcuuaccagcgacgaucugcucacacuggcugccgaccuugagaagcugaaaucuaaggugauccgcaccgaaagaccccucuccagcggcgucuauauggggaaucugucuacacagcaacuggagcagcggcgcgcccuccugaacaugauuggaauggugggcggggcucagggaacccagccuggcagagauggcguugugcgggucugggacgugaaaaauccggaucuucugaacaaucaauucgggacaaugcccucccucacccuggccugucuuacgaagcagggacagguggaccugaacgaugucguucucgcucugaccgaccugggccucaucuacacagccaaguauccuaauagcucugaccuggaucgccuuucccaaagccaucccauucugaacaugguggacaccaaaaaguccucucucaauaucagcggguacaacuuuucccugggagcggccgugaaagcuggcgccugcaugcuugaugggggaaauaugcuggagacaaucaaggucaccccucagacgauggacggcauucucaaaagcauccugaaggugaaaaagucucugggcauguucguuuccgauacacccggggaaagaaacccuuaugagaacauucucuacaagaucugucugagcggagacggcuggccguauauugcuucucggaccagcaucguggggcgcgccugggaaaauacaaccgucgaucuugaguccgacggaaaaccccagaaggugggcaccgcggggucuaacaaaagccugcaguccgccggauuuccuacaggccucacguacagccaacugaugacccugaaggauucuaugaugcagcuugaccccuccgcuaaaacauggauugauaucgagggcagaccugaagaccccguugagaucgcccucuaccagccggugagcgggugcuauauucacuucuuucgggaaccuaccgaccugaagcaguucaagcaagaugcuaaauacucucauggaaucgacgucgccgaucuguuucccgcccagccuggccucacauccgcugugauugaggcgcugcccagaaauaugguccuuaccugucaggggagcgacgauaucaagcgccugcucgacucccagggacggagagauauuaaacugaucgacaucgcccugucuaaggcugauagccgccgguucgaaaacgccgugugggaccaaugcaaagaucuuugucacaugcauacgggcguuguggucgagaagaagaaaagagggggcaaggaggaaauuacaccccacugcgcccucauggacuguaucauguaugaugcugccguguccggaggccugaauauuccuguucugcgcgcggugcucccgcgggacauggucuuuagaaccucuagccccaaaguggugcugugaggacuagucccuguucccagagcccacuuuuuuuucuuuuuuugaaauaaaauagccugucuuucagaucuaaaaaaaaaaaaaaaaaaaaaaaaaaaaaaaaaaaaaaaaaaaaaaaaaaaaaaaaaaaaaaaaaaaaaaaaaaaaaaaaaaaaaaaaaaaaaaaaaaaa

SEQ ID NO: 21420 - RNA, 2028 nt, Artificial Sequence
  mRNA product Design a-2 (A100) comprising derived and/or modified sequence from LASV(LASV221-NIG-2010;Clade II)__AIT17625__SP-IgE_NP(2-569) (opt5)
aggagaguccgcucagccagguugcagaagcggcuuagcguguguccuaaucuucucucugcguguagguaggccugugccgcaaacaagcuuaccauggacuggaccuggauccuguuccucguggccgcugccacaagaguccacagcagcgccuccaaggaggugaaaucuuuccuguggacccagagccucagacgggaacuguccggcuacugcucuagcaucaaacuucaagucguuaaggacgcucaggcccugcuccacgggcuggauuuuuccgaggugucuaacgugcagcgccuuaugagaaagcagcggcgcgacgauagcgaccugaaaagacuccgggaucugaaucaagcggucaacaaucugguggaacucaaguccacacagcaaaagagcauucugcgcguuggaacgcuuaccucugacgaucugcucacacuggcugccgaccuugagaaacugaaguccaaagugaucagaaccgaacggccccucagcucuggcgucuauauggggaaccuguccacacagcagcuggagcagcgcagagcccuccugaauaugauuggaauggugggcggggcucagggaacccagccuggccgggauggcguugugcgcgucugggacgugaagaacccggaucuucugaauaaccaauucgggacaaugcccagccucacccuggccugucuuacgaaacagggacagguggaccugaaugaugcuguccucgcccugaccgaccugggccucaucuacacagcgaaguauccuaacucuuccgaccuggauagacuuagccaaucccaucccauucugaauaugguugacaccaagaaaucuagccucaacaucuccggguacaauuuuagccugggagccgcugugaaggccggcgcuugcaugcuugaugggggaaacaugcuggagacaaucaaagugaccccucagacggucgacggcauucucaagucuauccugaaagugaagcggucccugggcauguucguuagcgauacacccggggaacgcaauccuuaugagaacauucucuacaaaaucugucugucuggagacggcuggccguauauugccagcagaaccuccaucguggggcgggcgugggaaaacacaaccgucgaucuugagucugacggaaagccccagaaggugggcaccgccgggagcaauaaaucccugcagagcgcuggauuuccuacaggccucacguacucucaacugaugacccugaaggauuccaugaugcagcuugaccccagcgccaaaacauggauugauaucgagggcagaccugaagaccccguugagaucgcucucuaccagccgaugucugggugcuauauucacuucuuucgcgaaccuaccgaccugaagcaguucaaacaagaugccaaguacucccauggaaucgacguggccgaucuguuucccgcucagccuggccucacaagcgcggucauugaggcccugccccggaacauggugcuuaccugucagggguccgacgauaucaagagacugcucgacucucagggacgccgggauauuaaacugaucgacaucgcucugagcaaggccgauuccagaaaauucgaaaaugccgucugggaccaaugcaaggaucuuugucacaugcauacgggcgugguuguggagaaaaagaagcgcgggggcaaagaggaaauuacaccccacugcgcucucauggacuguaucauguaugaugccgcggucucuggaggccugaacauuccugugcugcgggcuguucucccgagagacaugguguuucgcaccagcucccccaaggucgugcugugaggacuagucccuguucccagagcccacuuuuuuuucuuuuuuugaaauaaaauagccugucuuucagaucuaaaaaaaaaaaaaaaaaaaaaaaaaaaaaaaaaaaaaaaaaaaaaaaaaaaaaaaaaaaaaaaaaaaaaaaaaaaaaaaaaaaaaaaaaaaaaaaaaaaa

SEQ ID NO: 21421 - RNA, 2028 nt, Artificial Sequence
  mRNA product Design a-2 (A100) comprising derived and/or modified sequence from LASV(LASV237-NIG-2010;Clade II)__AIT17639__SP-IgE_NP(2-569) (opt5)
aggagaguccgcucagccagguugcagaagcggcuuagcguguguccuaaucuucucucugcguguagguaggccugugccgcaaacaagcuuaccauggacuggaccuggauccuguuccucguggccgcugccacaagaguccacagcagcgccuccaaggaggugaaaucuuuccuguggacccagagccucagacgggaacuguccggcuacugcucuaacaucaaacuucaagucguuaaggacgcucaggcccugcuccacgggcuggauuuuagcgagguguccaaugugcagcgccuuaugagaaagcagaaacgggacgauucugaccugaagcgccucagagaucugaaccaagcggucaauaaccugguggaacucaagagcacacagcagaaauccauucugcggguuggaacgcuuaccagcgacgaucugcucacacuggcugccgaccuugagaagcugaaaucuaaggugauccgcaccgaaagaccccucuccagcggcgucuauauggggaaucugucuacacagcaacuggagcagcggcgcgcccuccugaacaugauuggaauggugggcggggcucagggaacccagccuggcagagauggcguugugcgggucugggacgugaaaaauccggaucuucugaacaaucaauucgggacaaugcccucccucacccuggccugucuuacgaagcagggacagguggaccugaacgaugcuguccucgcccugaccgaccugggccucaucuacacagcgaaguauccuaauagcucugaccuggaucgccuuucccaaagccaucccauucugaacaugguugacaucaaaaaguccucucucaauaucagcggguacaacuuuucccugggagccgcugugaaagccggcgcuugcaugcuugaugggggaaauaugcuggagaccauuaaggugacaccucagaccauggacggcauccucaaaagcauucugaaggucaaaagaucucugggcauguucguguccgauacgcccggggaacggaacccuuaugagaacauccucuacaagauuugucugagcggagacggcuggccguauaucgccucucgcacaagcauuguugggagagcgugggaaaauaccacaguggaucuugaguccgacggaaagccccagaaagucggcucugccgggagcaacaagucccugcagagcgcuggauuuccuaccggccucaccuacucucaacugaugacacugaaagauuccaugaugcagcuugaccccagcgccaagacguggaucgauaucgagggccggccugaagaccccguggagauugcucucuaccagccgaugucugggugcuauauccacuucuuuagagaaccuaccgaccugaaacaguucaagcaagaugccaaguacucccauggaauugacguugccgaucuguuucccgcucagccuggccucacaagcgcggugaucgaggcccugccccgcaauaugguccuuaccugucagggguccgacgauauuaaacggcugcucgacucucagggaagacgcgauaucaagcugaucgacauugcucugagcaaagccgauucccggagauucgaaaacgccgugugggaccaaugcaaggaucuuugucacaugcauacaggcgucgugguugagaaaaagaagcgcgggggcaaagaggaaaucacgccccacugcgcucucauggacuguauuauguaugaugccgcggugucuggaggccugaauaucccuguccugcgggcugugcucccgagagacaugguuuuucgcaccagcucccccaaggugguccugugaggacuagucccuguucccagagcccacuuuuuuuucuuuuuuugaaauaaaauagccugucuuucagaucuaaaaaaaaaaaaaaaaaaaaaaaaaaaaaaaaaaaaaaaaaaaaaaaaaaaaaaaaaaaaaaaaaaaaaaaaaaaaaaaaaaaaaaaaaaaaaaaaaaaa

SEQ ID NO: 21422 - RNA, 2028 nt, Artificial Sequence
  mRNA product Design a-2 (A100) comprising derived and/or modified sequence from LASV(LASV253-NIG-2011;Clade II)__AIT17671__SP-IgE_NP(2-569) (opt5)
aggagaguccgcucagccagguugcagaagcggcuuagcguguguccuaaucuucucucugcguguagguaggccugugccgcaaacaagcuuaccauggacuggaccuggauccuguuccucguggccgcugccacaagaguccacagcagcgccuccaaggaggugaaaucuuuccuguggacccagagccucagacgggaacuguccggcuacugcucuagcaucaaacuucaagucguuaaggacgcucaggcccugcuccacgggcuggauuuuuccgaggugucuaacgugcagcgccuuaugagaaagcagaaacgggacgauagcgaccugaagcgccucagagaucugaaucaagcggucaacaaucugguggaacucaaguccacccagcagaaaagcguucugcgggugggaacgcuuaccucugacgaucugcucacacuggcugccgaccuugagaagcugaaauccaaggucauucgcaccgaaagaccccucagcucuggcguguauauggggaaccuguccacacagcaacuggagcagcggcgcgcccuccugaauaugaucggaaugguuggcggggcucagggaacccagccuggcagagauggcgugguccgggugugggacgugaaaaacccggaucuucugaauaaccaauucgggacaaugcccagccucacccuggccugucuuacgaagcagggacaggucgaccugaaugauguugugcucgcucugaccgaccugggccucauuuacacagccaaguauccuaacucuuccgaccuggaucgccuuagccaaucccaucccauccugaauaugguggacaccaaaaagucuagccucaacauuuccggguacaauuuuagccugggagcggccgucaaagcuggcgccugcaugcuugaugggggaaacaugcuggagacaaucaaggugaccccucagacgauggacggcauccucaaaucuauucugaagguuaaaaagucccugggcauguucgugagcgauacacccggggaaagaaauccuuaugagaacauccucuacaagauuugucugucuggagacggcuggccguauaucgcuagccggaccuccauugucgggcgcgccugggaaaacacaaccguggaucuugagucugacggaaaaccccagaagguuggcaccgcggggagcaauaaaucccugcagagcgccggauuuccuacaggccucacguacucucaacugaugacccugaaggauuccaugaugcagcuugaccccagcgcuaaaacauggaucgauauugagggcagaccugaagaccccguggagaucgcccucuaccagccgaugucugggugcuauauccacuucuuucgggaaccuaccgaccugaagcaguucaagcaagaugcuaaauacucccauggaauugacgucacagaucuguuucccgcccagccuggccucaccagcgccgugaucgaggcucugcccagaaacaugguccuuacgugucagggguccgacgauauuaagcgccugcucgacucucagggacggagagauaucaaacugauugacaucgcgcugagcaaggccgauucccgccgguucgaaaaugcugugugggaccaaugcaaagaucuuugucacaugcauacaggcguuguggucgagaagaagaaaagagggggcaaggaggaaaucacaccccacugcgcccucauggacuguauuauguaugaugccgcugugucuggaggccugaacaucccuguucugcgcgccgugcucccgcgggacauggucuuuagaaccagcucccccaaaguggugcugugaggacuagucccuguucccagagcccacuuuuuuuucuuuuuuugaaauaaaauagccugucuuucagaucuaaaaaaaaaaaaaaaaaaaaaaaaaaaaaaaaaaaaaaaaaaaaaaaaaaaaaaaaaaaaaaaaaaaaaaaaaaaaaaaaaaaaaaaaaaaaaaaaaaaa

SEQ ID NO: 21423 - RNA, 2028 nt, Artificial Sequence
  mRNA product Design a-2 (A100) comprising derived and/or modified sequence from LASV(LASV254-NIG-2011;Clade II)__AIT17675__SP-IgE_NP(2-569) (opt5)
aggagaguccgcucagccagguugcagaagcggcuuagcguguguccuaaucuucucucugcguguagguaggccugugccgcaaacaagcuuaccauggacuggaccuggauccuguuccucguggccgcugccacaagaguccacagcagcgccuccaaggaggugaaaucuuuccuguggacccagagccucagacgggaacuguccggcuacugcucuagcaucaaacuucaagucguuaaggacgcucaggcccugcuccacgggcuggauuuuuccgaggugucuaacgugcagcgccuuaugagaaagcagaaacgggacgauagcgaccugaagcgccucagagaucugaaucaagcggucaacaaucugguggaacucaaguccacacagcagaaaagcguucugcgggugggaacgcuuaccucugacgaucugcucacacuggcugccgaccuugagaagcugaaauccaaggucauucgcaccgaaagaccccucagcucuggcguguauauggggaaccuguccacacagcaacuggagcagcggcgcgcccuccugaauaugaucggaaugguuggcggggcucagggaacccagccuggcagagauggcgugguccgggugugggacgugaaaaacccggaucuucugaauaaccaauucgggacaaugcccagccucacccuggccugucuuacgaagcagggacaggucgaccugaaugaugcuguucucgcccugaccgaccugggccucauuuacacagcgaaguauccuaacucuuccgaccuggaucgccuuagccaaucccaucccauccugaauaugguggacaccaaaaagucuagccucaacauuuccggguacaauuuuagccugggagccgcugugaaagccggcgcuugcaugcuugaugggggaaacaugcuggagacaaucaaggucaccccucagacgauggacggcauccucaaaucuauucugaaggugaaaaagucccugggcauguucguuagcgauacacccggggaaagaaauccuuaugagaacauccucuacaagauuugucugucuggagacggcuggccguauaucgccagccggaccuccauuguggggcgcgcgugggaaaacacaaucgucgaucuugagucugacggaaaaccccagaaggugggcaccgccgggagcaauaaaucccugcagagcgcuggauuuccuaccggccucacauacucucaacugaugacgcugaaggauuccaugaugcagcuugaccccagcgccaaaaccuggauugauaucgagggcagaccugaagaccccguugagaucgcucucuaccagccgaugucugggugcuauauucacuucuuucgggaaccuacagaccugaagcaguucaagcaagaugccaaauacucccauggaaucgacguggccgaucuguuucccgcucagccuggccucaccagcgcggucauugaggcccugcccagaaacauggugcuuacaugucagggguccgacgauaucaagcgccugcucgacucucagggacggagagauauuaaacugaucgacaucgcucugagcaaggccgauucccgccgguucgaaaaugccgucugggaccaaugcaaagaucuuugucacaugcauaccggcgugguuguggagaagaagaaaagagggggcaaggaggaaauuacgccccacugcgcucucauggacuguaucauguaugaugccgcggucucuggaggccugaacauuccugugcugcgcgcuguucucccgcgggacaugguguuuagaacaagcucccccaaagucgugcugugaggacuagucccuguucccagagcccacuuuuuuuucuuuuuuugaaauaaaauagccugucuuucagaucuaaaaaaaaaaaaaaaaaaaaaaaaaaaaaaaaaaaaaaaaaaaaaaaaaaaaaaaaaaaaaaaaaaaaaaaaaaaaaaaaaaaaaaaaaaaaaaaaaaaa

SEQ ID NO: 21424 - RNA, 2028 nt, Artificial Sequence
  mRNA product Design a-2 (A100) comprising derived and/or modified sequence from LASV(Nig08-04;Clade II)__ADU56611__SP-IgE_NP(2-569) (opt5)
aggagaguccgcucagccagguugcagaagcggcuuagcguguguccuaaucuucucucugcguguagguaggccugugccgcaaacaagcuuaccauggacuggaccuggauccuguuccucguggccgcugccacaagaguccacagcagcgccuccaaggaggugaaaucuuuccuguggacccagagccucagacgggaacuguccggcuacugcucuaacaucaaacuucaagucguuaaggacgcucaggcccugcuccacgggcuggauuuuagcgagguguccaaugugcagcgccuuaugagaaagcagaaacgggacgauggagaccugaagcgccucagagaucugaaccaagcggucaauaaccugguggaacucaagucuacccagcagaaaagcguucugcgggugggcacgcuuaccuccgacgaucugcucacacuggcugccgaccuugagaagcugaaaagcaaggucauucgcaccgaaagaccccucucuuccgggguguauaugggaaaucugagcacacagcaacuggagcagcggaaagcccuccugucuaugaucggcaugguugggggagcucagggcacccagccuggccgcgaugggguggucagagugugggacgugaagaacccggaucuucugaauaaccaauucggaacaaugcccucccucacccuggccugucuuacgaagcagggccaggucgaccugaaugaugcuguucucgcccugaccgaccuggggcucauuuacacagcgaaauauccuaacagcucugaccuggaucggcuuucccaaagccaucccauccugaauaugguggacaccaagaaauccucucucaacauuagcggauacaauuuuucccugggcgccgcugugaaggccggggcuugcaugcuugauggaggcaacaugcuggagacaaucaaagucaccccucagacgauggacggcauccucaagagcauucugaaagugaagcgcucucuggggauguucguuuccgauacacccggagaaagaaauccuuaugagaacauccucuacaagauuugucugagcggcgacggguggccguauaucgccucucggaccagcauugugggacgcgcgugggaaaacacaaccgucgaucuugaguccgacggcaaaccccagaagguggggaccgccggaucuaauaaaagccugcaguccgcuggcuuuccuacaggccucacguacagccaacugaugacccugaaggauucuaugaugcagcuugaccccuccgccaaaacauggaucgauauugaggggagaccugaagaccccguugagaucgcucucuaccagccgaugagcggaugcuauauccacuucuuucgggaaccuaccgaccugaagcaguucaagcaagaugccaaauacucucauggcauugacgugacagaucuguuuuccgcccagcccgggcucaccagcgcugucaucgaggcgcugccuagaaacauggugcuuacgugucagggauccgacgauauuaagaaacugcucgacucucagggccgccgggauaucaagcugauugacaucagccugaauaaagccgauuccagacgcuucgaaaacgcugucugggaccaaugcaaggaucuuugucacaugcauacaggggugguuguggagaagaaaaagcggggcggaaaagaggaaaucacaccccacugcgcccucauggacuguauuauguuugaugccgcugucucuggcgggcugaauauccccauucugagagccgugcucccucgcgacaugguuuuccggaccagcuccccgaaggugguccugugaggacuagucccuguucccagagcccacuuuuuuuucuuuuuuugaaauaaaauagccugucuuucagaucuaaaaaaaaaaaaaaaaaaaaaaaaaaaaaaaaaaaaaaaaaaaaaaaaaaaaaaaaaaaaaaaaaaaaaaaaaaaaaaaaaaaaaaaaaaaaaaaaaaaa

SEQ ID NO: 21425 - RNA, 2031 nt, Artificial Sequence
  mRNA product Design a-2 (A100) comprising derived and/or modified sequence from LASV(GA391;Clade III)__AAA46284__SP-IgE_NP(2-570) (opt5)
aggagaguccgcucagccagguugcagaagcggcuuagcguguguccuaaucuucucucugcguguagguaggccugugccgcaaacaagcuuaccauggacuggaccuggauccuguuccucguggccgcugccacaagaguccacagcagcgccuccaaggaggugagaucuugccuguggacccagagccuccggcgcgaacuguccggcuacuguucuaacaucaaacuucaagucguuaaggacgcucaggcccugcuccacgggcuggauuucagcgagguguccaaugugcagagacuuaugcggaaacagaagcgcgacgauggagaccugaaaagacuccgggaucugaaccaagcggucaauaaccugguggaacucaagucuacacagcagaaaagcguucugcgcgugggcacgcuuuccagcgacgaucugcucauucuggcugccgaccuugagaaacugaagucuaaagucaccagaacagaacggccccucuccagcgggguguauaugggaaaucugucuucccagcaacuggaucagcgcagagcccuccugaacaugaucggcaugaccgggguuagcggaggcggcaagggggcuucuaauggaauugugcgggucugggacgugaaaaacgccgagcuucugaauaaccaguuuggcacaaugccuucccucacccuggcuugccuuacaaagcaggggcaaguggaucugaaugacgccguccaggcgcucaccgaucugggacugaucuacacggccaaguauccgaacagcuccgaccucgaccgccugucucagagccaucccauucuuaauaugaucgauaccaaaaaguccagccugaacaucucuggcuacaauuucucccucggggcugccguuaaagcuggagccuguaugcuggacggcggcaacaugcuugagacaauuaaggugagcccucaaaccauggaugggauccugaaaucuauucucaaggugaaaaagagccugggaauguuugucuccgacacacccggcgaaagaaacccuuaugagaauauccuguacaagauuugccucucuggggauggauggagcuauaucgcgucccggaccagcauugugggccgcgccugggaaaacacgguuguggaccuggagcaggauaauaaaccccagaagaucgggaacggaggcucuaauaaaucccuucagagcgcuggcuucgccgcugggcugaucuacucucaacucaugacacugaaggacuuuaaauguuucaaccugauuccuaaugccaagaccuggauggauaucgagggaagaccggaagaccccgucgagauugcccuuuaccagccuuccagcggcugcuaugugcacuuuuuccgggaacccacagaucucaagcaguuuaaacaggacgcuaaguacucccaugggagagacguuaccgaucuguucgcggcccaaccuggacugaccucugcugugaucgaggcccucccccgcaacauggucauuacaugucagggcagcgaagacauccggaaacugcuugagucccaggggagacgcgauaucaagcugauugacaucacgcucucuaaagccgauagccggaaguuugagaaugcugugugggaccaguucaaggaucugugccacaugcauaccggcgucgugguugaaaagaagaaaagaggaggcaaggaggaaauuacaccgcacugugcccugauggacugcaucauguuugaugcggcuguguccgggggacuugacgccaaaguccuccgcgugguucugccucgggauaugguguucagaaccagcacacccaaggucgugcugugaggacuagucccuguucccagagcccacuuuuuuuucuuuuuuugaaauaaaauagccugucuuucagaucuaaaaaaaaaaaaaaaaaaaaaaaaaaaaaaaaaaaaaaaaaaaaaaaaaaaaaaaaaaaaaaaaaaaaaaaaaaaaaaaaaaaaaaaaaaaaaaaaaaaa

SEQ ID NO: 21426 - RNA, 2028 nt, Artificial Sequence
  mRNA product Design a-2 (A100) comprising derived and/or modified sequence from LASV(Nig08-A19;Clade III)__ADU56619__SP-IgE_NP(2-569) (opt5)
aggagaguccgcucagccagguugcagaagcggcuuagcguguguccuaaucuucucucugcguguagguaggccugugccgcaaacaagcuuaccauggacuggaccuggauccuguuccucguggccgcugccacaagaguccacagcagcgccuccaaggaggugaaaucuuuccuguggacccagagccucagacgggaacuguccggcuacugcucuaacaucaaacuucaagucguuaaggacgcucaggcccugcuccacgggcuggauuuuagcgagguguccaaugugcagcgccuuaugagaaagcagaaacgggacgauggagaccugaagcgccucagagaucugaaccaagcggucaauaaccugguggaacucaagucuacacagcagaaaagcguucugcgggugggcacgcuuuccagcgacgaucugcucguccuggcugccgaccuugagaagcugaaaucuaaggugguucgcaccgaaagaccccucuccagcgggauuuauaugggaaaucugucuucccagcaacuggaucagcggaaagcccuccugaacaugaucggcaugacagggggaaauggcggccgcaacaccacaagcgacgggauugugagagucugggaugugaagaaugcugagcuucugaacaaucaguucggaaccaugccuucucucacacuggccugucuuaccaagcagggccaaguggaccugaacgaugcuguccaggcccucacggaccuggggcugaucuacaccgcgaaauaucccaauuccagcgaccucgaucggcuggcccagucccauccgauucuuaacaugaucgacacaaagaaaucuagccugaauaucuccggauacaacuuuagccucggcgcugccguuaaggcuggggccugcaugcuggauggaggcaacaugcuugagaccauuaaagugucuccucaaacaauggacggcauccugaaguccauucucaaagugaagcgcagccuggggauguucaucucugauacccccggagaaagaaauccuuaugagaacauucuguacaagaucugucucagcggcgacggguggcccuauauugcgucccggacgucuaucgucggacgcgccugggaaaauacagugguugaucuggagagcgacaacaaaccucagaagaccggcaaugggggauccaacaaaagccuucagucugcuggcuuugccgcuggccugacauacucccagcucaugacccugaaggauagcaugcugcaacuugacccgaaugccaaaaccuggauggauaucgaggggagacccgaagacccuguggagauugcccucuaccagcccucuuccggaugcuauauccacuucuuucgggaaccuacagaccugaagcaguucaagcaggaugcuaaauacagccauggcauugacgucacggaucuguuugcggcccaacccgggcucaccuccgcugugaucgaggcccugccgagaaacaugguuauuacaugucagggaucugaagacauccgcaaacuucuggagagccagggccggagagauaucaagcucauugacaucucccugucuaagguggauagccgcaaauucgagaaugccgucugggaccaguuuaaggaucugugccacaugcauaccgggauuguggucgaaaagaaaaagcggggcggaaaagaggaaaucacaccucacugugcucuuauggacugcauuauguucgaugccgcgguguccggcgggguugacgcuaaggugcucagagccguccugccccgcgauaugguguuucggaccagcacgccuaaaguugugcugugaggacuagucccuguucccagagcccacuuuuuuuucuuuuuuugaaauaaaauagccugucuuucagaucuaaaaaaaaaaaaaaaaaaaaaaaaaaaaaaaaaaaaaaaaaaaaaaaaaaaaaaaaaaaaaaaaaaaaaaaaaaaaaaaaaaaaaaaaaaaaaaaaaaaa

SEQ ID NO: 21427 - RNA, 2028 nt, Artificial Sequence
  mRNA product Design a-2 (A100) comprising derived and/or modified sequence from LASV(G1180-SLE-2010;Clade IV)__AIT17169__SP-IgE_NP(2-569) (opt5)
aggagaguccgcucagccagguugcagaagcggcuuagcguguguccuaaucuucucucugcguguagguaggccugugccgcaaacaagcuuaccauggacuggaccuggauccuguuccucguggccgcugccacaagaguccacagcagcgccuccaaggagaucaaaucuuuccuguggacccagagccucagacgggaacuguccggcuacugcucuaacauuaagcugcaaguggucaaagacgcucaggcccugcuccacgggcuggauuuuagcgagguuuccaaugugcagcgccuuaugagaaaggaacggcgcgacgauaacgaccugaaaagacuccgggaucugaaucaggcggugaacaaucuggucgagcucaagucuacacaacaaaagagcauccugcgcgugggaacgcuuaccuccgacgaucugcucauucuggcugccgaccuugaaaaacuuaagagcaaaguuaucagaacagagcggccccucucugccggcguguauauggggaaccuguccagccagcagcuggaucagcgcagagcucuccugucuaugauuggaauguccagcggcaaucagcgggcccaggcugggcgcgacggagucgugagaguuugggaugugaagaacgucgagcuucugaauaaccaguucggcaccaugccuucucucacacuggccugucuuaccaaacaaggccagguggaccugaaugaugcggugcaggcccucacagaccuggggcugaucuacaccgcuaaguauccgaacacguccgaccucgaucggcugacccaaagccaucccauccuuaauaugauugacacaaagaaauccucucugaacaucagcggauacaauuuuucccucggcgccgcugucaaggccggggcgugcaugcuggauggaggcaacaugcuugaaaccauuaaaguuagcccucagacaauggacgggauccugaagucuauucucaaagugaagaaagcccugggaauguucaucuccgauacccccggcgagcgcaacccuuaugaaaauauucuguacaagaucugucucagcggcgacggguggcccuauaucgcuucuagaacgagcauuacaggacgggccugggagaacaccguggucgaucuggaguccgacggcaagccucagaaagcugggucuaauaacagcaauaagucccuucagagcgugggauuuacagccggccugaccuacucucaacucaugacccugaaagaugccaugcugcagcuugacccgaacgcuaagacauggauggauaucgaagggagacccgaggacccuguugaaauugcgcucuaccagcccuccagcggaugcuauauccacuucuuucgcgagccuacggaccugaaacaguucaagcaagaugccaaguacucucauggcauugacgugaccgaucuguuugcugcccagcccggccucacauccgccgucaucgacgcucugccgcggaauauggugaucaccugucaggggagcgaugacauuagaaaacuucuggaaucccagggacgcaaggauaucaaacucauugacaucgcccugucuaagacagauagccggaaauaugagaacgcgguuugggaccaauacaaggaucugugccacaugcauaccggcguggucguggagaagaaaaagagagggggaaaagaagagauuacgccucacugugcucuuauggacugcaucauguucgaugccgccgucuccggcgggcucaauacaucugugcugcgcgcuguucugccccgggacaugguguuuagaaccagcaccccucgcgucgugcucugaggacuagucccuguucccagagcccacuuuuuuuucuuuuuuugaaauaaaauagccugucuuucagaucuaaaaaaaaaaaaaaaaaaaaaaaaaaaaaaaaaaaaaaaaaaaaaaaaaaaaaaaaaaaaaaaaaaaaaaaaaaaaaaaaaaaaaaaaaaaaaaaaaaaa

SEQ ID NO: 21428 - RNA, 2028 nt, Artificial Sequence
  mRNA product Design a-2 (A100) comprising derived and/or modified sequence from LASV(G1442-SLE-2011;Clade IV)__AIT17181__SP-IgE_NP(2-569) (opt5)
aggagaguccgcucagccagguugcagaagcggcuuagcguguguccuaaucuucucucugcguguagguaggccugugccgcaaacaagcuuaccauggacuggaccuggauccuguuccucguggccgcugccacaagaguccacagcagcgccuccaaggaggugaaaucuuuccuguggacccagagccucagacgggaacuguccggcuacugcucuaacaucaaacuucaagucguuaaggacgcucaggcccugcuccacgggcuggauuuuagcgagguguccaaugugcagcgccuuaugagaaagcagcggcgcgacgauaacgaccugaaaagacuccgggaucugaaucaagcggucaacaaucugguggaacucaagucuacacagcaaaagagcguucugcgcgugggaacgcuuaccuccgacgaucugcucguccuggcugccgaccuugagaaacuuaagagcaaagugauuagaacagaacggccccucucugccggcguuuauauggggaaccuguccagccagcagcuggaucagcgcagagcucuccugaauaugaucggaaugucuggcgggauucagggaacccggacaggccgcgacggcguggucagagugugggaugugaagaacgccgaccuucugaauaaccaguucgggaccaugccuucccucacacuggcuugucuuaccaaacaaggacaggucgaucugaaugacguugugcaggcccucacggaccugggccugaucuacaccgcgaaguauccgaacgccagcgaucucgaccggcugacacaaucucaucccauucuuaauaugaucgauaccaagaaauccagccugaacaucuccggguacaauuuuucucucggagcugccgugaaggcuggcgccugcaugcuggacgggggaaacaugcuugagacaauuaaagucagcccucagaccauggauggcauccugaaguccauucucaaagugaagaaaacgcugggcauguucaucagcgacacacccggggagcgcaacccuuaugaaaauauucuguacaagaucugucucucuggagauggcuggcccuauauugcguccagaaccagcaucacagggcgggccugggagaacaccguuguggaccuggaaucugauggaaagccucagaaagcuggcagcaauaacuccaauaagucucuucagagcgccggguuugcugccggacugaccuacucccaacucaugacacugaaagacgccaugcugcagcuugauccgaacgcuaagacguggauggacaucgagggcagacccgaggacccugucgaaauugcgcucuaccagcccagcucuggcugcuauauccacuucuuucgcgagccuaccgaucugaaacaguucaagcaagacgccaaguacucccaugggauugaugugacagaccuguuugcugcccagcccggacucaccagcgccguuaucgaagcucugccgcggaauauggugauuacaugucagggcucugaugacaucaaaaagcugcuggagucccaggggagaaaagauaucaagcucauugacaucgcccugagcaaaaccgauucccgcaaguaugaaaacgcggucugggaccaauacaaggaucugugccacaugcauacgggaguggucguggagaaaaagaaacggggcgggaaggaggaaauuacaccucacugugcucuuauggacugcaucauguucgaugccgccguuucuggcggacucaauacccuggugcugagagcuguccucccccgcgacaugguguuucggaccagcacaccuagaguugugcugugaggacuagucccuguucccagagcccacuuuuuuuucuuuuuuugaaauaaaauagccugucuuucagaucuaaaaaaaaaaaaaaaaaaaaaaaaaaaaaaaaaaaaaaaaaaaaaaaaaaaaaaaaaaaaaaaaaaaaaaaaaaaaaaaaaaaaaaaaaaaaaaaaaaaa

SEQ ID NO: 21429 - RNA, 2028 nt, Artificial Sequence
  mRNA product Design a-2 (A100) comprising derived and/or modified sequence from LASV(G3010-SLE-2013;Clade IV)__AIT17345__SP-IgE_NP(2-569) (opt5)
aggagaguccgcucagccagguugcagaagcggcuuagcguguguccuaaucuucucucugcguguagguaggccugugccgcaaacaagcuuaccauggacuggaccuggauccuguuccucguggccgcugccacaagaguccacagcagcgccuccaaggagaucaaaucuuuccuguggacccagagccucagacgggaacuguccggcuacugcucuaacauuaaacuucaaguggucaaagacgcucaggcccugcuccacgggcuggauuuuagcgagguuuccaaugugcagcgccuuaugagaaaggaacggcgcgacgauaacgaccugaaaagacuccgggaucugaaucaggcggugaacaaucuggucgagcucaagucuacacaacaaaagagcauccugcgcgugggaacgcuuaccuccgacgaucugcucauucuggcugccgaccuugaaaaacuuaagagcaaaguuacaagaaccgagcggccccucucugccggcguguauauggggaaccuguccagccagcagcuggaucagcgcagagcucuccugucuaugaucggaauguccagcggcguccagggggcccgggcuggacgcgacggcgugguuagagugugggaugucaagaaugccgagcuucugaacaaucaguucggcacaaugccuucucucacccuggcgugucuuacaaaacaggggcaaguggaccugaacgaugugguccaggcccucaccgaccugggacugauuuacacggcuaaguauccgaauaccuccgaccucgaucggcugacacagagccaucccauccuuaacaugaucgacaccaagaaauccucucugaauauuagcggcuacaacuuuucccucggggccgcuguuaaggccggagcgugcaugcuggauggcgggaauaugcuugaaacaaucaaagugagcccucaaaccauggacggcauucugaagucuauccucaaagugaagaaagcccugggaauguucauuuccgagacgcccggcgaacgcaacccuuaugagaacauccuguacaagauuugucucagcggggauggauggcccuauaucgcuucuagaacaagcaucaccggccgggccugggagaauacagucguggaccuggaauccgaugggaagccucagaaagcuggaucuaacaauagcaacaagucccuucagagcgccggcuuuaccgccgggcugaccuacucucagcucaugacacugaaagacgcuaugcugcaacuugauccgaaugcgaagacguggauggacauugagggaagacccgaagauccuguugagguggcccucuaccagcccuccagcggcugcuauauccacuucuuucgcgaaccuaccgaccugaaacaguucaagcaggacgcuaaguacucucauggcauugaugucacagaccuguuugccgcccaacccgggcucaccuccgcugugaucgaugcccugccgcggaacaugguuauuacaugucagggaagcgacgauaucaaaaagcugcuggagucccagggcagaaaagacaucaagcucauugauaucgcgcugucuaaaaccgacagccgcaaguaugagaaugcugugugggaucaguacaaggaccugugccacaugcauacgggggucguggucgaaaagaagaaacggggaggcaaggaggaaauuacaccucacugugcccuuauggauugcaucauguucgacgccgcuguguccgggggccucaacaccucuguucugagagccgugcugccccgcgauauggucuuucggaccagcacaccuagagugguucucugaggacuagucccuguucccagagcccacuuuuuuuucuuuuuuugaaauaaaauagccugucuuucagaucuaaaaaaaaaaaaaaaaaaaaaaaaaaaaaaaaaaaaaaaaaaaaaaaaaaaaaaaaaaaaaaaaaaaaaaaaaaaaaaaaaaaaaaaaaaaaaaaaaaaa

SEQ ID NO: 21430 - RNA, 2028 nt, Artificial Sequence
  mRNA product Design a-2 (A100) comprising derived and/or modified sequence from LASV(G502-SLE-2009;Clade IV)__AIT17127__SP-IgE_NP(2-569) (opt5)
aggagaguccgcucagccagguugcagaagcggcuuagcguguguccuaaucuucucucugcguguagguaggccugugccgcaaacaagcuuaccauggacuggaccuggauccuguuccucguggccgcugccacaagaguccacagcagcgccuccaaggagaucaaaucuuuccuguggacccagagccucagacgggaacuguccggcuacugcucuaacauuaagcugcaaguggucaaagacgcucaggcccugcuccacgggcuggauuuuagcgagguuuccaaugugcagcgccuuaugagaaaggaacggcgcgacgauaacgaccugaaaagacuccgggaucugaaucaggcggugaacaaucuggucgagcucaagucuacacaacaaaagagcauccugcgcgugggaacgcuuaccuccgacgaucugcucauucuggcugccgaccuugaaaaacuuaagagcaaaguuaucagaacagagcggccccucucugccggcguguauauggggaaccuguccagccagcagcuggaucagcgcagagcucuccugucuaugauuggaauguccggcgggaaucagggaguccgggccggcaaggacggcgugguucgcgugugggaugucaaaaacgcugagcuucugaauaaccaguucgggaccaugccuagccucacacuggccugucuuaccaagcagggacaaguggaccugaaugaugcggugcaggcccucacagaccugggccugaucuacaccgcuaaguauccgaacacgucugaccucgauagacugacccagucccaucccauccuuaauaugauugacaccaaaaagagcucccugaacaucucuggguacaauuuuagccucggagccgcugucaaagccggcgcgugcaugcuggaugggggaaacaugcuugaaacaauuaagguuuccccucaaacaauggacggcauccugaaaagcauucucaaggugaaaaaggcccugggcauguucaucucugauacccccggggagcggaacccuuaugaaaauauucuguacaagaucugucucuccggagacggcuggcccuauaucgcuagccgcacgucuauuacagggagagccugggagaacaccguggucgaucuggagagcgacggaaaaccucagaaggcuggcuccaauaacucuaauaaaagccuucaguccgccggguuuacagccggacugaccuacagccagcucaugacccugaaggaugcuaugcugcaacuugacccgaacacaaaaacguggauggauaucgaaggccggcccgaggacccuguggaaauugcgcucuaccagcccucuuccggcugcuauauccacuucuuuagagagccuaccgaccugaagcaguucaagcaggaugccaaauacagccaugggauugacguuacagaucuguuugcugcccaacccggacucaccucugccgugaucgacgcucugccgcgcaauauggucaucacaugucagggcuccgaugacauucggaaacuucuggaaagccaggggagaaaggauaucaagcucauugacaucgcccugaacaaaaccgauucccgcaaguaugagaaugcggugugggaccaguacaaggaucugugccacaugcauacgggaguuguggucgagaaaaagaaacggggcgggaaggaagagauuacaccucacugugcucuuauggacugcaucauguucgaugccgccgugucuggcggacucaacaccagcguccugagagcugugcugccccgcgacaugguuuuucggaccuccacaccuagagugguccucugaggacuagucccuguucccagagcccacuuuuuuuucuuuuuuugaaauaaaauagccugucuuucagaucuaaaaaaaaaaaaaaaaaaaaaaaaaaaaaaaaaaaaaaaaaaaaaaaaaaaaaaaaaaaaaaaaaaaaaaaaaaaaaaaaaaaaaaaaaaaaaaaaaaaa

SEQ ID NO: 21431 - RNA, 2028 nt, Artificial Sequence
  mRNA product Design a-2 (A100) comprising derived and/or modified sequence from LASV(G733-SLE-2010;Clade IV)__AIT17155__SP-IgE_NP(2-569) (opt5)
aggagaguccgcucagccagguugcagaagcggcuuagcguguguccuaaucuucucucugcguguagguaggccugugccgcaaacaagcuuaccauggacuggaccuggauccuguuccucguggccgcugccacaagaguccacagcagcgccuccaaggagaucaaaucuuuccuguggacccagagccucagacgggaacuguccggcuacugcucuaacauuaagcugcaaguggucaaagacgcucaggcccugcuccacgggcuggauuuuagcgagguuuccaaugugcagcgccuuaugagaaaggaacggcgcgacgauaacgaccugaaaagacuccgggaucugaaucaggcggugaacaaucuggucgagcucaagucuacacaacaaaagagcgugcugcgcguuggaacgcuuaccuccgacgaacugcucgugcuggcugccgaucuugagaaacuuaagagcaaagucaucagaacagagcggccccucucugccggcguguauauggggaaccuguccagccagcagcuggaccagcgcagagcucuccugucuaugauuggaauguccggcgggaaucagggagcccggaccggccgcgauggcguugugagagucugggacgugaagaacgcugaacuucugaauaaccaguucgggacaaugccuagccucacccuggccugucuuacaaaacagggacaaguggaucugaaugacgcgguccaggcccucaccgaucugggccugaucuacacggcuaaguauccgaacaccucugaccucgaccggcugacacagucccaucccauucuuaauaugaucgauaccaagaaaagcucccugaacaucucuggguacaauuuuagccucggagccgcuguuaaggccggcgcgugcaugcuggacgggggaaacaugcuugagacaauuaaaguguccccucaaaccauggauggcauccucaagagcauucugaaagugaagaaagcccugggcauguucaucucugacacgcccggggaacgcaacccuuaugagaauauucuguacaagaucugucucuccggagauggcuggcccuauauugcuagcagaacaucuaucaccgggcgggccugggagaacacagucguggaccuggaaagcgauggaaagccucagaaagcuggcuccaauaacucuaauaagagccuucaguccgccggguuuaccgccggacugaccuacagccagcucaugacacugaaagacgcuaugcugcaacuugauccgaacgcgaagacguggauggacaucgagggcagacccgaagauccuguugagauugcccucuaccagcccucuuccggcugcuauauccacuucuuucgcgaaccuaccgaccugaaacaguucaagcaggacgcuaaguacagccaugggauugaugugacagaccuguuugccgcccaacccggacucaccucugcugucaucgaugcccugccgcggaauauggugauuacaugucagggcuccgacgauaucagaaaacuucuggagagccaggggcgcaaggacaucaaacucauugauaucgcgcuguccaagauugacucucggaaauaugagaacgcuguuugggaucaguacaaggaccugugccacaugcauaccggaguggucguggaaaagaaaaagagaggcgggaaagaggaaaucacgccucacugugcccuuauggauugcauuauguucgacgccgcugucagcggcggacucaauucccuggugcugcgcgccguucucccccgggauaugguguuuagaacaucuaccccucgcgucgugcugugaggacuagucccuguucccagagcccacuuuuuuuucuuuuuuugaaauaaaauagccugucuuucagaucuaaaaaaaaaaaaaaaaaaaaaaaaaaaaaaaaaaaaaaaaaaaaaaaaaaaaaaaaaaaaaaaaaaaaaaaaaaaaaaaaaaaaaaaaaaaaaaaaaaaa

SEQ ID NO: 21432 - RNA, 2028 nt, Artificial Sequence
  mRNA product Design a-2 (A100) comprising derived and/or modified sequence from MOPV/LASV reassortant(IGS-1;Clade IV)__AFY05578__SP-IgE_NP(2-569) (opt5)
aggagaguccgcucagccagguugcagaagcggcuuagcguguguccuaaucuucucucugcguguagguaggccugugccgcaaacaagcuuaccauggacuggaccuggauccuguuccucguggccgcugccacaagaguccacagcagcgccuccaaggagaucaaaucuuuccuguggacccagagccucagacgggaacuguccggcuacugcucuaacauuaaacuucaaguggucaaggacgcucaggcccugcuccacgggcuggauuuuagcgagguuuccaaugugcagcgccuuaugagaaaggaacggcgcgacgauaacgaccugaaaagacuccgggaucugaaucaggcggugaacaaucuggucgagcucaagucuacacaacaaaagagcauccugcgcgugggaacgcuuaccuccgacgaucugcucauucuggcugccgaccuugaaaaacugagaagcaagguuauccggacagagcgcccccucucugccggcguguauauggggaaccuguccagccagcagcuggaucagagacgggcucuccugaauaugauuggaaugucuggcgggaaccagggagcccgcgcuggcagagacggcgucgugcggguuugggaugugaaaaaugccgagcuucuguccaaccaguucgggaccaugccuagccucacacuggcgugucuuaccaagcagggacaagucgaccugaaugaugccgugcaggcucucacagaccugggccugaucuacaccgccaaauauccgaacacgucugaccucgaucgccugacccagucccaucccauccuuaauaugauugacacaaagaaaagcucccugaacaucucuggguacaauuuuagccucggagcugccgugaaggcgggcgccugcaugcuggaugggggaaacaugcuugaaaccauuaaggucuccccucaaacaauggacggcauccugaaaagcauucucaagguuaaaaaggcucugggcauguucaucucugauacccccggggagagaaacccuuaugaaaauauucuguacaaaaucugucucuccggagacggcuggcccuauaucgccagccggacgucuauuacagggagagcuugggagaacaccgugguggaucuggagagcgacggaaagccucagaaggccgauuccaauaacucuagcaaaucccuucagagcgccggcuuuacagcugggcugaccuacucucagcucaugacccugaaggacgcgaugcugcaacuugauccgaaugccaaaacauggauggacaucgaaggacgccccgaggacccugucgaaauugcucucuaccagcccuccagcggcugcuauauccacuucuuucgggagccuacggaucugaagcaguucaaacaggacgccaaguacucucauggcauugaugugaccgaccuguuugccacacaacccgggcucaccuccgcuguuaucgaugcccugccgagaaacauggugaucacaugucagggaagcgacgauauucgcaaacuucuggaaucccagggccggaaggacaucaagcucauugauaucgaccugucuaaaaccgauagcagaaaguaugagaaugcggucugggaccaguacaaagaucugugccacaugcauacgggggugguuguggagaagaagaaacgcggaggcaaggaagagauuacaccucacugugcucuuauggacugcaucauguucgacgccgccgucuccgggggccucaacaccucugugcugcgggcuguccugcccagagauaugguguuucgcaccagcacaccucggguugugcucugaggacuagucccuguucccagagcccacuuuuuuuucuuuuuuugaaauaaaauagccugucuuucagaucuaaaaaaaaaaaaaaaaaaaaaaaaaaaaaaaaaaaaaaaaaaaaaaaaaaaaaaaaaaaaaaaaaaaaaaaaaaaaaaaaaaaaaaaaaaaaaaaaaaaa

SEQ ID NO: 21433 - RNA, 2028 nt, Artificial Sequence
  mRNA product Design a-2 (A100) comprising derived and/or modified sequence from LASV(LM765-SLE-2012;Clade IV)__AIT17815__SP-IgE_NP(2-569) (opt5)
aggagaguccgcucagccagguugcagaagcggcuuagcguguguccuaaucuucucucugcguguagguaggccugugccgcaaacaagcuuaccauggacuggaccuggauccuguuccucguggccgcugccacaagaguccacagcagcgccuccaaggagaucaaaucuuuccuguggacccagagccucagacgggaacuguccggcuacugcucuaacauuaagcugcaaguggucaaagacgcucaggcccugcuccacgggcuggauuuuagcgagguuuccaaugugcagcgccuuaugagaaaggaacggcgcgacgauaacgaccugaaaagacuccgggaucugaaucaggcggugaacaaucuggucgagcucaagucuacacaacaaaagagcauccugcgcgugggaacgcuuaccuccgacgaucugcucauucuggcugccgaccuugaaaaacuuaagagcaaaguuacaagaaccgagcggccccucucugccggcguguauauggggaaccuguccagccagcagcuggaucagcgcagagcucuccuggacaugaucggaaugucuggcuccaaucagggggcccgggcuggacgcgauggcgucgugagaguuugggacgugaagaacgccgagcuucugaauaaccaguucggcacaaugccuagccucacccuggcgugucuuacaaaacaggggcaagucgaucugaaugacgccgugcaggcucucaccgaccugggacugauuuacacggccaaguauccgaacaccucugaucucgaccggcugacacagucccaucccauccuuaauaugaucgauaccaagaaaagcucccugaacauuucuggcuacaauuuuagccucggggcugccgugaaggcgggagccugcaugcuggacggcgggaacaugcuugaaacaaucaaagucuccccucaaaccauggauggcauucucaagagcauccugaaaguuaagaaagcucugggaauguucauuucugacgcccccggcgagcgcaacccuuaugaaaauauccuguacaagauuugucucuccggggauggauggcccuauaucgcuagcagaacgucuaucacaggccgggccugggagaacaccgugguggaccuggagagcgaugggaagccucagaaagccggauccaauggcucuaacaagagccuucaguccgcuggguuuacagcgggacugaccuacagccagcucaugacccugaaagacgccaugcugcaacuugauccgaaugcuaagacauggauggacauugaaggcagacccgaggacccugucgaaaucgcccucuaccagcccucuuccggcugcuauauucacuucuuucgcgagccuacggaucugaaacaguucaagcaggacgccaaguacagccaugggaucgaugugaccgaccuguuugcugcccaacccggacucacaucugcgguuauugaugcucugccgcggaacauggugaucaccugucagggcuccgacgauaucagaaaacuuuucgaaagccaggggcgcaaggacauuaaacugaucgauauugcccucuccaagacagacucucggaaauaugagaaugccgucugggaucaguacaaggaccugugccacaugcauaccggaaucgugguugagaagaaaaagagaggcgggaaagaagagauuacgccucacugugcucugauggauugcaucauguuugacgccgcugugagcggcggacuuaacacauccguccuccgcgccgugcugccccgggacauggucuucagaaccucuaccccucgcgugguucugugaggacuagucccuguucccagagcccacuuuuuuuucuuuuuuugaaauaaaauagccugucuuucagaucuaaaaaaaaaaaaaaaaaaaaaaaaaaaaaaaaaaaaaaaaaaaaaaaaaaaaaaaaaaaaaaaaaaaaaaaaaaaaaaaaaaaaaaaaaaaaaaaaaaaa

SEQ ID NO: 21434 - RNA, 2028 nt, Artificial Sequence
  mRNA product Design a-2 (A100) comprising derived and/or modified sequence from LASV(LM776-SLE-2012;Clade IV)__AIT17825__SP-IgE_NP(2-569) (opt5)
aggagaguccgcucagccagguugcagaagcggcuuagcguguguccuaaucuucucucugcguguagguaggccugugccgcaaacaagcuuaccauggacuggaccuggauccuguuccucguggccgcugccacaagaguccacagcagcgccuccaaggagaucaaaucuuuccuguggacccagagccucagacgggaacuguccucuuacugcagcaacauuaaacuucaaguggucaaggacgcucaggcccugcuccacggccuggauuuuuccgagguuucuaaugugcagcgccuuaugagaaaggaacggcgcgacgauaacgaccugaaaagacuccgggaucugaaucaggcggugaacaaucuggucgagcucaagagcacacaacagaaguccauccugcgcguggggacgcuuaccagcgacgaucugcucauucuggcugccgaccuugaaaaacugaagucuaaaguuacaagaaccgagcggccccucuccgccggaguguauaugggcaaccugagcucucagcagcuggaucaacgcagagcucuccuguccaugaucgggaugagcggaucuaaucagggcgcccgggcugggcgcgacggagucgugagaguuugggaugugaagaacgccgagcuucugaauaaccaguucggcacaaugccuucccucacccuggcgugucuuacaaaacagggccaagucgaccugaaugaugccgugcaggcucucaccgaccuggggcugauuuacacggccaaguauccgaacaccagcgaccucgaucggcugacacagucccaucccauccuuaauaugaucgacaccaagaaaucuagccugaacauuuccggauacaauuuuagccucggcgcugccgugaaggcgggggccugcaugcuggauggaggcaacaugcuugaaacaaucaaagucucuccucaaaccauggacgggauucugaaguccauccucaaaguuaagaaagcucugggaauguucauuagcgauacgcccggcgagcgcaacccuuaugaaaauauccuguacaagauuugucucucuggcgacggguggcccuauaucgccagcagaacauccaucaccggacgggcuugggagaacacagugguggaucuggagucugacggcaagccucagaaagccgggagcaauaacuccaauaagagccuucagucugccggauuuaccgcuggccugaccuacucccagcucaugacacugaaagaugcgaugcugcaacuugacccgaacgccaagacguggauggauauugaagggagacccgaggacccugucgaaguggcucucuaccagcccagcucuggaugcuauauccacuucuuucgcgagccuaccgaccugaaacaguucaagcaggaugccaaguacucccauggcauugacguuacagaucuguuugccgcucaacccggccucaccagcgccgugaucgacgcgcugccgcggaauauggucauuacaugucagggguccgaugacaucagaaaacuucuggaaucucagggacgcaaggauaucaaacucauugacaucgcucugagcaagaccgauucccggaaauaugagaacgccgugugggaccaguacaaggaucugugccacaugcauacgggcguuguggucgagaagaaaaagagagggggaaaagaagagauuacaccucacugugcccuuauggacugcaucauguucgaugcugccgugucuggcgggcucaauaccagcguccugcgcgcugugcugccccgggacaugguuuuuagaaccuccacaccucgcgugguccucugaggacuagucccuguucccagagcccacuuuuuuuucuuuuuuugaaauaaaauagccugucuuucagaucuaaaaaaaaaaaaaaaaaaaaaaaaaaaaaaaaaaaaaaaaaaaaaaaaaaaaaaaaaaaaaaaaaaaaaaaaaaaaaaaaaaaaaaaaaaaaaaaaaaaa

SEQ ID NO: 21435 - RNA, 2028 nt, Artificial Sequence
  mRNA product Design a-2 (A100) comprising derived and/or modified sequence from LASV(Mad39;Clade IV)__ANH09723__SP-IgE_NP(2-569) (opt5)
aggagaguccgcucagccagguugcagaagcggcuuagcguguguccuaaucuucucucugcguguagguaggccugugccgcaaacaagcuuaccauggacuggaccuggauccuguuccucguggccgcugccacaagaguccacagcagcgccuccaaggagaucaaaucuuuccuguggacccagagccucagacgggaacuguccggcuacugcucuaacauuaagcugcaaguggucaaagacgcucaggcccugcuccacgggcuggauuuuagcgagguuuccaaugugcagcgccuuaugagaaagcagcggcgcgacgauaacgaccugaaaagacuccgggaucugaaucaagcggugaacaaucuggucgaacucaagucuacacagcaaaagagcgugcugcgcguuggaacgcuuaccuccgacgaucugcucacacuggcugccgaccuugagaaacuuaagagcaaagugaccagaacagaacggccccucaccgccggcgucuauauggggaaccugucuucccagcagcuggaucagcgcagagcucuccugaauaugaucggaaugagcggcgggaaccagggagcccggacaggccgcgacggcgugguuagagugugggaugucaagaaugcugagcuucugaacaaucaguucgggaccaugccuucucucacgcuggccugucuuaccaaacaaggacagguggaccugaacgaugugguccaggcgcucacagaccugggccugauuuacaccgccaaguauccgaauacauccgaccucgaucggcugacccaaagccaucccauccuuaacaugauugacacgaauaagucuucccugaacaucagcggguacaacuuuucccucggagcugccguuaaagcuggcgccugcaugcuggaugggggaaauaugcuugagacaaucaaggugucuccucagaccauggacggcauucugaaaagcauccucaaggugaaaaagucccugggcauguucauuagcgauacacccggggaacgcaacccuuaugagaauauccuguacaaaauuugucucucuggagacggcuggcccuauaucgcguccagaaccagcauuaccgggcgggccugggaaaacacagucguggaucuggagucuggaggcaagccucagaaggcugggagcaauaacuccaauaaaucucuucagagcgccggauuugcugccggccugacguacucccaacucaugacccugaaggacgccaugcugcagcuugauccgaacgcuaaaacauggauggacaucgagggcagacccgaagauccuguugagaucgcgcucuaccagcccauuagcgggugcuauauccacuucuuucgcgaaccuaccgaccugaagcaguucaaacaagacgccaaguacucucauggaauugaugugacagaccuguuugcugcccagcccggccucaccuccgccgucaucgaggcucugccgcggaauauggugauuacgugucaggggagcgaugacaucagaaaacuuuucgaaucucagggacgcaaggauaucaagcugauugacaucgcccucuccaaaacagauagccggaaguaugagaacgcgguuugggaccaauacaaagaucugugccacaugcauaccggcguggucguggagaagaagaaaaagggcgggaaagaagagauuaccccucacugugcucugauggacugcaucauguuugaugccgccgucuccggaggccuuaauacacucgugcugagagcuguucugccccgcgacaugguguuccggaccucuacaccuaaggucgugcucugaggacuagucccuguucccagagcccacuuuuuuuucuuuuuuugaaauaaaauagccugucuuucagaucuaaaaaaaaaaaaaaaaaaaaaaaaaaaaaaaaaaaaaaaaaaaaaaaaaaaaaaaaaaaaaaaaaaaaaaaaaaaaaaaaaaaaaaaaaaaaaaaaaaaa

SEQ ID NO: 21436 - RNA, 2028 nt, Artificial Sequence
  mRNA product Design a-2 (A100) comprising derived and/or modified sequence from LASV(Z0947-SLE-2011;Clade IV)__AIT17841__SP-IgE_NP(2-569) (opt5)
aggagaguccgcucagccagguugcagaagcggcuuagcguguguccuaaucuucucucugcguguagguaggccugugccgcaaacaagcuuaccauggacuggaccuggauccuguuccucguggccgcugccacaagaguccacagcagcgccuccaaggagaucaaaucuuuccuguggacccagagccucagacgggaacuguccggcuacugcucuaacauuaagcugcaaguggucaaagacgcucaggcccugcuccacgggcuggauuuuagcgagguuuccaaugugcagcgccuuaugagaaaggaacggcgcgacgauaacgaccugaaaagacuccgggaucugaaucaggcggugaacaaucuggucgagcucaagucuacacaacaaaagagcauccugcgcgugggaacgcuuaccuccgacgaucugcucauucuggcugccgaccuugaaaaacuuaagagcaaaguuacaagaaccgagcggccccucucugccggcguguauauggggaaccuguccagccagcagcuggaucagcgcagagcucuccugaauaugaucggaaugucuggcuccaaccagggggcccggacaggacgcgacggcgucgugagaguuugggaugugaagaaugcugagcuucugaacaaucaguucggcaccaugccuagccucacacuggccugucuuaccaaacaggggcaagucgaccugaacgaugcggugcaggcccucacggaccugggacugauuuacaccgcuaaguauccgaauacaucugaccucgaucggcugacccagucccaucccauccuuaacaugaucgacacaaagaaaagcucccugaauauuucuggcuacaacuuuagccucggggccgcugugaaggccggagcgugcaugcuggauggcgggaacaugcuugaaaccaucaaagucuccccucaaacgauggacggcauucucaagagcauccugaaaguuaagaaagcccugggaauguucauuucugaugcucccggcgagcgcaauccuuaugaaaacauccuguacaagauuugucucuccggggacggauggcccuauaucgccagcagaacaucuaucaccggccgggcuugggagaauacagugguggaucuggagagcgacgggaagccucagaaagccggauccaacggcucuaauaagagccuucaguccgccggguuuaccgcuggacugaccuacagccagcucaugacacugaaagaugcgaugcugcaacuugacccgaacgccaagacguggauggauauugaaggcagacccgaggacccugucgaaaucgcucucuaccagcccucuuccggcugcuauauucacuucuuucgcgagccuaccgaccugaaacaguucaagcaggaugccaaguacagccaugggaucgacgugacagaucuguuugccgcucaacccggacucaccucugccguuauugacgcgcugccgcggaauauggugaucacaugucagggcuccgaugacaucagaaaacuuuucgaaagccaggggcgcaaggauauuaaacugaucgacauugcucucuccaagaccgauucucggaaauaugagaacgccgucugggaccaguacaaggaucugugccacaugcauacgggaaucgugguugagaagaaaaagagaggcgggaaagaagagauuacaccucacugugcccugauggacugcaucauguuugaugcugccgugagcggcggacuuaauaccuccguccuccgcgcugugcugccccgggacauggucuucagaaccucuacaccucgcgugguucugugaggacuagucccuguucccagagcccacuuuuuuuucuuuuuuugaaauaaaauagccugucuuucagaucuaaaaaaaaaaaaaaaaaaaaaaaaaaaaaaaaaaaaaaaaaaaaaaaaaaaaaaaaaaaaaaaaaaaaaaaaaaaaaaaaaaaaaaaaaaaaaaaaaaaa

SEQ ID NO: 21437 - RNA, 2066 nt, Artificial Sequence
  mRNA product Design b-4 (hSL-A64-N5) comprising derived and/or modified sequence from LASV(Josiah;Clade IV)__NP_694869__SP-IgE_NP(2-569) (opt1)
aggagagucccgcagucggcguccagcggcucugcuuguucgugugugugucguugcaggccuuauucaagcuuaccauggacuggaccuggauccuguuccucguggccgccgcgacccgcguccacagcagcgccuccaaggagaucaagagcuuccuguggacccagucccuccgccgggagcugagcggcuacugcuccaacaucaagcuccagguggucaaggacgcccaggcgcugcugcacgggcuggacuucagcgagguguccaacgugcagcgccucaugcggaaggagcgccgggacgacaacgaccugaagcgccugcgggaccucaaccaggccgucaacaaccugguggagcucaagagcacccagcagaaguccauccugcgcgugggcacccugaccagcgacgaccugcucauccuggccgccgaccuggagaagcucaaguccaaggucauccggaccgagcgcccccugagcgccgggguguacaugggcaaccuguccagccagcagcucgaccagcggcgcgcgcugcugaacaugaucgggauguccggcggcaaccagggggcccgggccggccgcgacggggugguccgggugugggacgugaagaacgccgagcuccugaacaaccaguucggcaccaugccgagccugacgcucgcgugccugaccaagcaggggcaggucgaccugaacgacgccgugcaggcccucaccgaccugggccugaucuacaccgccaaguaccccaacacguccgaccucgaccgccugacccagagccaccccauccugaacaugaucgacaccaagaaguccagccucaacaucagcggcuacaacuucucccugggggccgcggugaaggccggcgccugcaugcuggacgggggcaacaugcucgagaccaucaaggucagcccccagacgauggacggcauccugaaguccauccugaaggugaagaaggcccucgggauguucaucagcgacaccccgggcgagcggaaccccuacgagaacauccuguacaagaucugccuguccggggacggcuggcccuacaucgccagccgcaccuccaucaccgggcgggcgugggagaacacgguggucgaccucgagagcgacggcaagccccagaaggccgacuccaacaacagcuccaagagccugcaguccgccggcuucaccgccgggcugaccuacagccagcucaugacccugaaggacgccaugcugcagcuggacccgaacgcgaagacguggauggacaucgagggccgccccgaggaccccguggagaucgcccucuaccagcccuccagcgggugcuacauccacuucuuccgggagccgaccgaccugaagcaguucaagcaggacgccaaguacucccacggcaucgacgugaccgaccuguucgccacccagcccgggcucacgagcgccgucaucgacgcgcugccccgcaacauggugaucacgugccagggcuccgacgacauccgcaagcugcucgagagccagggccggaaggacaucaagcugaucgacaucgcccugagcaagaccgacucccgcaaguacgagaacgccgugugggaccaguacaaggaccucugccacaugcacaccggggucguggucgagaagaagaagcggggcgggaaggaggagaucaccccgcacugcgcccugauggacugcaucauguucgacgcggccgugagcggcgggcugaacaccuccgugcuccgcgccguccugccccgggacaugguguuccgcaccagcacgccccgggugguccugugaggacuaguaauaaggaaacuguaugaaugucugugggcaggaagugaagagauccuucuguaaagguuuuuggaauuaugucugcugaauaauaaacuuuuuugaaauaauaaaucugguagaaaaaugagaucucaaaggcucuuuucagagccaccaaaaaaaaaaaaaaaaaaaaaaaaaaaaaaaaaaaaaaaaaaaaaaaaaaaaaaaaaaaaaaaaagaauu

SEQ ID NO: 21438 - RNA, 2066 nt, Artificial Sequence
  mRNA product Design b-4 (hSL-A64-N5) comprising derived and/or modified sequence from LASV(LP;Clade I)__AAF86702__SP-IgE_NP(2-569) (opt1)
aggagagucccgcagucggcguccagcggcucugcuuguucgugugugugucguugcaggccuuauucaagcuuaccauggacuggaccuggauccuguuccucguggccgccgcgacccgcguccacagcagcaacuccaaggagaucaagagcuuccuguggacccagucccuccgccgggagcugagcggcuacugcuccaacaucaagcuccagguggucaaggacgcccaggcccugcugcacgggcuggacuucagcgagguguccaacgugcagcgccucaugcggaagcagaagcgcgacgacgcggaccugaagcggcugcgcgaccucaaccaggccgucaacaaccugguggagcucaagagcacccagcagaagaacgugcugcgggucggcacgcuguccagcgacgaccugaucacccucgccgccgaccuggagaagcugaaguccaaggugauccgcaccgagcggccccucagcuccgggguguacaugggcaaccugagcucccagcagcuggaccagcgccgggcccuccugagcaugaucgggauguccggcggcccgcaggggaaccgcaccggcggggacggcgucgugcgggugugggacgucaagaacgcggagcugcucaacaaccaguucgggacgaugcccagccugacccuggccugccucaccaagcagggccagguggaccugaacgacgccgugcaggcccugaccgaccucggccugaucuacacggcgaaguaccccaacuccagcgaccuggacaugcucacccagagccaccccauccuggggauggucgacaccaagaaguccagccugaacaucuccggcuacaacuucagccucggggccgccgugaaggccggcgccugcaugcuggacggcgggaacaugcuggagaccaucaagguguccccgcagacgauggacggcauccucaagagcauccugaaggucaagcgcucccuggggauguucaucagcgacacccccggcgagcggaaccccuacgagaacauccucuacaagaucugccuguccggggagggcuggcccuacaucgcgagccgcaccuccaucaccggccgggccugggagaacacgcugguggaccucgagagcgacaacaagccgcccaagcugaacuccgccgggagcaacaagucccugcaggccgccggccucaacgcggggcugaccuacagccagcugaugacccugaaggacugcaugcuccagcuggaccccuccagcaagaccuggaucgacaucgagggccgccccgaggacccgguggagaucgcccuguuccagcccuccagcgggugcuacauccacuucuuccgggagcccacggaccucaagcaguucaagcaggacgccaaguacagccacggcaucgacgucaccgaccuguucuccacccagcccggccugaccagcgccgugaucgaggcccucccgcgcaacauggugcugacgugccagggguccgacgacaucaagaagcugcucgagagccagggccggcgcgacaucaagcugaucgacaucucccugagcaaggcggacucccgcaaguucgagaacgccgucugggaccaguacaaggaccucugccacaugcacaccgggguggucguggagaagaagaagcggggcgggaaggaggagaucacgccccacugcgcccugcuggacugcaucauguucgacgccgccaccaccggcagccucaacaucaccacccugcgcgcggugcugccccgggacauggucuuccgcaccuccacgcccaagguggugcucugaggacuaguaauaaggaaacuguaugaaugucugugggcaggaagugaagagauccuucuguaaagguuuuuggaauuaugucugcugaauaauaaacuuuuuugaaauaauaaaucugguagaaaaaugagaucucaaaggcucuuuucagagccaccaaaaaaaaaaaaaaaaaaaaaaaaaaaaaaaaaaaaaaaaaaaaaaaaaaaaaaaaaaaaaaaaagaauu

SEQ ID NO: 21439 - RNA, 2066 nt, Artificial Sequence
  mRNA product Design b-4 (hSL-A64-N5) comprising derived and/or modified sequence from LASV(803213;Clade II)__AAF86704__SP-IgE_NP(2-569) (opt1)
aggagagucccgcagucggcguccagcggcucugcuuguucgugugugugucguugcaggccuuauucaagcuuaccauggacuggaccuggauccuguuccucguggccgccgcgacccgcguccacagcagcgccuccaaggaggugaaguccuuccuguggacccagagccuccgccgggagcugagcggcuacugcuccaacaucaagcugcaggucgugaaggacgcccaggcgcuccugcacgggcuggacuucagcgaggugaacaacguccagcgccucaugcggaagcagaagcgcgacgacggcgaccugaagcggcugcgcgaccucaaccaggccgugaacaaccugguggagcugaaguccacccagcagaaguccauccuccgggucgggacgcugaccagcgacgaccugcucacccuggccgccgaccuggagaagcucaagagcaaggugauccgcaccgagcggccccuguccagcggcguguacauggggaaccuguccacgcagcagcucgagcagcgccgggcccugcugaacaugaucggcauggucggcggggcgcagggcacccagccggggcgcgacggcguggugcgggucugggacgugaagaaccccgaccuccugaacaaccaguucgggaccaugcccagccugacccucgccugccugacgaagcagggccagguggaccugaacgacgccguccucgcccugaccgaccugggccucaucuacaccgcgaaguaccccaacuccagcgaccuggaccgccugucccagagccacccgauccucaacaugguggacaccaagaaguccagccugaacaucagcggguacaacuucucccugggcgccgccgugaaggccggggccugcaugcucgacggcggcaacaugcuggagacgaucaaggucacgccccagaccauggacgggauccucaagagcauccugaaggugaagcggucccugggcauguucgugagcgacacccccggggagcgcaaccccuacgagaacauccuguacaagaucugccucuccggcgacggguggccguacaucgcgagccggaccuccaucgucggccgcgccugggagaacaccaccguggaccuggagagcgacggcaagccccagaagguggggaccgccggcuccaacaagagccugcaguccgccggguuccccacgggccucaccuacagccagcugaugacccugaaggacuccaugaugcagcuggaccccagcgccaagaccuggaucgacaucgaggggcggccggaggaccccgucgagaucgcgcucuaccagcccauguccggcugcuacauccacuucuuccgcgagcccacggaccugaagcaguucaagcaggacgccaaguacagccacggcaucgacguggccgaccuguucccggcccagcccgggcucaccuccgccgucaucgaggcgcugccccggaacauggugcugaccugccagggcagcgacgacaucaagaagcuccuggacucccaggggcgccgcgacaucaagcugaucgacaucagccucagcaagguggacucccggaaguucgagaacgccgucugggaccagugcaaggaccugugccacaugcacaccggcgugguggucgagaagaagaagcgcgggggcaaggaggagaucacgccccacugcgcccugauggacugcaucauguucgacgccgccgugagcggcgggcucaacaucccggugcugcgggcgguccugccccgcgacaugguguuccggaccuccagccccaaggugguccucugaggacuaguaauaaggaaacuguaugaaugucugugggcaggaagugaagagauccuucuguaaagguuuuuggaauuaugucugcugaauaauaaacuuuuuugaaauaauaaaucugguagaaaaaugagaucucaaaggcucuuuucagagccaccaaaaaaaaaaaaaaaaaaaaaaaaaaaaaaaaaaaaaaaaaaaaaaaaaaaaaaaaaaaaaaaaagaauu

SEQ ID NO: 21440 - RNA, 2069 nt, Artificial Sequence
  mRNA product Design b-4 (hSL-A64-N5) comprising derived and/or modified sequence from LASV(GA391;Clade III)__CAA36646__SP-IgE_NP(2-570) (opt1)
aggagagucccgcagucggcguccagcggcucugcuuguucgugugugugucguugcaggccuuauucaagcuuaccauggacuggaccuggauccuguuccucguggccgccgcgacccgcguccacagcagcgccuccaaggaggugcgcagcuuccuguggacccagucccuccggcgcgagcugagcggcuacugcuccaacaucaagcugcaggucgugaaggacgcccaggcgcuccugcacgggcuggacuucagcgagguguccaacguccagcggcucaugcgcaagcagaagcgggacgacggcgaccugaagcgccugcgggaccucaaccaggccgugaacaaccugguggagcucaagagcacccagcagaaguccguccugcgcguggggacccugagcuccgacgaccugcucauccuggccgccgaccuggagaagcucaagagcaaggugacccggaccgagcgcccccuguccagcggcgucuacauggggaaccuguccagccagcagcucgaccagcggcgcgcccugcugaacaugaucggcaugaccggcguguccgggggcgggaagggcgcgagcgacgggaucgugcgggucugggacgugaagaacgccgagcuccugaacaaccaguucggcacgaugccgucccugacccucgccugccugaccaagcagggccagguggaccugaacgacgccguccaggcgcucaccgaccuggggcugaucuacacggccaaguaccccaacagcagcgaccucgaccgccugucccagagccaccccauccugaacaugaucgacaccaagaaguccagccucaacaucuccggcuacaacuucagccugggggccgccgugaaggccggcgcgugcaugcuggacggcgggaacaugcucgagaccaucaaggugagcccccagaccauggacggcauccucaaguccauccugaaggucaagaagucccuggggauguucgugagcgacacgccgggcgagcggaaccccuacgagaacauccuguacaagaucugccuguccggggacggcuggcccuacaucgccagccgcaccuccaucgugggccgggccugggagaacaccgucguggaccucgagcaggacaacaagccccagaagaucgggaacggcgggagcaacaagucccugcagagcgccggcuucgccgcggggcugaccuacucccagcucaugacgcugaaggacuucaagugcuucaaccugaucccgaacgccaagaccuggauggacaucgagggccgccccgaggaccccguggagaucgcccuguaccagcccagcuccggcugcuacguccacuucuuccgggagccgaccgaccucaagcaguucaagcaggacgccaaguacagccacgggaucgacgugaccgaccuguucgccgcgcagcccggccugacgagcgccgucaucgaggcccucccccgcaacauggugaucacgugccagggguccgaggacauccggaagcugcuggagagccagggccgccgcgacaucaagcucaucgacaucacccuguccaaggccgacagccggaaguucgagaacgccgugugggaccaguucaaggaccugugccacaugcacaccggggucgugguggagaagaagaagcgcggcggcaaggaggagaucacgccccacugcgcgcucauggacugcaucauguucgacgccgccgucuccgggggccuggacgccaaggugcugcgggugguccucccgcgcgacaugguguuccggaccagcacccccaaggugguccugugaggacuaguaauaaggaaacuguaugaaugucugugggcaggaagugaagagauccuucuguaaagguuuuuggaauuaugucugcugaauaauaaacuuuuuugaaauaauaaaucugguagaaaaaugagaucucaaaggcucuuuucagagccaccaaaaaaaaaaaaaaaaaaaaaaaaaaaaaaaaaaaaaaaaaaaaaaaaaaaaaaaaaaaaaaaaagaauu

SEQ ID NO: 21441 - RNA, 2066 nt, Artificial Sequence
  mRNA product Design b-4 (hSL-A64-N5) comprising derived and/or modified sequence from LASV(AV;Clade V)__CCA30315__SP-IgE_NP(2-569) (opt1)
aggagagucccgcagucggcguccagcggcucugcuuguucgugugugugucguugcaggccuuauucaagcuuaccauggacuggaccuggauccuguuccucguggccgccgcgacccgcguccacagcagcgccuccaaggaggugaaguccuuccuguggacccagagccuccgccgggagcugagcggcuacugcuccaacaucaagcugcaggucgugaaggacgcccaggcgcuccugcacgggcuggacuucagcgagguguccaacguccagcgccucaugcggaagcagcgccgggacgacagcgaccugaagcgccugcgggaccucaaccaggccgugaacaaccugguggagcugaaguccacccagcagaaguccguccuccgcgugggcacgcugagcagcgacgaccugcucacccuggccgccgaccuggagaagcucaaguccaaggugacccggaccgagcgcccccugagcuccggggucuacaugggcaaccugagcucccagcagcucgaccagcggcgcgcccugcugaaccucaucgggaugacgaacggcagccagggcucccaggcggggcgggacggcguggugcgcgucugggacgugaagaacgccgagcugcugaacaaccaguucgggaccaugccgagccucacccuggccugccugaccaagcagggccagguggaccucaacgacgucgugcaggcccugacggaccuggggcucaucuacaccgcgaaguaccccaacaccagcgaccuggaccggcugacccagucccaccccauccucaacaugaucgacacgaagaaguccagccugaacaucagcggcuacaacuucucccugggcgccgccgugaaggccggggccugcaugcucgacggcgggaacaugcuggagaccaucaaggucagcccccaguccauggacggcauccucaagagcauccugaaggugaagcgcgcgcugggcauguucguguccgacaccccgggggagcggaaccccuacgagaacauccuguacaagaucugccucagcggcgacggguggcccuacaucgccucccgcaccagcaucgucggccgggccugggagaacacggugguggaccuggagaccgacgggaagccccagaagaucggcuccggcaacagcaacaagucccugcagagcgccggguucuccgccggccucaccuacagccagcugaugacccugaaggacgcgaugcugcagcucgacccgaacgccaagacguggauggacaucgaggggcgccccgaggaccccgucgagguggcccuguaccagcccaucuccggcugcuacauccacuucuuccgggagccgaccgaccugaagcaguucaagcaggacgccaaguacagccacgggaucgacaucgccgaccucuucgcggcccagcccggccugaccagcgccgucaucgaggcccugccccgcaacauggugaucacgugccagggcuccgaggacaucaagaagcuccuggagagccaggggcgcaaggacaucaagcugaucgacaucgcccucuccaagaucgacagccggaaguucgagaacgcggugugggaccaguacaaggaccugugccacaugcacaccggcgucgugguggagaagaagaagcgcgggggcaaggaggagaucaccccgcacugcgcccugauggacugcaucauguucgacgccgccgucuccgggggccucaacacccuggugcugcgggcggugcucccccgcgacauggucuuccggaccagcacgccccgcguggugcugugaggacuaguaauaaggaaacuguaugaaugucugugggcaggaagugaagagauccuucuguaaagguuuuuggaauuaugucugcugaauaauaaacuuuuuugaaauaauaaaucugguagaaaaaugagaucucaaaggcucuuuucagagccaccaaaaaaaaaaaaaaaaaaaaaaaaaaaaaaaaaaaaaaaaaaaaaaaaaaaaaaaaaaaaaaaaagaauu

SEQ ID NO: 21442 - RNA, 2066 nt, Artificial Sequence
  mRNA product Design b-4 (hSL-A64-N5) comprising derived and/or modified sequence from LASV(Togo/2016/7082;Clade VI)__AMR44578__SP-IgE_NP(2-569) (opt1)
aggagagucccgcagucggcguccagcggcucugcuuguucgugugugugucguugcaggccuuauucaagcuuaccauggacuggaccuggauccuguuccucguggccgccgcgacccgcguccacagcagcaacuccaaggaggugaaguccuuccuguggacccagagccuccgccgggagcugagcggcuacugcuccaacaucaagcugcaggucgugaaggacgcccaggcccuccugcacgggcuggacuucagcgagguguccaacguccagcgccucaugcggaagcagaagcgcgacgacggcgaccugaagcggcugcgcgaccucaaccaggcggugaacaaccugguggagcucaagagcguccagcagaaguccauccugcggguggggacccugaccagcgacgaccugcucacccuggccgccgaccuggagaagcucaaguccaaggugacccgcaccgagcggccccugagcuccggcgucuacauggggaaccugagcucccagcagcucgaccagcgccgggcccugcugagcaugaucggcauguccggcgggaaccagaacagccagccgaagggcgacgggguggugcgcgucugggacgugaagaacgccgaccuccugaacaaccaguucggcacgaugcccucccugacccucgcgugccugaccaagcagggccagguggaccugaacgacgccguccaggcccucaccgaccuggggcugaucuacacggccaaguaccccaacagcagcgaccucgaccggcugucccagagccaccccauccugaacaugaucgacaccaagaaguccagccucaacaucuccggcuacaacuucagccugggggcggccaucaagaccggcgccugcaugcuggacgggggcaacaugcucgagaccaucaaggugacgccgcagaccauggacggcauccugaaguccauccugaaggugaagcgcagccucgggauguucaucuccgacacccccggcgagcggaaccccuacgagaacauccuguacaagaucugccugagcggggacggcuggcccuacaucgccucccgcaccgccaucaucgggcgggcgugggagaacacggucguggaccucgagagcgacuccaagccgcagaagaucggcagcaacggcuccaacaagagccugcaguccgccggguucgcccccggccugaccuacagccagcucaugacccugaaggacuccaugcugcagcuggaccccaacgccaagaccuggaucgacaucgaggggcgccccgaggacccgguggaggucgcccucuuccagcccaucagcggcugcuacauccacuucuuccgggagcccacggaccugaagcaguucaagcaggacgcgaaguacagccacgggaucgacgugaccgaccuguucgccgcccagcccggccucaccuccgccgugaucgaggcccugccgcgcaacaugguccugaccugccagggcagcgacgacaucaagaagcuccuggacucccaggggcggcgcgacaucaagcugaucgacgugagccucaacaagaucgacucccgcaaguucgagaacgcggucugggaccaguacaaggaccugugccacaugcacacgggcgugguggucgagaagaagaagaagggcgggaaggaggagaucacgccccacugcgcccugcucgacugcaucauguucgacgccgccgugagcgggggccugaacgccaccgugcugcgggcgguccucccccgcgacaugguguuccggaccuccagccccaaggugguccugugaggacuaguaauaaggaaacuguaugaaugucugugggcaggaagugaagagauccuucuguaaagguuuuuggaauuaugucugcugaauaauaaacuuuuuugaaauaauaaaucugguagaaaaaugagaucucaaaggcucuuuucagagccaccaaaaaaaaaaaaaaaaaaaaaaaaaaaaaaaaaaaaaaaaaaaaaaaaaaaaaaaaaaaaaaaaagaauu

SEQ ID NO: 21443 - RNA, 2066 nt, Artificial Sequence
  mRNA product Design b-4 (hSL-A64-N5) comprising derived and/or modified sequence from LASV(KAK-428;Clade n.d. (VII))__ANH09741__SP-IgE_NP(2-569) (opt1)
aggagagucccgcagucggcguccagcggcucugcuuguucgugugugugucguugcaggccuuauucaagcuuaccauggacuggaccuggauccuguuccucguggccgccgcgacccgcguccacagcagcaacuccaaggaggugaaguccuuccuguggacccagagccuccgccgggagcugagcggcuacugcaccaacaucaagcugcaggucgugaaggacgcccaggcccuccugcacgggcuggacuucuccgaggugagcaacguccagcgccucaugcggaagcagaagcgcgacgacaacgaccugaagcggcugcgcgaccucaaccaggcggugaacaaccugguggagcugaaguccguccagcagaaguccgugcucaaggugggcacgcugaacagcgacgaccugcucacccuggccgccgaccuggagaagcucaagagcaaggucgugcggaccgagcgcccccuguccagcgggguguacaugggcaaccuguccagccagcagcucgaccagcggcgcgcccugcugaacaugaucgggauggccggcggcucccaggggaaccagccgagccgggacggcgucgugcgcgugugggacgucaagaacgcggaccuccugaacaaccaguucgggaccaugcccucccugacgcucgccugccugaccaagcagggccagguggaccugaacgacgugguccucgcccugaccgaccuggggcucaucuacaccgccaaguaccccaacagcuccgaccuggaccggcugagccagaaccaccccgugcucaacaugaucgacgugaacaagagcucccugaacaucagcggcuacaacuucucccugggcgcggccgucaaggccggggccugcaugcucgacggcgggaacaugcuggagacgaucaagaucagcccgcagaccguggacggcauccugaaguccauccucaaggugaagcgcgcccugggcauguucgucagcgacacccccggggagcggaaccccuacgagaacauccuguacaaggugugccucuccggcaacggguggcccuacaucgcgagccgcaccuccaucgucggccgggccugggagaacacggugguggaccuggagagcaacaagaaccagccgaaggucgggaacaacggcuccaacaagaugcugcagagcuccggcuucgccaccgggcucaccuacagccagcugaugacccugcgcgacuccaugcugcagcucgaccccacggccaagaccuggaucgacaucgagggccggcccgaggaccccguggagcuggcccuguuccagccgagcuccgggugcuacauccacuucuuccgcgagcccaccgaccucaagcaguucaagcaggacgcgaaguacagccacggcaucgacgugaacgaccuguucuccgcccagcccgggcugaccagcgccguccucgaggcccugccccggaacauggugcugacgugccagggcagcgacgacauccgcaagcuccuggacucccaggaccgcaaggacaucaagcugaucgacaucagccucuccaaggccgacgcgcggaaguucgagaacgacgugugggaccaguucaaggaccugugccacaugcacaccggcaucgucguggagaagaagaagaagggcgggaagcaggagaugaccccgcacugcgcccugcucgacugcaucauguucgacgccgccgugagcgggggccugaacguccccacccugcgcgccgugcuccccacggacaugguguuccggaccaucaccaccaaggucgugcugugaggacuaguaauaaggaaacuguaugaaugucugugggcaggaagugaagagauccuucuguaaagguuuuuggaauuaugucugcugaauaauaaacuuuuuugaaauaauaaaucugguagaaaaaugagaucucaaaggcucuuuucagagccaccaaaaaaaaaaaaaaaaaaaaaaaaaaaaaaaaaaaaaaaaaaaaaaaaaaaaaaaaaaaaaaaaagaauu

SEQ ID NO: 21444 - RNA, 2066 nt, Artificial Sequence; identical to SEQ ID NO: 21438
  mRNA product Design b-4 (hSL-A64-N5) comprising derived and/or modified sequence from LASV(Pinneo-NIG-1969;Clade I)__AIT17837__SP-IgE_NP(2-569) (opt1)

SEQ ID NO: 21445 - RNA, 2066 nt, Artificial Sequence
  mRNA product Design b-4 (hSL-A64-N5) comprising derived and/or modified sequence from LASV(ISTH0009-NIG-2011;Clade II)__AIT17405__SP-IgE_NP(2-569) (opt1)
aggagagucccgcagucggcguccagcggcucugcuuguucgugugugugucguugcaggccuuauucaagcuuaccauggacuggaccuggauccuguuccucguggccgccgcgacccgcguccacagcagcguguccaaggaggucaagagcuuccuguggacccagucccuccgccgggagcugagcggcuacugcuccaacaucaagcuccagguggugaaggacgcccaggcccugcugcacgggcuggacuucagcgaggucuccaacgugcagcgccucaugcggaagcagaagcgcgacgacagcgaccugaagcggcugcgcgaccucaaccaggcggugaacaaccuggucgagcugaaguccacccagcagaaguccauccuccgggugggcacccugaccagcgacgaccugcucacccuggccgccgaccuggagaagcucaagagcaaggugauccgcaccgagcggccccuguccagcggggucuacaugggcaaccuguccacgcagcagcucgagcagcgccgggcccugcugaacaugaucgggauggugggcggcgcccaggggacccagccgggccgcgacggggugguccgggugugggacgugaagaaccccgaccuccugaacaaccaguucggcaccaugcccagccugacccucgcgugccugacgaagcaggggcaggucgaccugaacgacgccgugcucgcccugaccgaccugggccucaucuacaccgccaaguaccccaacuccagcgaccuggaccgccugucccagagccacccgauccucaacaugguggacaucaagaaguccagccugaacaucagcggcuacaacuucucccugggggcggccgucaaggccggcgccugcaugcucgacgggggcaacaugcuggagaccaucaaggugacgccccagaccauggacggcauccucaagagcauccugaaggugaagcggucccuggggauguucgucagcgacacccccggcgagcgcaaccccuacgagaacauccuguacaagaucugccucuccggggacggcuggccguacaucgccagccggaccuccaucguggggcgcgcgugggagaacacgaccguggaccuggagagcgacggcaagccccagaaggucggcuccgccgggagcaacaagucccugcagagcgccggcuuccccaccgggcucaccuacucccagcugaugacgcugaaggacagcaugaugcagcuggaccccuccgccaagaccuggaucgacaucgagggccggccggaggaccccguggagaucgcccucuaccagcccaugagcgggugcuacauccacuucuuccgcgagcccaccgaccugaagcaguucaagcaggacgcgaaguacucccacggcaucgacgucgccgaccuguucccggcccagcccggccucaccagcgccgugaucgaggcccugccccggaacauggugcugacgugccaggggagcgacgacaucaagcgccuccuggacucccagggccgccgggacaucaagcugaucgacaucgcgcucagcaaggccgacucccgccgguucgagaacgccgucugggaccagugcaaggaccugugccacaugcacaccggggugguggucgagaagaagaagcgcggcgggaaggaggagaucacgccccacugcgcccugauggacugcaucauguacgacgccgcggugagcggcggccucaacaucccggugcugcgggccguccugccccgcgacaugguguuccggaccuccagccccaaggugguccucugaggacuaguaauaaggaaacuguaugaaugucugugggcaggaagugaagagauccuucuguaaagguuuuuggaauuaugucugcugaauaauaaacuuuuuugaaauaauaaaucugguagaaaaaugagaucucaaaggcucuuuucagagccaccaaaaaaaaaaaaaaaaaaaaaaaaaaaaaaaaaaaaaaaaaaaaaaaaaaaaaaaaaaaaaaaaagaauu

SEQ ID NO: 21446 - RNA, 2066 nt, Artificial Sequence
  mRNA product Design b-4 (hSL-A64-N5) comprising derived and/or modified sequence from LASV(ISTH2010-NIG-2012;Clade II)__AIT17483__SP-IgE_NP(2-569) (opt1)
aggagagucccgcagucggcguccagcggcucugcuuguucgugugugugucguugcaggccuuauucaagcuuaccauggacuggaccuggauccuguuccucguggccgccgcgacccgcguccacagcagcgccuccaaggaggugaaguccuuccuguggacccagagccuccgccgggagcugagcggcuacugcuccaacaucaagcugcaggucgugaaggacgcccaggcgcuccugcacgggcuggacuucagcgagguguccaacguccagcgccucaugcggaagcagaagcgcgacgacagcgaccugaagcggcugcgcgaccucaaccaggccgugaacaaccugguggagcugaaguccacccagcagaaguccauccuccgggucggcacgcugaccagcgacgaccugcucacccuggccgccgaccuggagaagcucaagagcaaggugauccgcaccgagcggccccuguccagcgggguguacaugggcaaccuguccacgcagcagcucgagcagcgccgggcccugcugaaccucaucgggauggucggcggcgcgcaggggacccagccgggccgcgacgggguggugcgggucugggacgugaagaaccccgaccugcugaacaaccaguucggcaccaugcccagccucacccuggccugccugacgaagcagggccagguggaccucaacgacgccguccuggcccugaccgaccucgggcugaucuacaccgcgaaguaccccaacuccagcgaccuggaccgccucucccagagccacccgauccugaacaugguggacaccaagaaguccagccugaacaucagcggcuucaacuucucccucggggccgccgugaaggccggcgccugcaugcuggacgggggcaacaugcuggagacgaucaaggucacgccccagaccauggacggcauccucaagagcauccugaaggugaagaagucccuggggauguucgugagcgacacccccggcgagcggaaccccuacgagaacauccucuacaagaucugccuguccggggacggcuggccguacaucgcgagccgcaccuccaucgucgggcgggccugggagaacaccaccguggaccuggagagcgacggcaagccccacaaggugggcaccgccggguccaacaagagccuccaguccgccggcuuccccacggggcugaccuacagccagcugaugacccugaaggacuccaugaugcagcucgaccccagcgccaagaccuggaucgacaucgagggccgcccggaggaccccgucgagaucgcgcuguaccagcccauguccgggugcuacauccacuucuuccgggagcccacggaccugaagcaguucaagcaggacgccaaguacagccacggcaucgacguggccgaccucuucccggcccagcccggccugaccuccgccgucaucgaggcgcugccccgcaacauggugcugaccugccaggggagcgacgacaucaagcggcuccuggacagccagggccgccgcgacaucaagcucaucgacaucgcccuguccaaggccgacagccggcgcuucgagaacgccgugugggaccagugcaaggaccugugccacaugcacaccggggucgugguggagaagaagaagcggggcgggaaggaggagaucacgccccacugcgcccucauggacugcaucauguacgacgcggccgucuccggcggccugaacaucccggugcugcgcgccgugcucccccgggacauggucuuccgcaccagcucccccaagguggugcugugaggacuaguaauaaggaaacuguaugaaugucugugggcaggaagugaagagauccuucuguaaagguuuuuggaauuaugucugcugaauaauaaacuuuuuugaaauaauaaaucugguagaaaaaugagaucucaaaggcucuuuucagagccaccaaaaaaaaaaaaaaaaaaaaaaaaaaaaaaaaaaaaaaaaaaaaaaaaaaaaaaaaaaaaaaaaagaauu

SEQ ID NO: 21447 - RNA, 2066 nt, Artificial Sequence
  mRNA product Design b-4 (hSL-A64-N5) comprising derived and/or modified sequence from LASV(Lassa virus/H.sapiens-wt/NGA/2015/ISTH_0543;Clade II)__AVO03640__SP-IgE_NP(2-569) (opt1)
aggagagucccgcagucggcguccagcggcucugcuuguucgugugugugucguugcaggccuuauucaagcuuaccauggacuggaccuggauccuguuccucguggccgccgcgacccgcguccacagcagcgccuccaaggaggugaaguccuuccuguggacccagagccuccgccgggagcugagcggcuacugcuccaacaucaagcugcaggucgugaaggacgcccaggcgcuccugcacgggcuggacuucagcgagguguccaacguccagcgccucaugcggaagcagaagcgcgacgacagcgaccugaagcggcugcgcgaccucaaccaggccgugaacaaccugguggagcugaaguccacccagcagaaguccauccuccgggucggcacgcugaccagcgacgaccugcucacccuggccgccgaccuggagaagcucaagagcaaggugauccgcaccgagcggccccuguccagcgggguguacaugggcaaccuguccacgcagcagcucgagcagcgccgggcccugcugaacaugaucgggauggucggcggcgcgcaggggacccagccgggccgcgacgggguggugcgggucugggacgugaagaaccccgaccuccugaacaaccaguucggcaccaugcccagccugacccucgccugccugacgaagcagggccagguggaccugaacgacgccguccucgcccugaccgaccuggggcucaucuacaccgcgaaguaccccaacuccagcgaccuggaccgccugucccagagccacccgauccucaacaugguggacaccaagaaguccagccugaacaucagcggcuacaacuucucccugggggccgccgugaaggccggcgccugcaugcucgacgggggcaacaugcuggagacgaucaaggucacgccccagaccauggacggcauccucaagagcauccugaaggugaagaagucccuggggauguucgugagcgacacccccggcgagcggaaccccuacgagaacauccuguacaagaucugccucuccggggacggcuggccguacaucgcgagccgcaccuccaucgucgggcgggccugggagaacaccaccguggaccuggagagcgacggcaagccccagaaggugggcuccgccgggagcaacaagucccugcagagcgccggcuuccccaccgggcucacguacucccagcugaugacccugaaggacagcaugaugcagcuggaccccuccgccaagaccuggaucgacaucgagggccgcccggaggaccccgucgagaucgcgcucuaccagcccaugagcgggugcuacauccacuucuuccgggagcccaccgaccugaagcaguucaagcaggacgccaaguacucccacggcaucgacguggccgaccuguucccggcccagcccggccucacgagcgccgucaucgaggcgcugccccgcaacauggugcugaccugccaggggagcgacgacaucaagcggcuccuggacucccagggccgcaaggacaucaagcugaucgacaucgcccucagcaaggccgacucccgccgguucgagaacgccgugugggaccagugcaaggaccugugccacaugcacaccggggucgugguggagaagaagaagcgcggcgggaaggaggagaucacgccccacugcgcccugauggacugcaucauguacgacgcggccgucagcggcggccucaacaucccggugcugcgggccgugcugccccgcgacauggucuuccggaccuccagccccaagguggugcucugaggacuaguaauaaggaaacuguaugaaugucugugggcaggaagugaagagauccuucuguaaagguuuuuggaauuaugucugcugaauaauaaacuuuuuugaaauaauaaaucugguagaaaaaugagaucucaaaggcucuuuucagagccaccaaaaaaaaaaaaaaaaaaaaaaaaaaaaaaaaaaaaaaaaaaaaaaaaaaaaaaaaaaaaaaaaagaauu

SEQ ID NO: 21448 - RNA, 2066 nt, Artificial Sequence
  mRNA product Design b-4 (hSL-A64-N5) comprising derived and/or modified sequence from LASV(Lassa virus/H.sapiens-wt/NGA/2016/ISTH_0009;Clade II)__AVO03572__SP-IgE_NP(2-569) (opt1)
aggagagucccgcagucggcguccagcggcucugcuuguucgugugugugucguugcaggccuuauucaagcuuaccauggacuggaccuggauccuguuccucguggccgccgcgacccgcguccacagcagcgccuccaaggaggugaaguccuuccuguggacccagagccuccgccgggagcugagcggcuacugcuccaacaucaagcugcaggucgugaaggacgcccaggcgcuccugcacgggcuggacuucagcgagguguccaacguccagcgccucaugcggaagcagaagcgcgacgacagcgaccugaagcggcugcgcgaccucaaccaggccgugaacaaccugguggagcugaaguccacccagcagaaguccauccuccgggucggcacgcugaccagcgacgaccugcucacccuggccgccgaccuggagaagcucaagagcaaggugauccgcaccgagcggccccuguccagcgggguguacaugggcaaccuguccacgcagcagcucgagcagcgccgggcccugcugaacaugaucgggauggucggcggcgcgcaggggacccagccgggccgcgacgggguggugcgggucugggacgugaagaaccccgaccuccugaacaaccaguucggcaccaugcccagccugacccucgccugccugacgaagcagggccagguggaccugaacgacgccguccucgcccugaccgaccuggggcucaucuacaccgcgaaguaccccaacuccagcgaccuggaccgccugucccagagccacccgauccucaacaugguggacaccaagaaguccagccugaacaucagcggcuacaacuucucccugggggccgccgugaaggccggcgccugcaugcucgacgggggcaacaugcuggagacgaucaaggucacgccccagaccauggacggcauccucaagagcauccugaaggugaagaagucccuggggauguucgugagcgacacccccggcgagcggaaccccuacgagaacauccuguacaagaucugccucuccggggacggcuggccguacaucgcgagccgcaccuccaucgucgggcgggccugggagaacaccaccguggaccuggagagcgacggcaagccccagaaggugggcuccgccgggagcaacaagucccugcagagcgccggcuuccccaccgggcucacguacucccagcugaugacccugaaggacagcaugaugcagcuggaccccuccgccaagaccuggaucgacaucgagggccgcccggaggaccccgucgagaucgcgcucuaccagcccaugagcgggugcuacauccacuucuuccgggagcccaccgaccugaagcaguucaagcaggacgccaaguacucccacggcaucgacguggccgaccuguucccggcccagcccggccucacgagcgccgucaucgaggcgcugccccgcaacauggugcugaccugccaggggagcgacgacaucaagcggcuccuggacucccagggccgccgcgacaucaagcugaucgacaucgcccucagcaaggccgacucccggcgcuucgagaacgccgugugggaccagugcaaggaccugugccacaugcacaccggggucgugguggagaagaagaagcggggcgggaaggaggagaucacgccccacugcgcccugauggacugcaucauguacgacgcggccgucagcggcggccucaacaucccggugcugcgcgccgugcugccccgggacauggucuuccgcaccuccagccccaagguggugcucugaggacuaguaauaaggaaacuguaugaaugucugugggcaggaagugaagagauccuucuguaaagguuuuuggaauuaugucugcugaauaauaaacuuuuuugaaauaauaaaucugguagaaaaaugagaucucaaaggcucuuuucagagccaccaaaaaaaaaaaaaaaaaaaaaaaaaaaaaaaaaaaaaaaaaaaaaaaaaaaaaaaaaaaaaaaaagaauu

SEQ ID NO: 21449 - RNA, 2066 nt, Artificial Sequence
  mRNA product Design b-4 (hSL-A64-N5) comprising derived and/or modified sequence from LASV(Lassa virus/H.sapiens-wt/NGA/2016/ISTH_0017;Clade II)__AVO03568__SP-IgE_NP(2-569) (opt1)
aggagagucccgcagucggcguccagcggcucugcuuguucgugugugugucguugcaggccuuauucaagcuuaccauggacuggaccuggauccuguuccucguggccgccgcgacccgcguccacagcagcgccuccaaggaggugaaguccuuccuguggacccagagccuccgccgggagcugagcggcuacugcuccagcaucaagcugcaggucgugaaggacgcccaggcgcuccugcacgggcuggacuucuccgaggugagcaacguccagcgccucaugcggaagcagaagcgcgacgacuccgaccugaagcggcugcgcgaccucaaccaggccgugaacaaccugguggagcucaagagcacccagcagaaguccauccugcgggucggcacgcugaccagcgacgaccugcucacccuggccgccgaccuggagaagcucaaguccaaggugauccgcaccgagcggccccugagcuccgggguguacaugggcaaccugagcacgcagcagcucgagcagcgccgggcccugcugaacaugaucgggauggcgggcggcgcccaggggacccagccgggccgcgacggggucgugcgggugugggacgucaagaaccccgaccuccugaacaaccaguucggcaccaugcccucccugacccucgccugccugacgaagcagggccagguggaccugaacgacgccgugcucgcgcugaccgaccuggggcucaucuacaccgccaaguaccccaacagcuccgaccuggaccgccugagccagagccacccgauccucaacauggucgacaccaagaaguccagccugaacaucuccggcuacaacuucagccugggggccgccgugaaggccggcgcgugcaugcucgacgggggcaacaugcuggagacgaucaaggugacgccccagaccauggacggcauccugaaguccauccucaaggucaagcggagccuggggauguucguguccgacgcccccggcgagcgcaaccccuacgagaacauccuguacaagaucugccucagcggggacggcuggccguacaucgccucccggaccagcaucguggggcgcgccugggagaacaccaccgucgaccuggaguccgacggcaagccccagaaggugggcgccaccgggagcaacaagucccugcagagcgcgggcuuccccaccgggcucacguacucccagcugaugacccugaaggacagcaugaugcagcuggaccccuccgccaagaccuggaucgacaucgagggccggccggaggaccccguggaggucgcccucuaccagcccgugagcgggugcuacauccacuucuuccgcgagcccaccgaccugaagcaguucaagcaggacgccaaguacucccacggcaucgacgucgccgaccuguucccggcgcagcccggccucacgagcgccgugaucgaggcccugccccggaacauggugcugaccugccaggggagcgacgacaucaagaagcuccuggacucccagggccgcaaggacaucaagcugaucgacaucgcccucagcaaggccgacucccgccgguucgagaacgcggucugggaccagugcaaggaccugugccacaugcacaccggggugguggucgagaagaagaagcgcggcgggaaggaggagaucacgccccacugcgcccugauggacugcaucauguacgacgccgccgugagcggcggccucaacaucccggugcugcgggcgguccugccccgcgacaugguguuccggaccuccagccccaaggugguccucugaggacuaguaauaaggaaacuguaugaaugucugugggcaggaagugaagagauccuucuguaaagguuuuuggaauuaugucugcugaauaauaaacuuuuuugaaauaauaaaucugguagaaaaaugagaucucaaaggcucuuuucagagccaccaaaaaaaaaaaaaaaaaaaaaaaaaaaaaaaaaaaaaaaaaaaaaaaaaaaaaaaaaaaaaaaaagaauu

SEQ ID NO: 21450 - RNA, 2066 nt, Artificial Sequence
  mRNA product Design b-4 (hSL-A64-N5) comprising derived and/or modified sequence from LASV(Lassa virus/H.sapiens-wt/NGA/2018/ISTH_0959;Clade II)__AVV65100__SP-IgE_NP(2-569) (opt1)
aggagagucccgcagucggcguccagcggcucugcuuguucgugugugugucguugcaggccuuauucaagcuuaccauggacuggaccuggauccuguuccucguggccgccgcgacccgcguccacagcagcgccuccaaggaggugaaguccuuccuguggacccagagccuccgccgggagcugagcggcuacugcuccaacaucaagcugcaggucgugaaggacgcccaggcgcuccugcacgggcuggacuucagcgagguguccaacguccagcgccucaugcggaagcagaagcgcgacgacagcgaccugaagcggcugcgcgaccucaaccaggccgugaacaaccugguggagcugaaguccacccagcagaaguccauccuccgggucggcacccugaccagcgacgaccugcucacccuggccgccgaccuggagaagcucaagagcaaggugauccgcaccgagcggccccuguccagcgggguguacaugggcaaccuguccacgcagcagcucgagcagcgccgggcccugcugaaccucaucgggauggucggcggcgcgcaggggacccagccgggccgcgacgggguggugcgggucugggacgugaagaaccccgaccugcugaacaaccaguucggcaccaugcccagccucacccuggccugccugacgaagcagggccagguggaccucaacgacgucgugcuggcccugaccgaccucgggcugaucuacaccgccaaguaccccaacuccagcgaccuggaccgccucucccagagccacccgauccugaacaugguggacaccaagaaguccagccugaacaucagcggcuucaacuucucccucggggcggccgucaaggccggcgccugcaugcuggacgggggcaacaugcuggagacgaucaaggugacgccccagaccauggacggcauccucaagagcauccugaaggugaagaagucccuggggauguucgucagcgacacccccggcgagcggaaccccuacgagaacauccucuacaagaucugccuguccggggacggcuggccguacaucgccagccgcaccuccaucguggggcgggcgugggagaacaccaccguggaccuggagagcgacggcaagccccacaaggucggcaccgccggguccaacaagagccuccaguccgccggcuuccccacggggcugaccuacagccagcugaugacccugaaggacuccaugaugcagcucgaccccagcgccaagaccuggaucgacaucgagggccgcccggaggaccccguggagaucgcccuguaccagcccauguccgggugcuacauccacuucuuccgggagcccacggaccugaagcaguucaagcaggacgcgaaguacagccacggcaucgacgucgccgaccucuucccggcccagcccggccugaccuccgccgugaucgaggcccugccccgcaacauggugcugaccugccaggggagcgacgacaucaagcggcuccuggacagccagggccgcaaggacaucaagcucaucgacaucgcgcuguccaagaccgacagccgccgguucgagaacgccgucugggaccagugcaaggaccugugccacaugcacacgggggugguggucgagaagaagaagcgcggcgggaaggaggagaucacgccccacugcgcccucauggacugcaucauguacgacgccgccguguccggcggccugaacaucccggugcugcgggcgguccucccccgcgacaugguguuccggaccagcucccccaaggugguccugugaggacuaguaauaaggaaacuguaugaaugucugugggcaggaagugaagagauccuucuguaaagguuuuuggaauuaugucugcugaauaauaaacuuuuuugaaauaauaaaucugguagaaaaaugagaucucaaaggcucuuuucagagccaccaaaaaaaaaaaaaaaaaaaaaaaaaaaaaaaaaaaaaaaaaaaaaaaaaaaaaaaaaaaaaaaaagaauu

SEQ ID NO: 21451 - RNA, 2066 nt, Artificial Sequence
  mRNA product Design b-4 (hSL-A64-N5) comprising derived and/or modified sequence from LASV(LASV003-NIG-2008;Clade II)__AIT17581__SP-IgE_NP(2-569) (opt1)
aggagagucccgcagucggcguccagcggcucugcuuguucgugugugugucguugcaggccuuauucaagcuuaccauggacuggaccuggauccuguuccucguggccgccgcgacccgcguccacagcagcgccuccaaggaggugaaguccuuccuguggacccagagccuccgccgggagcugagcggcuacugcuccagcaucaagcugcaggucgugaaggacgcccaggcgcuccugcacgggcuggacuucuccgaggugagcaacguccagcgccucaugcggaagcagaagcgcgacgacuccgaccugaagcggcugcgcgaccucaaccaggccgugaacaaccugguggagcucaagagcacccagcagaaguccguccugcgggugggcacccugaccagcgacgaccugcucacccuggccgccgaccuggagaagcucaaguccaaggugauccgcaccgagcggccccugagcuccggggucuacaugggcaaccugagcgcccagcagcucgagcagcgccggacgcugcugaacaugaucgggauggugggcggcgcgcaggggacccagccgggccgcgacggggugguccgggugugggacgugaagaaccccgaccuccugaacaaccaguucggcaccaugcccucccugacccucgccugccugacgaagcaggggcaggucgaccugaacgacguggugcucgcccugaccgaccugggccucaucuacaccgccaaguaccccaacagcuccgaccuggaccgccugagccagagccacccgauccucuccauggucgacaccaagaaguccagccugaacaucagcggcuacaacuucucccugggggcggccgugaaggccggcgccugcaugcucgacgggggcaacaugcuggagacgaucaaggugacgccccagaccauggacggcauccucaagagcauccugaaggucaagaagucccuggggauguucgugagcgacacccccggcgagcggaaccccuacgagaacauccuguacaagaucugccucuccggggacggcuggccguacaucgccagccgcaccuccaucguggggcgggcgugggagaacaccaccgucgaccuggagagcgacggcaagccccagaaggugggcaccgccggguccaacaagagccugcaguccgccggcuuccccacggggcucaccuacagccagcugaugacccugaaggacuccaugaugcagcuggaccccagcgccaagaccuggaucgacaucgagggccgcccggaggaccccgucgagaucgcccucuaccagcccauguccgggugcuacauccacuucuuccgggagcccacggaccugaagcaguucaagcaggacgcgaaguacagccacggcaucgacgugaccgaccuguucccggcccagcccggccucaccagcgccgugaucgaggcccugccccgcaacaugguccugaccugccagggguccgacgacaucaagcggcuccuggacagccagggccgccgcgacaucaagcugaucgacaucgcccucuccaaggcggacagccggcgcuucgagaacgccgugugggaccagugcaaggaccugugccacaugcacacggggguggucguggagaagaagaagcggggcgggaaggaggagaucacgccccacugcgcccugauggacugcaucauguacgacgccgccguguccggcggccucaacaucccgguccugcgcgcggugcugccccgggacaugguguuccgcaccagcucccccaaggucgugcucugaggacuaguaauaaggaaacuguaugaaugucugugggcaggaagugaagagauccuucuguaaagguuuuuggaauuaugucugcugaauaauaaacuuuuuugaaauaauaaaucugguagaaaaaugagaucucaaaggcucuuuucagagccaccaaaaaaaaaaaaaaaaaaaaaaaaaaaaaaaaaaaaaaaaaaaaaaaaaaaaaaaaaaaaaaaaagaauu

SEQ ID NO: 21452 - RNA, 2066 nt, Artificial Sequence
  mRNA product Design b-4 (hSL-A64-N5) comprising derived and/or modified sequence from LASV(LASV035-NIG-2009;Clade II)__AIT17589__SP-IgE_NP(2-569) (opt1)
aggagagucccgcagucggcguccagcggcucugcuuguucgugugugugucguugcaggccuuauucaagcuuaccauggacuggaccuggauccuguuccucguggccgccgcgacccgcguccacagcagcgccuccaaggaggugaaguccuuccuguggacccagagccuccgccgggagcugagcggcuacugcuccagcaucaagcugcaggucgugaaggacgcccaggcgcuccugcacgggcuggacuucuccgaggugagcaacguccagcgccucaugcggaagcagaagcgcgacgacuccgaccugaagcggcugcgcgaccucaaccaggccgugaacaaccugguggagcucaagagcacccagcagaaguccauccugcgggucggcacgcugaccagcgacgaccugcucacccuggccgccgaccuggagaagcucaaguccaaggugauccgcaccgagcggccccugagcuccgggguguacaugggcaaccugagcgcccagcagcucgagcagcgccgggcgcugcugaacaugaucgggauggucggcggcgcccaggggacgcagccgggccgcgacgggguggugcgggucugggacgugaagaaccccgaccuccugaacaaccaguucggcaccaugcccucccugacccucgccugccugaccaagcagggccagguggaccugaacgacgccguccucgcgcugacggaccuggggcucaucuacaccgccaaguaccccaacagcuccgaccuggaccgccugagccagagccacccgauccucaacaugguggacaccaagaaguccagccugaacaucuccggcuacaacuucagccugggggccgccgugaaggccggcgcgugcaugcucgacgggggcaacaugcuggagaccaucaaggucacgccccagaccauggacggcauccugaaguccauccucaaggugaagcggagccuggggauguucguguccgacacccccggcgagcgcaaccccuacgagaacauccuguacaagaucugccucagcggggacggcuggccguacaucgccucccggaccagcaucgucgggcgcgccugggagaacacgaccguggaccuggaguccgacggcaagccccagaaggugggcaccaccgggagcaacaagucccugcagagcgccggcuuccccacggggcucaccuacucccagcugaugacccugaaggacagcaugaugcagcuggaccccuccgccaagaccuggaucgacaucgagggccggccggaggaccccgucgagaucgcgcucuaccagcccaugagcgggugcuacauccacuucuuccgcgagcccacggaccugaagcaguucaagcaggacgccaaguacucccacggcaucgacguggccgaccuguucccggcccagcccggccucaccagcgccgucaucgaggcgcugccccggaacauggugcugaccugccaggggagcgacgacaucaagaagcuccuggacucccagggccgccgcgacaucaagcugaucgacaucgcccucagcaaggccgacucccggaaguucgagaacgccgugugggaccagugcaaggaccugugccacaugcacaccggggucgugguggagaagaagaagcgcggcgggaaggaggagaucacgccccacugcgcccugauggacugcaucauguacgacgcggccgucagcggcggccucaacaucccggugcugcgggccgugcugccccgcgacauggucuuccggaccuccagccccaagguggugcucugaggacuaguaauaaggaaacuguaugaaugucugugggcaggaagugaagagauccuucuguaaagguuuuuggaauuaugucugcugaauaauaaacuuuuuugaaauaauaaaucugguagaaaaaugagaucucaaaggcucuuuucagagccaccaaaaaaaaaaaaaaaaaaaaaaaaaaaaaaaaaaaaaaaaaaaaaaaaaaaaaaaaaaaaaaaaagaauu

SEQ ID NO: 21453 - RNA, 2066 nt, Artificial Sequence
  mRNA product Design b-4 (hSL-A64-N5) comprising derived and/or modified sequence from LASV(LASV1000-NIG-2009;Clade II)__AIT17783__SP-IgE_NP(2-569) (opt1)
aggagagucccgcagucggcguccagcggcucugcuuguucgugugugugucguugcaggccuuauucaagcuuaccauggacuggaccuggauccuguuccucguggccgccgcgacccgcguccacagcagcgccuccaaggaggugaaguccuuccuguggacccagagccuccgccgggagcugagcggcuacugcuccaacaucaagcugcaggucgugaaggacgcccaggcgcuccugcacgggcuggacuucagcgagguguccaacguccagcgccucaugcggaagcagaagcgcgacgacagcgaccugaagcggcugcgcgaccucaaccaggccgugaacaaccugguggagcugaaguccacccagcagaaguccauccuccgggucggcacgcugaccagcgacgaccugcucacccuggccgccgaccuggagaagcucaagagcaaggugauccgcaccgagcggccccuguccagcgggguguacaugggcaaccuguccacgcagcagcucgagcagcgccgggcccugcugaacaugaucgggauggucggcggcgcgcaggggacccagccgggccgcgacgggguggugcgggucugggacgugaagaaccccgaccuccugaacaaccaguucggcaccaugcccagccugacccucgccugccugacgaagcagggccagguggaccugaacgacgucgugcucgcccugaccgaccuggggcucaucuacaccgccaaguaccccaacuccagcgaccuggaccgccugucccagagccacccgauccucaacaugguggacaccaagaaguccagccugaacaucagcggcuacaacuucucccugggggcggccgucaaggccggcgccugcaugcucgacgggggcaacaugcuggagacgaucaaggugacgccccagaccauggacggcauccucaagagcauccugaaggugaagaagucccuggggauguucgucagcgacacccccggcgagcggaaccccuacgagaacauccuguacaagaucugccucuccggggacggcuggccguacaucgccagccgcaccuccaucguggggcgggcgugggagaacaccaccguggaccuggagagcgacggcaagccccagaaggucggcaccgccggguccaacaagagccugcaguccgccggcuuccccacggggcucaccuacagccagcugaugacccugaaggacuccaugaugcagcuggaccccagcgccaagaccuggaucgacaucgagggccgcccggaggaccccguggagaucgcccucuaccagcccgucuccgggugcuacauccacuucuuccgggagcccacggaccugaagcaguucaagcaggacgcgaaguacagccacggcaucgacguggccgaccuguucccggcccagcccggccucaccuccgccgugaucgaggcccugccccgcaacaugguccugaccugccaggggagcgacgacaucaagcggcuccuggacagccagggccgccgcgacaucaagcugaucgacaucgcgcucuccaaggccgacagccggcgcuucgagaacgccgugugggaccagugcaaggaccugugccacaugcacaccgggguggucguggagaagaagaagcggggcgggaaggaggagaucacgccccacugcgcccugauggacugcaucauguacgacgccgcgguguccggcggccucaacaucccgguccugcgcgccgugcugccccgggacaugguguuccgcaccagcucccccaaggucgugcucugaggacuaguaauaaggaaacuguaugaaugucugugggcaggaagugaagagauccuucuguaaagguuuuuggaauuaugucugcugaauaauaaacuuuuuugaaauaauaaaucugguagaaaaaugagaucucaaaggcucuuuucagagccaccaaaaaaaaaaaaaaaaaaaaaaaaaaaaaaaaaaaaaaaaaaaaaaaaaaaaaaaaaaaaaaaaagaauu

SEQ ID NO: 21454 - RNA, 2066 nt, Artificial Sequence
  mRNA product Design b-4 (hSL-A64-N5) comprising derived and/or modified sequence from LASV(LASV221-NIG-2010;Clade II)__AIT17625__SP-IgE_NP(2-569) (opt1)
aggagagucccgcagucggcguccagcggcucugcuuguucgugugugugucguugcaggccuuauucaagcuuaccauggacuggaccuggauccuguuccucguggccgccgcgacccgcguccacagcagcgccuccaaggaggugaaguccuuccuguggacccagagccuccgccgggagcugagcggcuacugcuccagcaucaagcugcaggucgugaaggacgcccaggcgcuccugcacgggcuggacuucuccgaggugagcaacguccagcgccucaugcggaagcagcgccgggacgacuccgaccugaagcgccugcgggaccucaaccaggccgugaacaaccugguggagcucaagagcacccagcagaaguccauccugcgcgucggcacgcugaccagcgacgaccugcucacccuggccgccgaccuggagaagcucaaguccaaggugauccggaccgagcgcccccugagcuccgggguguacaugggcaaccugagcacgcagcagcucgagcagcggcgcgcccugcugaacaugaucgggauggucggcggcgcgcaggggacccagccgggccgggacgggguggugcgcgucugggacgugaagaaccccgaccuccugaacaaccaguucggcaccaugcccucccugacccucgccugccugacgaagcagggccagguggaccugaacgacgccguccucgcccugaccgaccuggggcucaucuacaccgcgaaguaccccaacagcuccgaccuggaccggcugagccagagccacccgauccucaacaugguggacaccaagaaguccagccugaacaucuccggcuacaacuucagccugggggccgccgugaaggccggcgccugcaugcucgacgggggcaacaugcuggagacgaucaaggucacgccccagaccguggacggcauccugaaguccauccucaaggugaagcgcagccuggggauguucgucuccgacacccccggcgagcggaaccccuacgagaacauccuguacaagaucugccucagcggggacggcuggccguacaucgcgucccgcaccagcaucguggggcgggccugggagaacaccaccguggaccuggaguccgacggcaagccccagaaggucggcaccgccgggagcaacaagucccugcagagcgccggcuuccccacggggcucaccuacucccagcugaugacccugaaggacagcaugaugcagcuggaccccuccgccaagaccuggaucgacaucgagggccgcccggaggaccccguggagaucgcgcucuaccagcccaugagcgggugcuacauccacuucuuccgggagcccacggaccugaagcaguucaagcaggacgccaaguacucccacggcaucgacgucgccgaccuguucccggcccagcccggccucaccagcgccgugaucgaggcgcugccccgcaacauggugcugaccugccaggggagcgacgacaucaagcgccuccuggacucccagggccggcgcgacaucaagcugaucgacaucgcccucagcaaggccgacucccggaaguucgagaacgccgucugggaccagugcaaggaccugugccacaugcacaccggggugguggucgagaagaagaagcgcggcgggaaggaggagaucacgccccacugcgcccugauggacugcaucauguacgacgcggccgugagcggcggccucaacaucccggugcugcgggccguccugccccgcgacaugguguuccggaccuccagccccaaggugguccucugaggacuaguaauaaggaaacuguaugaaugucugugggcaggaagugaagagauccuucuguaaagguuuuuggaauuaugucugcugaauaauaaacuuuuuugaaauaauaaaucugguagaaaaaugagaucucaaaggcucuuuucagagccaccaaaaaaaaaaaaaaaaaaaaaaaaaaaaaaaaaaaaaaaaaaaaaaaaaaaaaaaaaaaaaaaaagaauu

SEQ ID NO: 21455 - RNA, 2066 nt, Artificial Sequence
  mRNA product Design b-4 (hSL-A64-N5) comprising derived and/or modified sequence from LASV(LASV237-NIG-2010;Clade II)__AIT17639__SP-IgE_NP(2-569) (opt1)
aggagagucccgcagucggcguccagcggcucugcuuguucgugugugugucguugcaggccuuauucaagcuuaccauggacuggaccuggauccuguuccucguggccgccgcgacccgcguccacagcagcgccuccaaggaggugaaguccuuccuguggacccagagccuccgccgggagcugagcggcuacugcuccaacaucaagcugcaggucgugaaggacgcccaggcgcuccugcacgggcuggacuucagcgagguguccaacguccagcgccucaugcggaagcagaagcgcgacgacagcgaccugaagcggcugcgcgaccucaaccaggccgugaacaaccugguggagcugaaguccacccagcagaaguccauccuccgggucggcacccugaccagcgacgaccugcucacccuggccgccgaccuggagaagcucaagagcaaggugauccgcaccgagcggccccuguccagcgggguguacaugggcaaccuguccacgcagcagcucgagcagcgccgggcccugcugaacaugaucgggauggucggcggcgcgcaggggacccagccgggccgcgacgggguggugcgggucugggacgugaagaaccccgaccuccugaacaaccaguucggcaccaugcccagccugacccucgccugccugacgaagcagggccagguggaccugaacgacgccguccucgcccugaccgaccuggggcucaucuacaccgcgaaguaccccaacuccagcgaccuggaccgccugucccagagccacccgauccucaacaugguggacaucaagaaguccagccugaacaucagcggcuacaacuucucccugggggccgccgugaaggccggcgccugcaugcucgacgggggcaacaugcuggagaccaucaaggucacgccccagaccauggacggcauccucaagagcauccugaaggugaagcggucccuggggauguucgugagcgacacccccggcgagcgcaaccccuacgagaacauccuguacaagaucugccucuccggggacggcuggccguacaucgcgagccggaccuccaucgucgggcgcgccugggagaacacgaccguggaccuggagagcgacggcaagccccagaaggugggcuccgccgggagcaacaagucccugcagagcgccggcuuccccaccgggcucaccuacucccagcugaugacgcugaaggacagcaugaugcagcuggaccccuccgccaagaccuggaucgacaucgagggccggccggaggaccccgucgagaucgcgcucuaccagcccaugagcgggugcuacauccacuucuuccgcgagcccaccgaccugaagcaguucaagcaggacgccaaguacucccacggcaucgacguggccgaccuguucccggcccagcccggccucaccagcgccgucaucgaggcgcugccccggaacauggugcugacgugccaggggagcgacgacaucaagcgccuccuggacucccagggccgccgggacaucaagcugaucgacaucgcccucagcaaggccgacucccgccgguucgagaacgccgugugggaccagugcaaggaccugugccacaugcacaccggggucgugguggagaagaagaagcgcggcgggaaggaggagaucacgccccacugcgcccugauggacugcaucauguacgacgcggccgucagcggcggccucaacaucccggugcugcgggccgugcugccccgcgacauggucuuccggaccuccagccccaagguggugcucugaggacuaguaauaaggaaacuguaugaaugucugugggcaggaagugaagagauccuucuguaaagguuuuuggaauuaugucugcugaauaauaaacuuuuuugaaauaauaaaucugguagaaaaaugagaucucaaaggcucuuuucagagccaccaaaaaaaaaaaaaaaaaaaaaaaaaaaaaaaaaaaaaaaaaaaaaaaaaaaaaaaaaaaaaaaaagaauu

SEQ ID NO: 21456 - RNA, 2066 nt, Artificial Sequence
  mRNA product Design b-4 (hSL-A64-N5) comprising derived and/or modified sequence from LASV(LASV253-NIG-2011;Clade II)__AIT17671__SP-IgE_NP(2-569) (opt1)
aggagagucccgcagucggcguccagcggcucugcuuguucgugugugugucguugcaggccuuauucaagcuuaccauggacuggaccuggauccuguuccucguggccgccgcgacccgcguccacagcagcgccuccaaggaggugaaguccuuccuguggacccagagccuccgccgggagcugagcggcuacugcuccagcaucaagcugcaggucgugaaggacgcccaggcgcuccugcacgggcuggacuucuccgaggugagcaacguccagcgccucaugcggaagcagaagcgcgacgacuccgaccugaagcggcugcgcgaccucaaccaggccgugaacaaccugguggagcucaagagcacccagcagaaguccguccugcgggugggcacccugaccagcgacgaccugcucacccuggccgccgaccuggagaagcucaaguccaaggugauccgcaccgagcggccccugagcuccggggucuacaugggcaaccugagcacgcagcagcucgagcagcgccgggcccugcugaacaugaucgggauggugggcggcgcgcaggggacccagccgggccgcgacggggugguccgggugugggacgugaagaaccccgaccuccugaacaaccaguucggcaccaugcccucccugacccucgccugccugacgaagcaggggcaggucgaccugaacgacguggugcucgcccugaccgaccugggccucaucuacaccgccaaguaccccaacagcuccgaccuggaccgccugagccagagccacccgauccucaacauggucgacaccaagaaguccagccugaacaucuccggcuacaacuucagccugggggcggccgugaaggccggcgccugcaugcucgacgggggcaacaugcuggagacgaucaaggugacgccccagaccauggacggcauccugaaguccauccucaaggucaagaagucccuggggauguucgugagcgacacccccggcgagcggaaccccuacgagaacauccuguacaagaucugccucagcggggacggcuggccguacaucgccucccgcaccagcaucguggggcgggcgugggagaacaccaccgucgaccuggaguccgacggcaagccccagaaggugggcaccgccgggagcaacaagucccugcagagcgccggcuuccccacggggcucaccuacucccagcugaugacccugaaggacagcaugaugcagcuggaccccuccgccaagaccuggaucgacaucgagggccgcccggaggaccccgucgagaucgcccucuaccagcccaugagcgggugcuacauccacuucuuccgggagcccacggaccugaagcaguucaagcaggacgcgaaguacucccacggcaucgacgugaccgaccuguucccggcccagcccggccucaccagcgccgugaucgaggcccugccccgcaacaugguccugaccugccaggggagcgacgacaucaagcggcuccuggacucccagggccgccgcgacaucaagcugaucgacaucgcccucagcaaggcggacucccggcgcuucgagaacgccgugugggaccagugcaaggaccugugccacaugcacacggggguggucguggagaagaagaagcggggcgggaaggaggagaucacgccccacugcgcccugauggacugcaucauguacgacgccgccgugagcggcggccucaacaucccgguccugcgcgcggugcugccccgggacaugguguuccgcaccuccagccccaaggucgugcucugaggacuaguaauaaggaaacuguaugaaugucugugggcaggaagugaagagauccuucuguaaagguuuuuggaauuaugucugcugaauaauaaacuuuuuugaaauaauaaaucugguagaaaaaugagaucucaaaggcucuuuucagagccaccaaaaaaaaaaaaaaaaaaaaaaaaaaaaaaaaaaaaaaaaaaaaaaaaaaaaaaaaaaaaaaaaagaauu

SEQ ID NO: 21457 - RNA, 2066 nt, Artificial Sequence
  mRNA product Design b-4 (hSL-A64-N5) comprising derived and/or modified sequence from LASV(LASV254-NIG-2011;Clade II)__AIT17675__SP-IgE_NP(2-569) (opt1)
aggagagucccgcagucggcguccagcggcucugcuuguucgugugugugucguugcaggccuuauucaagcuuaccauggacuggaccuggauccuguuccucguggccgccgcgacccgcguccacagcagcgccuccaaggaggugaaguccuuccuguggacccagagccuccgccgggagcugagcggcuacugcuccagcaucaagcugcaggucgugaaggacgcccaggcgcuccugcacgggcuggacuucuccgaggugagcaacguccagcgccucaugcggaagcagaagcgcgacgacuccgaccugaagcggcugcgcgaccucaaccaggccgugaacaaccugguggagcucaagagcacccagcagaaguccguccugcgggugggcacgcugaccagcgacgaccugcucacccuggccgccgaccuggagaagcucaaguccaaggugauccgcaccgagcggccccugagcuccggggucuacaugggcaaccugagcacgcagcagcucgagcagcgccgggcccugcugaacaugaucgggauggugggcggcgcgcaggggacccagccgggccgcgacggggugguccgggugugggacgugaagaaccccgaccuccugaacaaccaguucggcaccaugcccucccugacccucgccugccugacgaagcaggggcaggucgaccugaacgacgccgugcucgcccugaccgaccugggccucaucuacaccgcgaaguaccccaacagcuccgaccuggaccgccugagccagagccacccgauccucaacaugguggacaccaagaaguccagccugaacaucuccggcuacaacuucagccugggggccgccgucaaggccggcgccugcaugcucgacgggggcaacaugcuggagacgaucaaggugacgccccagaccauggacggcauccugaaguccauccucaaggugaagaagucccuggggauguucgucagcgacacccccggcgagcggaaccccuacgagaacauccuguacaagaucugccucagcggggacggcuggccguacaucgcgucccgcaccagcaucguggggcgggccugggagaacaccaucguggaccuggaguccgacggcaagccccagaaggucggcaccgccgggagcaacaagucccugcagagcgccggcuuccccaccgggcucacguacucccagcugaugacccugaaggacagcaugaugcagcuggaccccuccgccaagaccuggaucgacaucgagggccgcccggaggaccccguggagaucgcgcucuaccagcccaugagcgggugcuacauccacuucuuccgggagcccaccgaccugaagcaguucaagcaggacgccaaguacucccacggcaucgacgucgccgaccuguucccggcccagcccggccucacgagcgccgugaucgaggcgcugccccgcaacauggugcugaccugccaggggagcgacgacaucaagcggcuccuggacucccagggccgccgcgacaucaagcugaucgacaucgcccucagcaaggccgacucccggcgcuucgagaacgccgucugggaccagugcaaggaccugugccacaugcacaccggggugguggucgagaagaagaagcggggcgggaaggaggagaucacgccccacugcgcccugauggacugcaucauguacgacgcggccgugagcggcggccucaacaucccggugcugcgcgccguccugccccgggacaugguguuccgcaccuccagccccaaggugguccucugaggacuaguaauaaggaaacuguaugaaugucugugggcaggaagugaagagauccuucuguaaagguuuuuggaauuaugucugcugaauaauaaacuuuuuugaaauaauaaaucugguagaaaaaugagaucucaaaggcucuuuucagagccaccaaaaaaaaaaaaaaaaaaaaaaaaaaaaaaaaaaaaaaaaaaaaaaaaaaaaaaaaaaaaaaaaagaauu

SEQ ID NO: 21458 - RNA, 2066 nt, Artificial Sequence
  mRNA product Design b-4 (hSL-A64-N5) comprising derived and/or modified sequence from LASV(Nig08-04;Clade II)__ADU56611__SP-IgE_NP(2-569) (opt1)
aggagagucccgcagucggcguccagcggcucugcuuguucgugugugugucguugcaggccuuauucaagcuuaccauggacuggaccuggauccuguuccucguggccgccgcgacccgcguccacagcagcgccuccaaggaggugaaguccuuccuguggacccagagccuccgccgggagcugagcggcuacugcuccaacaucaagcugcaggucgugaaggacgcccaggcgcuccugcacgggcuggacuucagcgagguguccaacguccagcgccucaugcggaagcagaagcgcgacgacggcgaccugaagcggcugcgcgaccucaaccaggccgugaacaaccugguggagcucaagagcacccagcagaaguccguccugcggguggggacccugaccagcgacgaccugcucacccuggccgccgaccuggagaagcucaaguccaaggugauccgcaccgagcggccccugagcuccggcgucuacauggggaaccugagcacgcagcagcucgagcagcgcaaggcccugcuguccaugaucggcauggugggcggggcgcagggcacccagccggggcgggacggcgugguccgcgugugggacgugaagaaccccgaccuccugaacaaccaguucgggaccaugcccagccugacccucgccugccugacgaagcagggccaggucgaccugaacgacgccgugcucgcccugaccgaccugggccucaucuacaccgcgaaguaccccaacuccagcgaccuggaccggcugucccagagccacccgauccucaacaugguggacaccaagaaguccagccugaacaucagcggguacaacuucucccugggcgccgccgucaaggccggggccugcaugcucgacggcggcaacaugcuggagacgaucaaggugacgccccagaccauggacgggauccucaagagcauccugaaggugaagcgcucccugggcauguucgucagcgacacccccggggagcggaaccccuacgagaacauccuguacaagaucugccucuccggcgacggguggccguacaucgcgagccgcaccuccaucgugggccgggccugggagaacaccaccguggaccuggagagcgacggcaagccccagaaggucgggaccgccggcuccaacaagagccugcaguccgccggguuccccacgggccucaccuacagccagcugaugacccugaaggacuccaugaugcagcuggaccccagcgccaagaccuggaucgacaucgaggggcgcccggaggaccccguggagaucgcgcucuaccagcccauguccggcugcuacauccacuucuuccgggagcccacggaccugaagcaguucaagcaggacgccaaguacagccacggcaucgacgucaccgaccuguucuccgcccagccggggcucaccagcgccgugaucgaggcccugccccgcaacauggugcugaccugccagggcagcgacgacaucaagaagcuccuggacucccaggggcggcgcgacaucaagcugaucgacaucagccucaacaaggcggacucccgccgguucgagaacgccgucugggaccagugcaaggaccugugccacaugcacacgggcgugguggucgagaagaagaagcgcgggggcaaggaggagaucacgccccacugcgcccugauggacugcaucauguucgacgccgccgugagcggcgggcucaacauccccauccugcgggcggugcugccgcgcgacauggucuuccggaccuccagccccaagguggugcucugaggacuaguaauaaggaaacuguaugaaugucugugggcaggaagugaagagauccuucuguaaagguuuuuggaauuaugucugcugaauaauaaacuuuuuugaaauaauaaaucugguagaaaaaugagaucucaaaggcucuuuucagagccaccaaaaaaaaaaaaaaaaaaaaaaaaaaaaaaaaaaaaaaaaaaaaaaaaaaaaaaaaaaaaaaaaagaauu

SEQ ID NO: 21459 - RNA, 2069 nt, Artificial Sequence
  mRNA product Design b-4 (hSL-A64-N5) comprising derived and/or modified sequence from LASV(GA391;Clade III)__AAA46284__SP-IgE_NP(2-570) (opt1)
aggagagucccgcagucggcguccagcggcucugcuuguucgugugugugucguugcaggccuuauucaagcuuaccauggacuggaccuggauccuguuccucguggccgccgcgacccgcguccacagcagcgccuccaaggaggugcgcagcugccuguggacccagucccuccggcgcgagcugagcggcuacugcuccaacaucaagcugcaggucgugaaggacgcccaggcgcuccugcacgggcuggacuucagcgagguguccaacguccagcggcucaugcgcaagcagaagcgggacgacggcgaccugaagcgccugcgggaccucaaccaggccgugaacaaccugguggagcugaaguccacccagcagaaguccguccuccgcguggggacgcugagcuccgacgaccugcucauccuggccgccgaccuggagaagcucaagagcaaggugacccggaccgagcgcccccuguccagcggcgucuacauggggaaccuguccagccagcagcucgaccagcggcgcgcccugcugaacaugaucggcaugaccggcguguccgggggcgggaagggcgcgagcaacgggaucgugcgggucugggacgugaagaacgccgagcuccugaacaaccaguucggcacgaugccgucccugacccucgccugccugaccaagcagggccagguggaccugaacgacgccguccaggcgcucaccgaccuggggcugaucuacacggccaaguaccccaacagcagcgaccucgaccgccugucccagagccaccccauccugaacaugaucgacaccaagaaguccagccucaacaucuccggcuacaacuucagccugggggccgccgugaaggccggcgcgugcaugcuggacggcgggaacaugcucgagaccaucaaggugagcccccagaccauggacggcauccucaagagcauccugaaggucaagaagucccuggggauguucgugagcgacacgccgggcgagcggaaccccuacgagaacauccuguacaagaucugccuguccggggacggcuggagcuacaucgccucccgcaccagcaucgugggccgggccugggagaacaccgucguggaccucgagcaggacaacaagccccagaagaucgggaacggcggguccaacaagagccugcaguccgccggcuucgccgcggggcugaucuacagccagcucaugacccugaaggacuucaagugcuucaaccugauccccaacgccaagacguggauggacaucgagggccgcccggaggaccccguggagaucgcccuguaccagcccuccagcggcugcuacguccacuucuuccgggagcccaccgaccucaagcaguucaagcaggacgccaaguacagccacgggcgcgacgugaccgaccuguucgccgcgcagccgggccugaccuccgccgucaucgaggcccucccccggaacauggugaucacgugccaggggagcgaggacauccgcaagcugcuggagucccagggccgccgggacaucaagcucaucgacaucacccugagcaaggccgacucccgcaaguucgagaacgccgugugggaccaguucaaggaccugugccacaugcacaccggggucgugguggagaagaagaagcggggcggcaaggaggagaucacgccccacugcgcgcucauggacugcaucauguucgacgccgccgucagcgggggccuggacgccaaggugcugcgcgugguccucccccgggacaugguguuccgcaccuccaccccgaaggugguccugugaggacuaguaauaaggaaacuguaugaaugucugugggcaggaagugaagagauccuucuguaaagguuuuuggaauuaugucugcugaauaauaaacuuuuuugaaauaauaaaucugguagaaaaaugagaucucaaaggcucuuuucagagccaccaaaaaaaaaaaaaaaaaaaaaaaaaaaaaaaaaaaaaaaaaaaaaaaaaaaaaaaaaaaaaaaaagaauu

SEQ ID NO: 21460 - RNA, 2066 nt, Artificial Sequence
  mRNA product Design b-4 (hSL-A64-N5) comprising derived and/or modified sequence from LASV(Nig08-A19;Clade III)__ADU56619__SP-IgE_NP(2-569) (opt1)
aggagagucccgcagucggcguccagcggcucugcuuguucgugugugugucguugcaggccuuauucaagcuuaccauggacuggaccuggauccuguuccucguggccgccgcgacccgcguccacagcagcgccuccaaggaggugaaguccuuccuguggacccagucccuccgccgggagcugagcggcuacugcuccaacaucaagcugcaggucgugaaggacgcccaggcgcuccugcacgggcuggacuucagcgagguguccaacguccagcgccucaugcggaagcagaagcgcgacgacggcgaccugaagcggcugcgcgaccucaaccaggccgugaacaaccugguggagcucaagagcacccagcagaaguccguccugcggguggggacccugagcuccgacgaccugcucgugcuggccgccgaccuggagaagcucaagagcaaggucgugcgcaccgagcggccccuguccagcggcaucuacauggggaaccuguccagccagcagcucgaccagcgcaaggcccugcugaacaugaucggcaugaccggcgggaacggcgggcggaacaccacguccgacggcaucgugcgcgucugggacgugaagaacgcggagcuccugaacaaccaguucgggaccaugccgagccugacccucgccugccugaccaagcagggccagguggaccugaacgacgccguccaggcccucacggaccugggccugaucuacaccgcgaaguaccccaacuccagcgaccucgaccggcuggcccagagccaccccauccugaacaugaucgacaccaagaaguccagccucaacaucuccggguacaacuucagccugggcgccgccgugaaggccggggcgugcaugcuggacggcggcaacaugcucgagaccaucaaggugagcccccagacgauggacgggauccucaagagcauccugaaggucaagcgcucccugggcauguucaucagcgacaccccgggggagcggaaccccuacgagaacauccuguacaagaucugccuguccggcgacggguggcccuacaucgccagccgcaccuccaucgugggccgggccugggagaacaccguggucgaccucgagagcgacaacaagccccagaagacgggcaacgggggcuccaacaagagccugcaguccgccggguucgccgcgggccugaccuacagccagcucaugacccugaaggacuccaugcugcagcuggacccgaacgccaagaccuggauggacaucgaggggcgccccgaggaccccguggagaucgcccucuaccagcccagcuccggcugcuacauccacuucuuccgggagccgacggaccugaagcaguucaagcaggacgccaaguacagccacggcaucgacgugaccgaccuguucgccgcgcagcccgggcucaccagcgccgucaucgaggcccugccccgcaacauggugaucacgugccagggcuccgaggacauccggaagcugcucgagagccaggggcgccgcgacaucaagcugaucgacaucucccugagcaaggucgacucccggaaguucgagaacgccgugugggaccaguucaaggaccucugccacaugcacaccggcaucguggucgagaagaagaagcgcgggggcaaggaggagaucacgccccacugcgcccugauggacugcaucauguucgacgcggccgugagcggcgggguggacgccaagguccugcgggccgugcucccgcgcgacaugguguuccggaccuccacccccaaggucgugcugugaggacuaguaauaaggaaacuguaugaaugucugugggcaggaagugaagagauccuucuguaaagguuuuuggaauuaugucugcugaauaauaaacuuuuuugaaauaauaaaucugguagaaaaaugagaucucaaaggcucuuuucagagccaccaaaaaaaaaaaaaaaaaaaaaaaaaaaaaaaaaaaaaaaaaaaaaaaaaaaaaaaaaaaaaaaaagaauu

SEQ ID NO: 21461 - RNA, 2066 nt, Artificial Sequence
  mRNA product Design b-4 (hSL-A64-N5) comprising derived and/or modified sequence from LASV(G1180-SLE-2010;Clade IV)__AIT17169__SP-IgE_NP(2-569) (opt1)
aggagagucccgcagucggcguccagcggcucugcuuguucgugugugugucguugcaggccuuauucaagcuuaccauggacuggaccuggauccuguuccucguggccgccgcgacccgcguccacagcagcgccuccaaggagaucaagagcuuccuguggacccagucccuccgccgggagcugagcggcuacugcuccaacaucaagcuccagguggucaaggacgcccaggcgcugcugcacgggcuggacuucagcgagguguccaacgugcagcgccucaugcggaaggagcgccgggacgacaacgaccugaagcgccugcgggaccucaaccaggccgucaacaaccugguggagcucaagagcacccagcagaaguccauccugcgcgugggcacccugaccagcgacgaccugcucauccuggccgccgaccuggagaagcucaaguccaaggucauccggaccgagcgcccccugagcgccgggguguacaugggcaaccuguccagccagcagcucgaccagcggcgcgcgcugcuguccaugaucgggaugagcuccggcaaccagcgggcccaggccggccgcgacggggugguccgggugugggacgugaagaacgucgagcuccugaacaaccaguucggcaccaugccgagccugacgcucgccugccugaccaagcagggccagguggaccugaacgacgcggugcaggcccucaccgaccuggggcugaucuacaccgccaaguaccccaacacguccgaccucgaccgccugacccagagccaccccauccugaacaugaucgacaccaagaaguccagccucaacaucagcggguacaacuucucccugggcgccgccgucaaggcgggcgccugcaugcuggacgggggcaacaugcucgagaccaucaaggugagcccccagacgauggacgggauccugaaguccauccugaaggugaagaaggcccucggcauguucaucagcgacaccccgggcgagcggaaccccuacgagaacauccuguacaagaucugccuguccggggacggcuggcccuacaucgccagccgcaccuccaucaccgggcgggccugggagaacacggucguggaccucgagagcgacggcaagccccagaaggcgggguccaacaacagcaacaagucccugcagagcgugggcuucaccgccggccugaccuacucccagcucaugacccugaaggacgccaugcugcagcuggacccgaacgccaagacguggauggacaucgaggggcgccccgaggaccccgucgagaucgcccucuaccagcccagcuccggcugcuacauccacuucuuccgggagccgaccgaccugaagcaguucaagcaggacgcgaaguacagccacgggaucgacgugaccgaccuguucgccgcccagcccggccucaccuccgccgugaucgacgcccugccccgcaacauggucaucacgugccaggggagcgacgacauccgcaagcugcucgagagccagggccggaaggacaucaagcugaucgacaucgcgcuguccaagaccgacagccgcaaguacgagaacgccgugugggaccaguacaaggaccucugccacaugcacaccggcgucgugguggagaagaagaagcgcgggggcaaggaggagaucacgccccacugcgcccugauggacugcaucauguucgacgccgcggucuccgggggccugaacaccagcgugcuccgggccgugcugccgcgggacauggucuuccgcaccuccacgccccggguggugcugugaggacuaguaauaaggaaacuguaugaaugucugugggcaggaagugaagagauccuucuguaaagguuuuuggaauuaugucugcugaauaauaaacuuuuuugaaauaauaaaucugguagaaaaaugagaucucaaaggcucuuuucagagccaccaaaaaaaaaaaaaaaaaaaaaaaaaaaaaaaaaaaaaaaaaaaaaaaaaaaaaaaaaaaaaaaaagaauu

SEQ ID NO: 21462 - RNA, 2066 nt, Artificial Sequence
  mRNA product Design b-4 (hSL-A64-N5) comprising derived and/or modified sequence from LASV(G1442-SLE-2011;Clade IV)__AIT17181__SP-IgE_NP(2-569) (opt1)
aggagagucccgcagucggcguccagcggcucugcuuguucgugugugugucguugcaggccuuauucaagcuuaccauggacuggaccuggauccuguuccucguggccgccgcgacccgcguccacagcagcgccuccaaggaggugaaguccuuccuguggacccagagccuccgccgggagcugagcggcuacugcuccaacaucaagcugcaggucgugaaggacgcccaggcgcuccugcacgggcuggacuucagcgagguguccaacguccagcgccucaugcggaagcagcgccgggacgacaacgaccugaagcgccugcgggaccucaaccaggccgugaacaaccugguggagcucaagagcacccagcagaaguccguccugcgcgugggcacccugaccagcgacgaccugcucgugcuggccgccgaccuggagaagcucaaguccaaggucauccggaccgagcgcccccugagcgccgggguguacaugggcaaccuguccagccagcagcucgaccagcggcgcgcgcugcugaacaugaucgggauguccggcggcauccaggggacccggacgggccgcgacggggugguccgggugugggacgugaagaacgccgaccuccugaacaaccaguucggcaccaugccgagccugacccucgccugccugaccaagcaggggcaggucgaccugaacgacguggugcaggcccucacggaccugggccugaucuacaccgcgaaguaccccaacgccuccgaccucgaccgccugacccagagccaccccauccugaacaugaucgacaccaagaaguccagccucaacaucagcggcuacaacuucucccugggggccgccgucaaggccggcgcgugcaugcuggacgggggcaacaugcucgagacgaucaaggugagcccccagaccauggacggcauccugaaguccauccugaaggugaagaagacccucgggauguucaucagcgacaccccgggcgagcggaaccccuacgagaacauccuguacaagaucugccuguccggggacggcuggcccuacaucgccagccgcacguccaucaccgggcgggccugggagaacaccgucguggaccucgagagcgacggcaagccccagaaggccggcuccaacaacagcaacaagucccugcagagcgccggguucgcggccggccugaccuacucccagcucaugacgcugaaggacgccaugcugcagcuggacccgaacgccaagaccuggauggacaucgaggggcgccccgaggaccccguggagaucgcccucuaccagcccagcuccggcugcuacauccacuucuuccgggagccgaccgaccugaagcaguucaagcaggacgcgaaguacagccacgggaucgacgucaccgaccuguucgccgcccagcccggccucacguccgccgugaucgaggcccugccccgcaacauggucaucacgugccagggcagcgacgacaucaagaagcugcucgagucccaggggcgcaaggacaucaagcugaucgacaucgcgcugagcaagaccgacagccggaaguacgagaacgccgugugggaccaguacaaggaccucugccacaugcacaccggcguggucguggagaagaagaagcgcgggggcaaggaggagaucaccccgcacugcgcccugauggacugcaucauguucgacgccgcgguguccgggggccugaacacccucguccugcgggccgugcugccccgcgacaugguguuccggaccagcacgccccgcgucgugcucugaggacuaguaauaaggaaacuguaugaaugucugugggcaggaagugaagagauccuucuguaaagguuuuuggaauuaugucugcugaauaauaaacuuuuuugaaauaauaaaucugguagaaaaaugagaucucaaaggcucuuuucagagccaccaaaaaaaaaaaaaaaaaaaaaaaaaaaaaaaaaaaaaaaaaaaaaaaaaaaaaaaaaaaaaaaaagaauu

SEQ ID NO: 21463 - RNA, 2066 nt, Artificial Sequence
  mRNA product Design b-4 (hSL-A64-N5) comprising derived and/or modified sequence from LASV(G3010-SLE-2013;Clade IV)__AIT17345__SP-IgE_NP(2-569) (opt1)
aggagagucccgcagucggcguccagcggcucugcuuguucgugugugugucguugcaggccuuauucaagcuuaccauggacuggaccuggauccuguuccucguggccgccgcgacccgcguccacagcagcgccuccaaggagaucaagagcuuccuguggacccagucccuccgccgggagcugagcggcuacugcuccaacaucaagcuccagguggucaaggacgcccaggcgcugcugcacgggcuggacuucagcgagguguccaacgugcagcgccucaugcggaaggagcgccgggacgacaacgaccugaagcgccugcgggaccucaaccaggccgucaacaaccugguggagcucaagagcacccagcagaaguccauccugcgcgugggcacccugaccagcgacgaccugcucauccuggccgccgaccuggagaagcucaaguccaaggucacccggaccgagcgcccccugagcgccgggguguacaugggcaaccuguccagccagcagcucgaccagcggcgcgcgcugcuguccaugaucgggaugagcuccggcgugcagggcgcccgggccgggcgcgacggcgucgugcgggugugggacgucaagaacgccgagcuccugaacaaccaguucgggacgaugccgagccugacccucgcgugccugaccaagcagggccagguggaccugaacgacgugguccaggcccucaccgaccuggggcugaucuacacggccaaguaccccaacaccuccgaccucgaccgccugacccagagccaccccauccugaacaugaucgacaccaagaaguccagccucaacaucagcggcuacaacuucucccugggcgccgccgugaaggcgggggccugcaugcuggacggcgggaacaugcucgagacgaucaaggugagcccccagaccauggacggcauccugaaguccauccugaaggucaagaaggcccucggcauguucaucagcgagaccccgggggagcggaaccccuacgagaacauccuguacaagaucugccuguccggcgacggguggcccuacaucgccagccgcaccuccaucacgggccgggccugggagaacaccgugguggaccucgagagcgacgggaagccccagaaggcgggcuccaacaacagcaacaagucccugcagagcgccggcuucaccgccgggcugaccuacucccagcucaugacgcugaaggacgccaugcugcagcuggacccgaacgccaagaccuggauggacaucgagggccgccccgaggaccccgucgagguggcgcucuaccagcccagcuccgggugcuacauccacuucuuccgggagccgaccgaccugaagcaguucaagcaggacgccaaguacagccacggcaucgacgugaccgaccuguucgccgcccagcccgggcucacguccgccgucaucgacgcgcugccccgcaacauggugaucacgugccagggcagcgacgacaucaagaagcugcucgagagccagggccgcaaggacaucaagcugaucgacaucgcccuguccaagaccgacagccggaaguacgagaacgccgucugggaccaguacaaggaccucugccacaugcacaccggggugguggucgagaagaagaagcgcggcgggaaggaggagaucaccccgcacugcgcccugauggacugcaucauguucgacgcggccguguccggcgggcugaacaccagcgugcuccgggccguccugccccgcgacaugguguuccggaccuccacgccccgcgugguccugugaggacuaguaauaaggaaacuguaugaaugucugugggcaggaagugaagagauccuucuguaaagguuuuuggaauuaugucugcugaauaauaaacuuuuuugaaauaauaaaucugguagaaaaaugagaucucaaaggcucuuuucagagccaccaaaaaaaaaaaaaaaaaaaaaaaaaaaaaaaaaaaaaaaaaaaaaaaaaaaaaaaaaaaaaaaaagaauu

SEQ ID NO: 21464 - RNA, 2066 nt, Artificial Sequence
  mRNA product Design b-4 (hSL-A64-N5) comprising derived and/or modified sequence from LASV(G502-SLE-2009;Clade IV)__AIT17127__SP-IgE_NP(2-569) (opt1)
aggagagucccgcagucggcguccagcggcucugcuuguucgugugugugucguugcaggccuuauucaagcuuaccauggacuggaccuggauccuguuccucguggccgccgcgacccgcguccacagcagcgccuccaaggagaucaagagcuuccuguggacccagucccuccgccgggagcugagcggcuacugcuccaacaucaagcuccagguggucaaggacgcccaggcgcugcugcacgggcuggacuucagcgagguguccaacgugcagcgccucaugcggaaggagcgccgggacgacaacgaccugaagcgccugcgggaccucaaccaggccgucaacaaccugguggagcucaagagcacccagcagaaguccauccugcgcgugggcacccugaccagcgacgaccugcucauccuggccgccgaccuggagaagcucaaguccaaggucauccggaccgagcgcccccugagcgccgggguguacaugggcaaccuguccagccagcagcucgaccagcggcgcgcgcugcuguccaugaucgggaugagcggcggcaaccagggggugcgggccggcaaggacggggucgugcgcgugugggacgucaagaacgccgagcuccugaacaaccaguucggcaccaugccgucccugacgcucgccugccugaccaagcagggccagguggaccugaacgacgcggugcaggcccucaccgaccuggggcugaucuacaccgccaaguaccccaacacgagcgaccucgaccggcugacccagucccaccccauccugaacaugaucgacaccaagaaguccagccucaacaucuccggcuacaacuucagccugggggccgccgucaaggcgggcgccugcaugcuggacgggggcaacaugcucgagaccaucaaggugagcccccagacgauggacggcauccucaagagcauccugaaggugaagaaggcccuggggauguucaucuccgacaccccgggcgagcgcaaccccuacgagaacauccuguacaagaucugccugagcggggacggcuggcccuacaucgccucccggaccagcaucaccgggcgcgccugggagaacacggucguggaccucgaguccgacggcaagccccagaaggcgggcagcaacaacuccaacaagagccugcaguccgccggguucaccgccggccugaccuacagccagcucaugacccugaaggacgccaugcugcagcuggacccgaacacgaagaccuggauggacaucgaggggcggcccgaggaccccguggagaucgcccucuaccagcccuccagcggcugcuacauccacuucuuccgcgagccgaccgaccugaagcaguucaagcaggacgcgaaguacucccacgggaucgacgucaccgaccuguucgccgcccagcccggccucacgagcgccgugaucgacgcccugccccggaacauggugaucacgugccagggcuccgacgacauccgcaagcugcucgagagccaggggcgcaaggacaucaagcugaucgacaucgcgcugaacaagaccgacagccggaaguacgagaacgccgucugggaccaguacaaggaccucugccacaugcacaccggcguggucguggagaagaagaagcgcgggggcaaggaggagaucaccccgcacugcgcccugauggacugcaucauguucgacgccgcgguguccgggggccugaacaccagcguccuccgggccgugcugccccgcgacaugguguuccggaccuccacgccccgcgucgugcugugaggacuaguaauaaggaaacuguaugaaugucugugggcaggaagugaagagauccuucuguaaagguuuuuggaauuaugucugcugaauaauaaacuuuuuugaaauaauaaaucugguagaaaaaugagaucucaaaggcucuuuucagagccaccaaaaaaaaaaaaaaaaaaaaaaaaaaaaaaaaaaaaaaaaaaaaaaaaaaaaaaaaaaaaaaaaagaauu

SEQ ID NO: 21465 - RNA, 2066 nt, Artificial Sequence
  mRNA product Design b-4 (hSL-A64-N5) comprising derived and/or modified sequence from LASV(G733-SLE-2010;Clade IV)__AIT17155__SP-IgE_NP(2-569) (opt1)
aggagagucccgcagucggcguccagcggcucugcuuguucgugugugugucguugcaggccuuauucaagcuuaccauggacuggaccuggauccuguuccucguggccgccgcgacccgcguccacagcagcgccuccaaggagaucaagagcuuccuguggacccagucccuccgccgggagcugagcggcuacugcuccaacaucaagcuccagguggucaaggacgcccaggcgcugcugcacgggcuggacuucagcgagguguccaacgugcagcgccucaugcggaaggagcgccgggacgacaacgaccugaagcgccugcgggaccucaaccaggccgucaacaaccugguggagcucaagagcacccagcagaaguccgugcugcgcgucggcacccugaccagcgacgagcugcucgugcuggccgccgaccuggagaagcucaaguccaaggugauccggaccgagcgcccccugagcgccggggucuacaugggcaaccuguccagccagcagcucgaccagcggcgcgcgcugcuguccaugaucgggaugagcggcggcaaccagggggcccggaccggccgcgacgggguggugcgggucugggacgugaagaacgccgagcuccugaacaaccaguucggcaccaugccgucccugacccucgccugccugaccaagcagggccagguggaccugaacgacgcgguccaggcccucaccgaccuggggcugaucuacacggccaaguaccccaacaccagcgaccucgaccgccugacccagucccaccccauccugaacaugaucgacaccaagaaguccagccucaacaucuccggcuacaacuucagccugggggccgccgugaaggcgggcgccugcaugcuggacgggggcaacaugcucgagacgaucaaggugagcccccagaccauggacggcauccucaagagcauccugaaggucaagaaggcccuggggauguucaucuccgacaccccgggcgagcggaaccccuacgagaacauccuguacaagaucugccugagcggggacggcuggcccuacaucgccucccgcaccagcaucacggggcgggccugggagaacaccgugguggaccucgaguccgacggcaagccccagaaggcgggcagcaacaacuccaacaagagccugcaguccgccggguucaccgccggccugaccuacagccagcucaugacgcugaaggacgccaugcugcagcuggacccgaacgccaagaccuggauggacaucgaggggcgccccgaggaccccgucgagaucgcgcucuaccagcccuccagcggcugcuacauccacuucuuccgggagccgaccgaccugaagcaguucaagcaggacgccaaguacucccacgggaucgacgugaccgaccuguucgccgcccagcccggccucacgagcgccgugaucgacgcgcugccccgcaacauggucaucacgugccagggcuccgacgacauccgcaagcugcucgagagccaggggcggaaggacaucaagcugaucgacaucgcccugagcaagaucgacucccgcaaguacgagaacgccgugugggaccaguacaaggaccucugccacaugcacaccggcgucgugguggagaagaagaagcgcgggggcaaggaggagaucacgccccacugcgcccugauggacugcaucauguucgacgcggccgucagcgggggccugaacucccucgugcugcgggccgugcugccgcgggacauggucuuccgcaccagcacgccccggguggugcucugaggacuaguaauaaggaaacuguaugaaugucugugggcaggaagugaagagauccuucuguaaagguuuuuggaauuaugucugcugaauaauaaacuuuuuugaaauaauaaaucugguagaaaaaugagaucucaaaggcucuuuucagagccaccaaaaaaaaaaaaaaaaaaaaaaaaaaaaaaaaaaaaaaaaaaaaaaaaaaaaaaaaaaaaaaaaagaauu

SEQ ID NO: 21466 - RNA, 2066 nt, Artificial Sequence
  mRNA product Design b-4 (hSL-A64-N5) comprising derived and/or modified sequence from MOPV/LASV reassortant(IGS-1;Clade IV)__AFY05578__SP-IgE_NP(2-569) (opt1)
aggagagucccgcagucggcguccagcggcucugcuuguucgugugugugucguugcaggccuuauucaagcuuaccauggacuggaccuggauccuguuccucguggccgccgcgacccgcguccacagcagcgccuccaaggagaucaagagcuuccuguggacccagucccuccgccgggagcugagcggcuacugcuccaacaucaagcuccagguggucaaggacgcccaggcgcugcugcacgggcuggacuucagcgagguguccaacgugcagcgccucaugcggaaggagcgccgggacgacaacgaccugaagcgccugcgggaccucaaccaggccgucaacaaccugguggagcucaagagcacccagcagaaguccauccugcgcgugggcacccugaccagcgacgaccugcucauccuggccgccgaccuggagaagcuccgguccaaggucauccgcaccgagcggccccugagcgccgggguguacaugggcaaccuguccagccagcagcucgaccagcgccgggcgcugcugaacaugaucgggauguccggcggcaaccagggggcccgcgccggccgggacggggugguccgcgugugggacgugaagaacgccgagcuccugagcaaccaguucggcaccaugccgucccugacgcucgcgugccugaccaagcaggggcaggucgaccugaacgacgccgugcaggcccucaccgaccugggccugaucuacaccgccaaguaccccaacacgagcgaccucgaccggcugacccagucccaccccauccugaacaugaucgacaccaagaaguccagccucaacaucuccggcuacaacuucagccugggggccgcggugaaggccggcgccugcaugcuggacgggggcaacaugcucgagaccaucaaggucagcccccagacgauggacggcauccucaagagcauccugaaggugaagaaggcccuggggauguucaucuccgacaccccgggcgagcgcaaccccuacgagaacauccuguacaagaucugccugagcggggacggcuggcccuacaucgccucccggaccagcaucaccgggcgcgcgugggagaacacgguggucgaccucgaguccgacggcaagccccagaaggccgacagcaacaacuccagcaagucccugcagagcgccggcuucaccgccgggcugaccuacucccagcucaugacccugaaggacgccaugcugcagcuggacccgaacgcgaagacguggauggacaucgagggccggcccgaggaccccguggagaucgcccucuaccagcccagcuccgggugcuacauccacuucuuccgcgagccgaccgaccugaagcaguucaagcaggacgccaaguacagccacggcaucgacgugaccgaccuguucgccacccagcccgggcucacguccgccgucaucgacgcgcugccccgcaacauggugaucacgugccagggcagcgacgacauccggaagcugcucgagagccagggccgcaaggacaucaagcugaucgacaucgaccuguccaagaccgacagccggaaguacgagaacgccgugugggaccaguacaaggaccucugccacaugcacaccggggucguggucgagaagaagaagcgcggcgggaaggaggagaucaccccgcacugcgcccugauggacugcaucauguucgacgccgcgguguccggcgggcugaacaccagcgugcuccgggccguccugccccgcgacaugguguuccggaccuccacgccccgcgugguccugugaggacuaguaauaaggaaacuguaugaaugucugugggcaggaagugaagagauccuucuguaaagguuuuuggaauuaugucugcugaauaauaaacuuuuuugaaauaauaaaucugguagaaaaaugagaucucaaaggcucuuuucagagccaccaaaaaaaaaaaaaaaaaaaaaaaaaaaaaaaaaaaaaaaaaaaaaaaaaaaaaaaaaaaaaaaaagaauu

SEQ ID NO: 21467 - RNA, 2066 nt, Artificial Sequence
  mRNA product Design b-4 (hSL-A64-N5) comprising derived and/or modified sequence from LASV(LM765-SLE-2012;Clade IV)__AIT17815__SP-IgE_NP(2-569) (opt1)
aggagagucccgcagucggcguccagcggcucugcuuguucgugugugugucguugcaggccuuauucaagcuuaccauggacuggaccuggauccuguuccucguggccgccgcgacccgcguccacagcagcgccuccaaggagaucaagagcuuccuguggacccagucccuccgccgggagcugagcggcuacugcuccaacaucaagcuccagguggucaaggacgcccaggcgcugcugcacgggcuggacuucagcgagguguccaacgugcagcgccucaugcggaaggagcgccgggacgacaacgaccugaagcgccugcgggaccucaaccaggccgucaacaaccugguggagcucaagagcacccagcagaaguccauccugcgcgugggcacccugaccagcgacgaccugcucauccuggccgccgaccuggagaagcucaaguccaaggucacccggaccgagcgcccccugagcgccgggguguacaugggcaaccuguccagccagcagcucgaccagcggcgcgcgcugcuggacaugaucgggauguccggcagcaaccagggcgcccgggccgggcgcgacggcgugguccgggugugggacgugaagaacgccgagcuccugaacaaccaguucgggacgaugccgucccugacccucgcgugccugaccaagcagggccaggucgaccugaacgacgccgugcaggcccucaccgaccuggggcugaucuacacggccaaguaccccaacaccagcgaccucgaccgccugacccagucccaccccauccugaacaugaucgacaccaagaaguccagccucaacaucuccggcuacaacuucagccugggcgccgcggugaaggccggggccugcaugcuggacggcgggaacaugcucgagacgaucaaggucagcccccagaccauggacggcauccucaagagcauccugaaggugaagaaggcccugggcauguucaucuccgacgccccgggggagcggaaccccuacgagaacauccuguacaagaucugccugagcggcgacggguggcccuacaucgcgucccgcaccagcaucaccggccgggccugggagaacacgguggucgaccucgaguccgacgggaagccccagaaggccggcagcaacggcuccaacaagagccugcaguccgccggguucaccgccggccugaccuacagccagcucaugacccugaaggacgcgaugcugcagcuggacccgaacgccaagacguggauggacaucgaggggcgccccgaggaccccguggagaucgcccucuaccagcccuccagcggcugcuacauccacuucuuccgggagccgaccgaccugaagcaguucaagcaggacgccaaguacucccacgggaucgacgugaccgaccuguucgccgcgcagcccggccucaccagcgccgucaucgacgcccugccccgcaacauggugaucacgugccagggcuccgacgacauccgcaagcuguucgagagccaggggcggaaggacaucaagcucaucgacaucgcccugagcaagaccgacucccgcaaguacgagaacgcggugugggaccaguacaaggaccugugccacaugcacaccggcaucgucguggagaagaagaagcgcgggggcaaggaggagaucacgccccacugcgcccucauggacugcaucauguucgacgccgccgucagcgggggccugaacaccuccgugcugcgggccgugcucccgcgggacauggucuuccgcaccagcacgccccggguggugcugugaggacuaguaauaaggaaacuguaugaaugucugugggcaggaagugaagagauccuucuguaaagguuuuuggaauuaugucugcugaauaauaaacuuuuuugaaauaauaaaucugguagaaaaaugagaucucaaaggcucuuuucagagccaccaaaaaaaaaaaaaaaaaaaaaaaaaaaaaaaaaaaaaaaaaaaaaaaaaaaaaaaaaaaaaaaaagaauu

SEQ ID NO: 21468 - RNA, 2066 nt, Artificial Sequence
  mRNA product Design b-4 (hSL-A64-N5) comprising derived and/or modified sequence from LASV(LM776-SLE-2012;Clade IV)__AIT17825__SP-IgE_NP(2-569) (opt1)
aggagagucccgcagucggcguccagcggcucugcuuguucgugugugugucguugcaggccuuauucaagcuuaccauggacuggaccuggauccuguuccucguggccgccgcgacccgcguccacagcagcgccuccaaggagaucaagagcuuccuguggacccagucccuccgccgggagcugagcuccuacugcagcaacaucaagcuccagguggucaaggacgcccaggcgcugcugcacggccuggacuucuccgaggugagcaacgugcagcgccucaugcggaaggagcgccgggacgacaacgaccugaagcgccugcgggaccucaaccaggccgucaacaaccugguggagcugaaguccacccagcagaaguccauccuccgcguggggacccugaccuccgacgaccugcucauccuggccgccgaccuggagaagcucaagagcaaggucacccggaccgagcgcccccuguccgccggcguguacauggggaaccugagcucccagcagcucgaccagcggcgcgcgcugcugagcaugaucggcauguccgggagcaaccagggcgcccgggccggccgcgacggggugguccgggugugggacgugaagaacgccgagcuccugaacaaccaguucggcacgaugccgucccugacccucgcgugccugaccaagcaggggcaggucgaccugaacgacgccgugcaggcccucaccgaccugggccugaucuacacggccaaguaccccaacaccagcgaccucgaccgccugacccagagccaccccauccugaacaugaucgacaccaagaaguccagccucaacaucuccggguacaacuucagccugggcgccgcggugaaggccggcgccugcaugcuggacgggggcaacaugcucgagacgaucaaggucagcccccagaccauggacgggauccucaagagcauccugaaggugaagaaggcccugggcauguucaucuccgacaccccgggcgagcggaaccccuacgagaacauccuguacaagaucugccugagcggggacggcuggcccuacaucgccucccgcaccagcaucacggggcgggcgugggagaacaccguggucgaccucgaguccgacggcaagccccagaaggccgggagcaacaacuccaacaagagccugcaguccgccggcuucaccgccggccugaccuacagccagcucaugacgcugaaggacgccaugcugcagcuggacccgaacgcgaagaccuggauggacaucgaggggcgccccgaggaccccguggagguggcccucuaccagcccuccagcggcugcuacauccacuucuuccgggagccgaccgaccugaagcaguucaagcaggacgccaaguacucccacgggaucgacgucaccgaccuguucgccgcccagcccggccucacgagcgcggugaucgacgcccugccccgcaacauggugaucacgugccaggggagcgacgacauccgcaagcugcucgagucccagggccggaaggacaucaagcugaucgacaucgcccugagcaagaccgacucccgcaaguacgagaacgccgucugggaccaguacaaggaccucugccacaugcacaccggcguggucguggagaagaagaagcgcgggggcaaggaggagaucaccccgcacugcgcgcugauggacugcaucauguucgacgccgccgugagcgggggccugaacaccuccguccuccgggccgugcugccccgggacaugguguuccgcaccagcacgccccgggucgugcugugaggacuaguaauaaggaaacuguaugaaugucugugggcaggaagugaagagauccuucuguaaagguuuuuggaauuaugucugcugaauaauaaacuuuuuugaaauaauaaaucugguagaaaaaugagaucucaaaggcucuuuucagagccaccaaaaaaaaaaaaaaaaaaaaaaaaaaaaaaaaaaaaaaaaaaaaaaaaaaaaaaaaaaaaaaaaagaauu

SEQ ID NO: 21469 - RNA, 2066 nt, Artificial Sequence
  mRNA product Design b-4 (hSL-A64-N5) comprising derived and/or modified sequence from LASV(Mad39;Clade IV)__ANH09723__SP-IgE_NP(2-569) (opt1)
aggagagucccgcagucggcguccagcggcucugcuuguucgugugugugucguugcaggccuuauucaagcuuaccauggacuggaccuggauccuguuccucguggccgccgcgacccgcguccacagcagcgccuccaaggagaucaagagcuuccuguggacccagucccuccgccgggagcugagcggcuacugcuccaacaucaagcuccagguggucaaggacgcccaggcgcugcugcacgggcuggacuucagcgagguguccaacgugcagcgccucaugcggaagcagcgccgggacgacaacgaccugaagcgccugcgggaccucaaccaggccgucaacaaccugguggagcugaaguccacccagcagaaguccgugcuccgcgucggcacgcugaccagcgacgaccugcucacccuggccgccgaccuggagaagcucaaguccaaggugacccggacggagcgcccccugaccgccgggguguacaugggcaaccugagcucccagcagcucgaccagcggcgcgcgcugcugaacaugaucgggaugagcggcggcaaccagggggcccggaccggccgcgacggggucgugcgggugugggacgucaagaacgccgagcuccugaacaaccaguucggcaccaugccgucccugacgcucgccugccugaccaagcagggccagguggaccugaacgacgugguccaggcgcucaccgaccuggggcugaucuacaccgccaaguaccccaacacgagcgaccucgaccgccugacccagucccaccccauccugaacaugaucgacaccaacaagagcucccucaacaucagcggcuacaacuucagccugggggccgccgugaaggccggcgcgugcaugcuggacgggggcaacaugcucgagaccaucaaggugagcccccagacgauggacggcauccucaagagcauccugaaggucaagaagucccuggggauguucaucagcgacaccccgggcgagcggaaccccuacgagaacauccuguacaagaucugccuguccggggacggcuggcccuacaucgccagccgcaccuccaucaccgggcgggccugggagaacacggugguggaccucgagagcggcggcaagccccagaaggccggguccaacaacagcaacaagucccugcagagcgccggcuucgcggccgggcugaccuacucccagcucaugacccugaaggacgccaugcugcagcuggacccgaacgccaagaccuggauggacaucgagggccgccccgaggaccccgucgagaucgcccucuaccagcccaucagcgggugcuacauccacuucuuccgggagccgacggaccugaagcaguucaagcaggacgcgaaguacucccacggcaucgacgugaccgaccuguucgccgcccagcccggccucaccagcgccgugaucgaggcccugccccgcaacauggucaucacgugccagggguccgacgacauccgcaagcuguucgagagccagggccggaaggacaucaagcucaucgacaucgcgcuguccaagaccgacagccgcaaguacgagaacgccgugugggaccaguacaaggaccugugccacaugcacaccggggucgugguggagaagaagaagaagggcgggaaggaggagaucacgccccacugcgcccucauggacugcaucauguucgacgccgcggucagcggcggccugaacacccuggugcuccgggccgugcugccgcgcgacauggucuuccggaccuccacccccaagguggugcugugaggacuaguaauaaggaaacuguaugaaugucugugggcaggaagugaagagauccuucuguaaagguuuuuggaauuaugucugcugaauaauaaacuuuuuugaaauaauaaaucugguagaaaaaugagaucucaaaggcucuuuucagagccaccaaaaaaaaaaaaaaaaaaaaaaaaaaaaaaaaaaaaaaaaaaaaaaaaaaaaaaaaaaaaaaaaagaauu

SEQ ID NO: 21470 - RNA, 2066 nt, Artificial Sequence
  mRNA product Design b-4 (hSL-A64-N5) comprising derived and/or modified sequence from LASV(Z0947-SLE-2011;Clade IV)__AIT17841__SP-IgE_NP(2-569) (opt1)
aggagagucccgcagucggcguccagcggcucugcuuguucgugugugugucguugcaggccuuauucaagcuuaccauggacuggaccuggauccuguuccucguggccgccgcgacccgcguccacagcagcgccuccaaggagaucaagagcuuccuguggacccagucccuccgccgggagcugagcggcuacugcuccaacaucaagcuccagguggucaaggacgcccaggcgcugcugcacgggcuggacuucagcgagguguccaacgugcagcgccucaugcggaaggagcgccgggacgacaacgaccugaagcgccugcgggaccucaaccaggccgucaacaaccugguggagcucaagagcacccagcagaaguccauccugcgcgugggcacccugaccagcgacgaccugcucauccuggccgccgaccuggagaagcucaaguccaaggucacccggaccgagcgcccccugagcgccgggguguacaugggcaaccuguccagccagcagcucgaccagcggcgcgcgcugcugaacaugaucgggauguccggcagcaaccagggcgcccggacggggcgcgacggcgugguccgggugugggacgugaagaacgccgagcuccugaacaaccaguucgggaccaugccgucccugacccucgccugccugaccaagcagggccaggucgaccugaacgacgcggugcaggcccucacggaccuggggcugaucuacaccgccaaguaccccaacaccagcgaccucgaccgccugacccagucccaccccauccugaacaugaucgacacgaagaaguccagccucaacaucuccggcuacaacuucagccugggcgccgccgugaaggcgggggccugcaugcuggacggcgggaacaugcucgagaccaucaaggucagcccccagaccauggacggcauccucaagagcauccugaaggugaagaaggcccugggcauguucaucuccgacgccccgggggagcggaaccccuacgagaacauccuguacaagaucugccugagcggcgacggguggcccuacaucgccucccgcaccagcaucacgggccgggcgugggagaacaccguggucgaccucgaguccgacgggaagccccagaaggccggcagcaacggcuccaacaagagccugcaguccgccggguucaccgccggccugaccuacagccagcucaugacgcugaaggacgccaugcugcagcuggacccgaacgcgaagaccuggauggacaucgaggggcgccccgaggaccccguggagaucgcccucuaccagcccuccagcggcugcuacauccacuucuuccgggagccgaccgaccugaagcaguucaagcaggacgccaaguacucccacgggaucgacgugaccgaccuguucgccgcccagcccggccucacgagcgcggucaucgacgcccugccccgcaacauggugaucacgugccagggcuccgacgacauccgcaagcuguucgagagccaggggcggaaggacaucaagcucaucgacaucgcccugagcaagaccgacucccgcaaguacgagaacgccgugugggaccaguacaaggaccugugccacaugcacaccggcaucgucguggagaagaagaagcgcgggggcaaggaggagaucaccccgcacugcgcgcucauggacugcaucauguucgacgccgccgucagcgggggccugaacaccuccgugcugcgggccgugcucccccgggacauggucuuccgcaccagcacgccccggguggugcugugaggacuaguaauaaggaaacuguaugaaugucugugggcaggaagugaagagauccuucuguaaagguuuuuggaauuaugucugcugaauaauaaacuuuuuugaaauaauaaaucugguagaaaaaugagaucucaaaggcucuuuucagagccaccaaaaaaaaaaaaaaaaaaaaaaaaaaaaaaaaaaaaaaaaaaaaaaaaaaaaaaaaaaaaaaaaagaauu

SEQ ID NO: 21471 - RNA, 2066 nt, Artificial Sequence
  mRNA product Design b-4 (hSL-A64-N5) comprising derived and/or modified sequence from LASV(Josiah;Clade IV)__NP_694869__SP-IgE_NP(2-569) (opt4)
aggagagucccgcagucggcguccagcggcucugcuuguucgugugugugucguugcaggccuuauucaagcuuaccauggacuggaccuggauccuguuccugguggccgccgccaccagagugcacagcagcgccagcaaggagaucaagagcuuccuguggacccagagccugagaagagagcugagcggcuacugcagcaacaucaagcugcagguggugaaggacgcccaggcccugcugcacggccuggacuucagcgaggugagcaacgugcagagacugaugagaaaggagagaagagacgacaacgaccugaagagacugagagaccugaaccaggccgugaacaaccugguggagcugaagagcacccagcagaagagcauccugagagugggcacccugaccagcgacgaccugcugauccuggccgccgaccuggagaagcugaagagcaaggugaucagaaccgagagaccccugagcgccggcguguacaugggcaaccugagcagccagcagcuggaccagagaagagcccugcugaacaugaucggcaugagcggcggcaaccagggcgccagagccggcagagacggcguggugagagugugggacgugaagaacgccgagcugcugaacaaccaguucggcaccaugcccagccugacccuggccugccugaccaagcagggccagguggaccugaacgacgccgugcaggcccugaccgaccugggccugaucuacaccgccaaguaccccaacaccagcgaccuggacagacugacccagagccaccccauccugaacaugaucgacaccaagaagagcagccugaacaucagcggcuacaacuucagccugggcgccgccgugaaggccggcgccugcaugcuggacggcggcaacaugcuggagaccaucaaggugagcccccagaccauggacggcauccugaagagcauccugaaggugaagaaggcccugggcauguucaucagcgacacccccggcgagagaaaccccuacgagaacauccuguacaagaucugccugagcggcgacggcuggcccuacaucgccagcagaaccagcaucaccggcagagccugggagaacaccgugguggaccuggagagcgacggcaagccccagaaggccgacagcaacaacagcagcaagagccugcagagcgccggcuucaccgccggccugaccuacagccagcugaugacccugaaggacgccaugcugcagcuggaccccaacgccaagaccuggauggacaucgagggcagacccgaggaccccguggagaucgcccuguaccagcccagcagcggcugcuacauccacuucuucagagagcccaccgaccugaagcaguucaagcaggacgccaaguacagccacggcaucgacgugaccgaccuguucgccacccagcccggccugaccagcgccgugaucgacgcccugcccagaaacauggugaucaccugccagggcagcgacgacaucagaaagcugcuggagagccagggcagaaaggacaucaagcugaucgacaucgcccugagcaagaccgacagcagaaaguacgagaacgccgugugggaccaguacaaggaccugugccacaugcacaccggcguggugguggagaagaagaagagaggcggcaaggaggagaucaccccccacugcgcccugauggacugcaucauguucgacgccgccgugagcggcggccugaacaccagcgugcugagagccgugcugcccagagacaugguguucagaaccagcacccccagaguggugcugugaggacuaguaauaaggaaacuguaugaaugucugugggcaggaagugaagagauccuucuguaaagguuuuuggaauuaugucugcugaauaauaaacuuuuuugaaauaauaaaucugguagaaaaaugagaucucaaaggcucuuuucagagccaccaaaaaaaaaaaaaaaaaaaaaaaaaaaaaaaaaaaaaaaaaaaaaaaaaaaaaaaaaaaaaaaaagaauu

SEQ ID NO: 21472 - RNA, 2066 nt, Artificial Sequence
  mRNA product Design b-4 (hSL-A64-N5) comprising derived and/or modified sequence from LASV(LP;Clade I)__AAF86702__SP-IgE_NP(2-569) (opt4)
aggagagucccgcagucggcguccagcggcucugcuuguucgugugugugucguugcaggccuuauucaagcuuaccauggacuggaccuggauccuguuccugguggccgccgccaccagagugcacagcagcaacagcaaggagaucaagagcuuccuguggacccagagccugagaagagagcugagcggcuacugcagcaacaucaagcugcagguggugaaggacgcccaggcccugcugcacggccuggacuucagcgaggugagcaacgugcagagacugaugagaaagcagaagagagacgacgccgaccugaagagacugagagaccugaaccaggccgugaacaaccugguggagcugaagagcacccagcagaagaacgugcugagagugggcacccugagcagcgacgaccugaucacccuggccgccgaccuggagaagcugaagagcaaggugaucagaaccgagagaccccugagcagcggcguguacaugggcaaccugagcagccagcagcuggaccagagaagagcccugcugagcaugaucggcaugagcggcggcccccagggcaacagaaccggcggcgacggcguggugagagugugggacgugaagaacgccgagcugcugaacaaccaguucggcaccaugcccagccugacccuggccugccugaccaagcagggccagguggaccugaacgacgccgugcaggcccugaccgaccugggccugaucuacaccgccaaguaccccaacagcagcgaccuggacaugcugacccagagccaccccauccugggcaugguggacaccaagaagagcagccugaacaucagcggcuacaacuucagccugggcgccgccgugaaggccggcgccugcaugcuggacggcggcaacaugcuggagaccaucaaggugagcccccagaccauggacggcauccugaagagcauccugaaggugaagagaagccugggcauguucaucagcgacacccccggcgagagaaaccccuacgagaacauccuguacaagaucugccugagcggcgagggcuggcccuacaucgccagcagaaccagcaucaccggcagagccugggagaacacccugguggaccuggagagcgacaacaagccccccaagcugaacagcgccggcagcaacaagagccugcaggccgccggccugaacgccggccugaccuacagccagcugaugacccugaaggacugcaugcugcagcuggaccccagcagcaagaccuggaucgacaucgagggcagacccgaggaccccguggagaucgcccuguuccagcccagcagcggcugcuacauccacuucuucagagagcccaccgaccugaagcaguucaagcaggacgccaaguacagccacggcaucgacgugaccgaccuguucagcacccagcccggccugaccagcgccgugaucgaggcccugcccagaaacauggugcugaccugccagggcagcgacgacaucaagaagcugcuggagagccagggcagaagagacaucaagcugaucgacaucagccugagcaaggccgacagcagaaaguucgagaacgccgugugggaccaguacaaggaccugugccacaugcacaccggcguggugguggagaagaagaagagaggcggcaaggaggagaucaccccccacugcgcccugcuggacugcaucauguucgacgccgccaccaccggcagccugaacaucaccacccugagagccgugcugcccagagacaugguguucagaaccagcacccccaagguggugcugugaggacuaguaauaaggaaacuguaugaaugucugugggcaggaagugaagagauccuucuguaaagguuuuuggaauuaugucugcugaauaauaaacuuuuuugaaauaauaaaucugguagaaaaaugagaucucaaaggcucuuuucagagccaccaaaaaaaaaaaaaaaaaaaaaaaaaaaaaaaaaaaaaaaaaaaaaaaaaaaaaaaaaaaaaaaaagaauu

SEQ ID NO: 21473 - RNA, 2066 nt, Artificial Sequence
  mRNA product Design b-4 (hSL-A64-N5) comprising derived and/or modified sequence from LASV(803213;Clade II)__AAF86704__SP-IgE_NP(2-569) (opt4)
aggagagucccgcagucggcguccagcggcucugcuuguucgugugugugucguugcaggccuuauucaagcuuaccauggacuggaccuggauccuguuccugguggccgccgccaccagagugcacagcagcgccagcaaggaggugaagagcuuccuguggacccagagccugagaagagagcugagcggcuacugcagcaacaucaagcugcagguggugaaggacgcccaggcccugcugcacggccuggacuucagcgaggugaacaacgugcagagacugaugagaaagcagaagagagacgacggcgaccugaagagacugagagaccugaaccaggccgugaacaaccugguggagcugaagagcacccagcagaagagcauccugagagugggcacccugaccagcgacgaccugcugacccuggccgccgaccuggagaagcugaagagcaaggugaucagaaccgagagaccccugagcagcggcguguacaugggcaaccugagcacccagcagcuggagcagagaagagcccugcugaacaugaucggcauggugggcggcgcccagggcacccagcccggcagagacggcguggugagagugugggacgugaagaaccccgaccugcugaacaaccaguucggcaccaugcccagccugacccuggccugccugaccaagcagggccagguggaccugaacgacgccgugcuggcccugaccgaccugggccugaucuacaccgccaaguaccccaacagcagcgaccuggacagacugagccagagccaccccauccugaacaugguggacaccaagaagagcagccugaacaucagcggcuacaacuucagccugggcgccgccgugaaggccggcgccugcaugcuggacggcggcaacaugcuggagaccaucaaggugaccccccagaccauggacggcauccugaagagcauccugaaggugaagagaagccugggcauguucgugagcgacacccccggcgagagaaaccccuacgagaacauccuguacaagaucugccugagcggcgacggcuggcccuacaucgccagcagaaccagcaucgugggcagagccugggagaacaccaccguggaccuggagagcgacggcaagccccagaaggugggcaccgccggcagcaacaagagccugcagagcgccggcuuccccaccggccugaccuacagccagcugaugacccugaaggacagcaugaugcagcuggaccccagcgccaagaccuggaucgacaucgagggcagacccgaggaccccguggagaucgcccuguaccagcccaugagcggcugcuacauccacuucuucagagagcccaccgaccugaagcaguucaagcaggacgccaaguacagccacggcaucgacguggccgaccuguuccccgcccagcccggccugaccagcgccgugaucgaggcccugcccagaaacauggugcugaccugccagggcagcgacgacaucaagaagcugcuggacagccagggcagaagagacaucaagcugaucgacaucagccugagcaagguggacagcagaaaguucgagaacgccgugugggaccagugcaaggaccugugccacaugcacaccggcguggugguggagaagaagaagagaggcggcaaggaggagaucaccccccacugcgcccugauggacugcaucauguucgacgccgccgugagcggcggccugaacauccccgugcugagagccgugcugcccagagacaugguguucagaaccagcagccccaagguggugcugugaggacuaguaauaaggaaacuguaugaaugucugugggcaggaagugaagagauccuucuguaaagguuuuuggaauuaugucugcugaauaauaaacuuuuuugaaauaauaaaucugguagaaaaaugagaucucaaaggcucuuuucagagccaccaaaaaaaaaaaaaaaaaaaaaaaaaaaaaaaaaaaaaaaaaaaaaaaaaaaaaaaaaaaaaaaaagaauu

SEQ ID NO: 21474 - RNA, 2069 nt, Artificial Sequence
  mRNA product Design b-4 (hSL-A64-N5) comprising derived and/or modified sequence from LASV(GA391;Clade III)__CAA36646__SP-IgE_NP(2-570) (opt4)
aggagagucccgcagucggcguccagcggcucugcuuguucgugugugugucguugcaggccuuauucaagcuuaccauggacuggaccuggauccuguuccugguggccgccgccaccagagugcacagcagcgccagcaaggaggugagaagcuuccuguggacccagagccugagaagagagcugagcggcuacugcagcaacaucaagcugcagguggugaaggacgcccaggcccugcugcacggccuggacuucagcgaggugagcaacgugcagagacugaugagaaagcagaagagagacgacggcgaccugaagagacugagagaccugaaccaggccgugaacaaccugguggagcugaagagcacccagcagaagagcgugcugagagugggcacccugagcagcgacgaccugcugauccuggccgccgaccuggagaagcugaagagcaaggugaccagaaccgagagaccccugagcagcggcguguacaugggcaaccugagcagccagcagcuggaccagagaagagcccugcugaacaugaucggcaugaccggcgugagcggcggcggcaagggcgccagcgacggcaucgugagagugugggacgugaagaacgccgagcugcugaacaaccaguucggcaccaugcccagccugacccuggccugccugaccaagcagggccagguggaccugaacgacgccgugcaggcccugaccgaccugggccugaucuacaccgccaaguaccccaacagcagcgaccuggacagacugagccagagccaccccauccugaacaugaucgacaccaagaagagcagccugaacaucagcggcuacaacuucagccugggcgccgccgugaaggccggcgccugcaugcuggacggcggcaacaugcuggagaccaucaaggugagcccccagaccauggacggcauccugaagagcauccugaaggugaagaagagccugggcauguucgugagcgacacccccggcgagagaaaccccuacgagaacauccuguacaagaucugccugagcggcgacggcuggcccuacaucgccagcagaaccagcaucgugggcagagccugggagaacaccgugguggaccuggagcaggacaacaagccccagaagaucggcaacggcggcagcaacaagagccugcagagcgccggcuucgccgccggccugaccuacagccagcugaugacccugaaggacuucaagugcuucaaccugauccccaacgccaagaccuggauggacaucgagggcagacccgaggaccccguggagaucgcccuguaccagcccagcagcggcugcuacgugcacuucuucagagagcccaccgaccugaagcaguucaagcaggacgccaaguacagccacggcaucgacgugaccgaccuguucgccgcccagcccggccugaccagcgccgugaucgaggcccugcccagaaacauggugaucaccugccagggcagcgaggacaucagaaagcugcuggagagccagggcagaagagacaucaagcugaucgacaucacccugagcaaggccgacagcagaaaguucgagaacgccgugugggaccaguucaaggaccugugccacaugcacaccggcguggugguggagaagaagaagagaggcggcaaggaggagaucaccccccacugcgcccugauggacugcaucauguucgacgccgccgugagcggcggccuggacgccaaggugcugagaguggugcugcccagagacaugguguucagaaccagcacccccaagguggugcugugaggacuaguaauaaggaaacuguaugaaugucugugggcaggaagugaagagauccuucuguaaagguuuuuggaauuaugucugcugaauaauaaacuuuuuugaaauaauaaaucugguagaaaaaugagaucucaaaggcucuuuucagagccaccaaaaaaaaaaaaaaaaaaaaaaaaaaaaaaaaaaaaaaaaaaaaaaaaaaaaaaaaaaaaaaaaagaauu

SEQ ID NO: 21475 - RNA, 2066 nt, Artificial Sequence
  mRNA product Design b-4 (hSL-A64-N5) comprising derived and/or modified sequence from LASV(AV;Clade V)__CCA30315__SP-IgE_NP(2-569) (opt4)
aggagagucccgcagucggcguccagcggcucugcuuguucgugugugugucguugcaggccuuauucaagcuuaccauggacuggaccuggauccuguuccugguggccgccgccaccagagugcacagcagcgccagcaaggaggugaagagcuuccuguggacccagagccugagaagagagcugagcggcuacugcagcaacaucaagcugcagguggugaaggacgcccaggcccugcugcacggccuggacuucagcgaggugagcaacgugcagagacugaugagaaagcagagaagagacgacagcgaccugaagagacugagagaccugaaccaggccgugaacaaccugguggagcugaagagcacccagcagaagagcgugcugagagugggcacccugagcagcgacgaccugcugacccuggccgccgaccuggagaagcugaagagcaaggugaccagaaccgagagaccccugagcagcggcguguacaugggcaaccugagcagccagcagcuggaccagagaagagcccugcugaaccugaucggcaugaccaacggcagccagggcagccaggccggcagagacggcguggugagagugugggacgugaagaacgccgagcugcugaacaaccaguucggcaccaugcccagccugacccuggccugccugaccaagcagggccagguggaccugaacgacguggugcaggcccugaccgaccugggccugaucuacaccgccaaguaccccaacaccagcgaccuggacagacugacccagagccaccccauccugaacaugaucgacaccaagaagagcagccugaacaucagcggcuacaacuucagccugggcgccgccgugaaggccggcgccugcaugcuggacggcggcaacaugcuggagaccaucaaggugagcccccagagcauggacggcauccugaagagcauccugaaggugaagagagcccugggcauguucgugagcgacacccccggcgagagaaaccccuacgagaacauccuguacaagaucugccugagcggcgacggcuggcccuacaucgccagcagaaccagcaucgugggcagagccugggagaacaccgugguggaccuggagaccgacggcaagccccagaagaucggcagcggcaacagcaacaagagccugcagagcgccggcuucagcgccggccugaccuacagccagcugaugacccugaaggacgccaugcugcagcuggaccccaacgccaagaccuggauggacaucgagggcagacccgaggaccccguggagguggcccuguaccagcccaucagcggcugcuacauccacuucuucagagagcccaccgaccugaagcaguucaagcaggacgccaaguacagccacggcaucgacaucgccgaccuguucgccgcccagcccggccugaccagcgccgugaucgaggcccugcccagaaacauggugaucaccugccagggcagcgaggacaucaagaagcugcuggagagccagggcagaaaggacaucaagcugaucgacaucgcccugagcaagaucgacagcagaaaguucgagaacgccgugugggaccaguacaaggaccugugccacaugcacaccggcguggugguggagaagaagaagagaggcggcaaggaggagaucaccccccacugcgcccugauggacugcaucauguucgacgccgccgugagcggcggccugaacacccuggugcugagagccgugcugcccagagacaugguguucagaaccagcacccccagaguggugcugugaggacuaguaauaaggaaacuguaugaaugucugugggcaggaagugaagagauccuucuguaaagguuuuuggaauuaugucugcugaauaauaaacuuuuuugaaauaauaaaucugguagaaaaaugagaucucaaaggcucuuuucagagccaccaaaaaaaaaaaaaaaaaaaaaaaaaaaaaaaaaaaaaaaaaaaaaaaaaaaaaaaaaaaaaaaaagaauu

SEQ ID NO: 21476 - RNA, 2066 nt, Artificial Sequence
  mRNA product Design b-4 (hSL-A64-N5) comprising derived and/or modified sequence from LASV(Togo/2016/7082;Clade VI)__AMR44578__SP-IgE_NP(2-569) (opt4)
aggagagucccgcagucggcguccagcggcucugcuuguucgugugugugucguugcaggccuuauucaagcuuaccauggacuggaccuggauccuguuccugguggccgccgccaccagagugcacagcagcaacagcaaggaggugaagagcuuccuguggacccagagccugagaagagagcugagcggcuacugcagcaacaucaagcugcagguggugaaggacgcccaggcccugcugcacggccuggacuucagcgaggugagcaacgugcagagacugaugagaaagcagaagagagacgacggcgaccugaagagacugagagaccugaaccaggccgugaacaaccugguggagcugaagagcgugcagcagaagagcauccugagagugggcacccugaccagcgacgaccugcugacccuggccgccgaccuggagaagcugaagagcaaggugaccagaaccgagagaccccugagcagcggcguguacaugggcaaccugagcagccagcagcuggaccagagaagagcccugcugagcaugaucggcaugagcggcggcaaccagaacagccagcccaagggcgacggcguggugagagugugggacgugaagaacgccgaccugcugaacaaccaguucggcaccaugcccagccugacccuggccugccugaccaagcagggccagguggaccugaacgacgccgugcaggcccugaccgaccugggccugaucuacaccgccaaguaccccaacagcagcgaccuggacagacugagccagagccaccccauccugaacaugaucgacaccaagaagagcagccugaacaucagcggcuacaacuucagccugggcgccgccaucaagaccggcgccugcaugcuggacggcggcaacaugcuggagaccaucaaggugaccccccagaccauggacggcauccugaagagcauccugaaggugaagagaagccugggcauguucaucagcgacacccccggcgagagaaaccccuacgagaacauccuguacaagaucugccugagcggcgacggcuggcccuacaucgccagcagaaccgccaucaucggcagagccugggagaacaccgugguggaccuggagagcgacagcaagccccagaagaucggcagcaacggcagcaacaagagccugcagagcgccggcuucgcccccggccugaccuacagccagcugaugacccugaaggacagcaugcugcagcuggaccccaacgccaagaccuggaucgacaucgagggcagacccgaggaccccguggagguggcccuguuccagcccaucagcggcugcuacauccacuucuucagagagcccaccgaccugaagcaguucaagcaggacgccaaguacagccacggcaucgacgugaccgaccuguucgccgcccagcccggccugaccagcgccgugaucgaggcccugcccagaaacauggugcugaccugccagggcagcgacgacaucaagaagcugcuggacagccagggcagaagagacaucaagcugaucgacgugagccugaacaagaucgacagcagaaaguucgagaacgccgugugggaccaguacaaggaccugugccacaugcacaccggcguggugguggagaagaagaagaagggcggcaaggaggagaucaccccccacugcgcccugcuggacugcaucauguucgacgccgccgugagcggcggccugaacgccaccgugcugagagccgugcugcccagagacaugguguucagaaccagcagccccaagguggugcugugaggacuaguaauaaggaaacuguaugaaugucugugggcaggaagugaagagauccuucuguaaagguuuuuggaauuaugucugcugaauaauaaacuuuuuugaaauaauaaaucugguagaaaaaugagaucucaaaggcucuuuucagagccaccaaaaaaaaaaaaaaaaaaaaaaaaaaaaaaaaaaaaaaaaaaaaaaaaaaaaaaaaaaaaaaaaagaauu

SEQ ID NO: 21477 - RNA, 2066 nt, Artificial Sequence
  mRNA product Design b-4 (hSL-A64-N5) comprising derived and/or modified sequence from LASV(KAK-428;Clade n.d. (VII))__ANH09741__SP-IgE_NP(2-569) (opt4)
aggagagucccgcagucggcguccagcggcucugcuuguucgugugugugucguugcaggccuuauucaagcuuaccauggacuggaccuggauccuguuccugguggccgccgccaccagagugcacagcagcaacagcaaggaggugaagagcuuccuguggacccagagccugagaagagagcugagcggcuacugcaccaacaucaagcugcagguggugaaggacgcccaggcccugcugcacggccuggacuucagcgaggugagcaacgugcagagacugaugagaaagcagaagagagacgacaacgaccugaagagacugagagaccugaaccaggccgugaacaaccugguggagcugaagagcgugcagcagaagagcgugcugaaggugggcacccugaacagcgacgaccugcugacccuggccgccgaccuggagaagcugaagagcaagguggugagaaccgagagaccccugagcagcggcguguacaugggcaaccugagcagccagcagcuggaccagagaagagcccugcugaacaugaucggcauggccggcggcagccagggcaaccagcccagcagagacggcguggugagagugugggacgugaagaacgccgaccugcugaacaaccaguucggcaccaugcccagccugacccuggccugccugaccaagcagggccagguggaccugaacgacguggugcuggcccugaccgaccugggccugaucuacaccgccaaguaccccaacagcagcgaccuggacagacugagccagaaccaccccgugcugaacaugaucgacgugaacaagagcagccugaacaucagcggcuacaacuucagccugggcgccgccgugaaggccggcgccugcaugcuggacggcggcaacaugcuggagaccaucaagaucagcccccagaccguggacggcauccugaagagcauccugaaggugaagagagcccugggcauguucgugagcgacacccccggcgagagaaaccccuacgagaacauccuguacaaggugugccugagcggcaacggcuggcccuacaucgccagcagaaccagcaucgugggcagagccugggagaacaccgugguggaccuggagagcaacaagaaccagcccaaggugggcaacaacggcagcaacaagaugcugcagagcagcggcuucgccaccggccugaccuacagccagcugaugacccugagagacagcaugcugcagcuggaccccaccgccaagaccuggaucgacaucgagggcagacccgaggaccccguggagcuggcccuguuccagcccagcagcggcugcuacauccacuucuucagagagcccaccgaccugaagcaguucaagcaggacgccaaguacagccacggcaucgacgugaacgaccuguucagcgcccagcccggccugaccagcgccgugcuggaggcccugcccagaaacauggugcugaccugccagggcagcgacgacaucagaaagcugcuggacagccaggacagaaaggacaucaagcugaucgacaucagccugagcaaggccgacgccagaaaguucgagaacgacgugugggaccaguucaaggaccugugccacaugcacaccggcaucgugguggagaagaagaagaagggcggcaagcaggagaugaccccccacugcgcccugcuggacugcaucauguucgacgccgccgugagcggcggccugaacgugcccacccugagagccgugcugcccaccgacaugguguucagaaccaucaccaccaagguggugcugugaggacuaguaauaaggaaacuguaugaaugucugugggcaggaagugaagagauccuucuguaaagguuuuuggaauuaugucugcugaauaauaaacuuuuuugaaauaauaaaucugguagaaaaaugagaucucaaaggcucuuuucagagccaccaaaaaaaaaaaaaaaaaaaaaaaaaaaaaaaaaaaaaaaaaaaaaaaaaaaaaaaaaaaaaaaaagaauu

SEQ ID NO: 21478 - RNA, 2066 nt, Artificial Sequence; identical to SEQ ID NO: 21472
  mRNA product Design b-4 (hSL-A64-N5) comprising derived and/or modified sequence from LASV(Pinneo-NIG-1969;Clade I)__AIT17837__SP-IgE_NP(2-569) (opt4)

SEQ ID NO: 21479 - RNA, 2066 nt, Artificial Sequence
  mRNA product Design b-4 (hSL-A64-N5) comprising derived and/or modified sequence from LASV(ISTH0009-NIG-2011;Clade II)__AIT17405__SP-IgE_NP(2-569) (opt4)
aggagagucccgcagucggcguccagcggcucugcuuguucgugugugugucguugcaggccuuauucaagcuuaccauggacuggaccuggauccuguuccugguggccgccgccaccagagugcacagcagcgugagcaaggaggugaagagcuuccuguggacccagagccugagaagagagcugagcggcuacugcagcaacaucaagcugcagguggugaaggacgcccaggcccugcugcacggccuggacuucagcgaggugagcaacgugcagagacugaugagaaagcagaagagagacgacagcgaccugaagagacugagagaccugaaccaggccgugaacaaccugguggagcugaagagcacccagcagaagagcauccugagagugggcacccugaccagcgacgaccugcugacccuggccgccgaccuggagaagcugaagagcaaggugaucagaaccgagagaccccugagcagcggcguguacaugggcaaccugagcacccagcagcuggagcagagaagagcccugcugaacaugaucggcauggugggcggcgcccagggcacccagcccggcagagacggcguggugagagugugggacgugaagaaccccgaccugcugaacaaccaguucggcaccaugcccagccugacccuggccugccugaccaagcagggccagguggaccugaacgacgccgugcuggcccugaccgaccugggccugaucuacaccgccaaguaccccaacagcagcgaccuggacagacugagccagagccaccccauccugaacaugguggacaucaagaagagcagccugaacaucagcggcuacaacuucagccugggcgccgccgugaaggccggcgccugcaugcuggacggcggcaacaugcuggagaccaucaaggugaccccccagaccauggacggcauccugaagagcauccugaaggugaagagaagccugggcauguucgugagcgacacccccggcgagagaaaccccuacgagaacauccuguacaagaucugccugagcggcgacggcuggcccuacaucgccagcagaaccagcaucgugggcagagccugggagaacaccaccguggaccuggagagcgacggcaagccccagaaggugggcagcgccggcagcaacaagagccugcagagcgccggcuuccccaccggccugaccuacagccagcugaugacccugaaggacagcaugaugcagcuggaccccagcgccaagaccuggaucgacaucgagggcagacccgaggaccccguggagaucgcccuguaccagcccaugagcggcugcuacauccacuucuucagagagcccaccgaccugaagcaguucaagcaggacgccaaguacagccacggcaucgacguggccgaccuguuccccgcccagcccggccugaccagcgccgugaucgaggcccugcccagaaacauggugcugaccugccagggcagcgacgacaucaagagacugcuggacagccagggcagaagagacaucaagcugaucgacaucgcccugagcaaggccgacagcagaagauucgagaacgccgugugggaccagugcaaggaccugugccacaugcacaccggcguggugguggagaagaagaagagaggcggcaaggaggagaucaccccccacugcgcccugauggacugcaucauguacgacgccgccgugagcggcggccugaacauccccgugcugagagccgugcugcccagagacaugguguucagaaccagcagccccaagguggugcugugaggacuaguaauaaggaaacuguaugaaugucugugggcaggaagugaagagauccuucuguaaagguuuuuggaauuaugucugcugaauaauaaacuuuuuugaaauaauaaaucugguagaaaaaugagaucucaaaggcucuuuucagagccaccaaaaaaaaaaaaaaaaaaaaaaaaaaaaaaaaaaaaaaaaaaaaaaaaaaaaaaaaaaaaaaaaagaauu

SEQ ID NO: 21480 - RNA, 2066 nt, Artificial Sequence
  mRNA product Design b-4 (hSL-A64-N5) comprising derived and/or modified sequence from LASV(ISTH2010-NIG-2012;Clade II)__AIT17483__SP-IgE_NP(2-569) (opt4)
aggagagucccgcagucggcguccagcggcucugcuuguucgugugugugucguugcaggccuuauucaagcuuaccauggacuggaccuggauccuguuccugguggccgccgccaccagagugcacagcagcgccagcaaggaggugaagagcuuccuguggacccagagccugagaagagagcugagcggcuacugcagcaacaucaagcugcagguggugaaggacgcccaggcccugcugcacggccuggacuucagcgaggugagcaacgugcagagacugaugagaaagcagaagagagacgacagcgaccugaagagacugagagaccugaaccaggccgugaacaaccugguggagcugaagagcacccagcagaagagcauccugagagugggcacccugaccagcgacgaccugcugacccuggccgccgaccuggagaagcugaagagcaaggugaucagaaccgagagaccccugagcagcggcguguacaugggcaaccugagcacccagcagcuggagcagagaagagcccugcugaaccugaucggcauggugggcggcgcccagggcacccagcccggcagagacggcguggugagagugugggacgugaagaaccccgaccugcugaacaaccaguucggcaccaugcccagccugacccuggccugccugaccaagcagggccagguggaccugaacgacgccgugcuggcccugaccgaccugggccugaucuacaccgccaaguaccccaacagcagcgaccuggacagacugagccagagccaccccauccugaacaugguggacaccaagaagagcagccugaacaucagcggcuucaacuucagccugggcgccgccgugaaggccggcgccugcaugcuggacggcggcaacaugcuggagaccaucaaggugaccccccagaccauggacggcauccugaagagcauccugaaggugaagaagagccugggcauguucgugagcgacacccccggcgagagaaaccccuacgagaacauccuguacaagaucugccugagcggcgacggcuggcccuacaucgccagcagaaccagcaucgugggcagagccugggagaacaccaccguggaccuggagagcgacggcaagccccacaaggugggcaccgccggcagcaacaagagccugcagagcgccggcuuccccaccggccugaccuacagccagcugaugacccugaaggacagcaugaugcagcuggaccccagcgccaagaccuggaucgacaucgagggcagacccgaggaccccguggagaucgcccuguaccagcccaugagcggcugcuacauccacuucuucagagagcccaccgaccugaagcaguucaagcaggacgccaaguacagccacggcaucgacguggccgaccuguuccccgcccagcccggccugaccagcgccgugaucgaggcccugcccagaaacauggugcugaccugccagggcagcgacgacaucaagagacugcuggacagccagggcagaagagacaucaagcugaucgacaucgcccugagcaaggccgacagcagaagauucgagaacgccgugugggaccagugcaaggaccugugccacaugcacaccggcguggugguggagaagaagaagagaggcggcaaggaggagaucaccccccacugcgcccugauggacugcaucauguacgacgccgccgugagcggcggccugaacauccccgugcugagagccgugcugcccagagacaugguguucagaaccagcagccccaagguggugcugugaggacuaguaauaaggaaacuguaugaaugucugugggcaggaagugaagagauccuucuguaaagguuuuuggaauuaugucugcugaauaauaaacuuuuuugaaauaauaaaucugguagaaaaaugagaucucaaaggcucuuuucagagccaccaaaaaaaaaaaaaaaaaaaaaaaaaaaaaaaaaaaaaaaaaaaaaaaaaaaaaaaaaaaaaaaaagaauu

SEQ ID NO: 21481 - RNA, 2066 nt, Artificial Sequence
  mRNA product Design b-4 (hSL-A64-N5) comprising derived and/or modified sequence from LASV(Lassa virus/H.sapiens-wt/NGA/2015/ISTH_0543;Clade II)__AVO03640__SP-IgE_NP(2-569) (opt4)
aggagagucccgcagucggcguccagcggcucugcuuguucgugugugugucguugcaggccuuauucaagcuuaccauggacuggaccuggauccuguuccugguggccgccgccaccagagugcacagcagcgccagcaaggaggugaagagcuuccuguggacccagagccugagaagagagcugagcggcuacugcagcaacaucaagcugcagguggugaaggacgcccaggcccugcugcacggccuggacuucagcgaggugagcaacgugcagagacugaugagaaagcagaagagagacgacagcgaccugaagagacugagagaccugaaccaggccgugaacaaccugguggagcugaagagcacccagcagaagagcauccugagagugggcacccugaccagcgacgaccugcugacccuggccgccgaccuggagaagcugaagagcaaggugaucagaaccgagagaccccugagcagcggcguguacaugggcaaccugagcacccagcagcuggagcagagaagagcccugcugaacaugaucggcauggugggcggcgcccagggcacccagcccggcagagacggcguggugagagugugggacgugaagaaccccgaccugcugaacaaccaguucggcaccaugcccagccugacccuggccugccugaccaagcagggccagguggaccugaacgacgccgugcuggcccugaccgaccugggccugaucuacaccgccaaguaccccaacagcagcgaccuggacagacugagccagagccaccccauccugaacaugguggacaccaagaagagcagccugaacaucagcggcuacaacuucagccugggcgccgccgugaaggccggcgccugcaugcuggacggcggcaacaugcuggagaccaucaaggugaccccccagaccauggacggcauccugaagagcauccugaaggugaagaagagccugggcauguucgugagcgacacccccggcgagagaaaccccuacgagaacauccuguacaagaucugccugagcggcgacggcuggcccuacaucgccagcagaaccagcaucgugggcagagccugggagaacaccaccguggaccuggagagcgacggcaagccccagaaggugggcagcgccggcagcaacaagagccugcagagcgccggcuuccccaccggccugaccuacagccagcugaugacccugaaggacagcaugaugcagcuggaccccagcgccaagaccuggaucgacaucgagggcagacccgaggaccccguggagaucgcccuguaccagcccaugagcggcugcuacauccacuucuucagagagcccaccgaccugaagcaguucaagcaggacgccaaguacagccacggcaucgacguggccgaccuguuccccgcccagcccggccugaccagcgccgugaucgaggcccugcccagaaacauggugcugaccugccagggcagcgacgacaucaagagacugcuggacagccagggcagaaaggacaucaagcugaucgacaucgcccugagcaaggccgacagcagaagauucgagaacgccgugugggaccagugcaaggaccugugccacaugcacaccggcguggugguggagaagaagaagagaggcggcaaggaggagaucaccccccacugcgcccugauggacugcaucauguacgacgccgccgugagcggcggccugaacauccccgugcugagagccgugcugcccagagacaugguguucagaaccagcagccccaagguggugcugugaggacuaguaauaaggaaacuguaugaaugucugugggcaggaagugaagagauccuucuguaaagguuuuuggaauuaugucugcugaauaauaaacuuuuuugaaauaauaaaucugguagaaaaaugagaucucaaaggcucuuuucagagccaccaaaaaaaaaaaaaaaaaaaaaaaaaaaaaaaaaaaaaaaaaaaaaaaaaaaaaaaaaaaaaaaaagaauu

SEQ ID NO: 21482 - RNA, 2066 nt, Artificial Sequence
  mRNA product Design b-4 (hSL-A64-N5) comprising derived and/or modified sequence from LASV(Lassa virus/H.sapiens-wt/NGA/2016/ISTH_0009;Clade II)__AVO03572__SP-IgE_NP(2-569) (opt4)
aggagagucccgcagucggcguccagcggcucugcuuguucgugugugugucguugcaggccuuauucaagcuuaccauggacuggaccuggauccuguuccugguggccgccgccaccagagugcacagcagcgccagcaaggaggugaagagcuuccuguggacccagagccugagaagagagcugagcggcuacugcagcaacaucaagcugcagguggugaaggacgcccaggcccugcugcacggccuggacuucagcgaggugagcaacgugcagagacugaugagaaagcagaagagagacgacagcgaccugaagagacugagagaccugaaccaggccgugaacaaccugguggagcugaagagcacccagcagaagagcauccugagagugggcacccugaccagcgacgaccugcugacccuggccgccgaccuggagaagcugaagagcaaggugaucagaaccgagagaccccugagcagcggcguguacaugggcaaccugagcacccagcagcuggagcagagaagagcccugcugaacaugaucggcauggugggcggcgcccagggcacccagcccggcagagacggcguggugagagugugggacgugaagaaccccgaccugcugaacaaccaguucggcaccaugcccagccugacccuggccugccugaccaagcagggccagguggaccugaacgacgccgugcuggcccugaccgaccugggccugaucuacaccgccaaguaccccaacagcagcgaccuggacagacugagccagagccaccccauccugaacaugguggacaccaagaagagcagccugaacaucagcggcuacaacuucagccugggcgccgccgugaaggccggcgccugcaugcuggacggcggcaacaugcuggagaccaucaaggugaccccccagaccauggacggcauccugaagagcauccugaaggugaagaagagccugggcauguucgugagcgacacccccggcgagagaaaccccuacgagaacauccuguacaagaucugccugagcggcgacggcuggcccuacaucgccagcagaaccagcaucgugggcagagccugggagaacaccaccguggaccuggagagcgacggcaagccccagaaggugggcagcgccggcagcaacaagagccugcagagcgccggcuuccccaccggccugaccuacagccagcugaugacccugaaggacagcaugaugcagcuggaccccagcgccaagaccuggaucgacaucgagggcagacccgaggaccccguggagaucgcccuguaccagcccaugagcggcugcuacauccacuucuucagagagcccaccgaccugaagcaguucaagcaggacgccaaguacagccacggcaucgacguggccgaccuguuccccgcccagcccggccugaccagcgccgugaucgaggcccugcccagaaacauggugcugaccugccagggcagcgacgacaucaagagacugcuggacagccagggcagaagagacaucaagcugaucgacaucgcccugagcaaggccgacagcagaagauucgagaacgccgugugggaccagugcaaggaccugugccacaugcacaccggcguggugguggagaagaagaagagaggcggcaaggaggagaucaccccccacugcgcccugauggacugcaucauguacgacgccgccgugagcggcggccugaacauccccgugcugagagccgugcugcccagagacaugguguucagaaccagcagccccaagguggugcugugaggacuaguaauaaggaaacuguaugaaugucugugggcaggaagugaagagauccuucuguaaagguuuuuggaauuaugucugcugaauaauaaacuuuuuugaaauaauaaaucugguagaaaaaugagaucucaaaggcucuuuucagagccaccaaaaaaaaaaaaaaaaaaaaaaaaaaaaaaaaaaaaaaaaaaaaaaaaaaaaaaaaaaaaaaaaagaauu

SEQ ID NO: 21483 - RNA, 2066 nt, Artificial Sequence
  mRNA product Design b-4 (hSL-A64-N5) comprising derived and/or modified sequence from LASV(Lassa virus/H.sapiens-wt/NGA/2016/ISTH_0017;Clade II)__AVO03568__SP-IgE_NP(2-569) (opt4)
aggagagucccgcagucggcguccagcggcucugcuuguucgugugugugucguugcaggccuuauucaagcuuaccauggacuggaccuggauccuguuccugguggccgccgccaccagagugcacagcagcgccagcaaggaggugaagagcuuccuguggacccagagccugagaagagagcugagcggcuacugcagcagcaucaagcugcagguggugaaggacgcccaggcccugcugcacggccuggacuucagcgaggugagcaacgugcagagacugaugagaaagcagaagagagacgacagcgaccugaagagacugagagaccugaaccaggccgugaacaaccugguggagcugaagagcacccagcagaagagcauccugagagugggcacccugaccagcgacgaccugcugacccuggccgccgaccuggagaagcugaagagcaaggugaucagaaccgagagaccccugagcagcggcguguacaugggcaaccugagcacccagcagcuggagcagagaagagcccugcugaacaugaucggcauggccggcggcgcccagggcacccagcccggcagagacggcguggugagagugugggacgugaagaaccccgaccugcugaacaaccaguucggcaccaugcccagccugacccuggccugccugaccaagcagggccagguggaccugaacgacgccgugcuggcccugaccgaccugggccugaucuacaccgccaaguaccccaacagcagcgaccuggacagacugagccagagccaccccauccugaacaugguggacaccaagaagagcagccugaacaucagcggcuacaacuucagccugggcgccgccgugaaggccggcgccugcaugcuggacggcggcaacaugcuggagaccaucaaggugaccccccagaccauggacggcauccugaagagcauccugaaggugaagagaagccugggcauguucgugagcgacgcccccggcgagagaaaccccuacgagaacauccuguacaagaucugccugagcggcgacggcuggcccuacaucgccagcagaaccagcaucgugggcagagccugggagaacaccaccguggaccuggagagcgacggcaagccccagaaggugggcgccaccggcagcaacaagagccugcagagcgccggcuuccccaccggccugaccuacagccagcugaugacccugaaggacagcaugaugcagcuggaccccagcgccaagaccuggaucgacaucgagggcagacccgaggaccccguggagguggcccuguaccagcccgugagcggcugcuacauccacuucuucagagagcccaccgaccugaagcaguucaagcaggacgccaaguacagccacggcaucgacguggccgaccuguuccccgcccagcccggccugaccagcgccgugaucgaggcccugcccagaaacauggugcugaccugccagggcagcgacgacaucaagaagcugcuggacagccagggcagaaaggacaucaagcugaucgacaucgcccugagcaaggccgacagcagaagauucgagaacgccgugugggaccagugcaaggaccugugccacaugcacaccggcguggugguggagaagaagaagagaggcggcaaggaggagaucaccccccacugcgcccugauggacugcaucauguacgacgccgccgugagcggcggccugaacauccccgugcugagagccgugcugcccagagacaugguguucagaaccagcagccccaagguggugcugugaggacuaguaauaaggaaacuguaugaaugucugugggcaggaagugaagagauccuucuguaaagguuuuuggaauuaugucugcugaauaauaaacuuuuuugaaauaauaaaucugguagaaaaaugagaucucaaaggcucuuuucagagccaccaaaaaaaaaaaaaaaaaaaaaaaaaaaaaaaaaaaaaaaaaaaaaaaaaaaaaaaaaaaaaaaaagaauu

SEQ ID NO: 21484 - RNA, 2066 nt, Artificial Sequence
  mRNA product Design b-4 (hSL-A64-N5) comprising derived and/or modified sequence from LASV(Lassa virus/H.sapiens-wt/NGA/2018/ISTH_0959;Clade II)__AVV65100__SP-IgE_NP(2-569) (opt4)
aggagagucccgcagucggcguccagcggcucugcuuguucgugugugugucguugcaggccuuauucaagcuuaccauggacuggaccuggauccuguuccugguggccgccgccaccagagugcacagcagcgccagcaaggaggugaagagcuuccuguggacccagagccugagaagagagcugagcggcuacugcagcaacaucaagcugcagguggugaaggacgcccaggcccugcugcacggccuggacuucagcgaggugagcaacgugcagagacugaugagaaagcagaagagagacgacagcgaccugaagagacugagagaccugaaccaggccgugaacaaccugguggagcugaagagcacccagcagaagagcauccugagagugggcacccugaccagcgacgaccugcugacccuggccgccgaccuggagaagcugaagagcaaggugaucagaaccgagagaccccugagcagcggcguguacaugggcaaccugagcacccagcagcuggagcagagaagagcccugcugaaccugaucggcauggugggcggcgcccagggcacccagcccggcagagacggcguggugagagugugggacgugaagaaccccgaccugcugaacaaccaguucggcaccaugcccagccugacccuggccugccugaccaagcagggccagguggaccugaacgacguggugcuggcccugaccgaccugggccugaucuacaccgccaaguaccccaacagcagcgaccuggacagacugagccagagccaccccauccugaacaugguggacaccaagaagagcagccugaacaucagcggcuucaacuucagccugggcgccgccgugaaggccggcgccugcaugcuggacggcggcaacaugcuggagaccaucaaggugaccccccagaccauggacggcauccugaagagcauccugaaggugaagaagagccugggcauguucgugagcgacacccccggcgagagaaaccccuacgagaacauccuguacaagaucugccugagcggcgacggcuggcccuacaucgccagcagaaccagcaucgugggcagagccugggagaacaccaccguggaccuggagagcgacggcaagccccacaaggugggcaccgccggcagcaacaagagccugcagagcgccggcuuccccaccggccugaccuacagccagcugaugacccugaaggacagcaugaugcagcuggaccccagcgccaagaccuggaucgacaucgagggcagacccgaggaccccguggagaucgcccuguaccagcccaugagcggcugcuacauccacuucuucagagagcccaccgaccugaagcaguucaagcaggacgccaaguacagccacggcaucgacguggccgaccuguuccccgcccagcccggccugaccagcgccgugaucgaggcccugcccagaaacauggugcugaccugccagggcagcgacgacaucaagagacugcuggacagccagggcagaaaggacaucaagcugaucgacaucgcccugagcaagaccgacagcagaagauucgagaacgccgugugggaccagugcaaggaccugugccacaugcacaccggcguggugguggagaagaagaagagaggcggcaaggaggagaucaccccccacugcgcccugauggacugcaucauguacgacgccgccgugagcggcggccugaacauccccgugcugagagccgugcugcccagagacaugguguucagaaccagcagccccaagguggugcugugaggacuaguaauaaggaaacuguaugaaugucugugggcaggaagugaagagauccuucuguaaagguuuuuggaauuaugucugcugaauaauaaacuuuuuugaaauaauaaaucugguagaaaaaugagaucucaaaggcucuuuucagagccaccaaaaaaaaaaaaaaaaaaaaaaaaaaaaaaaaaaaaaaaaaaaaaaaaaaaaaaaaaaaaaaaaagaauu

SEQ ID NO: 21485 - RNA, 2066 nt, Artificial Sequence
  mRNA product Design b-4 (hSL-A64-N5) comprising derived and/or modified sequence from LASV(LASV003-NIG-2008;Clade II)__AIT17581__SP-IgE_NP(2-569) (opt4)
aggagagucccgcagucggcguccagcggcucugcuuguucgugugugugucguugcaggccuuauucaagcuuaccauggacuggaccuggauccuguuccugguggccgccgccaccagagugcacagcagcgccagcaaggaggugaagagcuuccuguggacccagagccugagaagagagcugagcggcuacugcagcagcaucaagcugcagguggugaaggacgcccaggcccugcugcacggccuggacuucagcgaggugagcaacgugcagagacugaugagaaagcagaagagagacgacagcgaccugaagagacugagagaccugaaccaggccgugaacaaccugguggagcugaagagcacccagcagaagagcgugcugagagugggcacccugaccagcgacgaccugcugacccuggccgccgaccuggagaagcugaagagcaaggugaucagaaccgagagaccccugagcagcggcguguacaugggcaaccugagcgcccagcagcuggagcagagaagaacccugcugaacaugaucggcauggugggcggcgcccagggcacccagcccggcagagacggcguggugagagugugggacgugaagaaccccgaccugcugaacaaccaguucggcaccaugcccagccugacccuggccugccugaccaagcagggccagguggaccugaacgacguggugcuggcccugaccgaccugggccugaucuacaccgccaaguaccccaacagcagcgaccuggacagacugagccagagccaccccauccugagcaugguggacaccaagaagagcagccugaacaucagcggcuacaacuucagccugggcgccgccgugaaggccggcgccugcaugcuggacggcggcaacaugcuggagaccaucaaggugaccccccagaccauggacggcauccugaagagcauccugaaggugaagaagagccugggcauguucgugagcgacacccccggcgagagaaaccccuacgagaacauccuguacaagaucugccugagcggcgacggcuggcccuacaucgccagcagaaccagcaucgugggcagagccugggagaacaccaccguggaccuggagagcgacggcaagccccagaaggugggcaccgccggcagcaacaagagccugcagagcgccggcuuccccaccggccugaccuacagccagcugaugacccugaaggacagcaugaugcagcuggaccccagcgccaagaccuggaucgacaucgagggcagacccgaggaccccguggagaucgcccuguaccagcccaugagcggcugcuacauccacuucuucagagagcccaccgaccugaagcaguucaagcaggacgccaaguacagccacggcaucgacgugaccgaccuguuccccgcccagcccggccugaccagcgccgugaucgaggcccugcccagaaacauggugcugaccugccagggcagcgacgacaucaagagacugcuggacagccagggcagaagagacaucaagcugaucgacaucgcccugagcaaggccgacagcagaagauucgagaacgccgugugggaccagugcaaggaccugugccacaugcacaccggcguggugguggagaagaagaagagaggcggcaaggaggagaucaccccccacugcgcccugauggacugcaucauguacgacgccgccgugagcggcggccugaacauccccgugcugagagccgugcugcccagagacaugguguucagaaccagcagccccaagguggugcugugaggacuaguaauaaggaaacuguaugaaugucugugggcaggaagugaagagauccuucuguaaagguuuuuggaauuaugucugcugaauaauaaacuuuuuugaaauaauaaaucugguagaaaaaugagaucucaaaggcucuuuucagagccaccaaaaaaaaaaaaaaaaaaaaaaaaaaaaaaaaaaaaaaaaaaaaaaaaaaaaaaaaaaaaaaaaagaauu

SEQ ID NO: 21486 - RNA, 2066 nt, Artificial Sequence
  mRNA product Design b-4 (hSL-A64-N5) comprising derived and/or modified sequence from LASV(LASV035-NIG-2009;Clade II)__AIT17589__SP-IgE_NP(2-569) (opt4)
aggagagucccgcagucggcguccagcggcucugcuuguucgugugugugucguugcaggccuuauucaagcuuaccauggacuggaccuggauccuguuccugguggccgccgccaccagagugcacagcagcgccagcaaggaggugaagagcuuccuguggacccagagccugagaagagagcugagcggcuacugcagcagcaucaagcugcagguggugaaggacgcccaggcccugcugcacggccuggacuucagcgaggugagcaacgugcagagacugaugagaaagcagaagagagacgacagcgaccugaagagacugagagaccugaaccaggccgugaacaaccugguggagcugaagagcacccagcagaagagcauccugagagugggcacccugaccagcgacgaccugcugacccuggccgccgaccuggagaagcugaagagcaaggugaucagaaccgagagaccccugagcagcggcguguacaugggcaaccugagcgcccagcagcuggagcagagaagagcccugcugaacaugaucggcauggugggcggcgcccagggcacccagcccggcagagacggcguggugagagugugggacgugaagaaccccgaccugcugaacaaccaguucggcaccaugcccagccugacccuggccugccugaccaagcagggccagguggaccugaacgacgccgugcuggcccugaccgaccugggccugaucuacaccgccaaguaccccaacagcagcgaccuggacagacugagccagagccaccccauccugaacaugguggacaccaagaagagcagccugaacaucagcggcuacaacuucagccugggcgccgccgugaaggccggcgccugcaugcuggacggcggcaacaugcuggagaccaucaaggugaccccccagaccauggacggcauccugaagagcauccugaaggugaagagaagccugggcauguucgugagcgacacccccggcgagagaaaccccuacgagaacauccuguacaagaucugccugagcggcgacggcuggcccuacaucgccagcagaaccagcaucgugggcagagccugggagaacaccaccguggaccuggagagcgacggcaagccccagaaggugggcaccaccggcagcaacaagagccugcagagcgccggcuuccccaccggccugaccuacagccagcugaugacccugaaggacagcaugaugcagcuggaccccagcgccaagaccuggaucgacaucgagggcagacccgaggaccccguggagaucgcccuguaccagcccaugagcggcugcuacauccacuucuucagagagcccaccgaccugaagcaguucaagcaggacgccaaguacagccacggcaucgacguggccgaccuguuccccgcccagcccggccugaccagcgccgugaucgaggcccugcccagaaacauggugcugaccugccagggcagcgacgacaucaagaagcugcuggacagccagggcagaagagacaucaagcugaucgacaucgcccugagcaaggccgacagcagaaaguucgagaacgccgugugggaccagugcaaggaccugugccacaugcacaccggcguggugguggagaagaagaagagaggcggcaaggaggagaucaccccccacugcgcccugauggacugcaucauguacgacgccgccgugagcggcggccugaacauccccgugcugagagccgugcugcccagagacaugguguucagaaccagcagccccaagguggugcugugaggacuaguaauaaggaaacuguaugaaugucugugggcaggaagugaagagauccuucuguaaagguuuuuggaauuaugucugcugaauaauaaacuuuuuugaaauaauaaaucugguagaaaaaugagaucucaaaggcucuuuucagagccaccaaaaaaaaaaaaaaaaaaaaaaaaaaaaaaaaaaaaaaaaaaaaaaaaaaaaaaaaaaaaaaaaagaauu

SEQ ID NO: 21487 - RNA, 2066 nt, Artificial Sequence
  mRNA product Design b-4 (hSL-A64-N5) comprising derived and/or modified sequence from LASV(LASV1000-NIG-2009;Clade II)__AIT17783__SP-IgE_NP(2-569) (opt4)
aggagagucccgcagucggcguccagcggcucugcuuguucgugugugugucguugcaggccuuauucaagcuuaccauggacuggaccuggauccuguuccugguggccgccgccaccagagugcacagcagcgccagcaaggaggugaagagcuuccuguggacccagagccugagaagagagcugagcggcuacugcagcaacaucaagcugcagguggugaaggacgcccaggcccugcugcacggccuggacuucagcgaggugagcaacgugcagagacugaugagaaagcagaagagagacgacagcgaccugaagagacugagagaccugaaccaggccgugaacaaccugguggagcugaagagcacccagcagaagagcauccugagagugggcacccugaccagcgacgaccugcugacccuggccgccgaccuggagaagcugaagagcaaggugaucagaaccgagagaccccugagcagcggcguguacaugggcaaccugagcacccagcagcuggagcagagaagagcccugcugaacaugaucggcauggugggcggcgcccagggcacccagcccggcagagacggcguggugagagugugggacgugaagaaccccgaccugcugaacaaccaguucggcaccaugcccagccugacccuggccugccugaccaagcagggccagguggaccugaacgacguggugcuggcccugaccgaccugggccugaucuacaccgccaaguaccccaacagcagcgaccuggacagacugagccagagccaccccauccugaacaugguggacaccaagaagagcagccugaacaucagcggcuacaacuucagccugggcgccgccgugaaggccggcgccugcaugcuggacggcggcaacaugcuggagaccaucaaggugaccccccagaccauggacggcauccugaagagcauccugaaggugaagaagagccugggcauguucgugagcgacacccccggcgagagaaaccccuacgagaacauccuguacaagaucugccugagcggcgacggcuggcccuacaucgccagcagaaccagcaucgugggcagagccugggagaacaccaccguggaccuggagagcgacggcaagccccagaaggugggcaccgccggcagcaacaagagccugcagagcgccggcuuccccaccggccugaccuacagccagcugaugacccugaaggacagcaugaugcagcuggaccccagcgccaagaccuggaucgacaucgagggcagacccgaggaccccguggagaucgcccuguaccagcccgugagcggcugcuacauccacuucuucagagagcccaccgaccugaagcaguucaagcaggacgccaaguacagccacggcaucgacguggccgaccuguuccccgcccagcccggccugaccagcgccgugaucgaggcccugcccagaaacauggugcugaccugccagggcagcgacgacaucaagagacugcuggacagccagggcagaagagacaucaagcugaucgacaucgcccugagcaaggccgacagcagaagauucgagaacgccgugugggaccagugcaaggaccugugccacaugcacaccggcguggugguggagaagaagaagagaggcggcaaggaggagaucaccccccacugcgcccugauggacugcaucauguacgacgccgccgugagcggcggccugaacauccccgugcugagagccgugcugcccagagacaugguguucagaaccagcagccccaagguggugcugugaggacuaguaauaaggaaacuguaugaaugucugugggcaggaagugaagagauccuucuguaaagguuuuuggaauuaugucugcugaauaauaaacuuuuuugaaauaauaaaucugguagaaaaaugagaucucaaaggcucuuuucagagccaccaaaaaaaaaaaaaaaaaaaaaaaaaaaaaaaaaaaaaaaaaaaaaaaaaaaaaaaaaaaaaaaaagaauu

SEQ ID NO: 21488 - RNA, 2066 nt, Artificial Sequence
  mRNA product Design b-4 (hSL-A64-N5) comprising derived and/or modified sequence from LASV(LASV221-NIG-2010;Clade II)__AIT17625__SP-IgE_NP(2-569) (opt4)
aggagagucccgcagucggcguccagcggcucugcuuguucgugugugugucguugcaggccuuauucaagcuuaccauggacuggaccuggauccuguuccugguggccgccgccaccagagugcacagcagcgccagcaaggaggugaagagcuuccuguggacccagagccugagaagagagcugagcggcuacugcagcagcaucaagcugcagguggugaaggacgcccaggcccugcugcacggccuggacuucagcgaggugagcaacgugcagagacugaugagaaagcagagaagagacgacagcgaccugaagagacugagagaccugaaccaggccgugaacaaccugguggagcugaagagcacccagcagaagagcauccugagagugggcacccugaccagcgacgaccugcugacccuggccgccgaccuggagaagcugaagagcaaggugaucagaaccgagagaccccugagcagcggcguguacaugggcaaccugagcacccagcagcuggagcagagaagagcccugcugaacaugaucggcauggugggcggcgcccagggcacccagcccggcagagacggcguggugagagugugggacgugaagaaccccgaccugcugaacaaccaguucggcaccaugcccagccugacccuggccugccugaccaagcagggccagguggaccugaacgacgccgugcuggcccugaccgaccugggccugaucuacaccgccaaguaccccaacagcagcgaccuggacagacugagccagagccaccccauccugaacaugguggacaccaagaagagcagccugaacaucagcggcuacaacuucagccugggcgccgccgugaaggccggcgccugcaugcuggacggcggcaacaugcuggagaccaucaaggugaccccccagaccguggacggcauccugaagagcauccugaaggugaagagaagccugggcauguucgugagcgacacccccggcgagagaaaccccuacgagaacauccuguacaagaucugccugagcggcgacggcuggcccuacaucgccagcagaaccagcaucgugggcagagccugggagaacaccaccguggaccuggagagcgacggcaagccccagaaggugggcaccgccggcagcaacaagagccugcagagcgccggcuuccccaccggccugaccuacagccagcugaugacccugaaggacagcaugaugcagcuggaccccagcgccaagaccuggaucgacaucgagggcagacccgaggaccccguggagaucgcccuguaccagcccaugagcggcugcuacauccacuucuucagagagcccaccgaccugaagcaguucaagcaggacgccaaguacagccacggcaucgacguggccgaccuguuccccgcccagcccggccugaccagcgccgugaucgaggcccugcccagaaacauggugcugaccugccagggcagcgacgacaucaagagacugcuggacagccagggcagaagagacaucaagcugaucgacaucgcccugagcaaggccgacagcagaaaguucgagaacgccgugugggaccagugcaaggaccugugccacaugcacaccggcguggugguggagaagaagaagagaggcggcaaggaggagaucaccccccacugcgcccugauggacugcaucauguacgacgccgccgugagcggcggccugaacauccccgugcugagagccgugcugcccagagacaugguguucagaaccagcagccccaagguggugcugugaggacuaguaauaaggaaacuguaugaaugucugugggcaggaagugaagagauccuucuguaaagguuuuuggaauuaugucugcugaauaauaaacuuuuuugaaauaauaaaucugguagaaaaaugagaucucaaaggcucuuuucagagccaccaaaaaaaaaaaaaaaaaaaaaaaaaaaaaaaaaaaaaaaaaaaaaaaaaaaaaaaaaaaaaaaaagaauu

SEQ ID NO: 21489 - RNA, 2066 nt, Artificial Sequence
  mRNA product Design b-4 (hSL-A64-N5) comprising derived and/or modified sequence from LASV(LASV237-NIG-2010;Clade II)__AIT17639__SP-IgE_NP(2-569) (opt4)
aggagagucccgcagucggcguccagcggcucugcuuguucgugugugugucguugcaggccuuauucaagcuuaccauggacuggaccuggauccuguuccugguggccgccgccaccagagugcacagcagcgccagcaaggaggugaagagcuuccuguggacccagagccugagaagagagcugagcggcuacugcagcaacaucaagcugcagguggugaaggacgcccaggcccugcugcacggccuggacuucagcgaggugagcaacgugcagagacugaugagaaagcagaagagagacgacagcgaccugaagagacugagagaccugaaccaggccgugaacaaccugguggagcugaagagcacccagcagaagagcauccugagagugggcacccugaccagcgacgaccugcugacccuggccgccgaccuggagaagcugaagagcaaggugaucagaaccgagagaccccugagcagcggcguguacaugggcaaccugagcacccagcagcuggagcagagaagagcccugcugaacaugaucggcauggugggcggcgcccagggcacccagcccggcagagacggcguggugagagugugggacgugaagaaccccgaccugcugaacaaccaguucggcaccaugcccagccugacccuggccugccugaccaagcagggccagguggaccugaacgacgccgugcuggcccugaccgaccugggccugaucuacaccgccaaguaccccaacagcagcgaccuggacagacugagccagagccaccccauccugaacaugguggacaucaagaagagcagccugaacaucagcggcuacaacuucagccugggcgccgccgugaaggccggcgccugcaugcuggacggcggcaacaugcuggagaccaucaaggugaccccccagaccauggacggcauccugaagagcauccugaaggugaagagaagccugggcauguucgugagcgacacccccggcgagagaaaccccuacgagaacauccuguacaagaucugccugagcggcgacggcuggcccuacaucgccagcagaaccagcaucgugggcagagccugggagaacaccaccguggaccuggagagcgacggcaagccccagaaggugggcagcgccggcagcaacaagagccugcagagcgccggcuuccccaccggccugaccuacagccagcugaugacccugaaggacagcaugaugcagcuggaccccagcgccaagaccuggaucgacaucgagggcagacccgaggaccccguggagaucgcccuguaccagcccaugagcggcugcuacauccacuucuucagagagcccaccgaccugaagcaguucaagcaggacgccaaguacagccacggcaucgacguggccgaccuguuccccgcccagcccggccugaccagcgccgugaucgaggcccugcccagaaacauggugcugaccugccagggcagcgacgacaucaagagacugcuggacagccagggcagaagagacaucaagcugaucgacaucgcccugagcaaggccgacagcagaagauucgagaacgccgugugggaccagugcaaggaccugugccacaugcacaccggcguggugguggagaagaagaagagaggcggcaaggaggagaucaccccccacugcgcccugauggacugcaucauguacgacgccgccgugagcggcggccugaacauccccgugcugagagccgugcugcccagagacaugguguucagaaccagcagccccaagguggugcugugaggacuaguaauaaggaaacuguaugaaugucugugggcaggaagugaagagauccuucuguaaagguuuuuggaauuaugucugcugaauaauaaacuuuuuugaaauaauaaaucugguagaaaaaugagaucucaaaggcucuuuucagagccaccaaaaaaaaaaaaaaaaaaaaaaaaaaaaaaaaaaaaaaaaaaaaaaaaaaaaaaaaaaaaaaaaagaauu

SEQ ID NO: 21490 - RNA, 2066 nt, Artificial Sequence
  mRNA product Design b-4 (hSL-A64-N5) comprising derived and/or modified sequence from LASV(LASV253-NIG-2011;Clade II)__AIT17671__SP-IgE_NP(2-569) (opt4)
aggagagucccgcagucggcguccagcggcucugcuuguucgugugugugucguugcaggccuuauucaagcuuaccauggacuggaccuggauccuguuccugguggccgccgccaccagagugcacagcagcgccagcaaggaggugaagagcuuccuguggacccagagccugagaagagagcugagcggcuacugcagcagcaucaagcugcagguggugaaggacgcccaggcccugcugcacggccuggacuucagcgaggugagcaacgugcagagacugaugagaaagcagaagagagacgacagcgaccugaagagacugagagaccugaaccaggccgugaacaaccugguggagcugaagagcacccagcagaagagcgugcugagagugggcacccugaccagcgacgaccugcugacccuggccgccgaccuggagaagcugaagagcaaggugaucagaaccgagagaccccugagcagcggcguguacaugggcaaccugagcacccagcagcuggagcagagaagagcccugcugaacaugaucggcauggugggcggcgcccagggcacccagcccggcagagacggcguggugagagugugggacgugaagaaccccgaccugcugaacaaccaguucggcaccaugcccagccugacccuggccugccugaccaagcagggccagguggaccugaacgacguggugcuggcccugaccgaccugggccugaucuacaccgccaaguaccccaacagcagcgaccuggacagacugagccagagccaccccauccugaacaugguggacaccaagaagagcagccugaacaucagcggcuacaacuucagccugggcgccgccgugaaggccggcgccugcaugcuggacggcggcaacaugcuggagaccaucaaggugaccccccagaccauggacggcauccugaagagcauccugaaggugaagaagagccugggcauguucgugagcgacacccccggcgagagaaaccccuacgagaacauccuguacaagaucugccugagcggcgacggcuggcccuacaucgccagcagaaccagcaucgugggcagagccugggagaacaccaccguggaccuggagagcgacggcaagccccagaaggugggcaccgccggcagcaacaagagccugcagagcgccggcuuccccaccggccugaccuacagccagcugaugacccugaaggacagcaugaugcagcuggaccccagcgccaagaccuggaucgacaucgagggcagacccgaggaccccguggagaucgcccuguaccagcccaugagcggcugcuacauccacuucuucagagagcccaccgaccugaagcaguucaagcaggacgccaaguacagccacggcaucgacgugaccgaccuguuccccgcccagcccggccugaccagcgccgugaucgaggcccugcccagaaacauggugcugaccugccagggcagcgacgacaucaagagacugcuggacagccagggcagaagagacaucaagcugaucgacaucgcccugagcaaggccgacagcagaagauucgagaacgccgugugggaccagugcaaggaccugugccacaugcacaccggcguggugguggagaagaagaagagaggcggcaaggaggagaucaccccccacugcgcccugauggacugcaucauguacgacgccgccgugagcggcggccugaacauccccgugcugagagccgugcugcccagagacaugguguucagaaccagcagccccaagguggugcugugaggacuaguaauaaggaaacuguaugaaugucugugggcaggaagugaagagauccuucuguaaagguuuuuggaauuaugucugcugaauaauaaacuuuuuugaaauaauaaaucugguagaaaaaugagaucucaaaggcucuuuucagagccaccaaaaaaaaaaaaaaaaaaaaaaaaaaaaaaaaaaaaaaaaaaaaaaaaaaaaaaaaaaaaaaaaagaauu

SEQ ID NO: 21491 - RNA, 2066 nt, Artificial Sequence
  mRNA product Design b-4 (hSL-A64-N5) comprising derived and/or modified sequence from LASV(LASV254-NIG-2011;Clade II)__AIT17675__SP-IgE_NP(2-569) (opt4)
aggagagucccgcagucggcguccagcggcucugcuuguucgugugugugucguugcaggccuuauucaagcuuaccauggacuggaccuggauccuguuccugguggccgccgccaccagagugcacagcagcgccagcaaggaggugaagagcuuccuguggacccagagccugagaagagagcugagcggcuacugcagcagcaucaagcugcagguggugaaggacgcccaggcccugcugcacggccuggacuucagcgaggugagcaacgugcagagacugaugagaaagcagaagagagacgacagcgaccugaagagacugagagaccugaaccaggccgugaacaaccugguggagcugaagagcacccagcagaagagcgugcugagagugggcacccugaccagcgacgaccugcugacccuggccgccgaccuggagaagcugaagagcaaggugaucagaaccgagagaccccugagcagcggcguguacaugggcaaccugagcacccagcagcuggagcagagaagagcccugcugaacaugaucggcauggugggcggcgcccagggcacccagcccggcagagacggcguggugagagugugggacgugaagaaccccgaccugcugaacaaccaguucggcaccaugcccagccugacccuggccugccugaccaagcagggccagguggaccugaacgacgccgugcuggcccugaccgaccugggccugaucuacaccgccaaguaccccaacagcagcgaccuggacagacugagccagagccaccccauccugaacaugguggacaccaagaagagcagccugaacaucagcggcuacaacuucagccugggcgccgccgugaaggccggcgccugcaugcuggacggcggcaacaugcuggagaccaucaaggugaccccccagaccauggacggcauccugaagagcauccugaaggugaagaagagccugggcauguucgugagcgacacccccggcgagagaaaccccuacgagaacauccuguacaagaucugccugagcggcgacggcuggcccuacaucgccagcagaaccagcaucgugggcagagccugggagaacaccaucguggaccuggagagcgacggcaagccccagaaggugggcaccgccggcagcaacaagagccugcagagcgccggcuuccccaccggccugaccuacagccagcugaugacccugaaggacagcaugaugcagcuggaccccagcgccaagaccuggaucgacaucgagggcagacccgaggaccccguggagaucgcccuguaccagcccaugagcggcugcuacauccacuucuucagagagcccaccgaccugaagcaguucaagcaggacgccaaguacagccacggcaucgacguggccgaccuguuccccgcccagcccggccugaccagcgccgugaucgaggcccugcccagaaacauggugcugaccugccagggcagcgacgacaucaagagacugcuggacagccagggcagaagagacaucaagcugaucgacaucgcccugagcaaggccgacagcagaagauucgagaacgccgugugggaccagugcaaggaccugugccacaugcacaccggcguggugguggagaagaagaagagaggcggcaaggaggagaucaccccccacugcgcccugauggacugcaucauguacgacgccgccgugagcggcggccugaacauccccgugcugagagccgugcugcccagagacaugguguucagaaccagcagccccaagguggugcugugaggacuaguaauaaggaaacuguaugaaugucugugggcaggaagugaagagauccuucuguaaagguuuuuggaauuaugucugcugaauaauaaacuuuuuugaaauaauaaaucugguagaaaaaugagaucucaaaggcucuuuucagagccaccaaaaaaaaaaaaaaaaaaaaaaaaaaaaaaaaaaaaaaaaaaaaaaaaaaaaaaaaaaaaaaaaagaauu

SEQ ID NO: 21492 - RNA, 2066 nt, Artificial Sequence
  mRNA product Design b-4 (hSL-A64-N5) comprising derived and/or modified sequence from LASV(Nig08-04;Clade II)__ADU56611__SP-IgE_NP(2-569) (opt4)
aggagagucccgcagucggcguccagcggcucugcuuguucgugugugugucguugcaggccuuauucaagcuuaccauggacuggaccuggauccuguuccugguggccgccgccaccagagugcacagcagcgccagcaaggaggugaagagcuuccuguggacccagagccugagaagagagcugagcggcuacugcagcaacaucaagcugcagguggugaaggacgcccaggcccugcugcacggccuggacuucagcgaggugagcaacgugcagagacugaugagaaagcagaagagagacgacggcgaccugaagagacugagagaccugaaccaggccgugaacaaccugguggagcugaagagcacccagcagaagagcgugcugagagugggcacccugaccagcgacgaccugcugacccuggccgccgaccuggagaagcugaagagcaaggugaucagaaccgagagaccccugagcagcggcguguacaugggcaaccugagcacccagcagcuggagcagagaaaggcccugcugagcaugaucggcauggugggcggcgcccagggcacccagcccggcagagacggcguggugagagugugggacgugaagaaccccgaccugcugaacaaccaguucggcaccaugcccagccugacccuggccugccugaccaagcagggccagguggaccugaacgacgccgugcuggcccugaccgaccugggccugaucuacaccgccaaguaccccaacagcagcgaccuggacagacugagccagagccaccccauccugaacaugguggacaccaagaagagcagccugaacaucagcggcuacaacuucagccugggcgccgccgugaaggccggcgccugcaugcuggacggcggcaacaugcuggagaccaucaaggugaccccccagaccauggacggcauccugaagagcauccugaaggugaagagaagccugggcauguucgugagcgacacccccggcgagagaaaccccuacgagaacauccuguacaagaucugccugagcggcgacggcuggcccuacaucgccagcagaaccagcaucgugggcagagccugggagaacaccaccguggaccuggagagcgacggcaagccccagaaggugggcaccgccggcagcaacaagagccugcagagcgccggcuuccccaccggccugaccuacagccagcugaugacccugaaggacagcaugaugcagcuggaccccagcgccaagaccuggaucgacaucgagggcagacccgaggaccccguggagaucgcccuguaccagcccaugagcggcugcuacauccacuucuucagagagcccaccgaccugaagcaguucaagcaggacgccaaguacagccacggcaucgacgugaccgaccuguucagcgcccagcccggccugaccagcgccgugaucgaggcccugcccagaaacauggugcugaccugccagggcagcgacgacaucaagaagcugcuggacagccagggcagaagagacaucaagcugaucgacaucagccugaacaaggccgacagcagaagauucgagaacgccgugugggaccagugcaaggaccugugccacaugcacaccggcguggugguggagaagaagaagagaggcggcaaggaggagaucaccccccacugcgcccugauggacugcaucauguucgacgccgccgugagcggcggccugaacauccccauccugagagccgugcugcccagagacaugguguucagaaccagcagccccaagguggugcugugaggacuaguaauaaggaaacuguaugaaugucugugggcaggaagugaagagauccuucuguaaagguuuuuggaauuaugucugcugaauaauaaacuuuuuugaaauaauaaaucugguagaaaaaugagaucucaaaggcucuuuucagagccaccaaaaaaaaaaaaaaaaaaaaaaaaaaaaaaaaaaaaaaaaaaaaaaaaaaaaaaaaaaaaaaaaagaauu

SEQ ID NO: 21493 - RNA, 2069 nt, Artificial Sequence
  mRNA product Design b-4 (hSL-A64-N5) comprising derived and/or modified sequence from LASV(GA391;Clade III)__AAA46284__SP-IgE_NP(2-570) (opt4)
aggagagucccgcagucggcguccagcggcucugcuuguucgugugugugucguugcaggccuuauucaagcuuaccauggacuggaccuggauccuguuccugguggccgccgccaccagagugcacagcagcgccagcaaggaggugagaagcugccuguggacccagagccugagaagagagcugagcggcuacugcagcaacaucaagcugcagguggugaaggacgcccaggcccugcugcacggccuggacuucagcgaggugagcaacgugcagagacugaugagaaagcagaagagagacgacggcgaccugaagagacugagagaccugaaccaggccgugaacaaccugguggagcugaagagcacccagcagaagagcgugcugagagugggcacccugagcagcgacgaccugcugauccuggccgccgaccuggagaagcugaagagcaaggugaccagaaccgagagaccccugagcagcggcguguacaugggcaaccugagcagccagcagcuggaccagagaagagcccugcugaacaugaucggcaugaccggcgugagcggcggcggcaagggcgccagcaacggcaucgugagagugugggacgugaagaacgccgagcugcugaacaaccaguucggcaccaugcccagccugacccuggccugccugaccaagcagggccagguggaccugaacgacgccgugcaggcccugaccgaccugggccugaucuacaccgccaaguaccccaacagcagcgaccuggacagacugagccagagccaccccauccugaacaugaucgacaccaagaagagcagccugaacaucagcggcuacaacuucagccugggcgccgccgugaaggccggcgccugcaugcuggacggcggcaacaugcuggagaccaucaaggugagcccccagaccauggacggcauccugaagagcauccugaaggugaagaagagccugggcauguucgugagcgacacccccggcgagagaaaccccuacgagaacauccuguacaagaucugccugagcggcgacggcuggagcuacaucgccagcagaaccagcaucgugggcagagccugggagaacaccgugguggaccuggagcaggacaacaagccccagaagaucggcaacggcggcagcaacaagagccugcagagcgccggcuucgccgccggccugaucuacagccagcugaugacccugaaggacuucaagugcuucaaccugauccccaacgccaagaccuggauggacaucgagggcagacccgaggaccccguggagaucgcccuguaccagcccagcagcggcugcuacgugcacuucuucagagagcccaccgaccugaagcaguucaagcaggacgccaaguacagccacggcagagacgugaccgaccuguucgccgcccagcccggccugaccagcgccgugaucgaggcccugcccagaaacauggugaucaccugccagggcagcgaggacaucagaaagcugcuggagagccagggcagaagagacaucaagcugaucgacaucacccugagcaaggccgacagcagaaaguucgagaacgccgugugggaccaguucaaggaccugugccacaugcacaccggcguggugguggagaagaagaagagaggcggcaaggaggagaucaccccccacugcgcccugauggacugcaucauguucgacgccgccgugagcggcggccuggacgccaaggugcugagaguggugcugcccagagacaugguguucagaaccagcacccccaagguggugcugugaggacuaguaauaaggaaacuguaugaaugucugugggcaggaagugaagagauccuucuguaaagguuuuuggaauuaugucugcugaauaauaaacuuuuuugaaauaauaaaucugguagaaaaaugagaucucaaaggcucuuuucagagccaccaaaaaaaaaaaaaaaaaaaaaaaaaaaaaaaaaaaaaaaaaaaaaaaaaaaaaaaaaaaaaaaaagaauu

SEQ ID NO: 21494 - RNA, 2066 nt, Artificial Sequence
  mRNA product Design b-4 (hSL-A64-N5) comprising derived and/or modified sequence from LASV(Nig08-A19;Clade III)__ADU56619__SP-IgE_NP(2-569) (opt4)
aggagagucccgcagucggcguccagcggcucugcuuguucgugugugugucguugcaggccuuauucaagcuuaccauggacuggaccuggauccuguuccugguggccgccgccaccagagugcacagcagcgccagcaaggaggugaagagcuuccuguggacccagagccugagaagagagcugagcggcuacugcagcaacaucaagcugcagguggugaaggacgcccaggcccugcugcacggccuggacuucagcgaggugagcaacgugcagagacugaugagaaagcagaagagagacgacggcgaccugaagagacugagagaccugaaccaggccgugaacaaccugguggagcugaagagcacccagcagaagagcgugcugagagugggcacccugagcagcgacgaccugcuggugcuggccgccgaccuggagaagcugaagagcaagguggugagaaccgagagaccccugagcagcggcaucuacaugggcaaccugagcagccagcagcuggaccagagaaaggcccugcugaacaugaucggcaugaccggcggcaacggcggcagaaacaccaccagcgacggcaucgugagagugugggacgugaagaacgccgagcugcugaacaaccaguucggcaccaugcccagccugacccuggccugccugaccaagcagggccagguggaccugaacgacgccgugcaggcccugaccgaccugggccugaucuacaccgccaaguaccccaacagcagcgaccuggacagacuggcccagagccaccccauccugaacaugaucgacaccaagaagagcagccugaacaucagcggcuacaacuucagccugggcgccgccgugaaggccggcgccugcaugcuggacggcggcaacaugcuggagaccaucaaggugagcccccagaccauggacggcauccugaagagcauccugaaggugaagagaagccugggcauguucaucagcgacacccccggcgagagaaaccccuacgagaacauccuguacaagaucugccugagcggcgacggcuggcccuacaucgccagcagaaccagcaucgugggcagagccugggagaacaccgugguggaccuggagagcgacaacaagccccagaagaccggcaacggcggcagcaacaagagccugcagagcgccggcuucgccgccggccugaccuacagccagcugaugacccugaaggacagcaugcugcagcuggaccccaacgccaagaccuggauggacaucgagggcagacccgaggaccccguggagaucgcccuguaccagcccagcagcggcugcuacauccacuucuucagagagcccaccgaccugaagcaguucaagcaggacgccaaguacagccacggcaucgacgugaccgaccuguucgccgcccagcccggccugaccagcgccgugaucgaggcccugcccagaaacauggugaucaccugccagggcagcgaggacaucagaaagcugcuggagagccagggcagaagagacaucaagcugaucgacaucagccugagcaagguggacagcagaaaguucgagaacgccgugugggaccaguucaaggaccugugccacaugcacaccggcaucgugguggagaagaagaagagaggcggcaaggaggagaucaccccccacugcgcccugauggacugcaucauguucgacgccgccgugagcggcggcguggacgccaaggugcugagagccgugcugcccagagacaugguguucagaaccagcacccccaagguggugcugugaggacuaguaauaaggaaacuguaugaaugucugugggcaggaagugaagagauccuucuguaaagguuuuuggaauuaugucugcugaauaauaaacuuuuuugaaauaauaaaucugguagaaaaaugagaucucaaaggcucuuuucagagccaccaaaaaaaaaaaaaaaaaaaaaaaaaaaaaaaaaaaaaaaaaaaaaaaaaaaaaaaaaaaaaaaaagaauu

SEQ ID NO: 21495 - RNA, 2066 nt, Artificial Sequence
  mRNA product Design b-4 (hSL-A64-N5) comprising derived and/or modified sequence from LASV(G1180-SLE-2010;Clade IV)__AIT17169__SP-IgE_NP(2-569) (opt4)
aggagagucccgcagucggcguccagcggcucugcuuguucgugugugugucguugcaggccuuauucaagcuuaccauggacuggaccuggauccuguuccugguggccgccgccaccagagugcacagcagcgccagcaaggagaucaagagcuuccuguggacccagagccugagaagagagcugagcggcuacugcagcaacaucaagcugcagguggugaaggacgcccaggcccugcugcacggccuggacuucagcgaggugagcaacgugcagagacugaugagaaaggagagaagagacgacaacgaccugaagagacugagagaccugaaccaggccgugaacaaccugguggagcugaagagcacccagcagaagagcauccugagagugggcacccugaccagcgacgaccugcugauccuggccgccgaccuggagaagcugaagagcaaggugaucagaaccgagagaccccugagcgccggcguguacaugggcaaccugagcagccagcagcuggaccagagaagagcccugcugagcaugaucggcaugagcagcggcaaccagagagcccaggccggcagagacggcguggugagagugugggacgugaagaacguggagcugcugaacaaccaguucggcaccaugcccagccugacccuggccugccugaccaagcagggccagguggaccugaacgacgccgugcaggcccugaccgaccugggccugaucuacaccgccaaguaccccaacaccagcgaccuggacagacugacccagagccaccccauccugaacaugaucgacaccaagaagagcagccugaacaucagcggcuacaacuucagccugggcgccgccgugaaggccggcgccugcaugcuggacggcggcaacaugcuggagaccaucaaggugagcccccagaccauggacggcauccugaagagcauccugaaggugaagaaggcccugggcauguucaucagcgacacccccggcgagagaaaccccuacgagaacauccuguacaagaucugccugagcggcgacggcuggcccuacaucgccagcagaaccagcaucaccggcagagccugggagaacaccgugguggaccuggagagcgacggcaagccccagaaggccggcagcaacaacagcaacaagagccugcagagcgugggcuucaccgccggccugaccuacagccagcugaugacccugaaggacgccaugcugcagcuggaccccaacgccaagaccuggauggacaucgagggcagacccgaggaccccguggagaucgcccuguaccagcccagcagcggcugcuacauccacuucuucagagagcccaccgaccugaagcaguucaagcaggacgccaaguacagccacggcaucgacgugaccgaccuguucgccgcccagcccggccugaccagcgccgugaucgacgcccugcccagaaacauggugaucaccugccagggcagcgacgacaucagaaagcugcuggagagccagggcagaaaggacaucaagcugaucgacaucgcccugagcaagaccgacagcagaaaguacgagaacgccgugugggaccaguacaaggaccugugccacaugcacaccggcguggugguggagaagaagaagagaggcggcaaggaggagaucaccccccacugcgcccugauggacugcaucauguucgacgccgccgugagcggcggccugaacaccagcgugcugagagccgugcugcccagagacaugguguucagaaccagcacccccagaguggugcugugaggacuaguaauaaggaaacuguaugaaugucugugggcaggaagugaagagauccuucuguaaagguuuuuggaauuaugucugcugaauaauaaacuuuuuugaaauaauaaaucugguagaaaaaugagaucucaaaggcucuuuucagagccaccaaaaaaaaaaaaaaaaaaaaaaaaaaaaaaaaaaaaaaaaaaaaaaaaaaaaaaaaaaaaaaaaagaauu

SEQ ID NO: 21496 - RNA, 2066 nt, Artificial Sequence
  mRNA product Design b-4 (hSL-A64-N5) comprising derived and/or modified sequence from LASV(G1442-SLE-2011;Clade IV)__AIT17181__SP-IgE_NP(2-569) (opt4)
aggagagucccgcagucggcguccagcggcucugcuuguucgugugugugucguugcaggccuuauucaagcuuaccauggacuggaccuggauccuguuccugguggccgccgccaccagagugcacagcagcgccagcaaggaggugaagagcuuccuguggacccagagccugagaagagagcugagcggcuacugcagcaacaucaagcugcagguggugaaggacgcccaggcccugcugcacggccuggacuucagcgaggugagcaacgugcagagacugaugagaaagcagagaagagacgacaacgaccugaagagacugagagaccugaaccaggccgugaacaaccugguggagcugaagagcacccagcagaagagcgugcugagagugggcacccugaccagcgacgaccugcuggugcuggccgccgaccuggagaagcugaagagcaaggugaucagaaccgagagaccccugagcgccggcguguacaugggcaaccugagcagccagcagcuggaccagagaagagcccugcugaacaugaucggcaugagcggcggcauccagggcaccagaaccggcagagacggcguggugagagugugggacgugaagaacgccgaccugcugaacaaccaguucggcaccaugcccagccugacccuggccugccugaccaagcagggccagguggaccugaacgacguggugcaggcccugaccgaccugggccugaucuacaccgccaaguaccccaacgccagcgaccuggacagacugacccagagccaccccauccugaacaugaucgacaccaagaagagcagccugaacaucagcggcuacaacuucagccugggcgccgccgugaaggccggcgccugcaugcuggacggcggcaacaugcuggagaccaucaaggugagcccccagaccauggacggcauccugaagagcauccugaaggugaagaagacccugggcauguucaucagcgacacccccggcgagagaaaccccuacgagaacauccuguacaagaucugccugagcggcgacggcuggcccuacaucgccagcagaaccagcaucaccggcagagccugggagaacaccgugguggaccuggagagcgacggcaagccccagaaggccggcagcaacaacagcaacaagagccugcagagcgccggcuucgccgccggccugaccuacagccagcugaugacccugaaggacgccaugcugcagcuggaccccaacgccaagaccuggauggacaucgagggcagacccgaggaccccguggagaucgcccuguaccagcccagcagcggcugcuacauccacuucuucagagagcccaccgaccugaagcaguucaagcaggacgccaaguacagccacggcaucgacgugaccgaccuguucgccgcccagcccggccugaccagcgccgugaucgaggcccugcccagaaacauggugaucaccugccagggcagcgacgacaucaagaagcugcuggagagccagggcagaaaggacaucaagcugaucgacaucgcccugagcaagaccgacagcagaaaguacgagaacgccgugugggaccaguacaaggaccugugccacaugcacaccggcguggugguggagaagaagaagagaggcggcaaggaggagaucaccccccacugcgcccugauggacugcaucauguucgacgccgccgugagcggcggccugaacacccuggugcugagagccgugcugcccagagacaugguguucagaaccagcacccccagaguggugcugugaggacuaguaauaaggaaacuguaugaaugucugugggcaggaagugaagagauccuucuguaaagguuuuuggaauuaugucugcugaauaauaaacuuuuuugaaauaauaaaucugguagaaaaaugagaucucaaaggcucuuuucagagccaccaaaaaaaaaaaaaaaaaaaaaaaaaaaaaaaaaaaaaaaaaaaaaaaaaaaaaaaaaaaaaaaaagaauu

SEQ ID NO: 21497 - RNA, 2066 nt, Artificial Sequence
  mRNA product Design b-4 (hSL-A64-N5) comprising derived and/or modified sequence from LASV(G3010-SLE-2013;Clade IV)__AIT17345__SP-IgE_NP(2-569) (opt4)
aggagagucccgcagucggcguccagcggcucugcuuguucgugugugugucguugcaggccuuauucaagcuuaccauggacuggaccuggauccuguuccugguggccgccgccaccagagugcacagcagcgccagcaaggagaucaagagcuuccuguggacccagagccugagaagagagcugagcggcuacugcagcaacaucaagcugcagguggugaaggacgcccaggcccugcugcacggccuggacuucagcgaggugagcaacgugcagagacugaugagaaaggagagaagagacgacaacgaccugaagagacugagagaccugaaccaggccgugaacaaccugguggagcugaagagcacccagcagaagagcauccugagagugggcacccugaccagcgacgaccugcugauccuggccgccgaccuggagaagcugaagagcaaggugaccagaaccgagagaccccugagcgccggcguguacaugggcaaccugagcagccagcagcuggaccagagaagagcccugcugagcaugaucggcaugagcagcggcgugcagggcgccagagccggcagagacggcguggugagagugugggacgugaagaacgccgagcugcugaacaaccaguucggcaccaugcccagccugacccuggccugccugaccaagcagggccagguggaccugaacgacguggugcaggcccugaccgaccugggccugaucuacaccgccaaguaccccaacaccagcgaccuggacagacugacccagagccaccccauccugaacaugaucgacaccaagaagagcagccugaacaucagcggcuacaacuucagccugggcgccgccgugaaggccggcgccugcaugcuggacggcggcaacaugcuggagaccaucaaggugagcccccagaccauggacggcauccugaagagcauccugaaggugaagaaggcccugggcauguucaucagcgagacccccggcgagagaaaccccuacgagaacauccuguacaagaucugccugagcggcgacggcuggcccuacaucgccagcagaaccagcaucaccggcagagccugggagaacaccgugguggaccuggagagcgacggcaagccccagaaggccggcagcaacaacagcaacaagagccugcagagcgccggcuucaccgccggccugaccuacagccagcugaugacccugaaggacgccaugcugcagcuggaccccaacgccaagaccuggauggacaucgagggcagacccgaggaccccguggagguggcccuguaccagcccagcagcggcugcuacauccacuucuucagagagcccaccgaccugaagcaguucaagcaggacgccaaguacagccacggcaucgacgugaccgaccuguucgccgcccagcccggccugaccagcgccgugaucgacgcccugcccagaaacauggugaucaccugccagggcagcgacgacaucaagaagcugcuggagagccagggcagaaaggacaucaagcugaucgacaucgcccugagcaagaccgacagcagaaaguacgagaacgccgugugggaccaguacaaggaccugugccacaugcacaccggcguggugguggagaagaagaagagaggcggcaaggaggagaucaccccccacugcgcccugauggacugcaucauguucgacgccgccgugagcggcggccugaacaccagcgugcugagagccgugcugcccagagacaugguguucagaaccagcacccccagaguggugcugugaggacuaguaauaaggaaacuguaugaaugucugugggcaggaagugaagagauccuucuguaaagguuuuuggaauuaugucugcugaauaauaaacuuuuuugaaauaauaaaucugguagaaaaaugagaucucaaaggcucuuuucagagccaccaaaaaaaaaaaaaaaaaaaaaaaaaaaaaaaaaaaaaaaaaaaaaaaaaaaaaaaaaaaaaaaaagaauu

SEQ ID NO: 21498 - RNA, 2066 nt, Artificial Sequence
  mRNA product Design b-4 (hSL-A64-N5) comprising derived and/or modified sequence from LASV(G502-SLE-2009;Clade IV)__AIT17127__SP-IgE_NP(2-569) (opt4)
aggagagucccgcagucggcguccagcggcucugcuuguucgugugugugucguugcaggccuuauucaagcuuaccauggacuggaccuggauccuguuccugguggccgccgccaccagagugcacagcagcgccagcaaggagaucaagagcuuccuguggacccagagccugagaagagagcugagcggcuacugcagcaacaucaagcugcagguggugaaggacgcccaggcccugcugcacggccuggacuucagcgaggugagcaacgugcagagacugaugagaaaggagagaagagacgacaacgaccugaagagacugagagaccugaaccaggccgugaacaaccugguggagcugaagagcacccagcagaagagcauccugagagugggcacccugaccagcgacgaccugcugauccuggccgccgaccuggagaagcugaagagcaaggugaucagaaccgagagaccccugagcgccggcguguacaugggcaaccugagcagccagcagcuggaccagagaagagcccugcugagcaugaucggcaugagcggcggcaaccagggcgugagagccggcaaggacggcguggugagagugugggacgugaagaacgccgagcugcugaacaaccaguucggcaccaugcccagccugacccuggccugccugaccaagcagggccagguggaccugaacgacgccgugcaggcccugaccgaccugggccugaucuacaccgccaaguaccccaacaccagcgaccuggacagacugacccagagccaccccauccugaacaugaucgacaccaagaagagcagccugaacaucagcggcuacaacuucagccugggcgccgccgugaaggccggcgccugcaugcuggacggcggcaacaugcuggagaccaucaaggugagcccccagaccauggacggcauccugaagagcauccugaaggugaagaaggcccugggcauguucaucagcgacacccccggcgagagaaaccccuacgagaacauccuguacaagaucugccugagcggcgacggcuggcccuacaucgccagcagaaccagcaucaccggcagagccugggagaacaccgugguggaccuggagagcgacggcaagccccagaaggccggcagcaacaacagcaacaagagccugcagagcgccggcuucaccgccggccugaccuacagccagcugaugacccugaaggacgccaugcugcagcuggaccccaacaccaagaccuggauggacaucgagggcagacccgaggaccccguggagaucgcccuguaccagcccagcagcggcugcuacauccacuucuucagagagcccaccgaccugaagcaguucaagcaggacgccaaguacagccacggcaucgacgugaccgaccuguucgccgcccagcccggccugaccagcgccgugaucgacgcccugcccagaaacauggugaucaccugccagggcagcgacgacaucagaaagcugcuggagagccagggcagaaaggacaucaagcugaucgacaucgcccugaacaagaccgacagcagaaaguacgagaacgccgugugggaccaguacaaggaccugugccacaugcacaccggcguggugguggagaagaagaagagaggcggcaaggaggagaucaccccccacugcgcccugauggacugcaucauguucgacgccgccgugagcggcggccugaacaccagcgugcugagagccgugcugcccagagacaugguguucagaaccagcacccccagaguggugcugugaggacuaguaauaaggaaacuguaugaaugucugugggcaggaagugaagagauccuucuguaaagguuuuuggaauuaugucugcugaauaauaaacuuuuuugaaauaauaaaucugguagaaaaaugagaucucaaaggcucuuuucagagccaccaaaaaaaaaaaaaaaaaaaaaaaaaaaaaaaaaaaaaaaaaaaaaaaaaaaaaaaaaaaaaaaaagaauu

SEQ ID NO: 21499 - RNA, 2066 nt, Artificial Sequence
  mRNA product Design b-4 (hSL-A64-N5) comprising derived and/or modified sequence from LASV(G733-SLE-2010;Clade IV)__AIT17155__SP-IgE_NP(2-569) (opt4)
aggagagucccgcagucggcguccagcggcucugcuuguucgugugugugucguugcaggccuuauucaagcuuaccauggacuggaccuggauccuguuccugguggccgccgccaccagagugcacagcagcgccagcaaggagaucaagagcuuccuguggacccagagccugagaagagagcugagcggcuacugcagcaacaucaagcugcagguggugaaggacgcccaggcccugcugcacggccuggacuucagcgaggugagcaacgugcagagacugaugagaaaggagagaagagacgacaacgaccugaagagacugagagaccugaaccaggccgugaacaaccugguggagcugaagagcacccagcagaagagcgugcugagagugggcacccugaccagcgacgagcugcuggugcuggccgccgaccuggagaagcugaagagcaaggugaucagaaccgagagaccccugagcgccggcguguacaugggcaaccugagcagccagcagcuggaccagagaagagcccugcugagcaugaucggcaugagcggcggcaaccagggcgccagaaccggcagagacggcguggugagagugugggacgugaagaacgccgagcugcugaacaaccaguucggcaccaugcccagccugacccuggccugccugaccaagcagggccagguggaccugaacgacgccgugcaggcccugaccgaccugggccugaucuacaccgccaaguaccccaacaccagcgaccuggacagacugacccagagccaccccauccugaacaugaucgacaccaagaagagcagccugaacaucagcggcuacaacuucagccugggcgccgccgugaaggccggcgccugcaugcuggacggcggcaacaugcuggagaccaucaaggugagcccccagaccauggacggcauccugaagagcauccugaaggugaagaaggcccugggcauguucaucagcgacacccccggcgagagaaaccccuacgagaacauccuguacaagaucugccugagcggcgacggcuggcccuacaucgccagcagaaccagcaucaccggcagagccugggagaacaccgugguggaccuggagagcgacggcaagccccagaaggccggcagcaacaacagcaacaagagccugcagagcgccggcuucaccgccggccugaccuacagccagcugaugacccugaaggacgccaugcugcagcuggaccccaacgccaagaccuggauggacaucgagggcagacccgaggaccccguggagaucgcccuguaccagcccagcagcggcugcuacauccacuucuucagagagcccaccgaccugaagcaguucaagcaggacgccaaguacagccacggcaucgacgugaccgaccuguucgccgcccagcccggccugaccagcgccgugaucgacgcccugcccagaaacauggugaucaccugccagggcagcgacgacaucagaaagcugcuggagagccagggcagaaaggacaucaagcugaucgacaucgcccugagcaagaucgacagcagaaaguacgagaacgccgugugggaccaguacaaggaccugugccacaugcacaccggcguggugguggagaagaagaagagaggcggcaaggaggagaucaccccccacugcgcccugauggacugcaucauguucgacgccgccgugagcggcggccugaacagccuggugcugagagccgugcugcccagagacaugguguucagaaccagcacccccagaguggugcugugaggacuaguaauaaggaaacuguaugaaugucugugggcaggaagugaagagauccuucuguaaagguuuuuggaauuaugucugcugaauaauaaacuuuuuugaaauaauaaaucugguagaaaaaugagaucucaaaggcucuuuucagagccaccaaaaaaaaaaaaaaaaaaaaaaaaaaaaaaaaaaaaaaaaaaaaaaaaaaaaaaaaaaaaaaaaagaauu

SEQ ID NO: 21500 - RNA, 2066 nt, Artificial Sequence
  mRNA product Design b-4 (hSL-A64-N5) comprising derived and/or modified sequence from MOPV/LASV reassortant(IGS-1;Clade IV)__AFY05578__SP-IgE_NP(2-569) (opt4)
aggagagucccgcagucggcguccagcggcucugcuuguucgugugugugucguugcaggccuuauucaagcuuaccauggacuggaccuggauccuguuccugguggccgccgccaccagagugcacagcagcgccagcaaggagaucaagagcuuccuguggacccagagccugagaagagagcugagcggcuacugcagcaacaucaagcugcagguggugaaggacgcccaggcccugcugcacggccuggacuucagcgaggugagcaacgugcagagacugaugagaaaggagagaagagacgacaacgaccugaagagacugagagaccugaaccaggccgugaacaaccugguggagcugaagagcacccagcagaagagcauccugagagugggcacccugaccagcgacgaccugcugauccuggccgccgaccuggagaagcugagaagcaaggugaucagaaccgagagaccccugagcgccggcguguacaugggcaaccugagcagccagcagcuggaccagagaagagcccugcugaacaugaucggcaugagcggcggcaaccagggcgccagagccggcagagacggcguggugagagugugggacgugaagaacgccgagcugcugagcaaccaguucggcaccaugcccagccugacccuggccugccugaccaagcagggccagguggaccugaacgacgccgugcaggcccugaccgaccugggccugaucuacaccgccaaguaccccaacaccagcgaccuggacagacugacccagagccaccccauccugaacaugaucgacaccaagaagagcagccugaacaucagcggcuacaacuucagccugggcgccgccgugaaggccggcgccugcaugcuggacggcggcaacaugcuggagaccaucaaggugagcccccagaccauggacggcauccugaagagcauccugaaggugaagaaggcccugggcauguucaucagcgacacccccggcgagagaaaccccuacgagaacauccuguacaagaucugccugagcggcgacggcuggcccuacaucgccagcagaaccagcaucaccggcagagccugggagaacaccgugguggaccuggagagcgacggcaagccccagaaggccgacagcaacaacagcagcaagagccugcagagcgccggcuucaccgccggccugaccuacagccagcugaugacccugaaggacgccaugcugcagcuggaccccaacgccaagaccuggauggacaucgagggcagacccgaggaccccguggagaucgcccuguaccagcccagcagcggcugcuacauccacuucuucagagagcccaccgaccugaagcaguucaagcaggacgccaaguacagccacggcaucgacgugaccgaccuguucgccacccagcccggccugaccagcgccgugaucgacgcccugcccagaaacauggugaucaccugccagggcagcgacgacaucagaaagcugcuggagagccagggcagaaaggacaucaagcugaucgacaucgaccugagcaagaccgacagcagaaaguacgagaacgccgugugggaccaguacaaggaccugugccacaugcacaccggcguggugguggagaagaagaagagaggcggcaaggaggagaucaccccccacugcgcccugauggacugcaucauguucgacgccgccgugagcggcggccugaacaccagcgugcugagagccgugcugcccagagacaugguguucagaaccagcacccccagaguggugcugugaggacuaguaauaaggaaacuguaugaaugucugugggcaggaagugaagagauccuucuguaaagguuuuuggaauuaugucugcugaauaauaaacuuuuuugaaauaauaaaucugguagaaaaaugagaucucaaaggcucuuuucagagccaccaaaaaaaaaaaaaaaaaaaaaaaaaaaaaaaaaaaaaaaaaaaaaaaaaaaaaaaaaaaaaaaaagaauu

SEQ ID NO: 21501 - RNA, 2066 nt, Artificial Sequence
  mRNA product Design b-4 (hSL-A64-N5) comprising derived and/or modified sequence from LASV(LM765-SLE-2012;Clade IV)__AIT17815__SP-IgE_NP(2-569) (opt4)
aggagagucccgcagucggcguccagcggcucugcuuguucgugugugugucguugcaggccuuauucaagcuuaccauggacuggaccuggauccuguuccugguggccgccgccaccagagugcacagcagcgccagcaaggagaucaagagcuuccuguggacccagagccugagaagagagcugagcggcuacugcagcaacaucaagcugcagguggugaaggacgcccaggcccugcugcacggccuggacuucagcgaggugagcaacgugcagagacugaugagaaaggagagaagagacgacaacgaccugaagagacugagagaccugaaccaggccgugaacaaccugguggagcugaagagcacccagcagaagagcauccugagagugggcacccugaccagcgacgaccugcugauccuggccgccgaccuggagaagcugaagagcaaggugaccagaaccgagagaccccugagcgccggcguguacaugggcaaccugagcagccagcagcuggaccagagaagagcccugcuggacaugaucggcaugagcggcagcaaccagggcgccagagccggcagagacggcguggugagagugugggacgugaagaacgccgagcugcugaacaaccaguucggcaccaugcccagccugacccuggccugccugaccaagcagggccagguggaccugaacgacgccgugcaggcccugaccgaccugggccugaucuacaccgccaaguaccccaacaccagcgaccuggacagacugacccagagccaccccauccugaacaugaucgacaccaagaagagcagccugaacaucagcggcuacaacuucagccugggcgccgccgugaaggccggcgccugcaugcuggacggcggcaacaugcuggagaccaucaaggugagcccccagaccauggacggcauccugaagagcauccugaaggugaagaaggcccugggcauguucaucagcgacgcccccggcgagagaaaccccuacgagaacauccuguacaagaucugccugagcggcgacggcuggcccuacaucgccagcagaaccagcaucaccggcagagccugggagaacaccgugguggaccuggagagcgacggcaagccccagaaggccggcagcaacggcagcaacaagagccugcagagcgccggcuucaccgccggccugaccuacagccagcugaugacccugaaggacgccaugcugcagcuggaccccaacgccaagaccuggauggacaucgagggcagacccgaggaccccguggagaucgcccuguaccagcccagcagcggcugcuacauccacuucuucagagagcccaccgaccugaagcaguucaagcaggacgccaaguacagccacggcaucgacgugaccgaccuguucgccgcccagcccggccugaccagcgccgugaucgacgcccugcccagaaacauggugaucaccugccagggcagcgacgacaucagaaagcuguucgagagccagggcagaaaggacaucaagcugaucgacaucgcccugagcaagaccgacagcagaaaguacgagaacgccgugugggaccaguacaaggaccugugccacaugcacaccggcaucgugguggagaagaagaagagaggcggcaaggaggagaucaccccccacugcgcccugauggacugcaucauguucgacgccgccgugagcggcggccugaacaccagcgugcugagagccgugcugcccagagacaugguguucagaaccagcacccccagaguggugcugugaggacuaguaauaaggaaacuguaugaaugucugugggcaggaagugaagagauccuucuguaaagguuuuuggaauuaugucugcugaauaauaaacuuuuuugaaauaauaaaucugguagaaaaaugagaucucaaaggcucuuuucagagccaccaaaaaaaaaaaaaaaaaaaaaaaaaaaaaaaaaaaaaaaaaaaaaaaaaaaaaaaaaaaaaaaaagaauu

SEQ ID NO: 21502 - RNA, 2066 nt, Artificial Sequence
  mRNA product Design b-4 (hSL-A64-N5) comprising derived and/or modified sequence from LASV(LM776-SLE-2012;Clade IV)__AIT17825__SP-IgE_NP(2-569) (opt4)
aggagagucccgcagucggcguccagcggcucugcuuguucgugugugugucguugcaggccuuauucaagcuuaccauggacuggaccuggauccuguuccugguggccgccgccaccagagugcacagcagcgccagcaaggagaucaagagcuuccuguggacccagagccugagaagagagcugagcagcuacugcagcaacaucaagcugcagguggugaaggacgcccaggcccugcugcacggccuggacuucagcgaggugagcaacgugcagagacugaugagaaaggagagaagagacgacaacgaccugaagagacugagagaccugaaccaggccgugaacaaccugguggagcugaagagcacccagcagaagagcauccugagagugggcacccugaccagcgacgaccugcugauccuggccgccgaccuggagaagcugaagagcaaggugaccagaaccgagagaccccugagcgccggcguguacaugggcaaccugagcagccagcagcuggaccagagaagagcccugcugagcaugaucggcaugagcggcagcaaccagggcgccagagccggcagagacggcguggugagagugugggacgugaagaacgccgagcugcugaacaaccaguucggcaccaugcccagccugacccuggccugccugaccaagcagggccagguggaccugaacgacgccgugcaggcccugaccgaccugggccugaucuacaccgccaaguaccccaacaccagcgaccuggacagacugacccagagccaccccauccugaacaugaucgacaccaagaagagcagccugaacaucagcggcuacaacuucagccugggcgccgccgugaaggccggcgccugcaugcuggacggcggcaacaugcuggagaccaucaaggugagcccccagaccauggacggcauccugaagagcauccugaaggugaagaaggcccugggcauguucaucagcgacacccccggcgagagaaaccccuacgagaacauccuguacaagaucugccugagcggcgacggcuggcccuacaucgccagcagaaccagcaucaccggcagagccugggagaacaccgugguggaccuggagagcgacggcaagccccagaaggccggcagcaacaacagcaacaagagccugcagagcgccggcuucaccgccggccugaccuacagccagcugaugacccugaaggacgccaugcugcagcuggaccccaacgccaagaccuggauggacaucgagggcagacccgaggaccccguggagguggcccuguaccagcccagcagcggcugcuacauccacuucuucagagagcccaccgaccugaagcaguucaagcaggacgccaaguacagccacggcaucgacgugaccgaccuguucgccgcccagcccggccugaccagcgccgugaucgacgcccugcccagaaacauggugaucaccugccagggcagcgacgacaucagaaagcugcuggagagccagggcagaaaggacaucaagcugaucgacaucgcccugagcaagaccgacagcagaaaguacgagaacgccgugugggaccaguacaaggaccugugccacaugcacaccggcguggugguggagaagaagaagagaggcggcaaggaggagaucaccccccacugcgcccugauggacugcaucauguucgacgccgccgugagcggcggccugaacaccagcgugcugagagccgugcugcccagagacaugguguucagaaccagcacccccagaguggugcugugaggacuaguaauaaggaaacuguaugaaugucugugggcaggaagugaagagauccuucuguaaagguuuuuggaauuaugucugcugaauaauaaacuuuuuugaaauaauaaaucugguagaaaaaugagaucucaaaggcucuuuucagagccaccaaaaaaaaaaaaaaaaaaaaaaaaaaaaaaaaaaaaaaaaaaaaaaaaaaaaaaaaaaaaaaaaagaauu

SEQ ID NO: 21503 - RNA, 2066 nt, Artificial Sequence
  mRNA product Design b-4 (hSL-A64-N5) comprising derived and/or modified sequence from LASV(Mad39;Clade IV)__ANH09723__SP-IgE_NP(2-569) (opt4)
aggagagucccgcagucggcguccagcggcucugcuuguucgugugugugucguugcaggccuuauucaagcuuaccauggacuggaccuggauccuguuccugguggccgccgccaccagagugcacagcagcgccagcaaggagaucaagagcuuccuguggacccagagccugagaagagagcugagcggcuacugcagcaacaucaagcugcagguggugaaggacgcccaggcccugcugcacggccuggacuucagcgaggugagcaacgugcagagacugaugagaaagcagagaagagacgacaacgaccugaagagacugagagaccugaaccaggccgugaacaaccugguggagcugaagagcacccagcagaagagcgugcugagagugggcacccugaccagcgacgaccugcugacccuggccgccgaccuggagaagcugaagagcaaggugaccagaaccgagagaccccugaccgccggcguguacaugggcaaccugagcagccagcagcuggaccagagaagagcccugcugaacaugaucggcaugagcggcggcaaccagggcgccagaaccggcagagacggcguggugagagugugggacgugaagaacgccgagcugcugaacaaccaguucggcaccaugcccagccugacccuggccugccugaccaagcagggccagguggaccugaacgacguggugcaggcccugaccgaccugggccugaucuacaccgccaaguaccccaacaccagcgaccuggacagacugacccagagccaccccauccugaacaugaucgacaccaacaagagcagccugaacaucagcggcuacaacuucagccugggcgccgccgugaaggccggcgccugcaugcuggacggcggcaacaugcuggagaccaucaaggugagcccccagaccauggacggcauccugaagagcauccugaaggugaagaagagccugggcauguucaucagcgacacccccggcgagagaaaccccuacgagaacauccuguacaagaucugccugagcggcgacggcuggcccuacaucgccagcagaaccagcaucaccggcagagccugggagaacaccgugguggaccuggagagcggcggcaagccccagaaggccggcagcaacaacagcaacaagagccugcagagcgccggcuucgccgccggccugaccuacagccagcugaugacccugaaggacgccaugcugcagcuggaccccaacgccaagaccuggauggacaucgagggcagacccgaggaccccguggagaucgcccuguaccagcccaucagcggcugcuacauccacuucuucagagagcccaccgaccugaagcaguucaagcaggacgccaaguacagccacggcaucgacgugaccgaccuguucgccgcccagcccggccugaccagcgccgugaucgaggcccugcccagaaacauggugaucaccugccagggcagcgacgacaucagaaagcuguucgagagccagggcagaaaggacaucaagcugaucgacaucgcccugagcaagaccgacagcagaaaguacgagaacgccgugugggaccaguacaaggaccugugccacaugcacaccggcguggugguggagaagaagaagaagggcggcaaggaggagaucaccccccacugcgcccugauggacugcaucauguucgacgccgccgugagcggcggccugaacacccuggugcugagagccgugcugcccagagacaugguguucagaaccagcacccccaagguggugcugugaggacuaguaauaaggaaacuguaugaaugucugugggcaggaagugaagagauccuucuguaaagguuuuuggaauuaugucugcugaauaauaaacuuuuuugaaauaauaaaucugguagaaaaaugagaucucaaaggcucuuuucagagccaccaaaaaaaaaaaaaaaaaaaaaaaaaaaaaaaaaaaaaaaaaaaaaaaaaaaaaaaaaaaaaaaaagaauu

SEQ ID NO: 21504 - RNA, 2066 nt, Artificial Sequence
  mRNA product Design b-4 (hSL-A64-N5) comprising derived and/or modified sequence from LASV(Z0947-SLE-2011;Clade IV)__AIT17841__SP-IgE_NP(2-569) (opt4)
aggagagucccgcagucggcguccagcggcucugcuuguucgugugugugucguugcaggccuuauucaagcuuaccauggacuggaccuggauccuguuccugguggccgccgccaccagagugcacagcagcgccagcaaggagaucaagagcuuccuguggacccagagccugagaagagagcugagcggcuacugcagcaacaucaagcugcagguggugaaggacgcccaggcccugcugcacggccuggacuucagcgaggugagcaacgugcagagacugaugagaaaggagagaagagacgacaacgaccugaagagacugagagaccugaaccaggccgugaacaaccugguggagcugaagagcacccagcagaagagcauccugagagugggcacccugaccagcgacgaccugcugauccuggccgccgaccuggagaagcugaagagcaaggugaccagaaccgagagaccccugagcgccggcguguacaugggcaaccugagcagccagcagcuggaccagagaagagcccugcugaacaugaucggcaugagcggcagcaaccagggcgccagaaccggcagagacggcguggugagagugugggacgugaagaacgccgagcugcugaacaaccaguucggcaccaugcccagccugacccuggccugccugaccaagcagggccagguggaccugaacgacgccgugcaggcccugaccgaccugggccugaucuacaccgccaaguaccccaacaccagcgaccuggacagacugacccagagccaccccauccugaacaugaucgacaccaagaagagcagccugaacaucagcggcuacaacuucagccugggcgccgccgugaaggccggcgccugcaugcuggacggcggcaacaugcuggagaccaucaaggugagcccccagaccauggacggcauccugaagagcauccugaaggugaagaaggcccugggcauguucaucagcgacgcccccggcgagagaaaccccuacgagaacauccuguacaagaucugccugagcggcgacggcuggcccuacaucgccagcagaaccagcaucaccggcagagccugggagaacaccgugguggaccuggagagcgacggcaagccccagaaggccggcagcaacggcagcaacaagagccugcagagcgccggcuucaccgccggccugaccuacagccagcugaugacccugaaggacgccaugcugcagcuggaccccaacgccaagaccuggauggacaucgagggcagacccgaggaccccguggagaucgcccuguaccagcccagcagcggcugcuacauccacuucuucagagagcccaccgaccugaagcaguucaagcaggacgccaaguacagccacggcaucgacgugaccgaccuguucgccgcccagcccggccugaccagcgccgugaucgacgcccugcccagaaacauggugaucaccugccagggcagcgacgacaucagaaagcuguucgagagccagggcagaaaggacaucaagcugaucgacaucgcccugagcaagaccgacagcagaaaguacgagaacgccgugugggaccaguacaaggaccugugccacaugcacaccggcaucgugguggagaagaagaagagaggcggcaaggaggagaucaccccccacugcgcccugauggacugcaucauguucgacgccgccgugagcggcggccugaacaccagcgugcugagagccgugcugcccagagacaugguguucagaaccagcacccccagaguggugcugugaggacuaguaauaaggaaacuguaugaaugucugugggcaggaagugaagagauccuucuguaaagguuuuuggaauuaugucugcugaauaauaaacuuuuuugaaauaauaaaucugguagaaaaaugagaucucaaaggcucuuuucagagccaccaaaaaaaaaaaaaaaaaaaaaaaaaaaaaaaaaaaaaaaaaaaaaaaaaaaaaaaaaaaaaaaaagaauu

SEQ ID NO: 21505 - RNA, 2066 nt, Artificial Sequence
  mRNA product Design b-4 (hSL-A64-N5) comprising derived and/or modified sequence from LASV(Josiah;Clade IV)__NP_694869__SP-IgE_NP(2-569) (opt5)
aggagagucccgcagucggcguccagcggcucugcuuguucgugugugugucguugcaggccuuauucaagcuuaccauggacuggaccuggauccuguuccucguggccgcugccacaagaguccacagcagcgccuccaaggagaucaaaucuuuccuguggacccagagccucagacgggaacuguccggcuacugcucuaacauuaagcugcaaguggucaaagacgcucaggcccugcuccacgggcuggauuuuagcgagguuuccaaugugcagcgccuuaugagaaaggaacggcgcgacgauaacgaccugaaaagacuccgggaucugaaucaggcggugaacaaucuggucgagcucaagucuacacaacaaaagagcauccugcgcgugggaacgcuuaccuccgacgaucugcucauucuggcugccgaccuugaaaaacuuaagagcaaaguuaucagaacagagcggccccucucugccggcguguauauggggaaccuguccagccagcagcuggaucagcgcagagcucuccugaauaugauuggaaugucuggcgggaaccagggagcccgggcuggccgcgacggcgucgugagaguuugggaugugaagaaugccgagcuucugaacaaucaguucgggaccaugccuucccucacacuggcgugucuuaccaaacagggacaagucgaccugaacgaugccgugcaggcucucacagaccugggccugaucuacaccgccaaguauccgaauacgagcgaccucgaucggcugacccagucucaucccauccuuaacaugauugacacaaagaaauccagccugaauaucuccggguacaacuuuucucucggagcugccgugaaggcgggcgccugcaugcuggaugggggaaacaugcuugaaaccauuaaagucagcccucaaacaauggacggcauccugaaguccauucucaaaguuaagaaagcucugggcauguucaucagcgauacccccggggagcgcaauccuuaugaaaacauucuguacaagaucugucucucuggagacggcuggcccuauaucgccuccagaacgagcauuacagggcgggcuugggagaauaccgugguggaucuggagucugacggaaagccucagaaagccgauagcaacaauuccucuaagagccuucaguccgccggcuuuacagcugggcugaccuacagccagcucaugacccugaaagacgcgaugcugcaacuugauccgaacgccaagacauggauggacaucgaaggaagacccgaggacccugucgaaauugcucucuaccagcccucuuccggcugcuauauccacuucuuucgcgagccuacggaucugaaacaguucaagcaggacgccaaguacagccauggcauugaugugaccgaccuguuugccacacaacccgggcucaccucugcuguuaucgaugcccugccgcggaauauggugaucacaugucagggauccgacgauauuagaaaacuucuggaaagccagggccgcaaggacaucaaacucauugauaucgcgcuguccaagaccgacucucggaaauaugagaacgcugucugggaucaguacaaggaccugugccacaugcauacgggggugguuguggagaagaaaaagagaggaggcaaagaagagauuacaccucacugugcccuuauggauugcaucauguucgacgccgcugucagcgggggccucaauaccuccgugcugcgcgccguccugccccgggacaugguguuuagaaccucuacaccucgcguugugcucugaggacuaguaauaaggaaacuguaugaaugucugugggcaggaagugaagagauccuucuguaaagguuuuuggaauuaugucugcugaauaauaaacuuuuuugaaauaauaaaucugguagaaaaaugagaucucaaaggcucuuuucagagccaccaaaaaaaaaaaaaaaaaaaaaaaaaaaaaaaaaaaaaaaaaaaaaaaaaaaaaaaaaaaaaaaaagaauu

SEQ ID NO: 21506 - RNA, 2066 nt, Artificial Sequence
  mRNA product Design b-4 (hSL-A64-N5) comprising derived and/or modified sequence from LASV(LP;Clade I)__AAF86702__SP-IgE_NP(2-569) (opt5)
aggagagucccgcagucggcguccagcggcucugcuuguucgugugugugucguugcaggccuuauucaagcuuaccauggacuggaccuggauccuguuccucguggccgcugccacaagaguccacagcagcaacuccaaggagaucaaaucuuuccuguggacccagagccucagacgggaacuguccggcuacugcucuaauauuaagcuccaaguggucaaagacgcccaggcucugcuccacgggcuggauuuuagcgagguuuccaacgugcagcgccuuaugagaaagcagaaacgggacgaugccgaccugaagcgccucagagaucugaaucaagcggugaacaaucuggucgaacucaagucuacacagcagaaaaacgugcugcggguuggaacgcuuagcuccgacgaucugaucacccucgcugccgaccuggagaaacuuaaaagcaaggugauucgcacagaaagaccccugucuuccggcgucuauauggggaaucucagcucucagcaacuggaucagcggcgcgcccugcucuccaugaucggaaugagcggcgggccucagggaaacagaaccggcggcgacggggugguucgggugugggaugucaaaaaugcugagcugcuuaacaaucaguucggaacaaugccgucucugacccucgccugucugacaaagcaaggccagguggaccuuaacgaugcugugcaggcccugaccgaccucgggcugauuuacacggcgaaguaucccaauuccagcgaccuggauaugcucacccaaucccauccuauccugggaauggucgacacaaagaagucuagccuuaacaucuccggcuacaauuuuagccugggggccgcuguuaaagccggagcuugcaugcucgauggcggcaacaugcuggagaccauuaaggugucuccccagacaauggacgggauccuuaaauccauucugaaggugaaacgcagccucggaauguucaucucugauaccccuggcgaaagaaaccccuaugagaauauucuguacaagaucugucugagcggggaaggauggccuuauauugccucccggacgucuaucacaggccgcgcgugggagaacacccucgucgaccuggagagcgauaauaagccgcccaaacuuaacuccgccgggagcaauaagucucugcaggcugccggacucaacgcuggccugacauacucccagcugaugacccuuaaagacugcaugcuccaacuggauccuagcucuaagaccuggaucgacauugaaggcagacccgaggauccuguggaaaucgcccuguuucagcccuccagcggguguuacauucacuucuuucgggagccgacagaccucaaacaguucaagcaggacgccaaguauucccauggaaucgauguuacggaccuguuuucuacccaaccuggccuuacaagcgcugugauugaagcgcugcccagaaauaugguccuuaccugccagggguccgaugacaucaaaaagcugcuggagucucagggacgccgggauaucaaacuuauugacaucagccucuccaaggccgauagcagaaaauucgagaacgcugugugggaccaguacaaggaucugugucacaugcauacaggcguuguggucgaaaagaaaaagcgcgggggcaaagaggaaauuaccccucacugcgcccugcucgacuguaucauguuugaugccgcuacgacaggaucucugaauauuaccacccuucgggccgugcugcccagagacauggucuuccgcacauccacccccaaggugguucucugaggacuaguaauaaggaaacuguaugaaugucugugggcaggaagugaagagauccuucuguaaagguuuuuggaauuaugucugcugaauaauaaacuuuuuugaaauaauaaaucugguagaaaaaugagaucucaaaggcucuuuucagagccaccaaaaaaaaaaaaaaaaaaaaaaaaaaaaaaaaaaaaaaaaaaaaaaaaaaaaaaaaaaaaaaaaagaauu

SEQ ID NO: 21507 - RNA, 2066 nt, Artificial Sequence
  mRNA product Design b-4 (hSL-A64-N5) comprising derived and/or modified sequence from LASV(803213;Clade II)__AAF86704__SP-IgE_NP(2-569) (opt5)
aggagagucccgcagucggcguccagcggcucugcuuguucgugugugugucguugcaggccuuauucaagcuuaccauggacuggaccuggauccuguuccucguggccgcugccacaagaguccacagcagcgccuccaaggaggugaaaucuuuccuguggacccagagccucagacgggaacuguccggcuacugcucuaacaucaaacuucaagucguuaaggacgcucaggcccugcuccacgggcuggauuuuagcgaggugaauaacgugcagcgccuuaugagaaagcagaaacgggacgauggagaccugaagcgccucagagaucugaaucaagcggucaacaaucugguggaacucaaguccacacagcagaaaucuauucugcggguuggcacgcuuaccagcgacgaucugcucacacuggcugccgaccuugagaagcugaaauccaaggugauccgcaccgaaagaccccucagcucuggggucuauaugggaaaccuguccacacagcaacuggagcagcggcgcgcccuccugaauaugauuggcauggugggaggagcucagggcacccagccuggcagagaugggguugugcgggucugggacgugaaaaacccggaucuucugaauaaccaauucggaacaaugcccagccucacccuggccugucuuacgaagcagggccagguggaccugaaugaugcuguccucgcccugaccgaccuggggcucaucuacacagcgaaguauccuaacucuuccgaccuggaucgccuuagccaaucucaucccauucugaauaugguugacaccaaaaaguccagccucaacaucuccggauacaauuuuucucugggcgccgcugugaaagccggggcuugcaugcuugauggaggcaacaugcuggagacaaucaaggugaccccucagacgauggacggcauucucaaaagcauccugaaggucaaaagaucccuggggauguucgugagcgauacacccggagaacggaacccuuaugagaauauucucuacaagaucugucugucuggcgacggguggccguauauugccucccgcaccagcaucguugggagagcgugggaaaacacaaccguggaucuugagucugacggcaagccccagaaagucgggaccgccggaagcaauaagucccugcagucugcuggcuuuccuacaggccucacguacagccaacugaugacccugaaagauuccaugaugcagcuugaccccagcgccaagacauggauugauaucgaggggcggccugaagaccccguggagaucgcucucuaccagccgaugucuggaugcuauauucacuucuuuagagaaccuaccgaccugaaacaguucaagcaagaugccaaguacucccauggcaucgacguugccgaucuguuucccgcucagccugggcucacaagcgcggugauugaggcccugccccgcaacaugguccuuaccugucagggaucugacgauaucaaaaagcugcucgacucccagggccggagagauauuaaacugaucgacaucagccuguccaagguggauucucgcaaauucgaaaaugcugucugggaccaaugcaaggaucuuugucacaugcauacgggggugguuguggagaagaaaaagcggggcggaaaagaggaaauuacaccccacugcgcccucauggacuguaucauguuugaugccgcugucagcggcgggcugaacauuccugugcugagagccguucucccgcgcgacaugguguuccggaccuccucucccaaggucgugcugugaggacuaguaauaaggaaacuguaugaaugucugugggcaggaagugaagagauccuucuguaaagguuuuuggaauuaugucugcugaauaauaaacuuuuuugaaauaauaaaucugguagaaaaaugagaucucaaaggcucuuuucagagccaccaaaaaaaaaaaaaaaaaaaaaaaaaaaaaaaaaaaaaaaaaaaaaaaaaaaaaaaaaaaaaaaaagaauu

SEQ ID NO: 21508 - RNA, 2069 nt, Artificial Sequence
  mRNA product Design b-4 (hSL-A64-N5) comprising derived and/or modified sequence from LASV(GA391;Clade III)__CAA36646__SP-IgE_NP(2-570) (opt5)
aggagagucccgcagucggcguccagcggcucugcuuguucgugugugugucguugcaggccuuauucaagcuuaccauggacuggaccuggauccuguuccucguggccgcugccacaagaguccacagcagcgccuccaaggaggugagaucuuuccuguggacccagagccuccggcgcgaacuguccggcuacugcucuaacaucaaacuucaagucguuaaggacgcucaggcccugcuccacgggcuggauuuuagcgagguguccaaugugcagagacuuaugcggaaacagaagcgcgacgauggagaccugaaaagacuccgggaucugaaccaagcggucaauaaccugguggaacucaagucuacacagcagaaaagcguucugcgcgugggcacgcuuuccagcgacgaucugcucauucuggcugccgaccuugagaaacugaagucuaaagucaccagaacagaacggccccucuccagcgggguguauaugggaaaucugucuucccagcaacuggaucagcgcagagcccuccugaacaugaucggcaugaccgggguuagcggaggcggcaagggggcuucugacggaauugugcgggucugggaugugaaaaaugccgagcuucugaacaaucaguucggcacaaugccuucccucacccuggcuugucuuacaaagcaggggcaaguggaccugaacgaugccguccaggcgcucaccgaccugggacugaucuacacggccaaguauccgaauagcuccgaccucgaucgccugucucagagccaucccauucuuaacaugaucgacaccaaaaaguccagccugaauaucucuggcuacaacuuuucccucggggcugccguuaaagcuggagccugcaugcuggauggcggcaauaugcuugagacaauuaaggugagcccucaaaccauggacgggauccugaaaucuauucucaaggugaaaaagagccugggaauguucgucuccgauacacccggcgaaagaaacccuuaugagaacauccuguacaagauuugucucucuggggacggauggcccuauaucgcgagccggaccuccauugugggccgcgccugggaaaauacgguuguggaucuggagcaggacaacaaaccucagaagaucgggaauggaggcagcaacaaaucucuucaguccgcuggcuuugccgcugggcugacauacagccaacucaugacccugaaggauuucaaaugcuuuaaucugaucccgaacgccaagacauggauggacauugagggaagacccgaagauccugucgagaucgcccuuuaccagcccucuuccggcuguuaugugcacuucuuucgggaaccuaccgaccucaagcaguucaaacaggacgcuaaguacagccaugggauugauguuaccgaccuguuugcggcccaacccggacugacauccgcugugaucgaggcccucccgagaaauauggucauuacgugccagggcucugaagauauccgcaaacugcuugagagccaggggcggagagacaucaagcugauugauaucacccucuccaaagccgacucucgcaaguucgagaacgcugugugggaucaguuuaaggaccugugucacaugcauacaggcgucgugguugaaaagaagaaacggggaggcaaggaggaaauuaccccucacugcgcccugauggauuguaucauguucgacgcggcugugagcgggggacuugaugccaaaguccucagagugguucugccccgcgacaugguguuccggacauccaccccuaaggucgugcugugaggacuaguaauaaggaaacuguaugaaugucugugggcaggaagugaagagauccuucuguaaagguuuuuggaauuaugucugcugaauaauaaacuuuuuugaaauaauaaaucugguagaaaaaugagaucucaaaggcucuuuucagagccaccaaaaaaaaaaaaaaaaaaaaaaaaaaaaaaaaaaaaaaaaaaaaaaaaaaaaaaaaaaaaaaaaagaauu

SEQ ID NO: 21509 - RNA, 2066 nt, Artificial Sequence
  mRNA product Design b-4 (hSL-A64-N5) comprising derived and/or modified sequence from LASV(AV;Clade V)__CCA30315__SP-IgE_NP(2-569) (opt5)
aggagagucccgcagucggcguccagcggcucugcuuguucgugugugugucguugcaggccuuauucaagcuuaccauggacuggaccuggauccuguuccucguggccgcugccacaagaguccacagcagcgccuccaaggaggugaaaucuuuccuguggacccagagccucagacgggaacuguccggcuacugcucuaacaucaaacuucaagucguuaaggacgcucaggcccugcuccacgggcuggauuuuagcgagguguccaaugugcagcgccuuaugagaaagcagcggcgcgacgauucugaccugaaaagacuccgggaucugaaccaagcggucaauaaccugguggaacucaagagcacacagcagaaguccguucugcgcgugggaacgcuuagcucugacgaucugcucacccuggcugccgaccuugagaaacugaaguccaaagucacaagaaccgaacggccccucagcucuggcguguauauggggaaucuguccagccagcaacuggaucagcgcagagcccuccugaaccuuauuggaaugacaaauggcucucaggggucccaggcuggacgggacggcguugugcgcgucugggaugugaagaacgccgagcugcucaauaaccaauucggcaccaugccuagccugacacuugcuugucugaccaaacagggacagguggaccucaaugaugucguucaagcccugacggaccuggggcucaucuacaccgcgaaguauccgaacacauccgaccuggauagacuuacccagucucaucccauucugaauaugaucgacacaaagaaaagcucccucaacauuagcggcuacaauuuuucucugggggccgcugugaaggccggagcuugcaugcuugauggcgggaacaugcuggagaccaucaaaguguccccucagagcauggacggaauccucaagucuauucugaaagucaagcgggcccugggcauguucgugagcgauacgcccggcgaacgcaacccuuaugagaauauccucuacaaaauuugucuguccggggacggauggcccuauaucgcgucuagaacaagcauuguuggccgggccugggaaaacaccguggucgaucuugagacagacgggaagccucagaagaucggauccggcaauagcaacaaaucucugcaauccgcuggguuuagcgccggacucaccuacucucagcugaugacccugaaggaugcuaugcuucagcucgacccgaaugccaaaacauggauggauauugagggcagacccgaagacccuguggagguugcccuguaccagcccaucuccggcugcuauauccacuucuuucgcgaaccuacggaccugaagcaauucaaacaggaugcuaaguacagccaugggauugacaucgcggaucucuuugccgcucagcccggacugaccuccgccgugauugaggcccuuccgcggaacauggucaucacaugucagggcucugaagacauuaagaaacugcucgagagccaagggagaaaggauaucaaacugaucgacauugcucuguccaagaucgauucucgcaaauucgagaaugccgugugggaccaguauaaggaucuuugccacaugcauaccggagucgugguugaaaagaaaaagcggggcgggaaagaggaaauuacaccucacugugcgcucauggacugcaucauguuugaugcugccgugagcggcggacugaacacccugguccucagagccgugcugccccgcgacaugguuuuccggacguccacaccuagagugguccuuugaggacuaguaauaaggaaacuguaugaaugucugugggcaggaagugaagagauccuucuguaaagguuuuuggaauuaugucugcugaauaauaaacuuuuuugaaauaauaaaucugguagaaaaaugagaucucaaaggcucuuuucagagccaccaaaaaaaaaaaaaaaaaaaaaaaaaaaaaaaaaaaaaaaaaaaaaaaaaaaaaaaaaaaaaaaaagaauu

SEQ ID NO: 21510 - RNA, 2066 nt, Artificial Sequence
  mRNA product Design b-4 (hSL-A64-N5) comprising derived and/or modified sequence from LASV(Togo/2016/7082;Clade VI)__AMR44578__SP-IgE_NP(2-569) (opt5)
aggagagucccgcagucggcguccagcggcucugcuuguucgugugugugucguugcaggccuuauucaagcuuaccauggacuggaccuggauccuguuccucguggccgcugccacaagaguccacagcagcaacuccaaggaggugaaaucuuuccuguggacccagagccucagacgggaacuguccggcuacugcucuaauaucaaacuucaagucguuaaagacgcccaggcucugcuccacgggcuggauuuuagcgagguguccaacgugcagcgccuuaugagaaagcagaaacgggacgauggagaccugaagcgccucagagaucugaaucaagccgucaacaaucugguggaacucaagucuguucagcagaaaagcauucugcgggugggcacacuuacguccgacgaucugcucacccuggcggcugaccuugagaagcugaaaagcaaggucacacgcaccgaaagaccccucucuuccgggguguauaugggaaaccugagcucucagcaacuggaucagcggcgcgcccuccuguccaugaucggcaugagcgggggaaaucagaacucucagccuaaaggcgacggcguugugagagucugggaugugaagaaugccgaccuucugaacaaucaauucgggacaaugccgucccucacccuggcuugucuuacaaagcagggacagguggaucugaacgacgccguccaagcucucaccgaccugggccugauuuacacggccaaauaucccaauagcuccgaucucgaccggcugucucagagccauccuauccuuaacaugauugauaccaagaaauccagccugaauaucucuggguacaacuuuucccucggagcggccaucaagacaggcgcuugcaugcuggacgggggaaacaugcuugagaccauuaaaguuacaccccagaccauggauggcauccucaagagcauucugaaagugaagcgcucucugggcauguucaucagcgacacgccuggggagagaaaucccuaugaaaacauucuguacaagaucugucucuccggagauggcuggccuuauauugccucucggacagcuaucaucgggcgcgccugggagaauaccguggucgaccuggaaagcgauuccaaaccgcagaagauuggaagcaacggcucuaauaaaucccuucaaagcgcgggguuugcccccggacugacauacucucagcucaugacccugaaggacuccaugcugcagcuugauccuaacgcuaaaaccuggaucgacauugagggcagacccgaggacccuguggaaguugcccucuuccagcccaucagcggcugcuacauucacuuuuuccgggagccgacagaucugaagcaauuuaagcaggacgcuaaauauucccaugggaucgaugugacggaccuguucgccgcccagccuggacucaccucugcugucaucgaagcgcugcccagaaauauggugcuuacaugucagggcagcgaugacauuaagaaacugcucgauucccaagggcgccgggacaucaagcugauugauguuucucugaacaaaaucgacagcagaaaguuugagaaugccgugugggaucaguacaaggaccuuugccacaugcauaccggagucguggucgaaaagaagaaaaagggcgggaaagaggagauuacaccucacugugcucuccuggauugcaucauguucgacgccgccguguccggcggacugaacgcuaccguucuccgcgccgugcugccccgggacauggucuuuagaacgagcucucccaaggugguucuuugaggacuaguaauaaggaaacuguaugaaugucugugggcaggaagugaagagauccuucuguaaagguuuuuggaauuaugucugcugaauaauaaacuuuuuugaaauaauaaaucugguagaaaaaugagaucucaaaggcucuuuucagagccaccaaaaaaaaaaaaaaaaaaaaaaaaaaaaaaaaaaaaaaaaaaaaaaaaaaaaaaaaaaaaaaaaagaauu

SEQ ID NO: 21511 - RNA, 2066 nt, Artificial Sequence
  mRNA product Design b-4 (hSL-A64-N5) comprising derived and/or modified sequence from LASV(KAK-428;Clade n.d. (VII))__ANH09741__SP-IgE_NP(2-569) (opt5)
aggagagucccgcagucggcguccagcggcucugcuuguucgugugugugucguugcaggccuuauucaagcuuaccauggacuggaccuggauccuguuccucguggccgcugccacaagaguccacagcagcaacuccaaggaggugaaaucuuuccuguggacccagagccucagacgggaacuguccggcuacugcacaaauaucaaacuucaagucguuaaggacgcccaggcucugcuccacgggcuggauuuuucugaggugagcaacgugcagcgccuuaugagaaagcagaaacgggacgauaaugaccugaagcgccucagagaucugaaccaagccgucaauaaccugguggaacucaaguccguucagcagaaaucugugcugaaggucggaacgcuuaauagcgacgaucugcucacccuggcggcugaccuugagaaacugaaguccaaagugguucggacagaacgcccccucagcucuggcguguauauggggaaccuguccagccagcaacuggaucagagacgggcccuccugaauaugauuggaauggccggcgggucucagggaaaccagccuucccgcgacggcgucgugagagugugggaugucaagaaugcugaccuucugaacaaucaauucggcaccaugccgagccucacacuggccugucuuaccaagcaggggcagguugaucugaacgacguggugcucgcucugacagaccugggacucaucuacaccgccaaauaucccaauucuuccgaucuggaccggcuuagccaaaaccauccuguccugaacaugauugaugugaauaaguccucucucaacaucagcggcuacaauuuuucccugggggcggccguuaaagcuggagccugcaugcuugacggcgggaacaugcuggagacgauuaagaucagcccccagaccguggauggaauccucaaaucuauucugaaggucaaacgcgcucugggcauguucguguccgacacaccuggcgagagaaaucccuaugaaaacauccucuacaagguuugucugagcgggaauggauggccuuauauugccucucggaccagcaucgugggccgcgcgugggagaacacagucguggaucuugaauccaauaagaaccagccgaaagucgggaauaacggaucuaauaagaugcugcagagcuccggcuuugccaccgggcucacguacagccaacugaugacacugagagacucuaugcuucagcucgaucccaccgcuaaaacauggauugacaucgagggacggccugaggaucccguggaacuggcccuguuccagccuuccagcggcugcuacauucacuuuuucagagagcccaccgaccucaagcaguuuaaacaagacgcuaaguauucucauggcaucgauguuaacgaccuguucuccgcccagccggggcuuaccagcgccgugcuggaagcucucccucgcaauaugguccugacaugucagggauccgaugacauccggaagcugcuugauucucaggacagaaaagauauuaagcucaucgacauuagccuguccaaagcggaugcccgcaaguuugagaacgacgugugggaucaauucaaagaccugugccacaugcauacgggcaucguuguggaaaagaagaaaaagggagggaaacaggagaugacaccccacugugcucuccuggauugcauuauguuugacgccgccgucucuggcgggcuuaacgugccuacccugcgggcugugcuccccaccgacaugguuuucagaacaaucaccacgaaggucgugcugugaggacuaguaauaaggaaacuguaugaaugucugugggcaggaagugaagagauccuucuguaaagguuuuuggaauuaugucugcugaauaauaaacuuuuuugaaauaauaaaucugguagaaaaaugagaucucaaaggcucuuuucagagccaccaaaaaaaaaaaaaaaaaaaaaaaaaaaaaaaaaaaaaaaaaaaaaaaaaaaaaaaaaaaaaaaaagaauu

SEQ ID NO: 21512 - RNA, 2066 nt, Artificial Sequence; identical to SEQ ID NO: 21506
  mRNA product Design b-4 (hSL-A64-N5) comprising derived and/or modified sequence from LASV(Pinneo-NIG-1969;Clade I)__AIT17837__SP-IgE_NP(2-569) (opt5)

SEQ ID NO: 21513 - RNA, 2066 nt, Artificial Sequence
  mRNA product Design b-4 (hSL-A64-N5) comprising derived and/or modified sequence from LASV(ISTH0009-NIG-2011;Clade II)__AIT17405__SP-IgE_NP(2-569) (opt5)
aggagagucccgcagucggcguccagcggcucugcuuguucgugugugugucguugcaggccuuauucaagcuuaccauggacuggaccuggauccuguuccucguggccgcugccacaagaguccacagcagcguguccaaggaggucaaaucuuuccuguggacccagagccucagacgggaacuguccggcuacugcucuaacaucaaacuucaaguugugaaggacgcccaggcucugcuccacgggcuggauuuuagcgagguguccaauguccagcgccuuaugagaaagcagaaacgggacgauucugaccugaagcgccucagagaucugaaccaagccgugaauaaccugguugaacucaagagcacacagcagaaauccauucugcgggugggaacgcuuaccagcgacgaucugcucacacuggcggcugaccuugagaagcugaaaucuaaggucauccgcaccgaaagaccccucuccagcggcguguauauggggaaucugucuacacagcaacuggagcagcggcgcgcccuccugaacaugauuggaaugguuggcggggcccagggaacccagccuggcagagauggcgugguccgggugugggacgugaaaaauccggaucuucugaacaaucaauucgggacaaugcccucccucacccuggcuugucuuacgaagcagggacaggucgaccugaacgaugccguucucgcucugaccgaccugggccucaucuacacagccaaguauccuaauagcucugaccuggaucgccuuucccaaagccaucccauucugaacaugguggacaucaaaaaguccucucucaauaucagcggguacaacuuuucccugggagcggccgugaaagcuggcgccugcaugcuugaugggggaaauaugcuggagaccauuaaggucacaccucagaccauggacggcauccucaaaagcauucugaaggugaaaagaucucugggcauguucguuuccgauacgcccggggaacggaacccuuaugagaacauccucuacaagauuugucugagcggagacggcuggccguauaucgcuucucgcacaagcauuguggggagagccugggaaaauaccacagucgaucuugaguccgacggaaagccccagaaagugggcucugcggggagcaacaagucccugcagagcgccggauuuccuaccggccucaccuacucucaacugaugacacugaaagauuccaugaugcagcuugaccccagcgcuaagacguggaucgauaucgagggccggccugaagaccccguugagauugcccucuaccagccgaugucugggugcuauauccacuucuuuagagaaccuaccgaccugaaacaguucaagcaagaugcuaaguacucccauggaauugacguggccgaucuguuucccgcccagccuggccucacaagcgcugucaucgaggcgcugccccgcaauauggugcuuaccugucagggguccgacgauauuaaacggcugcucgacucucagggaagacgcgauaucaagcugaucgacauugcccugagcaaagcugauucccggagauucgaaaacgccgucugggaccaaugcaaggaucuuugucacaugcauacaggcgugguuguggagaaaaagaagcgcgggggcaaagaggaaaucacgccccacugcgcccucauggacuguauuauguaugaugcugccgucucuggaggccugaauaucccugugcugcgggcgguucucccgagagacaugguguuucgcaccagcucccccaaggucgugcugugaggacuaguaauaaggaaacuguaugaaugucugugggcaggaagugaagagauccuucuguaaagguuuuuggaauuaugucugcugaauaauaaacuuuuuugaaauaauaaaucugguagaaaaaugagaucucaaaggcucuuuucagagccaccaaaaaaaaaaaaaaaaaaaaaaaaaaaaaaaaaaaaaaaaaaaaaaaaaaaaaaaaaaaaaaaaagaauu

SEQ ID NO: 21514 - RNA, 2066 nt, Artificial Sequence
  mRNA product Design b-4 (hSL-A64-N5) comprising derived and/or modified sequence from LASV(ISTH2010-NIG-2012;Clade II)__AIT17483__SP-IgE_NP(2-569) (opt5)
aggagagucccgcagucggcguccagcggcucugcuuguucgugugugugucguugcaggccuuauucaagcuuaccauggacuggaccuggauccuguuccucguggccgcugccacaagaguccacagcagcgccuccaaggaggugaaaucuuuccuguggacccagagccucagacgggaacuguccggcuacugcucuaacaucaaacuucaagucguuaaggacgcucaggcccugcuccacgggcuggauuuuagcgagguguccaaugugcagcgccuuaugagaaagcagaaacgggacgauucugaccugaagcgccucagagaucugaaccaagcggucaauaaccugguggaacucaagagcacacagcagaaauccauucugcggguuggaacgcuuaccagcgacgaucugcucacacuggcugccgaccuugagaagcugaaaucuaaggugauccgcaccgaaagaccccucuccagcggcgucuauauggggaaucugucuacacagcaacuggagcagcggcgcgcccuccugaaccuuauuggaauggugggcggggcucagggaacccagccuggcagagauggcguugugcgggucugggacgugaaaaauccggaucugcucaacaaucaauucgggacaaugcccucccugacccuugccugucugacgaagcagggacagguggaccucaacgaugcuguccuggcccugaccgaccucggccugaucuacacagcgaaguauccuaauagcucugaccuugaucgccugucccaaagccaucccauucucaacaugguugacaccaaaaaguccucucugaauaucagcggguuuaacuucucccuuggagccgcugugaaagccggcgcuugcaugcuggaugggggaaauaugcucgagacaaucaaggugaccccucagacgauggacggcauucugaaaagcauccugaaggucaaaaagucucucggcauguuuguguccgauacacccggggaaagaaacccuuacgagaacauucuguauaagaucugucuuagcggagacggcuggccguacauugccucucggaccagcaucguugggcgcgcgugggaaaauacaaccguggaucuggaguccgacggaaaaccccacaaggucggcaccgccgggucuaacaaaagccuccaguccgcuggauucccuacaggccugacguauagccagcugaugacccuuaaggauucuaugaugcaacucgaccccuccgccaaaacauggauugauaucgagggcagaccugaagaccccguggagaucgcucuguaccagccgaugagcgggugcuacauucacuuuuuccgggaaccuaccgaccugaagcaguuuaagcaggaugccaaauauucucauggaaucgacguugccgaucucuuccccgcucaaccuggccugacauccgcggugauugaggcccuucccagaaauaugguccugaccugucaggggagcgacgauaucaagcgccuccuggacucccagggacggagagauauuaaacugaucgacaucgcucuuucuaaggccgauagccgccgguuugaaaacgccgugugggaccagugcaaagaucucugucauaugcacacgggcgucgugguugagaagaagaaaagagggggcaaggaggaaauuacaccccacugcgcucugauggacuguaucauguacgaugccgcgguguccggaggccugaauauuccuguccuccgcgcugugcugccgcgggacaugguuuucagaaccucuagccccaaagugguccuuugaggacuaguaauaaggaaacuguaugaaugucugugggcaggaagugaagagauccuucuguaaagguuuuuggaauuaugucugcugaauaauaaacuuuuuugaaauaauaaaucugguagaaaaaugagaucucaaaggcucuuuucagagccaccaaaaaaaaaaaaaaaaaaaaaaaaaaaaaaaaaaaaaaaaaaaaaaaaaaaaaaaaaaaaaaaaagaauu

SEQ ID NO: 21515 - RNA, 2066 nt, Artificial Sequence
  mRNA product Design b-4 (hSL-A64-N5) comprising derived and/or modified sequence from LASV(Lassa virus/H.sapiens-wt/NGA/2015/ISTH_0543;Clade II)__AVO03640__SP-IgE_NP(2-569) (opt5)
aggagagucccgcagucggcguccagcggcucugcuuguucgugugugugucguugcaggccuuauucaagcuuaccauggacuggaccuggauccuguuccucguggccgcugccacaagaguccacagcagcgccuccaaggaggugaaaucuuuccuguggacccagagccucagacgggaacuguccggcuacugcucuaacaucaaacuucaagucguuaaggacgcucaggcccugcuccacgggcuggauuuuagcgagguguccaaugugcagcgccuuaugagaaagcagaaacgggacgauucugaccugaagcgccucagagaucugaaccaagcggucaauaaccugguggaacucaagagcacacagcagaaauccauucugcggguuggaacgcuuaccagcgacgaucugcucacacuggcugccgaccuugagaagcugaaaucuaaggugauccgcaccgaaagaccccucuccagcggcgucuauauggggaaucugucuacacagcaacuggagcagcggcgcgcccuccugaacaugauuggaauggugggcggggcucagggaacccagccuggcagagauggcguugugcgggucugggacgugaaaaauccggaucuucugaacaaucaauucgggacaaugcccucccucacccuggccugucuuacgaagcagggacagguggaccugaacgaugcuguccucgcccugaccgaccugggccucaucuacacagcgaaguauccuaauagcucugaccuggaucgccuuucccaaagccaucccauucugaacaugguugacaccaaaaaguccucucucaauaucagcggguacaacuuuucccugggagccgcugugaaagccggcgcuugcaugcuugaugggggaaauaugcuggagacaaucaaggugaccccucagacgauggacggcauucucaaaagcauccugaaggucaaaaagucucugggcauguucguguccgauacacccggggaaagaaacccuuaugagaacauucucuacaagaucugucugagcggagacggcuggccguauauugccucucggaccagcaucguugggcgcgcgugggaaaauacaaccguggaucuugaguccgacggaaaaccccagaaggucggcucugccgggagcaacaaaucccugcagagcgcuggauuuccuaccggccucacauacucucaacugaugacgcugaaggauuccaugaugcagcuugaccccagcgccaaaaccuggauugauaucgagggcagaccugaagaccccguggagaucgcucucuaccagccgaugucugggugcuauauucacuucuuucgggaaccuacagaccugaagcaguucaagcaagaugccaaauacucccauggaaucgacguugccgaucuguuucccgcucagccuggccucaccagcgcggugauugaggcccugcccagaaauaugguccuuacaugucagggguccgacgauaucaagcgccugcucgacucucagggacggaaagauauuaagcugaucgacaucgcucugagcaaagccgauuccagacgcuucgaaaacgccgugugggaccaaugcaaggaucuuugucacaugcauaccggcgucgugguugagaagaaaaagagagggggcaaagaggaaauuacgccccacugcgcucucauggacuguaucauguaugaugccgcggugucuggaggccugaauauuccuguccugcgggcugugcucccgcgcgacaugguuuuucggacaagcucccccaaggugguccugugaggacuaguaauaaggaaacuguaugaaugucugugggcaggaagugaagagauccuucuguaaagguuuuuggaauuaugucugcugaauaauaaacuuuuuugaaauaauaaaucugguagaaaaaugagaucucaaaggcucuuuucagagccaccaaaaaaaaaaaaaaaaaaaaaaaaaaaaaaaaaaaaaaaaaaaaaaaaaaaaaaaaaaaaaaaaagaauu

SEQ ID NO: 21516 - RNA, 2066 nt, Artificial Sequence
  mRNA product Design b-4 (hSL-A64-N5) comprising derived and/or modified sequence from LASV(Lassa virus/H.sapiens-wt/NGA/2016/ISTH_0009;Clade II)__AVO03572__SP-IgE_NP(2-569) (opt5)
aggagagucccgcagucggcguccagcggcucugcuuguucgugugugugucguugcaggccuuauucaagcuuaccauggacuggaccuggauccuguuccucguggccgcugccacaagaguccacagcagcgccuccaaggaggugaaaucuuuccuguggacccagagccucagacgggaacuguccggcuacugcucuaacaucaaacuucaagucguuaaggacgcucaggcccugcuccacgggcuggauuuuagcgagguguccaaugugcagcgccuuaugagaaagcagaaacgggacgauucugaccugaagcgccucagagaucugaaccaagcggucaauaaccugguggaacucaagagcacacagcagaaauccauucugcggguuggaacgcuuaccagcgacgaucugcucacacuggcugccgaccuugagaagcugaaaucuaaggugauccgcaccgaaagaccccucuccagcggcgucuauauggggaaucugucuacacagcaacuggagcagcggcgcgcccuccugaacaugauuggaauggugggcggggcucagggaacccagccuggcagagauggcguugugcgggucugggacgugaaaaauccggaucuucugaacaaucaauucgggacaaugcccucccucacccuggccugucuuacgaagcagggacagguggaccugaacgaugcuguccucgcccugaccgaccugggccucaucuacacagcgaaguauccuaauagcucugaccuggaucgccuuucccaaagccaucccauucugaacaugguugacaccaaaaaguccucucucaauaucagcggguacaacuuuucccugggagccgcugugaaagccggcgcuugcaugcuugaugggggaaauaugcuggagacaaucaaggugaccccucagacgauggacggcauucucaaaagcauccugaaggucaaaaagucucugggcauguucguguccgauacacccggggaaagaaacccuuaugagaacauucucuacaagaucugucugagcggagacggcuggccguauauugccucucggaccagcaucguugggcgcgcgugggaaaauacaaccguggaucuugaguccgacggaaaaccccagaaggucggcucugccgggagcaacaaaucccugcagagcgcuggauuuccuaccggccucacauacucucaacugaugacgcugaaggauuccaugaugcagcuugaccccagcgccaaaaccuggauugauaucgagggcagaccugaagaccccguggagaucgcucucuaccagccgaugucugggugcuauauucacuucuuucgggaaccuacagaccugaagcaguucaagcaagaugccaaauacucccauggaaucgacguugccgaucuguuucccgcucagccuggccucaccagcgcggugauugaggcccugcccagaaauaugguccuuacaugucagggguccgacgauaucaagcgccugcucgacucucagggacggagagauauuaaacugaucgacaucgcucugagcaaggccgauucccgccgguucgaaaacgccgugugggaccaaugcaaagaucuuugucacaugcauaccggcgucgugguugagaagaagaaaagagggggcaaggaggaaauuacgccccacugcgcucucauggacuguaucauguaugaugccgcggugucuggaggccugaauauuccuguccugcgcgcugugcucccgcgggacaugguuuuuagaacaagcucccccaaagugguccugugaggacuaguaauaaggaaacuguaugaaugucugugggcaggaagugaagagauccuucuguaaagguuuuuggaauuaugucugcugaauaauaaacuuuuuugaaauaauaaaucugguagaaaaaugagaucucaaaggcucuuuucagagccaccaaaaaaaaaaaaaaaaaaaaaaaaaaaaaaaaaaaaaaaaaaaaaaaaaaaaaaaaaaaaaaaaagaauu

SEQ ID NO: 21517 - RNA, 2066 nt, Artificial Sequence
  mRNA product Design b-4 (hSL-A64-N5) comprising derived and/or modified sequence from LASV(Lassa virus/H.sapiens-wt/NGA/2016/ISTH_0017;Clade II)__AVO03568__SP-IgE_NP(2-569) (opt5)
aggagagucccgcagucggcguccagcggcucugcuuguucgugugugugucguugcaggccuuauucaagcuuaccauggacuggaccuggauccuguuccucguggccgcugccacaagaguccacagcagcgccuccaaggaggugaaaucuuuccuguggacccagagccucagacgggaacuguccggcuacugcucuagcaucaaacuucaagucguuaaggacgcucaggcccugcuccacgggcuggauuuuuccgaggugucuaacgugcagcgccuuaugagaaagcagaaacgggacgauagcgaccugaagcgccucagagaucugaaucaagcggucaacaaucugguggaacucaaguccacacagcagaaaagcauucugcggguuggaacgcuuaccucugacgaucugcucacacuggcugccgaccuugagaagcugaaauccaaggugauccgcaccgaaagaccccucagcucuggcgucuauauggggaaccuguccacacagcaacuggagcagcggcgcgcccuccugaauaugauuggaauggcuggcggggcccagggaacccagccuggcagagauggcgugguucgggugugggacgucaaaaacccggaucuucugaauaaccaauucgggacaaugcccagccucacccuggcuugucuuacgaagcagggacagguggaccugaaugaugccgugcucgcgcugaccgaccugggccucaucuacacagccaaguauccuaacucuuccgaccuggaucgccuuagccaaucccaucccauucugaauauggucgacaccaaaaagucuagccucaacaucuccggguacaauuuuagccugggagcugccguuaaagcuggcgccugcaugcuugaugggggaaacaugcuggagacaaucaaggugaccccucagacgauggacggcauucucaaaucuauccugaaggugaaaagaucccugggcauguucgucagcgaugcgcccggggaacggaauccuuaugagaacauucucuacaagaucugucugucuggagacggcuggccguauauugccagccgcacauccaucguggggagagcuugggaaaacaccacaguugaucuugagucugacggaaagccccagaaagugggcgccaccgggagcaauaagucccugcagagcgcuggauuuccuaccggccucacauacucucaacugaugacgcugaaagauuccaugaugcagcuugaccccagcgccaagaccuggauugauaucgagggccggccugaagaccccgucgagguggcccucuaccagccgguuucugggugcuauauccacuucuuuagagaaccuacagaccugaaacaguucaagcaagaugcuaaguacucccauggaauugacguggcggaucuguuucccgcccagccuggccucaccagcgcugucaucgaggcccugccccgcaacauggugcuuacaugucagggguccgacgauauuaaaaagcugcucgacucucagggacggaaagauaucaagcugauugacaucgcccugagcaaagcugauuccagacgcuucgaaaaugccgucugggaccaaugcaaggaucuuugucacaugcauaccggcgugguuguggagaagaaaaagagagggggcaaagaggaaaucacgccccacugcgcgcucauggacuguauuauguaugaugcugccgucucuggaggccugaacaucccugugcugcgggccguucucccgcgcgacaugguguuucggacaagcucccccaaggucgugcugugaggacuaguaauaaggaaacuguaugaaugucugugggcaggaagugaagagauccuucuguaaagguuuuuggaauuaugucugcugaauaauaaacuuuuuugaaauaauaaaucugguagaaaaaugagaucucaaaggcucuuuucagagccaccaaaaaaaaaaaaaaaaaaaaaaaaaaaaaaaaaaaaaaaaaaaaaaaaaaaaaaaaaaaaaaaaagaauu

SEQ ID NO: 21518 - RNA, 2066 nt, Artificial Sequence
  mRNA product Design b-4 (hSL-A64-N5) comprising derived and/or modified sequence from LASV(Lassa virus/H.sapiens-wt/NGA/2018/ISTH_0959;Clade II)__AVV65100__SP-IgE_NP(2-569) (opt5)
aggagagucccgcagucggcguccagcggcucugcuuguucgugugugugucguugcaggccuuauucaagcuuaccauggacuggaccuggauccuguuccucguggccgcugccacaagaguccacagcagcgccuccaaggaggugaaaucuuuccuguggacccagagccucagacgggaacuguccggcuacugcucuaacaucaaacuucaagucguuaaggacgcucaggcccugcuccacgggcuggauuuuagcgagguguccaaugugcagcgccuuaugagaaagcagaaacgggacgauucugaccugaagcgccucagagaucugaaccaagcggucaauaaccugguggaacucaagagcacccagcagaaauccauucugcggguuggaacgcuuaccagcgacgaucugcucacacuggcugccgaccuugagaagcugaaaucuaaggugauccgcaccgaaagaccccucuccagcggcgucuauauggggaaucugucuacacagcaacuggagcagcggcgcgcccuccugaaccuuauuggaauggugggcggggcucagggaacccagccuggcagagauggcguugugcgggucugggacgugaaaaauccggaucugcucaacaaucaauucgggacaaugcccucccugacccuugccugucugacgaagcagggacagguggaccucaacgaugucguucuggcucugaccgaccucggccugaucuacacagccaaguauccuaauagcucugaccuugaucgccugucccaaagccaucccauucucaacaugguggacaccaaaaaguccucucugaauaucagcggguuuaacuucucccuuggagcggccgugaaagcuggcgccugcaugcuggaugggggaaauaugcucgagacaaucaaggucaccccucagacgauggacggcauucugaaaagcauccugaaggugaaaaagucucucggcauguuuguuuccgauacacccggggaaagaaacccuuacgagaacauucuguauaagaucugucuuagcggagacggcuggccguacauugcuucucggaccagcaucguggggcgcgccugggaaaauacaaccgucgaucuggaguccgacggaaaaccccacaaggugggcaccgcggggucuaacaaaagccuccaguccgccggauucccuacaggccugacguauagccagcugaugacccuuaaggauucuaugaugcaacucgaccccuccgcuaaaacauggauugauaucgagggcagaccugaagaccccguugagaucgcccuguaccagccgaugagcgggugcuacauucacuuuuuccgggaaccuaccgaccugaagcaguuuaagcaggaugcuaaauauucucauggaaucgacguggccgaucucuuccccgcccaaccuggccugacauccgcugucauugaggcgcuucccagaaauauggugcugaccugucaggggagcgacgauaucaagcgccuccuggacucccagggacggaaagauauuaagcugaucgacaucgcccuuucuaaaacggauagcagacgcuuugaaaacgcugucugggaccagugcaaggaucucugucauaugcacacaggcgugguuguggagaagaaaaagagagggggcaaagaggaaauuacaccccacugcgcccugauggacuguaucauguacgaugccgcugucuccggaggccugaauauuccugugcuccgggccguucugccgcgcgacaugguguuccggaccucuagccccaaggucgugcuuugaggacuaguaauaaggaaacuguaugaaugucugugggcaggaagugaagagauccuucuguaaagguuuuuggaauuaugucugcugaauaauaaacuuuuuugaaauaauaaaucugguagaaaaaugagaucucaaaggcucuuuucagagccaccaaaaaaaaaaaaaaaaaaaaaaaaaaaaaaaaaaaaaaaaaaaaaaaaaaaaaaaaaaaaaaaaagaauu

SEQ ID NO: 21519 - RNA, 2066 nt, Artificial Sequence
  mRNA product Design b-4 (hSL-A64-N5) comprising derived and/or modified sequence from LASV(LASV003-NIG-2008;Clade II)__AIT17581__SP-IgE_NP(2-569) (opt5)
aggagagucccgcagucggcguccagcggcucugcuuguucgugugugugucguugcaggccuuauucaagcuuaccauggacuggaccuggauccuguuccucguggccgcugccacaagaguccacagcagcgccuccaaggaggugaaaucuuuccuguggacccagagccucagacgggaacuguccggcuacugcucuagcaucaaacuucaagucguuaaggacgcucaggcccugcuccacgggcuggauuuuuccgaggugucuaacgugcagcgccuuaugagaaagcagaaacgggacgauagcgaccugaagcgccucagagaucugaaucaagcggucaacaaucugguggaacucaaguccacccagcagaaaagcguucugcgggugggaacgcuuaccucugacgaucugcucacacuggcugccgaccuugagaagcugaaauccaaggucauucgcaccgaaagaccccucagcucuggcguguauauggggaaccuguccgcccagcaacuggagcagcggcgcacacuccugaauaugaucggaaugguuggcggggcucagggaacccagccuggcagagauggcgugguccgggugugggacgugaaaaacccggaucuucugaauaaccaauucgggacaaugcccagccucacccuggccugucuuacgaagcagggacaggucgaccugaaugauguugugcucgcucugaccgaccugggccucauuuacacagccaaguauccuaacucuuccgaccuggaucgccuuagccaaucccaucccauccugucuaugguggacaccaaaaagagcucccucaauauuagcggguacaacuuuucucugggagcggccgucaaagcuggcgccugcaugcuugaugggggaaauaugcuggagacaaucaaggugaccccucagacgauggacggcauccucaaauccauucugaagguuaaaaagagccugggcauguucgugucugauacacccggggaaagaaacccuuaugagaauauccucuacaagauuugucugagcggagacggcuggccguauaucgcuucccggaccucuauugucgggcgcgccugggaaaacacaaccguggaucuugagagcgacggaaaaccccagaagguuggcaccgcgggguccaacaaaagccugcagucugccggauuuccuacaggccucacguacucccaacugaugacccugaaggauagcaugaugcagcuugaccccucugcuaaaacauggaucgauauugagggcagaccugaagaccccguggagaucgcccucuaccagccgauguccgggugcuauauccacuucuuucgggaaccuaccgaccugaagcaguucaagcaagaugcuaaauacagccauggaauugacgucacagaucuguuucccgcccagccuggccucaccuccgccgugaucgaggcucugcccagaaauaugguccuuacgugucaggggucugacgauauuaagcgccugcucgacagccagggacggagagauaucaaacugauugacaucgcgcuguccaaggccgauucucgccgguucgaaaacgcugugugggaccaaugcaaagaucuuugucacaugcauacaggcguuguggucgagaagaagaaaagagggggcaaggaggaaaucacaccccacugcgcccucauggacuguauuauguaugaugccgcugugagcggaggccugaauaucccuguucugcgcgccgugcucccgcgggacauggucuuuagaaccuccagccccaaaguggugcugugaggacuaguaauaaggaaacuguaugaaugucugugggcaggaagugaagagauccuucuguaaagguuuuuggaauuaugucugcugaauaauaaacuuuuuugaaauaauaaaucugguagaaaaaugagaucucaaaggcucuuuucagagccaccaaaaaaaaaaaaaaaaaaaaaaaaaaaaaaaaaaaaaaaaaaaaaaaaaaaaaaaaaaaaaaaaagaauu

SEQ ID NO: 21520 - RNA, 2066 nt, Artificial Sequence
  mRNA product Design b-4 (hSL-A64-N5) comprising derived and/or modified sequence from LASV(LASV035-NIG-2009;Clade II)__AIT17589__SP-IgE_NP(2-569) (opt5)
aggagagucccgcagucggcguccagcggcucugcuuguucgugugugugucguugcaggccuuauucaagcuuaccauggacuggaccuggauccuguuccucguggccgcugccacaagaguccacagcagcgccuccaaggaggugaaaucuuuccuguggacccagagccucagacgggaacuguccggcuacugcucuagcaucaaacuucaagucguuaaagacgcucaggcccugcuccacgggcuggauuuuuccgaggugucuaacgugcagcgccuuaugagaaagcagaaacgggacgauagcgaccugaagcgccucagagaucugaaucaagcggucaacaaucugguggaacucaaguccacacagcagaaaagcauucugcggguuggaacgcuuaccucugacgaucugcucacacuggcugccgaccuugagaagcugaaauccaaggugauccgcaccgaaagaccccucagcucuggcgucuauauggggaaccuguccgcccagcaacuggagcagcggcgcgcucuccugaauaugauuggaauggugggcggggcccagggaacacagccuggcagagauggcguugugcgggucugggacgugaaaaacccggaucuucugaauaaccaauucgggaccaugcccagccucacacuggcuugucuuaccaagcagggacagguggaccugaaugaugccguccucgcgcugacggaccugggccucaucuacaccgccaaguauccuaacucuuccgaccuggaucgccuuagccaaucccaucccauucugaauaugguugacacaaagaagucuagccucaacaucuccggguacaauuuuagccugggagcugccgugaaagcuggcgccugcaugcuugaugggggaaacaugcuggagaccaucaaggugacaccucagaccauggacggcauucucaaaucuauccugaaggucaaaagaucccugggcauguucgugagcgauacgcccggggaacggaauccuuaugagaacauucucuacaagaucugucugucuggagacggcuggccguauauugcgagccgcacauccaucguugggagagccugggaaaacaccacaguggaucuugagucugacggaaagccccagaaagucggcaccaccgggagcaauaagucccugcagagcgcuggauuuccuacaggccucacguacucucaacugaugacccugaaagauuccaugaugcagcuugaccccagcgccaagacauggauugauaucgagggccggccugaagaccccguggagaucgcucucuaccagccgaugucugggugcuauauucacuucuuuagagaaccuaccgaccugaaacaguucaagcaagaugccaaguacucccauggaaucgacguugccgaucuguuucccgcucagccuggccucacaagcgcggugauugaggcccugccccgcaacaugguccuuaccugucagggguccgacgauaucaaaaagcugcucgacucucagggacggagagauauuaaacugaucgacaucgcucugagcaaggccgauucccgcaaauucgaaaaugccgugugggaccaaugcaaggaucuuugucacaugcauacgggcgucgugguugagaagaaaaagagagggggcaaagaggaaauuacaccccacugcgcucucauggacuguaucauguaugaugccgcggugucuggaggccugaacauuccuguccugcgggcugugcucccgcgcgacaugguuuuucggaccagcucccccaaggugguccugugaggacuaguaauaaggaaacuguaugaaugucugugggcaggaagugaagagauccuucuguaaagguuuuuggaauuaugucugcugaauaauaaacuuuuuugaaauaauaaaucugguagaaaaaugagaucucaaaggcucuuuucagagccaccaaaaaaaaaaaaaaaaaaaaaaaaaaaaaaaaaaaaaaaaaaaaaaaaaaaaaaaaaaaaaaaaagaauu

SEQ ID NO: 21521 - RNA, 2066 nt, Artificial Sequence
  mRNA product Design b-4 (hSL-A64-N5) comprising derived and/or modified sequence from LASV(LASV1000-NIG-2009;Clade II)__AIT17783__SP-IgE_NP(2-569) (opt5)
aggagagucccgcagucggcguccagcggcucugcuuguucgugugugugucguugcaggccuuauucaagcuuaccauggacuggaccuggauccuguuccucguggccgcugccacaagaguccacagcagcgccuccaaggaggugaaaucuuuccuguggacccagagccucagacgggaacuguccggcuacugcucuaacaucaaacuucaagucguuaaggacgcucaggcccugcuccacgggcuggauuuuagcgagguguccaaugugcagcgccuuaugagaaagcagaaacgggacgauucugaccugaagcgccucagagaucugaaccaagcggucaauaaccugguggaacucaagagcacacagcagaaauccauucugcggguuggaacgcuuaccagcgacgaucugcucacacuggcugccgaccuugagaagcugaaaucuaaggugauccgcaccgaaagaccccucuccagcggcgucuauauggggaaucugucuacacagcaacuggagcagcggcgcgcccuccugaacaugauuggaauggugggcggggcucagggaacccagccuggcagagauggcguugugcgggucugggacgugaaaaauccggaucuucugaacaaucaauucgggacaaugcccucccucacccuggccugucuuacgaagcagggacagguggaccugaacgaugucguucucgcucugaccgaccugggccucaucuacacagccaaguauccuaauagcucugaccuggaucgccuuucccaaagccaucccauucugaacaugguggacaccaaaaaguccucucucaauaucagcggguacaacuuuucccugggagcggccgugaaagcuggcgccugcaugcuugaugggggaaauaugcuggagacaaucaaggucaccccucagacgauggacggcauucucaaaagcauccugaaggugaaaaagucucugggcauguucguuuccgauacacccggggaaagaaacccuuaugagaacauucucuacaagaucugucugagcggagacggcuggccguauauugcuucucggaccagcaucguggggcgcgccugggaaaauacaaccgucgaucuugaguccgacggaaaaccccagaaggugggcaccgcggggucuaacaaaagccugcaguccgccggauuuccuacaggccucacguacagccaacugaugacccugaaggauucuaugaugcagcuugaccccuccgcuaaaacauggauugauaucgagggcagaccugaagaccccguugagaucgcccucuaccagccggugagcgggugcuauauucacuucuuucgggaaccuaccgaccugaagcaguucaagcaagaugcuaaauacucucauggaaucgacgucgccgaucuguuucccgcccagccuggccucacauccgcugugauugaggcgcugcccagaaauaugguccuuaccugucaggggagcgacgauaucaagcgccugcucgacucccagggacggagagauauuaaacugaucgacaucgcccugucuaaggcugauagccgccgguucgaaaacgccgugugggaccaaugcaaagaucuuugucacaugcauacgggcguuguggucgagaagaagaaaagagggggcaaggaggaaauuacaccccacugcgcccucauggacuguaucauguaugaugcugccguguccggaggccugaauauuccuguucugcgcgcggugcucccgcgggacauggucuuuagaaccucuagccccaaaguggugcugugaggacuaguaauaaggaaacuguaugaaugucugugggcaggaagugaagagauccuucuguaaagguuuuuggaauuaugucugcugaauaauaaacuuuuuugaaauaauaaaucugguagaaaaaugagaucucaaaggcucuuuucagagccaccaaaaaaaaaaaaaaaaaaaaaaaaaaaaaaaaaaaaaaaaaaaaaaaaaaaaaaaaaaaaaaaaagaauu

SEQ ID NO: 21522 - RNA, 2066 nt, Artificial Sequence
  mRNA product Design b-4 (hSL-A64-N5) comprising derived and/or modified sequence from LASV(LASV221-NIG-2010;Clade II)__AIT17625__SP-IgE_NP(2-569) (opt5)
aggagagucccgcagucggcguccagcggcucugcuuguucgugugugugucguugcaggccuuauucaagcuuaccauggacuggaccuggauccuguuccucguggccgcugccacaagaguccacagcagcgccuccaaggaggugaaaucuuuccuguggacccagagccucagacgggaacuguccggcuacugcucuagcaucaaacuucaagucguuaaggacgcucaggcccugcuccacgggcuggauuuuuccgaggugucuaacgugcagcgccuuaugagaaagcagcggcgcgacgauagcgaccugaaaagacuccgggaucugaaucaagcggucaacaaucugguggaacucaaguccacacagcaaaagagcauucugcgcguuggaacgcuuaccucugacgaucugcucacacuggcugccgaccuugagaaacugaaguccaaagugaucagaaccgaacggccccucagcucuggcgucuauauggggaaccuguccacacagcagcuggagcagcgcagagcccuccugaauaugauuggaauggugggcggggcucagggaacccagccuggccgggauggcguugugcgcgucugggacgugaagaacccggaucuucugaauaaccaauucgggacaaugcccagccucacccuggccugucuuacgaaacagggacagguggaccugaaugaugcuguccucgcccugaccgaccugggccucaucuacacagcgaaguauccuaacucuuccgaccuggauagacuuagccaaucccaucccauucugaauaugguugacaccaagaaaucuagccucaacaucuccggguacaauuuuagccugggagccgcugugaaggccggcgcuugcaugcuugaugggggaaacaugcuggagacaaucaaagugaccccucagacggucgacggcauucucaagucuauccugaaagugaagcggucccugggcauguucguuagcgauacacccggggaacgcaauccuuaugagaacauucucuacaaaaucugucugucuggagacggcuggccguauauugccagcagaaccuccaucguggggcgggcgugggaaaacacaaccgucgaucuugagucugacggaaagccccagaaggugggcaccgccgggagcaauaaaucccugcagagcgcuggauuuccuacaggccucacguacucucaacugaugacccugaaggauuccaugaugcagcuugaccccagcgccaaaacauggauugauaucgagggcagaccugaagaccccguugagaucgcucucuaccagccgaugucugggugcuauauucacuucuuucgcgaaccuaccgaccugaagcaguucaaacaagaugccaaguacucccauggaaucgacguggccgaucuguuucccgcucagccuggccucacaagcgcggucauugaggcccugccccggaacauggugcuuaccugucagggguccgacgauaucaagagacugcucgacucucagggacgccgggauauuaaacugaucgacaucgcucugagcaaggccgauuccagaaaauucgaaaaugccgucugggaccaaugcaaggaucuuugucacaugcauacgggcgugguuguggagaaaaagaagcgcgggggcaaagaggaaauuacaccccacugcgcucucauggacuguaucauguaugaugccgcggucucuggaggccugaacauuccugugcugcgggcuguucucccgagagacaugguguuucgcaccagcucccccaaggucgugcugugaggacuaguaauaaggaaacuguaugaaugucugugggcaggaagugaagagauccuucuguaaagguuuuuggaauuaugucugcugaauaauaaacuuuuuugaaauaauaaaucugguagaaaaaugagaucucaaaggcucuuuucagagccaccaaaaaaaaaaaaaaaaaaaaaaaaaaaaaaaaaaaaaaaaaaaaaaaaaaaaaaaaaaaaaaaaagaauu

SEQ ID NO: 21523 - RNA, 2066 nt, Artificial Sequence
  mRNA product Design b-4 (hSL-A64-N5) comprising derived and/or modified sequence from LASV(LASV237-NIG-2010;Clade II)__AIT17639__SP-IgE_NP(2-569) (opt5)
aggagagucccgcagucggcguccagcggcucugcuuguucgugugugugucguugcaggccuuauucaagcuuaccauggacuggaccuggauccuguuccucguggccgcugccacaagaguccacagcagcgccuccaaggaggugaaaucuuuccuguggacccagagccucagacgggaacuguccggcuacugcucuaacaucaaacuucaagucguuaaggacgcucaggcccugcuccacgggcuggauuuuagcgagguguccaaugugcagcgccuuaugagaaagcagaaacgggacgauucugaccugaagcgccucagagaucugaaccaagcggucaauaaccugguggaacucaagagcacacagcagaaauccauucugcggguuggaacgcuuaccagcgacgaucugcucacacuggcugccgaccuugagaagcugaaaucuaaggugauccgcaccgaaagaccccucuccagcggcgucuauauggggaaucugucuacacagcaacuggagcagcggcgcgcccuccugaacaugauuggaauggugggcggggcucagggaacccagccuggcagagauggcguugugcgggucugggacgugaaaaauccggaucuucugaacaaucaauucgggacaaugcccucccucacccuggccugucuuacgaagcagggacagguggaccugaacgaugcuguccucgcccugaccgaccugggccucaucuacacagcgaaguauccuaauagcucugaccuggaucgccuuucccaaagccaucccauucugaacaugguugacaucaaaaaguccucucucaauaucagcggguacaacuuuucccugggagccgcugugaaagccggcgcuugcaugcuugaugggggaaauaugcuggagaccauuaaggugacaccucagaccauggacggcauccucaaaagcauucugaaggucaaaagaucucugggcauguucguguccgauacgcccggggaacggaacccuuaugagaacauccucuacaagauuugucugagcggagacggcuggccguauaucgccucucgcacaagcauuguugggagagcgugggaaaauaccacaguggaucuugaguccgacggaaagccccagaaagucggcucugccgggagcaacaagucccugcagagcgcuggauuuccuaccggccucaccuacucucaacugaugacacugaaagauuccaugaugcagcuugaccccagcgccaagacguggaucgauaucgagggccggccugaagaccccguggagauugcucucuaccagccgaugucugggugcuauauccacuucuuuagagaaccuaccgaccugaaacaguucaagcaagaugccaaguacucccauggaauugacguugccgaucuguuucccgcucagccuggccucacaagcgcggugaucgaggcccugccccgcaauaugguccuuaccugucagggguccgacgauauuaaacggcugcucgacucucagggaagacgcgauaucaagcugaucgacauugcucugagcaaagccgauucccggagauucgaaaacgccgugugggaccaaugcaaggaucuuugucacaugcauacaggcgucgugguugagaaaaagaagcgcgggggcaaagaggaaaucacgccccacugcgcucucauggacuguauuauguaugaugccgcggugucuggaggccugaauaucccuguccugcgggcugugcucccgagagacaugguuuuucgcaccagcucccccaaggugguccugugaggacuaguaauaaggaaacuguaugaaugucugugggcaggaagugaagagauccuucuguaaagguuuuuggaauuaugucugcugaauaauaaacuuuuuugaaauaauaaaucugguagaaaaaugagaucucaaaggcucuuuucagagccaccaaaaaaaaaaaaaaaaaaaaaaaaaaaaaaaaaaaaaaaaaaaaaaaaaaaaaaaaaaaaaaaaagaauu

SEQ ID NO: 21524 - RNA, 2066 nt, Artificial Sequence
  mRNA product Design b-4 (hSL-A64-N5) comprising derived and/or modified sequence from LASV(LASV253-NIG-2011;Clade II)__AIT17671__SP-IgE_NP(2-569) (opt5)
aggagagucccgcagucggcguccagcggcucugcuuguucgugugugugucguugcaggccuuauucaagcuuaccauggacuggaccuggauccuguuccucguggccgcugccacaagaguccacagcagcgccuccaaggaggugaaaucuuuccuguggacccagagccucagacgggaacuguccggcuacugcucuagcaucaaacuucaagucguuaaggacgcucaggcccugcuccacgggcuggauuuuuccgaggugucuaacgugcagcgccuuaugagaaagcagaaacgggacgauagcgaccugaagcgccucagagaucugaaucaagcggucaacaaucugguggaacucaaguccacccagcagaaaagcguucugcgggugggaacgcuuaccucugacgaucugcucacacuggcugccgaccuugagaagcugaaauccaaggucauucgcaccgaaagaccccucagcucuggcguguauauggggaaccuguccacacagcaacuggagcagcggcgcgcccuccugaauaugaucggaaugguuggcggggcucagggaacccagccuggcagagauggcgugguccgggugugggacgugaaaaacccggaucuucugaauaaccaauucgggacaaugcccagccucacccuggccugucuuacgaagcagggacaggucgaccugaaugauguugugcucgcucugaccgaccugggccucauuuacacagccaaguauccuaacucuuccgaccuggaucgccuuagccaaucccaucccauccugaauaugguggacaccaaaaagucuagccucaacauuuccggguacaauuuuagccugggagcggccgucaaagcuggcgccugcaugcuugaugggggaaacaugcuggagacaaucaaggugaccccucagacgauggacggcauccucaaaucuauucugaagguuaaaaagucccugggcauguucgugagcgauacacccggggaaagaaauccuuaugagaacauccucuacaagauuugucugucuggagacggcuggccguauaucgcuagccggaccuccauugucgggcgcgccugggaaaacacaaccguggaucuugagucugacggaaaaccccagaagguuggcaccgcggggagcaauaaaucccugcagagcgccggauuuccuacaggccucacguacucucaacugaugacccugaaggauuccaugaugcagcuugaccccagcgcuaaaacauggaucgauauugagggcagaccugaagaccccguggagaucgcccucuaccagccgaugucugggugcuauauccacuucuuucgggaaccuaccgaccugaagcaguucaagcaagaugcuaaauacucccauggaauugacgucacagaucuguuucccgcccagccuggccucaccagcgccgugaucgaggcucugcccagaaacaugguccuuacgugucagggguccgacgauauuaagcgccugcucgacucucagggacggagagauaucaaacugauugacaucgcgcugagcaaggccgauucccgccgguucgaaaaugcugugugggaccaaugcaaagaucuuugucacaugcauacaggcguuguggucgagaagaagaaaagagggggcaaggaggaaaucacaccccacugcgcccucauggacuguauuauguaugaugccgcugugucuggaggccugaacaucccuguucugcgcgccgugcucccgcgggacauggucuuuagaaccagcucccccaaaguggugcugugaggacuaguaauaaggaaacuguaugaaugucugugggcaggaagugaagagauccuucuguaaagguuuuuggaauuaugucugcugaauaauaaacuuuuuugaaauaauaaaucugguagaaaaaugagaucucaaaggcucuuuucagagccaccaaaaaaaaaaaaaaaaaaaaaaaaaaaaaaaaaaaaaaaaaaaaaaaaaaaaaaaaaaaaaaaaagaauu

SEQ ID NO: 21525 - RNA, 2066 nt, Artificial Sequence
  mRNA product Design b-4 (hSL-A64-N5) comprising derived and/or modified sequence from LASV(LASV254-NIG-2011;Clade II)__AIT17675__SP-IgE_NP(2-569) (opt5)
aggagagucccgcagucggcguccagcggcucugcuuguucgugugugugucguugcaggccuuauucaagcuuaccauggacuggaccuggauccuguuccucguggccgcugccacaagaguccacagcagcgccuccaaggaggugaaaucuuuccuguggacccagagccucagacgggaacuguccggcuacugcucuagcaucaaacuucaagucguuaaggacgcucaggcccugcuccacgggcuggauuuuuccgaggugucuaacgugcagcgccuuaugagaaagcagaaacgggacgauagcgaccugaagcgccucagagaucugaaucaagcggucaacaaucugguggaacucaaguccacacagcagaaaagcguucugcgggugggaacgcuuaccucugacgaucugcucacacuggcugccgaccuugagaagcugaaauccaaggucauucgcaccgaaagaccccucagcucuggcguguauauggggaaccuguccacacagcaacuggagcagcggcgcgcccuccugaauaugaucggaaugguuggcggggcucagggaacccagccuggcagagauggcgugguccgggugugggacgugaaaaacccggaucuucugaauaaccaauucgggacaaugcccagccucacccuggccugucuuacgaagcagggacaggucgaccugaaugaugcuguucucgcccugaccgaccugggccucauuuacacagcgaaguauccuaacucuuccgaccuggaucgccuuagccaaucccaucccauccugaauaugguggacaccaaaaagucuagccucaacauuuccggguacaauuuuagccugggagccgcugugaaagccggcgcuugcaugcuugaugggggaaacaugcuggagacaaucaaggucaccccucagacgauggacggcauccucaaaucuauucugaaggugaaaaagucccugggcauguucguuagcgauacacccggggaaagaaauccuuaugagaacauccucuacaagauuugucugucuggagacggcuggccguauaucgccagccggaccuccauuguggggcgcgcgugggaaaacacaaucgucgaucuugagucugacggaaaaccccagaaggugggcaccgccgggagcaauaaaucccugcagagcgcuggauuuccuaccggccucacauacucucaacugaugacgcugaaggauuccaugaugcagcuugaccccagcgccaaaaccuggauugauaucgagggcagaccugaagaccccguugagaucgcucucuaccagccgaugucugggugcuauauucacuucuuucgggaaccuacagaccugaagcaguucaagcaagaugccaaauacucccauggaaucgacguggccgaucuguuucccgcucagccuggccucaccagcgcggucauugaggcccugcccagaaacauggugcuuacaugucagggguccgacgauaucaagcgccugcucgacucucagggacggagagauauuaaacugaucgacaucgcucugagcaaggccgauucccgccgguucgaaaaugccgucugggaccaaugcaaagaucuuugucacaugcauaccggcgugguuguggagaagaagaaaagagggggcaaggaggaaauuacgccccacugcgcucucauggacuguaucauguaugaugccgcggucucuggaggccugaacauuccugugcugcgcgcuguucucccgcgggacaugguguuuagaacaagcucccccaaagucgugcugugaggacuaguaauaaggaaacuguaugaaugucugugggcaggaagugaagagauccuucuguaaagguuuuuggaauuaugucugcugaauaauaaacuuuuuugaaauaauaaaucugguagaaaaaugagaucucaaaggcucuuuucagagccaccaaaaaaaaaaaaaaaaaaaaaaaaaaaaaaaaaaaaaaaaaaaaaaaaaaaaaaaaaaaaaaaaagaauu

SEQ ID NO: 21526 - RNA, 2066 nt, Artificial Sequence
  mRNA product Design b-4 (hSL-A64-N5) comprising derived and/or modified sequence from LASV(Nig08-04;Clade II)__ADU56611__SP-IgE_NP(2-569) (opt5)
aggagagucccgcagucggcguccagcggcucugcuuguucgugugugugucguugcaggccuuauucaagcuuaccauggacuggaccuggauccuguuccucguggccgcugccacaagaguccacagcagcgccuccaaggaggugaaaucuuuccuguggacccagagccucagacgggaacuguccggcuacugcucuaacaucaaacuucaagucguuaaggacgcucaggcccugcuccacgggcuggauuuuagcgagguguccaaugugcagcgccuuaugagaaagcagaaacgggacgauggagaccugaagcgccucagagaucugaaccaagcggucaauaaccugguggaacucaagucuacccagcagaaaagcguucugcgggugggcacgcuuaccuccgacgaucugcucacacuggcugccgaccuugagaagcugaaaagcaaggucauucgcaccgaaagaccccucucuuccgggguguauaugggaaaucugagcacacagcaacuggagcagcggaaagcccuccugucuaugaucggcaugguugggggagcucagggcacccagccuggccgcgaugggguggucagagugugggacgugaagaacccggaucuucugaauaaccaauucggaacaaugcccucccucacccuggccugucuuacgaagcagggccaggucgaccugaaugaugcuguucucgcccugaccgaccuggggcucauuuacacagcgaaauauccuaacagcucugaccuggaucggcuuucccaaagccaucccauccugaauaugguggacaccaagaaauccucucucaacauuagcggauacaauuuuucccugggcgccgcugugaaggccggggcuugcaugcuugauggaggcaacaugcuggagacaaucaaagucaccccucagacgauggacggcauccucaagagcauucugaaagugaagcgcucucuggggauguucguuuccgauacacccggagaaagaaauccuuaugagaacauccucuacaagauuugucugagcggcgacggguggccguauaucgccucucggaccagcauugugggacgcgcgugggaaaacacaaccgucgaucuugaguccgacggcaaaccccagaagguggggaccgccggaucuaauaaaagccugcaguccgcuggcuuuccuacaggccucacguacagccaacugaugacccugaaggauucuaugaugcagcuugaccccuccgccaaaacauggaucgauauugaggggagaccugaagaccccguugagaucgcucucuaccagccgaugagcggaugcuauauccacuucuuucgggaaccuaccgaccugaagcaguucaagcaagaugccaaauacucucauggcauugacgugacagaucuguuuuccgcccagcccgggcucaccagcgcugucaucgaggcgcugccuagaaacauggugcuuacgugucagggauccgacgauauuaagaaacugcucgacucucagggccgccgggauaucaagcugauugacaucagccugaauaaagccgauuccagacgcuucgaaaacgcugucugggaccaaugcaaggaucuuugucacaugcauacaggggugguuguggagaagaaaaagcggggcggaaaagaggaaaucacaccccacugcgcccucauggacuguauuauguuugaugccgcugucucuggcgggcugaauauccccauucugagagccgugcucccucgcgacaugguuuuccggaccagcuccccgaaggugguccugugaggacuaguaauaaggaaacuguaugaaugucugugggcaggaagugaagagauccuucuguaaagguuuuuggaauuaugucugcugaauaauaaacuuuuuugaaauaauaaaucugguagaaaaaugagaucucaaaggcucuuuucagagccaccaaaaaaaaaaaaaaaaaaaaaaaaaaaaaaaaaaaaaaaaaaaaaaaaaaaaaaaaaaaaaaaaagaauu

SEQ ID NO: 21527 - RNA, 2069 nt, Artificial Sequence
  mRNA product Design b-4 (hSL-A64-N5) comprising derived and/or modified sequence from LASV(GA391;Clade III)__AAA46284__SP-IgE_NP(2-570) (opt5)
aggagagucccgcagucggcguccagcggcucugcuuguucgugugugugucguugcaggccuuauucaagcuuaccauggacuggaccuggauccuguuccucguggccgcugccacaagaguccacagcagcgccuccaaggaggugagaucuugccuguggacccagagccuccggcgcgaacuguccggcuacuguucuaacaucaaacuucaagucguuaaggacgcucaggcccugcuccacgggcuggauuucagcgagguguccaaugugcagagacuuaugcggaaacagaagcgcgacgauggagaccugaaaagacuccgggaucugaaccaagcggucaauaaccugguggaacucaagucuacacagcagaaaagcguucugcgcgugggcacgcuuuccagcgacgaucugcucauucuggcugccgaccuugagaaacugaagucuaaagucaccagaacagaacggccccucuccagcgggguguauaugggaaaucugucuucccagcaacuggaucagcgcagagcccuccugaacaugaucggcaugaccgggguuagcggaggcggcaagggggcuucuaauggaauugugcgggucugggacgugaaaaacgccgagcuucugaauaaccaguuuggcacaaugccuucccucacccuggcuugccuuacaaagcaggggcaaguggaucugaaugacgccguccaggcgcucaccgaucugggacugaucuacacggccaaguauccgaacagcuccgaccucgaccgccugucucagagccaucccauucuuaauaugaucgauaccaaaaaguccagccugaacaucucuggcuacaauuucucccucggggcugccguuaaagcuggagccuguaugcuggacggcggcaacaugcuugagacaauuaaggugagcccucaaaccauggaugggauccugaaaucuauucucaaggugaaaaagagccugggaauguuugucuccgacacacccggcgaaagaaacccuuaugagaauauccuguacaagauuugccucucuggggauggauggagcuauaucgcgucccggaccagcauugugggccgcgccugggaaaacacgguuguggaccuggagcaggauaauaaaccccagaagaucgggaacggaggcucuaauaaaucccuucagagcgcuggcuucgccgcugggcugaucuacucucaacucaugacacugaaggacuuuaaauguuucaaccugauuccuaaugccaagaccuggauggauaucgagggaagaccggaagaccccgucgagauugcccuuuaccagccuuccagcggcugcuaugugcacuuuuuccgggaacccacagaucucaagcaguuuaaacaggacgcuaaguacucccaugggagagacguuaccgaucuguucgcggcccaaccuggacugaccucugcugugaucgaggcccucccccgcaacauggucauuacaugucagggcagcgaagacauccggaaacugcuugagucccaggggagacgcgauaucaagcugauugacaucacgcucucuaaagccgauagccggaaguuugagaaugcugugugggaccaguucaaggaucugugccacaugcauaccggcgucgugguugaaaagaagaaaagaggaggcaaggaggaaauuacaccgcacugugcccugauggacugcaucauguuugaugcggcuguguccgggggacuugacgccaaaguccuccgcgugguucugccucgggauaugguguucagaaccagcacacccaaggucgugcugugaggacuaguaauaaggaaacuguaugaaugucugugggcaggaagugaagagauccuucuguaaagguuuuuggaauuaugucugcugaauaauaaacuuuuuugaaauaauaaaucugguagaaaaaugagaucucaaaggcucuuuucagagccaccaaaaaaaaaaaaaaaaaaaaaaaaaaaaaaaaaaaaaaaaaaaaaaaaaaaaaaaaaaaaaaaaagaauu

SEQ ID NO: 21528 - RNA, 2066 nt, Artificial Sequence
  mRNA product Design b-4 (hSL-A64-N5) comprising derived and/or modified sequence from LASV(Nig08-A19;Clade III)__ADU56619__SP-IgE_NP(2-569) (opt5)
aggagagucccgcagucggcguccagcggcucugcuuguucgugugugugucguugcaggccuuauucaagcuuaccauggacuggaccuggauccuguuccucguggccgcugccacaagaguccacagcagcgccuccaaggaggugaaaucuuuccuguggacccagagccucagacgggaacuguccggcuacugcucuaacaucaaacuucaagucguuaaggacgcucaggcccugcuccacgggcuggauuuuagcgagguguccaaugugcagcgccuuaugagaaagcagaaacgggacgauggagaccugaagcgccucagagaucugaaccaagcggucaauaaccugguggaacucaagucuacacagcagaaaagcguucugcgggugggcacgcuuuccagcgacgaucugcucguccuggcugccgaccuugagaagcugaaaucuaaggugguucgcaccgaaagaccccucuccagcgggauuuauaugggaaaucugucuucccagcaacuggaucagcggaaagcccuccugaacaugaucggcaugacagggggaaauggcggccgcaacaccacaagcgacgggauugugagagucugggaugugaagaaugcugagcuucugaacaaucaguucggaaccaugccuucucucacacuggccugucuuaccaagcagggccaaguggaccugaacgaugcuguccaggcccucacggaccuggggcugaucuacaccgcgaaauaucccaauuccagcgaccucgaucggcuggcccagucccauccgauucuuaacaugaucgacacaaagaaaucuagccugaauaucuccggauacaacuuuagccucggcgcugccguuaaggcuggggccugcaugcuggauggaggcaacaugcuugagaccauuaaagugucuccucaaacaauggacggcauccugaaguccauucucaaagugaagcgcagccuggggauguucaucucugauacccccggagaaagaaauccuuaugagaacauucuguacaagaucugucucagcggcgacggguggcccuauauugcgucccggacgucuaucgucggacgcgccugggaaaauacagugguugaucuggagagcgacaacaaaccucagaagaccggcaaugggggauccaacaaaagccuucagucugcuggcuuugccgcuggccugacauacucccagcucaugacccugaaggauagcaugcugcaacuugacccgaaugccaaaaccuggauggauaucgaggggagacccgaagacccuguggagauugcccucuaccagcccucuuccggaugcuauauccacuucuuucgggaaccuacagaccugaagcaguucaagcaggaugcuaaauacagccauggcauugacgucacggaucuguuugcggcccaacccgggcucaccuccgcugugaucgaggcccugccgagaaacaugguuauuacaugucagggaucugaagacauccgcaaacuucuggagagccagggccggagagauaucaagcucauugacaucucccugucuaagguggauagccgcaaauucgagaaugccgucugggaccaguuuaaggaucugugccacaugcauaccgggauuguggucgaaaagaaaaagcggggcggaaaagaggaaaucacaccucacugugcucuuauggacugcauuauguucgaugccgcgguguccggcgggguugacgcuaaggugcucagagccguccugccccgcgauaugguguuucggaccagcacgccuaaaguugugcugugaggacuaguaauaaggaaacuguaugaaugucugugggcaggaagugaagagauccuucuguaaagguuuuuggaauuaugucugcugaauaauaaacuuuuuugaaauaauaaaucugguagaaaaaugagaucucaaaggcucuuuucagagccaccaaaaaaaaaaaaaaaaaaaaaaaaaaaaaaaaaaaaaaaaaaaaaaaaaaaaaaaaaaaaaaaaagaauu

SEQ ID NO: 21529 - RNA, 2066 nt, Artificial Sequence
  mRNA product Design b-4 (hSL-A64-N5) comprising derived and/or modified sequence from LASV(G1180-SLE-2010;Clade IV)__AIT17169__SP-IgE_NP(2-569) (opt5)
aggagagucccgcagucggcguccagcggcucugcuuguucgugugugugucguugcaggccuuauucaagcuuaccauggacuggaccuggauccuguuccucguggccgcugccacaagaguccacagcagcgccuccaaggagaucaaaucuuuccuguggacccagagccucagacgggaacuguccggcuacugcucuaacauuaagcugcaaguggucaaagacgcucaggcccugcuccacgggcuggauuuuagcgagguuuccaaugugcagcgccuuaugagaaaggaacggcgcgacgauaacgaccugaaaagacuccgggaucugaaucaggcggugaacaaucuggucgagcucaagucuacacaacaaaagagcauccugcgcgugggaacgcuuaccuccgacgaucugcucauucuggcugccgaccuugaaaaacuuaagagcaaaguuaucagaacagagcggccccucucugccggcguguauauggggaaccuguccagccagcagcuggaucagcgcagagcucuccugucuaugauuggaauguccagcggcaaucagcgggcccaggcugggcgcgacggagucgugagaguuugggaugugaagaacgucgagcuucugaauaaccaguucggcaccaugccuucucucacacuggccugucuuaccaaacaaggccagguggaccugaaugaugcggugcaggcccucacagaccuggggcugaucuacaccgcuaaguauccgaacacguccgaccucgaucggcugacccaaagccaucccauccuuaauaugauugacacaaagaaauccucucugaacaucagcggauacaauuuuucccucggcgccgcugucaaggccggggcgugcaugcuggauggaggcaacaugcuugaaaccauuaaaguuagcccucagacaauggacgggauccugaagucuauucucaaagugaagaaagcccugggaauguucaucuccgauacccccggcgagcgcaacccuuaugaaaauauucuguacaagaucugucucagcggcgacggguggcccuauaucgcuucuagaacgagcauuacaggacgggccugggagaacaccguggucgaucuggaguccgacggcaagccucagaaagcugggucuaauaacagcaauaagucccuucagagcgugggauuuacagccggccugaccuacucucaacucaugacccugaaagaugccaugcugcagcuugacccgaacgcuaagacauggauggauaucgaagggagacccgaggacccuguugaaauugcgcucuaccagcccuccagcggaugcuauauccacuucuuucgcgagccuacggaccugaaacaguucaagcaagaugccaaguacucucauggcauugacgugaccgaucuguuugcugcccagcccggccucacauccgccgucaucgacgcucugccgcggaauauggugaucaccugucaggggagcgaugacauuagaaaacuucuggaaucccagggacgcaaggauaucaaacucauugacaucgcccugucuaagacagauagccggaaauaugagaacgcgguuugggaccaauacaaggaucugugccacaugcauaccggcguggucguggagaagaaaaagagagggggaaaagaagagauuacgccucacugugcucuuauggacugcaucauguucgaugccgccgucuccggcgggcucaauacaucugugcugcgcgcuguucugccccgggacaugguguuuagaaccagcaccccucgcgucgugcucugaggacuaguaauaaggaaacuguaugaaugucugugggcaggaagugaagagauccuucuguaaagguuuuuggaauuaugucugcugaauaauaaacuuuuuugaaauaauaaaucugguagaaaaaugagaucucaaaggcucuuuucagagccaccaaaaaaaaaaaaaaaaaaaaaaaaaaaaaaaaaaaaaaaaaaaaaaaaaaaaaaaaaaaaaaaaagaauu

SEQ ID NO: 21530 - RNA, 2066 nt, Artificial Sequence
  mRNA product Design b-4 (hSL-A64-N5) comprising derived and/or modified sequence from LASV(G1442-SLE-2011;Clade IV)__AIT17181__SP-IgE_NP(2-569) (opt5)
aggagagucccgcagucggcguccagcggcucugcuuguucgugugugugucguugcaggccuuauucaagcuuaccauggacuggaccuggauccuguuccucguggccgcugccacaagaguccacagcagcgccuccaaggaggugaaaucuuuccuguggacccagagccucagacgggaacuguccggcuacugcucuaacaucaaacuucaagucguuaaggacgcucaggcccugcuccacgggcuggauuuuagcgagguguccaaugugcagcgccuuaugagaaagcagcggcgcgacgauaacgaccugaaaagacuccgggaucugaaucaagcggucaacaaucugguggaacucaagucuacacagcaaaagagcguucugcgcgugggaacgcuuaccuccgacgaucugcucguccuggcugccgaccuugagaaacuuaagagcaaagugauuagaacagaacggccccucucugccggcguuuauauggggaaccuguccagccagcagcuggaucagcgcagagcucuccugaauaugaucggaaugucuggcgggauucagggaacccggacaggccgcgacggcguggucagagugugggaugugaagaacgccgaccuucugaauaaccaguucgggaccaugccuucccucacacuggcuugucuuaccaaacaaggacaggucgaucugaaugacguugugcaggcccucacggaccugggccugaucuacaccgcgaaguauccgaacgccagcgaucucgaccggcugacacaaucucaucccauucuuaauaugaucgauaccaagaaauccagccugaacaucuccggguacaauuuuucucucggagcugccgugaaggcuggcgccugcaugcuggacgggggaaacaugcuugagacaauuaaagucagcccucagaccauggauggcauccugaaguccauucucaaagugaagaaaacgcugggcauguucaucagcgacacacccggggagcgcaacccuuaugaaaauauucuguacaagaucugucucucuggagauggcuggcccuauauugcguccagaaccagcaucacagggcgggccugggagaacaccguuguggaccuggaaucugauggaaagccucagaaagcuggcagcaauaacuccaauaagucucuucagagcgccggguuugcugccggacugaccuacucccaacucaugacacugaaagacgccaugcugcagcuugauccgaacgcuaagacguggauggacaucgagggcagacccgaggacccugucgaaauugcgcucuaccagcccagcucuggcugcuauauccacuucuuucgcgagccuaccgaucugaaacaguucaagcaagacgccaaguacucccaugggauugaugugacagaccuguuugcugcccagcccggacucaccagcgccguuaucgaagcucugccgcggaauauggugauuacaugucagggcucugaugacaucaaaaagcugcuggagucccaggggagaaaagauaucaagcucauugacaucgcccugagcaaaaccgauucccgcaaguaugaaaacgcggucugggaccaauacaaggaucugugccacaugcauacgggaguggucguggagaaaaagaaacggggcgggaaggaggaaauuacaccucacugugcucuuauggacugcaucauguucgaugccgccguuucuggcggacucaauacccuggugcugagagcuguccucccccgcgacaugguguuucggaccagcacaccuagaguugugcugugaggacuaguaauaaggaaacuguaugaaugucugugggcaggaagugaagagauccuucuguaaagguuuuuggaauuaugucugcugaauaauaaacuuuuuugaaauaauaaaucugguagaaaaaugagaucucaaaggcucuuuucagagccaccaaaaaaaaaaaaaaaaaaaaaaaaaaaaaaaaaaaaaaaaaaaaaaaaaaaaaaaaaaaaaaaaagaauu

SEQ ID NO: 21531 - RNA, 2066 nt, Artificial Sequence
  mRNA product Design b-4 (hSL-A64-N5) comprising derived and/or modified sequence from LASV(G3010-SLE-2013;Clade IV)__AIT17345__SP-IgE_NP(2-569) (opt5)
aggagagucccgcagucggcguccagcggcucugcuuguucgugugugugucguugcaggccuuauucaagcuuaccauggacuggaccuggauccuguuccucguggccgcugccacaagaguccacagcagcgccuccaaggagaucaaaucuuuccuguggacccagagccucagacgggaacuguccggcuacugcucuaacauuaaacuucaaguggucaaagacgcucaggcccugcuccacgggcuggauuuuagcgagguuuccaaugugcagcgccuuaugagaaaggaacggcgcgacgauaacgaccugaaaagacuccgggaucugaaucaggcggugaacaaucuggucgagcucaagucuacacaacaaaagagcauccugcgcgugggaacgcuuaccuccgacgaucugcucauucuggcugccgaccuugaaaaacuuaagagcaaaguuacaagaaccgagcggccccucucugccggcguguauauggggaaccuguccagccagcagcuggaucagcgcagagcucuccugucuaugaucggaauguccagcggcguccagggggcccgggcuggacgcgacggcgugguuagagugugggaugucaagaaugccgagcuucugaacaaucaguucggcacaaugccuucucucacccuggcgugucuuacaaaacaggggcaaguggaccugaacgaugugguccaggcccucaccgaccugggacugauuuacacggcuaaguauccgaauaccuccgaccucgaucggcugacacagagccaucccauccuuaacaugaucgacaccaagaaauccucucugaauauuagcggcuacaacuuuucccucggggccgcuguuaaggccggagcgugcaugcuggauggcgggaauaugcuugaaacaaucaaagugagcccucaaaccauggacggcauucugaagucuauccucaaagugaagaaagcccugggaauguucauuuccgagacgcccggcgaacgcaacccuuaugagaacauccuguacaagauuugucucagcggggauggauggcccuauaucgcuucuagaacaagcaucaccggccgggccugggagaauacagucguggaccuggaauccgaugggaagccucagaaagcuggaucuaacaauagcaacaagucccuucagagcgccggcuuuaccgccgggcugaccuacucucagcucaugacacugaaagacgcuaugcugcaacuugauccgaaugcgaagacguggauggacauugagggaagacccgaagauccuguugagguggcccucuaccagcccuccagcggcugcuauauccacuucuuucgcgaaccuaccgaccugaaacaguucaagcaggacgcuaaguacucucauggcauugaugucacagaccuguuugccgcccaacccgggcucaccuccgcugugaucgaugcccugccgcggaacaugguuauuacaugucagggaagcgacgauaucaaaaagcugcuggagucccagggcagaaaagacaucaagcucauugauaucgcgcugucuaaaaccgacagccgcaaguaugagaaugcugugugggaucaguacaaggaccugugccacaugcauacgggggucguggucgaaaagaagaaacggggaggcaaggaggaaauuacaccucacugugcccuuauggauugcaucauguucgacgccgcuguguccgggggccucaacaccucuguucugagagccgugcugccccgcgauauggucuuucggaccagcacaccuagagugguucucugaggacuaguaauaaggaaacuguaugaaugucugugggcaggaagugaagagauccuucuguaaagguuuuuggaauuaugucugcugaauaauaaacuuuuuugaaauaauaaaucugguagaaaaaugagaucucaaaggcucuuuucagagccaccaaaaaaaaaaaaaaaaaaaaaaaaaaaaaaaaaaaaaaaaaaaaaaaaaaaaaaaaaaaaaaaaagaauu

SEQ ID NO: 21532 - RNA, 2066 nt, Artificial Sequence
  mRNA product Design b-4 (hSL-A64-N5) comprising derived and/or modified sequence from LASV(G502-SLE-2009;Clade IV)__AIT17127__SP-IgE_NP(2-569) (opt5)
aggagagucccgcagucggcguccagcggcucugcuuguucgugugugugucguugcaggccuuauucaagcuuaccauggacuggaccuggauccuguuccucguggccgcugccacaagaguccacagcagcgccuccaaggagaucaaaucuuuccuguggacccagagccucagacgggaacuguccggcuacugcucuaacauuaagcugcaaguggucaaagacgcucaggcccugcuccacgggcuggauuuuagcgagguuuccaaugugcagcgccuuaugagaaaggaacggcgcgacgauaacgaccugaaaagacuccgggaucugaaucaggcggugaacaaucuggucgagcucaagucuacacaacaaaagagcauccugcgcgugggaacgcuuaccuccgacgaucugcucauucuggcugccgaccuugaaaaacuuaagagcaaaguuaucagaacagagcggccccucucugccggcguguauauggggaaccuguccagccagcagcuggaucagcgcagagcucuccugucuaugauuggaauguccggcgggaaucagggaguccgggccggcaaggacggcgugguucgcgugugggaugucaaaaacgcugagcuucugaauaaccaguucgggaccaugccuagccucacacuggccugucuuaccaagcagggacaaguggaccugaaugaugcggugcaggcccucacagaccugggccugaucuacaccgcuaaguauccgaacacgucugaccucgauagacugacccagucccaucccauccuuaauaugauugacaccaaaaagagcucccugaacaucucuggguacaauuuuagccucggagccgcugucaaagccggcgcgugcaugcuggaugggggaaacaugcuugaaacaauuaagguuuccccucaaacaauggacggcauccugaaaagcauucucaaggugaaaaaggcccugggcauguucaucucugauacccccggggagcggaacccuuaugaaaauauucuguacaagaucugucucuccggagacggcuggcccuauaucgcuagccgcacgucuauuacagggagagccugggagaacaccguggucgaucuggagagcgacggaaaaccucagaaggcuggcuccaauaacucuaauaaaagccuucaguccgccggguuuacagccggacugaccuacagccagcucaugacccugaaggaugcuaugcugcaacuugacccgaacacaaaaacguggauggauaucgaaggccggcccgaggacccuguggaaauugcgcucuaccagcccucuuccggcugcuauauccacuucuuuagagagccuaccgaccugaagcaguucaagcaggaugccaaauacagccaugggauugacguuacagaucuguuugcugcccaacccggacucaccucugccgugaucgacgcucugccgcgcaauauggucaucacaugucagggcuccgaugacauucggaaacuucuggaaagccaggggagaaaggauaucaagcucauugacaucgcccugaacaaaaccgauucccgcaaguaugagaaugcggugugggaccaguacaaggaucugugccacaugcauacgggaguuguggucgagaaaaagaaacggggcgggaaggaagagauuacaccucacugugcucuuauggacugcaucauguucgaugccgccgugucuggcggacucaacaccagcguccugagagcugugcugccccgcgacaugguuuuucggaccuccacaccuagagugguccucugaggacuaguaauaaggaaacuguaugaaugucugugggcaggaagugaagagauccuucuguaaagguuuuuggaauuaugucugcugaauaauaaacuuuuuugaaauaauaaaucugguagaaaaaugagaucucaaaggcucuuuucagagccaccaaaaaaaaaaaaaaaaaaaaaaaaaaaaaaaaaaaaaaaaaaaaaaaaaaaaaaaaaaaaaaaaagaauu

SEQ ID NO: 21533 - RNA, 2066 nt, Artificial Sequence
  mRNA product Design b-4 (hSL-A64-N5) comprising derived and/or modified sequence from LASV(G733-SLE-2010;Clade IV)__AIT17155__SP-IgE_NP(2-569) (opt5)
aggagagucccgcagucggcguccagcggcucugcuuguucgugugugugucguugcaggccuuauucaagcuuaccauggacuggaccuggauccuguuccucguggccgcugccacaagaguccacagcagcgccuccaaggagaucaaaucuuuccuguggacccagagccucagacgggaacuguccggcuacugcucuaacauuaagcugcaaguggucaaagacgcucaggcccugcuccacgggcuggauuuuagcgagguuuccaaugugcagcgccuuaugagaaaggaacggcgcgacgauaacgaccugaaaagacuccgggaucugaaucaggcggugaacaaucuggucgagcucaagucuacacaacaaaagagcgugcugcgcguuggaacgcuuaccuccgacgaacugcucgugcuggcugccgaucuugagaaacuuaagagcaaagucaucagaacagagcggccccucucugccggcguguauauggggaaccuguccagccagcagcuggaccagcgcagagcucuccugucuaugauuggaauguccggcgggaaucagggagcccggaccggccgcgauggcguugugagagucugggacgugaagaacgcugaacuucugaauaaccaguucgggacaaugccuagccucacccuggccugucuuacaaaacagggacaaguggaucugaaugacgcgguccaggcccucaccgaucugggccugaucuacacggcuaaguauccgaacaccucugaccucgaccggcugacacagucccaucccauucuuaauaugaucgauaccaagaaaagcucccugaacaucucuggguacaauuuuagccucggagccgcuguuaaggccggcgcgugcaugcuggacgggggaaacaugcuugagacaauuaaaguguccccucaaaccauggauggcauccucaagagcauucugaaagugaagaaagcccugggcauguucaucucugacacgcccggggaacgcaacccuuaugagaauauucuguacaagaucugucucuccggagauggcuggcccuauauugcuagcagaacaucuaucaccgggcgggccugggagaacacagucguggaccuggaaagcgauggaaagccucagaaagcuggcuccaauaacucuaauaagagccuucaguccgccggguuuaccgccggacugaccuacagccagcucaugacacugaaagacgcuaugcugcaacuugauccgaacgcgaagacguggauggacaucgagggcagacccgaagauccuguugagauugcccucuaccagcccucuuccggcugcuauauccacuucuuucgcgaaccuaccgaccugaaacaguucaagcaggacgcuaaguacagccaugggauugaugugacagaccuguuugccgcccaacccggacucaccucugcugucaucgaugcccugccgcggaauauggugauuacaugucagggcuccgacgauaucagaaaacuucuggagagccaggggcgcaaggacaucaaacucauugauaucgcgcuguccaagauugacucucggaaauaugagaacgcuguuugggaucaguacaaggaccugugccacaugcauaccggaguggucguggaaaagaaaaagagaggcgggaaagaggaaaucacgccucacugugcccuuauggauugcauuauguucgacgccgcugucagcggcggacucaauucccuggugcugcgcgccguucucccccgggauaugguguuuagaacaucuaccccucgcgucgugcugugaggacuaguaauaaggaaacuguaugaaugucugugggcaggaagugaagagauccuucuguaaagguuuuuggaauuaugucugcugaauaauaaacuuuuuugaaauaauaaaucugguagaaaaaugagaucucaaaggcucuuuucagagccaccaaaaaaaaaaaaaaaaaaaaaaaaaaaaaaaaaaaaaaaaaaaaaaaaaaaaaaaaaaaaaaaaagaauu

SEQ ID NO: 21534 - RNA, 2066 nt, Artificial Sequence
  mRNA product Design b-4 (hSL-A64-N5) comprising derived and/or modified sequence from MOPV/LASV reassortant(IGS-1;Clade IV)__AFY05578__SP-IgE_NP(2-569) (opt5)
aggagagucccgcagucggcguccagcggcucugcuuguucgugugugugucguugcaggccuuauucaagcuuaccauggacuggaccuggauccuguuccucguggccgcugccacaagaguccacagcagcgccuccaaggagaucaaaucuuuccuguggacccagagccucagacgggaacuguccggcuacugcucuaacauuaaacuucaaguggucaaggacgcucaggcccugcuccacgggcuggauuuuagcgagguuuccaaugugcagcgccuuaugagaaaggaacggcgcgacgauaacgaccugaaaagacuccgggaucugaaucaggcggugaacaaucuggucgagcucaagucuacacaacaaaagagcauccugcgcgugggaacgcuuaccuccgacgaucugcucauucuggcugccgaccuugaaaaacugagaagcaagguuauccggacagagcgcccccucucugccggcguguauauggggaaccuguccagccagcagcuggaucagagacgggcucuccugaauaugauuggaaugucuggcgggaaccagggagcccgcgcuggcagagacggcgucgugcggguuugggaugugaaaaaugccgagcuucuguccaaccaguucgggaccaugccuagccucacacuggcgugucuuaccaagcagggacaagucgaccugaaugaugccgugcaggcucucacagaccugggccugaucuacaccgccaaauauccgaacacgucugaccucgaucgccugacccagucccaucccauccuuaauaugauugacacaaagaaaagcucccugaacaucucuggguacaauuuuagccucggagcugccgugaaggcgggcgccugcaugcuggaugggggaaacaugcuugaaaccauuaaggucuccccucaaacaauggacggcauccugaaaagcauucucaagguuaaaaaggcucugggcauguucaucucugauacccccggggagagaaacccuuaugaaaauauucuguacaaaaucugucucuccggagacggcuggcccuauaucgccagccggacgucuauuacagggagagcuugggagaacaccgugguggaucuggagagcgacggaaagccucagaaggccgauuccaauaacucuagcaaaucccuucagagcgccggcuuuacagcugggcugaccuacucucagcucaugacccugaaggacgcgaugcugcaacuugauccgaaugccaaaacauggauggacaucgaaggacgccccgaggacccugucgaaauugcucucuaccagcccuccagcggcugcuauauccacuucuuucgggagccuacggaucugaagcaguucaaacaggacgccaaguacucucauggcauugaugugaccgaccuguuugccacacaacccgggcucaccuccgcuguuaucgaugcccugccgagaaacauggugaucacaugucagggaagcgacgauauucgcaaacuucuggaaucccagggccggaaggacaucaagcucauugauaucgaccugucuaaaaccgauagcagaaaguaugagaaugcggucugggaccaguacaaagaucugugccacaugcauacgggggugguuguggagaagaagaaacgcggaggcaaggaagagauuacaccucacugugcucuuauggacugcaucauguucgacgccgccgucuccgggggccucaacaccucugugcugcgggcuguccugcccagagauaugguguuucgcaccagcacaccucggguugugcucugaggacuaguaauaaggaaacuguaugaaugucugugggcaggaagugaagagauccuucuguaaagguuuuuggaauuaugucugcugaauaauaaacuuuuuugaaauaauaaaucugguagaaaaaugagaucucaaaggcucuuuucagagccaccaaaaaaaaaaaaaaaaaaaaaaaaaaaaaaaaaaaaaaaaaaaaaaaaaaaaaaaaaaaaaaaaagaauu

SEQ ID NO: 21535 - RNA, 2066 nt, Artificial Sequence
  mRNA product Design b-4 (hSL-A64-N5) comprising derived and/or modified sequence from LASV(LM765-SLE-2012;Clade IV)__AIT17815__SP-IgE_NP(2-569) (opt5)
aggagagucccgcagucggcguccagcggcucugcuuguucgugugugugucguugcaggccuuauucaagcuuaccauggacuggaccuggauccuguuccucguggccgcugccacaagaguccacagcagcgccuccaaggagaucaaaucuuuccuguggacccagagccucagacgggaacuguccggcuacugcucuaacauuaagcugcaaguggucaaagacgcucaggcccugcuccacgggcuggauuuuagcgagguuuccaaugugcagcgccuuaugagaaaggaacggcgcgacgauaacgaccugaaaagacuccgggaucugaaucaggcggugaacaaucuggucgagcucaagucuacacaacaaaagagcauccugcgcgugggaacgcuuaccuccgacgaucugcucauucuggcugccgaccuugaaaaacuuaagagcaaaguuacaagaaccgagcggccccucucugccggcguguauauggggaaccuguccagccagcagcuggaucagcgcagagcucuccuggacaugaucggaaugucuggcuccaaucagggggcccgggcuggacgcgauggcgucgugagaguuugggacgugaagaacgccgagcuucugaauaaccaguucggcacaaugccuagccucacccuggcgugucuuacaaaacaggggcaagucgaucugaaugacgccgugcaggcucucaccgaccugggacugauuuacacggccaaguauccgaacaccucugaucucgaccggcugacacagucccaucccauccuuaauaugaucgauaccaagaaaagcucccugaacauuucuggcuacaauuuuagccucggggcugccgugaaggcgggagccugcaugcuggacggcgggaacaugcuugaaacaaucaaagucuccccucaaaccauggauggcauucucaagagcauccugaaaguuaagaaagcucugggaauguucauuucugacgcccccggcgagcgcaacccuuaugaaaauauccuguacaagauuugucucuccggggauggauggcccuauaucgcuagcagaacgucuaucacaggccgggccugggagaacaccgugguggaccuggagagcgaugggaagccucagaaagccggauccaauggcucuaacaagagccuucaguccgcuggguuuacagcgggacugaccuacagccagcucaugacccugaaagacgccaugcugcaacuugauccgaaugcuaagacauggauggacauugaaggcagacccgaggacccugucgaaaucgcccucuaccagcccucuuccggcugcuauauucacuucuuucgcgagccuacggaucugaaacaguucaagcaggacgccaaguacagccaugggaucgaugugaccgaccuguuugcugcccaacccggacucacaucugcgguuauugaugcucugccgcggaacauggugaucaccugucagggcuccgacgauaucagaaaacuuuucgaaagccaggggcgcaaggacauuaaacugaucgauauugcccucuccaagacagacucucggaaauaugagaaugccgucugggaucaguacaaggaccugugccacaugcauaccggaaucgugguugagaagaaaaagagaggcgggaaagaagagauuacgccucacugugcucugauggauugcaucauguuugacgccgcugugagcggcggacuuaacacauccguccuccgcgccgugcugccccgggacauggucuucagaaccucuaccccucgcgugguucugugaggacuaguaauaaggaaacuguaugaaugucugugggcaggaagugaagagauccuucuguaaagguuuuuggaauuaugucugcugaauaauaaacuuuuuugaaauaauaaaucugguagaaaaaugagaucucaaaggcucuuuucagagccaccaaaaaaaaaaaaaaaaaaaaaaaaaaaaaaaaaaaaaaaaaaaaaaaaaaaaaaaaaaaaaaaaagaauu

SEQ ID NO: 21536 - RNA, 2066 nt, Artificial Sequence
  mRNA product Design b-4 (hSL-A64-N5) comprising derived and/or modified sequence from LASV(LM776-SLE-2012;Clade IV)__AIT17825__SP-IgE_NP(2-569) (opt5)
aggagagucccgcagucggcguccagcggcucugcuuguucgugugugugucguugcaggccuuauucaagcuuaccauggacuggaccuggauccuguuccucguggccgcugccacaagaguccacagcagcgccuccaaggagaucaaaucuuuccuguggacccagagccucagacgggaacuguccucuuacugcagcaacauuaaacuucaaguggucaaggacgcucaggcccugcuccacggccuggauuuuuccgagguuucuaaugugcagcgccuuaugagaaaggaacggcgcgacgauaacgaccugaaaagacuccgggaucugaaucaggcggugaacaaucuggucgagcucaagagcacacaacagaaguccauccugcgcguggggacgcuuaccagcgacgaucugcucauucuggcugccgaccuugaaaaacugaagucuaaaguuacaagaaccgagcggccccucuccgccggaguguauaugggcaaccugagcucucagcagcuggaucaacgcagagcucuccuguccaugaucgggaugagcggaucuaaucagggcgcccgggcugggcgcgacggagucgugagaguuugggaugugaagaacgccgagcuucugaauaaccaguucggcacaaugccuucccucacccuggcgugucuuacaaaacagggccaagucgaccugaaugaugccgugcaggcucucaccgaccuggggcugauuuacacggccaaguauccgaacaccagcgaccucgaucggcugacacagucccaucccauccuuaauaugaucgacaccaagaaaucuagccugaacauuuccggauacaauuuuagccucggcgcugccgugaaggcgggggccugcaugcuggauggaggcaacaugcuugaaacaaucaaagucucuccucaaaccauggacgggauucugaaguccauccucaaaguuaagaaagcucugggaauguucauuagcgauacgcccggcgagcgcaacccuuaugaaaauauccuguacaagauuugucucucuggcgacggguggcccuauaucgccagcagaacauccaucaccggacgggcuugggagaacacagugguggaucuggagucugacggcaagccucagaaagccgggagcaauaacuccaauaagagccuucagucugccggauuuaccgcuggccugaccuacucccagcucaugacacugaaagaugcgaugcugcaacuugacccgaacgccaagacguggauggauauugaagggagacccgaggacccugucgaaguggcucucuaccagcccagcucuggaugcuauauccacuucuuucgcgagccuaccgaccugaaacaguucaagcaggaugccaaguacucccauggcauugacguuacagaucuguuugccgcucaacccggccucaccagcgccgugaucgacgcgcugccgcggaauauggucauuacaugucagggguccgaugacaucagaaaacuucuggaaucucagggacgcaaggauaucaaacucauugacaucgcucugagcaagaccgauucccggaaauaugagaacgccgugugggaccaguacaaggaucugugccacaugcauacgggcguuguggucgagaagaaaaagagagggggaaaagaagagauuacaccucacugugcccuuauggacugcaucauguucgaugcugccgugucuggcgggcucaauaccagcguccugcgcgcugugcugccccgggacaugguuuuuagaaccuccacaccucgcgugguccucugaggacuaguaauaaggaaacuguaugaaugucugugggcaggaagugaagagauccuucuguaaagguuuuuggaauuaugucugcugaauaauaaacuuuuuugaaauaauaaaucugguagaaaaaugagaucucaaaggcucuuuucagagccaccaaaaaaaaaaaaaaaaaaaaaaaaaaaaaaaaaaaaaaaaaaaaaaaaaaaaaaaaaaaaaaaaagaauu

SEQ ID NO: 21537 - RNA, 2066 nt, Artificial Sequence
  mRNA product Design b-4 (hSL-A64-N5) comprising derived and/or modified sequence from LASV(Mad39;Clade IV)__ANH09723__SP-IgE_NP(2-569) (opt5)
aggagagucccgcagucggcguccagcggcucugcuuguucgugugugugucguugcaggccuuauucaagcuuaccauggacuggaccuggauccuguuccucguggccgcugccacaagaguccacagcagcgccuccaaggagaucaaaucuuuccuguggacccagagccucagacgggaacuguccggcuacugcucuaacauuaagcugcaaguggucaaagacgcucaggcccugcuccacgggcuggauuuuagcgagguuuccaaugugcagcgccuuaugagaaagcagcggcgcgacgauaacgaccugaaaagacuccgggaucugaaucaagcggugaacaaucuggucgaacucaagucuacacagcaaaagagcgugcugcgcguuggaacgcuuaccuccgacgaucugcucacacuggcugccgaccuugagaaacuuaagagcaaagugaccagaacagaacggccccucaccgccggcgucuauauggggaaccugucuucccagcagcuggaucagcgcagagcucuccugaauaugaucggaaugagcggcgggaaccagggagcccggacaggccgcgacggcgugguuagagugugggaugucaagaaugcugagcuucugaacaaucaguucgggaccaugccuucucucacgcuggccugucuuaccaaacaaggacagguggaccugaacgaugugguccaggcgcucacagaccugggccugauuuacaccgccaaguauccgaauacauccgaccucgaucggcugacccaaagccaucccauccuuaacaugauugacacgaauaagucuucccugaacaucagcggguacaacuuuucccucggagcugccguuaaagcuggcgccugcaugcuggaugggggaaauaugcuugagacaaucaaggugucuccucagaccauggacggcauucugaaaagcauccucaaggugaaaaagucccugggcauguucauuagcgauacacccggggaacgcaacccuuaugagaauauccuguacaaaauuugucucucuggagacggcuggcccuauaucgcguccagaaccagcauuaccgggcgggccugggaaaacacagucguggaucuggagucuggaggcaagccucagaaggcugggagcaauaacuccaauaaaucucuucagagcgccggauuugcugccggccugacguacucccaacucaugacccugaaggacgccaugcugcagcuugauccgaacgcuaaaacauggauggacaucgagggcagacccgaagauccuguugagaucgcgcucuaccagcccauuagcgggugcuauauccacuucuuucgcgaaccuaccgaccugaagcaguucaaacaagacgccaaguacucucauggaauugaugugacagaccuguuugcugcccagcccggccucaccuccgccgucaucgaggcucugccgcggaauauggugauuacgugucaggggagcgaugacaucagaaaacuuuucgaaucucagggacgcaaggauaucaagcugauugacaucgcccucuccaaaacagauagccggaaguaugagaacgcgguuugggaccaauacaaagaucugugccacaugcauaccggcguggucguggagaagaagaaaaagggcgggaaagaagagauuaccccucacugugcucugauggacugcaucauguuugaugccgccgucuccggaggccuuaauacacucgugcugagagcuguucugccccgcgacaugguguuccggaccucuacaccuaaggucgugcucugaggacuaguaauaaggaaacuguaugaaugucugugggcaggaagugaagagauccuucuguaaagguuuuuggaauuaugucugcugaauaauaaacuuuuuugaaauaauaaaucugguagaaaaaugagaucucaaaggcucuuuucagagccaccaaaaaaaaaaaaaaaaaaaaaaaaaaaaaaaaaaaaaaaaaaaaaaaaaaaaaaaaaaaaaaaaagaauu

SEQ ID NO: 21538 - RNA, 2066 nt, Artificial Sequence
  mRNA product Design b-4 (hSL-A64-N5) comprising derived and/or modified sequence from LASV(Z0947-SLE-2011;Clade IV)__AIT17841__SP-IgE_NP(2-569) (opt5)
aggagagucccgcagucggcguccagcggcucugcuuguucgugugugugucguugcaggccuuauucaagcuuaccauggacuggaccuggauccuguuccucguggccgcugccacaagaguccacagcagcgccuccaaggagaucaaaucuuuccuguggacccagagccucagacgggaacuguccggcuacugcucuaacauuaagcugcaaguggucaaagacgcucaggcccugcuccacgggcuggauuuuagcgagguuuccaaugugcagcgccuuaugagaaaggaacggcgcgacgauaacgaccugaaaagacuccgggaucugaaucaggcggugaacaaucuggucgagcucaagucuacacaacaaaagagcauccugcgcgugggaacgcuuaccuccgacgaucugcucauucuggcugccgaccuugaaaaacuuaagagcaaaguuacaagaaccgagcggccccucucugccggcguguauauggggaaccuguccagccagcagcuggaucagcgcagagcucuccugaauaugaucggaaugucuggcuccaaccagggggcccggacaggacgcgacggcgucgugagaguuugggaugugaagaaugcugagcuucugaacaaucaguucggcaccaugccuagccucacacuggccugucuuaccaaacaggggcaagucgaccugaacgaugcggugcaggcccucacggaccugggacugauuuacaccgcuaaguauccgaauacaucugaccucgaucggcugacccagucccaucccauccuuaacaugaucgacacaaagaaaagcucccugaauauuucuggcuacaacuuuagccucggggccgcugugaaggccggagcgugcaugcuggauggcgggaacaugcuugaaaccaucaaagucuccccucaaacgauggacggcauucucaagagcauccugaaaguuaagaaagcccugggaauguucauuucugaugcucccggcgagcgcaauccuuaugaaaacauccuguacaagauuugucucuccggggacggauggcccuauaucgccagcagaacaucuaucaccggccgggcuugggagaauacagugguggaucuggagagcgacgggaagccucagaaagccggauccaacggcucuaauaagagccuucaguccgccggguuuaccgcuggacugaccuacagccagcucaugacacugaaagaugcgaugcugcaacuugacccgaacgccaagacguggauggauauugaaggcagacccgaggacccugucgaaaucgcucucuaccagcccucuuccggcugcuauauucacuucuuucgcgagccuaccgaccugaaacaguucaagcaggaugccaaguacagccaugggaucgacgugacagaucuguuugccgcucaacccggacucaccucugccguuauugacgcgcugccgcggaauauggugaucacaugucagggcuccgaugacaucagaaaacuuuucgaaagccaggggcgcaaggauauuaaacugaucgacauugcucucuccaagaccgauucucggaaauaugagaacgccgucugggaccaguacaaggaucugugccacaugcauacgggaaucgugguugagaagaaaaagagaggcgggaaagaagagauuacaccucacugugcccugauggacugcaucauguuugaugcugccgugagcggcggacuuaauaccuccguccuccgcgcugugcugccccgggacauggucuucagaaccucuacaccucgcgugguucugugaggacuaguaauaaggaaacuguaugaaugucugugggcaggaagugaagagauccuucuguaaagguuuuuggaauuaugucugcugaauaauaaacuuuuuugaaauaauaaaucugguagaaaaaugagaucucaaaggcucuuuucagagccaccaaaaaaaaaaaaaaaaaaaaaaaaaaaaaaaaaaaaaaaaaaaaaaaaaaaaaaaaaaaaaaaaagaauu

SEQ ID NO: 21539 - RNA, 2097 nt, Artificial Sequence
  mRNA product Design b-4 (hSL-A100) comprising derived and/or modified sequence from LASV(Josiah;Clade IV)__NP_694869__SP-IgE_NP(2-569) (opt1)
aggagagucccgcagucggcguccagcggcucugcuuguucgugugugugucguugcaggccuuauucaagcuuaccauggacuggaccuggauccuguuccucguggccgccgcgacccgcguccacagcagcgccuccaaggagaucaagagcuuccuguggacccagucccuccgccgggagcugagcggcuacugcuccaacaucaagcuccagguggucaaggacgcccaggcgcugcugcacgggcuggacuucagcgagguguccaacgugcagcgccucaugcggaaggagcgccgggacgacaacgaccugaagcgccugcgggaccucaaccaggccgucaacaaccugguggagcucaagagcacccagcagaaguccauccugcgcgugggcacccugaccagcgacgaccugcucauccuggccgccgaccuggagaagcucaaguccaaggucauccggaccgagcgcccccugagcgccgggguguacaugggcaaccuguccagccagcagcucgaccagcggcgcgcgcugcugaacaugaucgggauguccggcggcaaccagggggcccgggccggccgcgacggggugguccgggugugggacgugaagaacgccgagcuccugaacaaccaguucggcaccaugccgagccugacgcucgcgugccugaccaagcaggggcaggucgaccugaacgacgccgugcaggcccucaccgaccugggccugaucuacaccgccaaguaccccaacacguccgaccucgaccgccugacccagagccaccccauccugaacaugaucgacaccaagaaguccagccucaacaucagcggcuacaacuucucccugggggccgcggugaaggccggcgccugcaugcuggacgggggcaacaugcucgagaccaucaaggucagcccccagacgauggacggcauccugaaguccauccugaaggugaagaaggcccucgggauguucaucagcgacaccccgggcgagcggaaccccuacgagaacauccuguacaagaucugccuguccggggacggcuggcccuacaucgccagccgcaccuccaucaccgggcgggcgugggagaacacgguggucgaccucgagagcgacggcaagccccagaaggccgacuccaacaacagcuccaagagccugcaguccgccggcuucaccgccgggcugaccuacagccagcucaugacccugaaggacgccaugcugcagcuggacccgaacgcgaagacguggauggacaucgagggccgccccgaggaccccguggagaucgcccucuaccagcccuccagcgggugcuacauccacuucuuccgggagccgaccgaccugaagcaguucaagcaggacgccaaguacucccacggcaucgacgugaccgaccuguucgccacccagcccgggcucacgagcgccgucaucgacgcgcugccccgcaacauggugaucacgugccagggcuccgacgacauccgcaagcugcucgagagccagggccggaaggacaucaagcugaucgacaucgcccugagcaagaccgacucccgcaaguacgagaacgccgugugggaccaguacaaggaccucugccacaugcacaccggggucguggucgagaagaagaagcggggcgggaaggaggagaucaccccgcacugcgcccugauggacugcaucauguucgacgcggccgugagcggcgggcugaacaccuccgugcuccgcgccguccugccccgggacaugguguuccgcaccagcacgccccgggugguccugugaggacuaguaauaaggaaacuguaugaaugucugugggcaggaagugaagagauccuucuguaaagguuuuuggaauuaugucugcugaauaauaaacuuuuuugaaauaauaaaucugguagaaaaaugagaucucaaaggcucuuuucagagccaccaaaaaaaaaaaaaaaaaaaaaaaaaaaaaaaaaaaaaaaaaaaaaaaaaaaaaaaaaaaaaaaaaaaaaaaaaaaaaaaaaaaaaaaaaaaaaaaaaaaaa

SEQ ID NO: 21540 - RNA, 2097 nt, Artificial Sequence
  mRNA product Design b-4 (hSL-A100) comprising derived and/or modified sequence from LASV(LP;Clade I)__AAF86702__SP-IgE_NP(2-569) (opt1)
aggagagucccgcagucggcguccagcggcucugcuuguucgugugugugucguugcaggccuuauucaagcuuaccauggacuggaccuggauccuguuccucguggccgccgcgacccgcguccacagcagcaacuccaaggagaucaagagcuuccuguggacccagucccuccgccgggagcugagcggcuacugcuccaacaucaagcuccagguggucaaggacgcccaggcccugcugcacgggcuggacuucagcgagguguccaacgugcagcgccucaugcggaagcagaagcgcgacgacgcggaccugaagcggcugcgcgaccucaaccaggccgucaacaaccugguggagcucaagagcacccagcagaagaacgugcugcgggucggcacgcuguccagcgacgaccugaucacccucgccgccgaccuggagaagcugaaguccaaggugauccgcaccgagcggccccucagcuccgggguguacaugggcaaccugagcucccagcagcuggaccagcgccgggcccuccugagcaugaucgggauguccggcggcccgcaggggaaccgcaccggcggggacggcgucgugcgggugugggacgucaagaacgcggagcugcucaacaaccaguucgggacgaugcccagccugacccuggccugccucaccaagcagggccagguggaccugaacgacgccgugcaggcccugaccgaccucggccugaucuacacggcgaaguaccccaacuccagcgaccuggacaugcucacccagagccaccccauccuggggauggucgacaccaagaaguccagccugaacaucuccggcuacaacuucagccucggggccgccgugaaggccggcgccugcaugcuggacggcgggaacaugcuggagaccaucaagguguccccgcagacgauggacggcauccucaagagcauccugaaggucaagcgcucccuggggauguucaucagcgacacccccggcgagcggaaccccuacgagaacauccucuacaagaucugccuguccggggagggcuggcccuacaucgcgagccgcaccuccaucaccggccgggccugggagaacacgcugguggaccucgagagcgacaacaagccgcccaagcugaacuccgccgggagcaacaagucccugcaggccgccggccucaacgcggggcugaccuacagccagcugaugacccugaaggacugcaugcuccagcuggaccccuccagcaagaccuggaucgacaucgagggccgccccgaggacccgguggagaucgcccuguuccagcccuccagcgggugcuacauccacuucuuccgggagcccacggaccucaagcaguucaagcaggacgccaaguacagccacggcaucgacgucaccgaccuguucuccacccagcccggccugaccagcgccgugaucgaggcccucccgcgcaacauggugcugacgugccagggguccgacgacaucaagaagcugcucgagagccagggccggcgcgacaucaagcugaucgacaucucccugagcaaggcggacucccgcaaguucgagaacgccgucugggaccaguacaaggaccucugccacaugcacaccgggguggucguggagaagaagaagcggggcgggaaggaggagaucacgccccacugcgcccugcuggacugcaucauguucgacgccgccaccaccggcagccucaacaucaccacccugcgcgcggugcugccccgggacauggucuuccgcaccuccacgcccaagguggugcucugaggacuaguaauaaggaaacuguaugaaugucugugggcaggaagugaagagauccuucuguaaagguuuuuggaauuaugucugcugaauaauaaacuuuuuugaaauaauaaaucugguagaaaaaugagaucucaaaggcucuuuucagagccaccaaaaaaaaaaaaaaaaaaaaaaaaaaaaaaaaaaaaaaaaaaaaaaaaaaaaaaaaaaaaaaaaaaaaaaaaaaaaaaaaaaaaaaaaaaaaaaaaaaaaa

SEQ ID NO: 21541 - RNA, 2097 nt, Artificial Sequence
  mRNA product Design b-4 (hSL-A100) comprising derived and/or modified sequence from LASV(803213;Clade II)__AAF86704__SP-IgE_NP(2-569) (opt1)
aggagagucccgcagucggcguccagcggcucugcuuguucgugugugugucguugcaggccuuauucaagcuuaccauggacuggaccuggauccuguuccucguggccgccgcgacccgcguccacagcagcgccuccaaggaggugaaguccuuccuguggacccagagccuccgccgggagcugagcggcuacugcuccaacaucaagcugcaggucgugaaggacgcccaggcgcuccugcacgggcuggacuucagcgaggugaacaacguccagcgccucaugcggaagcagaagcgcgacgacggcgaccugaagcggcugcgcgaccucaaccaggccgugaacaaccugguggagcugaaguccacccagcagaaguccauccuccgggucgggacgcugaccagcgacgaccugcucacccuggccgccgaccuggagaagcucaagagcaaggugauccgcaccgagcggccccuguccagcggcguguacauggggaaccuguccacgcagcagcucgagcagcgccgggcccugcugaacaugaucggcauggucggcggggcgcagggcacccagccggggcgcgacggcguggugcgggucugggacgugaagaaccccgaccuccugaacaaccaguucgggaccaugcccagccugacccucgccugccugacgaagcagggccagguggaccugaacgacgccguccucgcccugaccgaccugggccucaucuacaccgcgaaguaccccaacuccagcgaccuggaccgccugucccagagccacccgauccucaacaugguggacaccaagaaguccagccugaacaucagcggguacaacuucucccugggcgccgccgugaaggccggggccugcaugcucgacggcggcaacaugcuggagacgaucaaggucacgccccagaccauggacgggauccucaagagcauccugaaggugaagcggucccugggcauguucgugagcgacacccccggggagcgcaaccccuacgagaacauccuguacaagaucugccucuccggcgacggguggccguacaucgcgagccggaccuccaucgucggccgcgccugggagaacaccaccguggaccuggagagcgacggcaagccccagaagguggggaccgccggcuccaacaagagccugcaguccgccggguuccccacgggccucaccuacagccagcugaugacccugaaggacuccaugaugcagcuggaccccagcgccaagaccuggaucgacaucgaggggcggccggaggaccccgucgagaucgcgcucuaccagcccauguccggcugcuacauccacuucuuccgcgagcccacggaccugaagcaguucaagcaggacgccaaguacagccacggcaucgacguggccgaccuguucccggcccagcccgggcucaccuccgccgucaucgaggcgcugccccggaacauggugcugaccugccagggcagcgacgacaucaagaagcuccuggacucccaggggcgccgcgacaucaagcugaucgacaucagccucagcaagguggacucccggaaguucgagaacgccgucugggaccagugcaaggaccugugccacaugcacaccggcgugguggucgagaagaagaagcgcgggggcaaggaggagaucacgccccacugcgcccugauggacugcaucauguucgacgccgccgugagcggcgggcucaacaucccggugcugcgggcgguccugccccgcgacaugguguuccggaccuccagccccaaggugguccucugaggacuaguaauaaggaaacuguaugaaugucugugggcaggaagugaagagauccuucuguaaagguuuuuggaauuaugucugcugaauaauaaacuuuuuugaaauaauaaaucugguagaaaaaugagaucucaaaggcucuuuucagagccaccaaaaaaaaaaaaaaaaaaaaaaaaaaaaaaaaaaaaaaaaaaaaaaaaaaaaaaaaaaaaaaaaaaaaaaaaaaaaaaaaaaaaaaaaaaaaaaaaaaaaa

SEQ ID NO: 21542 - RNA, 2100 nt, Artificial Sequence
  mRNA product Design b-4 (hSL-A100) comprising derived and/or modified sequence from LASV(GA391;Clade III)__CAA36646__SP-IgE_NP(2-570) (opt1)
aggagagucccgcagucggcguccagcggcucugcuuguucgugugugugucguugcaggccuuauucaagcuuaccauggacuggaccuggauccuguuccucguggccgccgcgacccgcguccacagcagcgccuccaaggaggugcgcagcuuccuguggacccagucccuccggcgcgagcugagcggcuacugcuccaacaucaagcugcaggucgugaaggacgcccaggcgcuccugcacgggcuggacuucagcgagguguccaacguccagcggcucaugcgcaagcagaagcgggacgacggcgaccugaagcgccugcgggaccucaaccaggccgugaacaaccugguggagcucaagagcacccagcagaaguccguccugcgcguggggacccugagcuccgacgaccugcucauccuggccgccgaccuggagaagcucaagagcaaggugacccggaccgagcgcccccuguccagcggcgucuacauggggaaccuguccagccagcagcucgaccagcggcgcgcccugcugaacaugaucggcaugaccggcguguccgggggcgggaagggcgcgagcgacgggaucgugcgggucugggacgugaagaacgccgagcuccugaacaaccaguucggcacgaugccgucccugacccucgccugccugaccaagcagggccagguggaccugaacgacgccguccaggcgcucaccgaccuggggcugaucuacacggccaaguaccccaacagcagcgaccucgaccgccugucccagagccaccccauccugaacaugaucgacaccaagaaguccagccucaacaucuccggcuacaacuucagccugggggccgccgugaaggccggcgcgugcaugcuggacggcgggaacaugcucgagaccaucaaggugagcccccagaccauggacggcauccucaaguccauccugaaggucaagaagucccuggggauguucgugagcgacacgccgggcgagcggaaccccuacgagaacauccuguacaagaucugccuguccggggacggcuggcccuacaucgccagccgcaccuccaucgugggccgggccugggagaacaccgucguggaccucgagcaggacaacaagccccagaagaucgggaacggcgggagcaacaagucccugcagagcgccggcuucgccgcggggcugaccuacucccagcucaugacgcugaaggacuucaagugcuucaaccugaucccgaacgccaagaccuggauggacaucgagggccgccccgaggaccccguggagaucgcccuguaccagcccagcuccggcugcuacguccacuucuuccgggagccgaccgaccucaagcaguucaagcaggacgccaaguacagccacgggaucgacgugaccgaccuguucgccgcgcagcccggccugacgagcgccgucaucgaggcccucccccgcaacauggugaucacgugccagggguccgaggacauccggaagcugcuggagagccagggccgccgcgacaucaagcucaucgacaucacccuguccaaggccgacagccggaaguucgagaacgccgugugggaccaguucaaggaccugugccacaugcacaccggggucgugguggagaagaagaagcgcggcggcaaggaggagaucacgccccacugcgcgcucauggacugcaucauguucgacgccgccgucuccgggggccuggacgccaaggugcugcgggugguccucccgcgcgacaugguguuccggaccagcacccccaaggugguccugugaggacuaguaauaaggaaacuguaugaaugucugugggcaggaagugaagagauccuucuguaaagguuuuuggaauuaugucugcugaauaauaaacuuuuuugaaauaauaaaucugguagaaaaaugagaucucaaaggcucuuuucagagccaccaaaaaaaaaaaaaaaaaaaaaaaaaaaaaaaaaaaaaaaaaaaaaaaaaaaaaaaaaaaaaaaaaaaaaaaaaaaaaaaaaaaaaaaaaaaaaaaaaaaaa

SEQ ID NO: 21543 - RNA, 2097 nt, Artificial Sequence
  mRNA product Design b-4 (hSL-A100) comprising derived and/or modified sequence from LASV(AV;Clade V)__CCA30315__SP-IgE_NP(2-569) (opt1)
aggagagucccgcagucggcguccagcggcucugcuuguucgugugugugucguugcaggccuuauucaagcuuaccauggacuggaccuggauccuguuccucguggccgccgcgacccgcguccacagcagcgccuccaaggaggugaaguccuuccuguggacccagagccuccgccgggagcugagcggcuacugcuccaacaucaagcugcaggucgugaaggacgcccaggcgcuccugcacgggcuggacuucagcgagguguccaacguccagcgccucaugcggaagcagcgccgggacgacagcgaccugaagcgccugcgggaccucaaccaggccgugaacaaccugguggagcugaaguccacccagcagaaguccguccuccgcgugggcacgcugagcagcgacgaccugcucacccuggccgccgaccuggagaagcucaaguccaaggugacccggaccgagcgcccccugagcuccggggucuacaugggcaaccugagcucccagcagcucgaccagcggcgcgcccugcugaaccucaucgggaugacgaacggcagccagggcucccaggcggggcgggacggcguggugcgcgucugggacgugaagaacgccgagcugcugaacaaccaguucgggaccaugccgagccucacccuggccugccugaccaagcagggccagguggaccucaacgacgucgugcaggcccugacggaccuggggcucaucuacaccgcgaaguaccccaacaccagcgaccuggaccggcugacccagucccaccccauccucaacaugaucgacacgaagaaguccagccugaacaucagcggcuacaacuucucccugggcgccgccgugaaggccggggccugcaugcucgacggcgggaacaugcuggagaccaucaaggucagcccccaguccauggacggcauccucaagagcauccugaaggugaagcgcgcgcugggcauguucguguccgacaccccgggggagcggaaccccuacgagaacauccuguacaagaucugccucagcggcgacggguggcccuacaucgccucccgcaccagcaucgucggccgggccugggagaacacggugguggaccuggagaccgacgggaagccccagaagaucggcuccggcaacagcaacaagucccugcagagcgccggguucuccgccggccucaccuacagccagcugaugacccugaaggacgcgaugcugcagcucgacccgaacgccaagacguggauggacaucgaggggcgccccgaggaccccgucgagguggcccuguaccagcccaucuccggcugcuacauccacuucuuccgggagccgaccgaccugaagcaguucaagcaggacgccaaguacagccacgggaucgacaucgccgaccucuucgcggcccagcccggccugaccagcgccgucaucgaggcccugccccgcaacauggugaucacgugccagggcuccgaggacaucaagaagcuccuggagagccaggggcgcaaggacaucaagcugaucgacaucgcccucuccaagaucgacagccggaaguucgagaacgcggugugggaccaguacaaggaccugugccacaugcacaccggcgucgugguggagaagaagaagcgcgggggcaaggaggagaucaccccgcacugcgcccugauggacugcaucauguucgacgccgccgucuccgggggccucaacacccuggugcugcgggcggugcucccccgcgacauggucuuccggaccagcacgccccgcguggugcugugaggacuaguaauaaggaaacuguaugaaugucugugggcaggaagugaagagauccuucuguaaagguuuuuggaauuaugucugcugaauaauaaacuuuuuugaaauaauaaaucugguagaaaaaugagaucucaaaggcucuuuucagagccaccaaaaaaaaaaaaaaaaaaaaaaaaaaaaaaaaaaaaaaaaaaaaaaaaaaaaaaaaaaaaaaaaaaaaaaaaaaaaaaaaaaaaaaaaaaaaaaaaaaaaa

SEQ ID NO: 21544 - RNA, 2097 nt, Artificial Sequence
  mRNA product Design b-4 (hSL-A100) comprising derived and/or modified sequence from LASV(Togo/2016/7082;Clade VI)__AMR44578__SP-IgE_NP(2-569) (opt1)
aggagagucccgcagucggcguccagcggcucugcuuguucgugugugugucguugcaggccuuauucaagcuuaccauggacuggaccuggauccuguuccucguggccgccgcgacccgcguccacagcagcaacuccaaggaggugaaguccuuccuguggacccagagccuccgccgggagcugagcggcuacugcuccaacaucaagcugcaggucgugaaggacgcccaggcccuccugcacgggcuggacuucagcgagguguccaacguccagcgccucaugcggaagcagaagcgcgacgacggcgaccugaagcggcugcgcgaccucaaccaggcggugaacaaccugguggagcucaagagcguccagcagaaguccauccugcggguggggacccugaccagcgacgaccugcucacccuggccgccgaccuggagaagcucaaguccaaggugacccgcaccgagcggccccugagcuccggcgucuacauggggaaccugagcucccagcagcucgaccagcgccgggcccugcugagcaugaucggcauguccggcgggaaccagaacagccagccgaagggcgacgggguggugcgcgucugggacgugaagaacgccgaccuccugaacaaccaguucggcacgaugcccucccugacccucgcgugccugaccaagcagggccagguggaccugaacgacgccguccaggcccucaccgaccuggggcugaucuacacggccaaguaccccaacagcagcgaccucgaccggcugucccagagccaccccauccugaacaugaucgacaccaagaaguccagccucaacaucuccggcuacaacuucagccugggggcggccaucaagaccggcgccugcaugcuggacgggggcaacaugcucgagaccaucaaggugacgccgcagaccauggacggcauccugaaguccauccugaaggugaagcgcagccucgggauguucaucuccgacacccccggcgagcggaaccccuacgagaacauccuguacaagaucugccugagcggggacggcuggcccuacaucgccucccgcaccgccaucaucgggcgggcgugggagaacacggucguggaccucgagagcgacuccaagccgcagaagaucggcagcaacggcuccaacaagagccugcaguccgccggguucgcccccggccugaccuacagccagcucaugacccugaaggacuccaugcugcagcuggaccccaacgccaagaccuggaucgacaucgaggggcgccccgaggacccgguggaggucgcccucuuccagcccaucagcggcugcuacauccacuucuuccgggagcccacggaccugaagcaguucaagcaggacgcgaaguacagccacgggaucgacgugaccgaccuguucgccgcccagcccggccucaccuccgccgugaucgaggcccugccgcgcaacaugguccugaccugccagggcagcgacgacaucaagaagcuccuggacucccaggggcggcgcgacaucaagcugaucgacgugagccucaacaagaucgacucccgcaaguucgagaacgcggucugggaccaguacaaggaccugugccacaugcacacgggcgugguggucgagaagaagaagaagggcgggaaggaggagaucacgccccacugcgcccugcucgacugcaucauguucgacgccgccgugagcgggggccugaacgccaccgugcugcgggcgguccucccccgcgacaugguguuccggaccuccagccccaaggugguccugugaggacuaguaauaaggaaacuguaugaaugucugugggcaggaagugaagagauccuucuguaaagguuuuuggaauuaugucugcugaauaauaaacuuuuuugaaauaauaaaucugguagaaaaaugagaucucaaaggcucuuuucagagccaccaaaaaaaaaaaaaaaaaaaaaaaaaaaaaaaaaaaaaaaaaaaaaaaaaaaaaaaaaaaaaaaaaaaaaaaaaaaaaaaaaaaaaaaaaaaaaaaaaaaaa

SEQ ID NO: 21545 - RNA, 2097 nt, Artificial Sequence
  mRNA product Design b-4 (hSL-A100) comprising derived and/or modified sequence from LASV(KAK-428;Clade n.d. (VII))__ANH09741__SP-IgE_NP(2-569) (opt1)
aggagagucccgcagucggcguccagcggcucugcuuguucgugugugugucguugcaggccuuauucaagcuuaccauggacuggaccuggauccuguuccucguggccgccgcgacccgcguccacagcagcaacuccaaggaggugaaguccuuccuguggacccagagccuccgccgggagcugagcggcuacugcaccaacaucaagcugcaggucgugaaggacgcccaggcccuccugcacgggcuggacuucuccgaggugagcaacguccagcgccucaugcggaagcagaagcgcgacgacaacgaccugaagcggcugcgcgaccucaaccaggcggugaacaaccugguggagcugaaguccguccagcagaaguccgugcucaaggugggcacgcugaacagcgacgaccugcucacccuggccgccgaccuggagaagcucaagagcaaggucgugcggaccgagcgcccccuguccagcgggguguacaugggcaaccuguccagccagcagcucgaccagcggcgcgcccugcugaacaugaucgggauggccggcggcucccaggggaaccagccgagccgggacggcgucgugcgcgugugggacgucaagaacgcggaccuccugaacaaccaguucgggaccaugcccucccugacgcucgccugccugaccaagcagggccagguggaccugaacgacgugguccucgcccugaccgaccuggggcucaucuacaccgccaaguaccccaacagcuccgaccuggaccggcugagccagaaccaccccgugcucaacaugaucgacgugaacaagagcucccugaacaucagcggcuacaacuucucccugggcgcggccgucaaggccggggccugcaugcucgacggcgggaacaugcuggagacgaucaagaucagcccgcagaccguggacggcauccugaaguccauccucaaggugaagcgcgcccugggcauguucgucagcgacacccccggggagcggaaccccuacgagaacauccuguacaaggugugccucuccggcaacggguggcccuacaucgcgagccgcaccuccaucgucggccgggccugggagaacacggugguggaccuggagagcaacaagaaccagccgaaggucgggaacaacggcuccaacaagaugcugcagagcuccggcuucgccaccgggcucaccuacagccagcugaugacccugcgcgacuccaugcugcagcucgaccccacggccaagaccuggaucgacaucgagggccggcccgaggaccccguggagcuggcccuguuccagccgagcuccgggugcuacauccacuucuuccgcgagcccaccgaccucaagcaguucaagcaggacgcgaaguacagccacggcaucgacgugaacgaccuguucuccgcccagcccgggcugaccagcgccguccucgaggcccugccccggaacauggugcugacgugccagggcagcgacgacauccgcaagcuccuggacucccaggaccgcaaggacaucaagcugaucgacaucagccucuccaaggccgacgcgcggaaguucgagaacgacgugugggaccaguucaaggaccugugccacaugcacaccggcaucgucguggagaagaagaagaagggcgggaagcaggagaugaccccgcacugcgcccugcucgacugcaucauguucgacgccgccgugagcgggggccugaacguccccacccugcgcgccgugcuccccacggacaugguguuccggaccaucaccaccaaggucgugcugugaggacuaguaauaaggaaacuguaugaaugucugugggcaggaagugaagagauccuucuguaaagguuuuuggaauuaugucugcugaauaauaaacuuuuuugaaauaauaaaucugguagaaaaaugagaucucaaaggcucuuuucagagccaccaaaaaaaaaaaaaaaaaaaaaaaaaaaaaaaaaaaaaaaaaaaaaaaaaaaaaaaaaaaaaaaaaaaaaaaaaaaaaaaaaaaaaaaaaaaaaaaaaaaaa

SEQ ID NO: 21546 - RNA, 2097 nt, Artificial Sequence; identical to SEQ ID NO: 21540
  mRNA product Design b-4 (hSL-A100) comprising derived and/or modified sequence from LASV(Pinneo-NIG-1969;Clade I)__AIT17837__SP-IgE_NP(2-569) (opt1)

SEQ ID NO: 21547 - RNA, 2097 nt, Artificial Sequence
  mRNA product Design b-4 (hSL-A100) comprising derived and/or modified sequence from LASV(ISTH0009-NIG-2011;Clade II)__AIT17405__SP-IgE_NP(2-569) (opt1)
aggagagucccgcagucggcguccagcggcucugcuuguucgugugugugucguugcaggccuuauucaagcuuaccauggacuggaccuggauccuguuccucguggccgccgcgacccgcguccacagcagcguguccaaggaggucaagagcuuccuguggacccagucccuccgccgggagcugagcggcuacugcuccaacaucaagcuccagguggugaaggacgcccaggcccugcugcacgggcuggacuucagcgaggucuccaacgugcagcgccucaugcggaagcagaagcgcgacgacagcgaccugaagcggcugcgcgaccucaaccaggcggugaacaaccuggucgagcugaaguccacccagcagaaguccauccuccgggugggcacccugaccagcgacgaccugcucacccuggccgccgaccuggagaagcucaagagcaaggugauccgcaccgagcggccccuguccagcggggucuacaugggcaaccuguccacgcagcagcucgagcagcgccgggcccugcugaacaugaucgggauggugggcggcgcccaggggacccagccgggccgcgacggggugguccgggugugggacgugaagaaccccgaccuccugaacaaccaguucggcaccaugcccagccugacccucgcgugccugacgaagcaggggcaggucgaccugaacgacgccgugcucgcccugaccgaccugggccucaucuacaccgccaaguaccccaacuccagcgaccuggaccgccugucccagagccacccgauccucaacaugguggacaucaagaaguccagccugaacaucagcggcuacaacuucucccugggggcggccgucaaggccggcgccugcaugcucgacgggggcaacaugcuggagaccaucaaggugacgccccagaccauggacggcauccucaagagcauccugaaggugaagcggucccuggggauguucgucagcgacacccccggcgagcgcaaccccuacgagaacauccuguacaagaucugccucuccggggacggcuggccguacaucgccagccggaccuccaucguggggcgcgcgugggagaacacgaccguggaccuggagagcgacggcaagccccagaaggucggcuccgccgggagcaacaagucccugcagagcgccggcuuccccaccgggcucaccuacucccagcugaugacgcugaaggacagcaugaugcagcuggaccccuccgccaagaccuggaucgacaucgagggccggccggaggaccccguggagaucgcccucuaccagcccaugagcgggugcuacauccacuucuuccgcgagcccaccgaccugaagcaguucaagcaggacgcgaaguacucccacggcaucgacgucgccgaccuguucccggcccagcccggccucaccagcgccgugaucgaggcccugccccggaacauggugcugacgugccaggggagcgacgacaucaagcgccuccuggacucccagggccgccgggacaucaagcugaucgacaucgcgcucagcaaggccgacucccgccgguucgagaacgccgucugggaccagugcaaggaccugugccacaugcacaccggggugguggucgagaagaagaagcgcggcgggaaggaggagaucacgccccacugcgcccugauggacugcaucauguacgacgccgcggugagcggcggccucaacaucccggugcugcgggccguccugccccgcgacaugguguuccggaccuccagccccaaggugguccucugaggacuaguaauaaggaaacuguaugaaugucugugggcaggaagugaagagauccuucuguaaagguuuuuggaauuaugucugcugaauaauaaacuuuuuugaaauaauaaaucugguagaaaaaugagaucucaaaggcucuuuucagagccaccaaaaaaaaaaaaaaaaaaaaaaaaaaaaaaaaaaaaaaaaaaaaaaaaaaaaaaaaaaaaaaaaaaaaaaaaaaaaaaaaaaaaaaaaaaaaaaaaaaaaa

SEQ ID NO: 21548 - RNA, 2097 nt, Artificial Sequence
  mRNA product Design b-4 (hSL-A100) comprising derived and/or modified sequence from LASV(ISTH2010-NIG-2012;Clade II)__AIT17483__SP-IgE_NP(2-569) (opt1)
aggagagucccgcagucggcguccagcggcucugcuuguucgugugugugucguugcaggccuuauucaagcuuaccauggacuggaccuggauccuguuccucguggccgccgcgacccgcguccacagcagcgccuccaaggaggugaaguccuuccuguggacccagagccuccgccgggagcugagcggcuacugcuccaacaucaagcugcaggucgugaaggacgcccaggcgcuccugcacgggcuggacuucagcgagguguccaacguccagcgccucaugcggaagcagaagcgcgacgacagcgaccugaagcggcugcgcgaccucaaccaggccgugaacaaccugguggagcugaaguccacccagcagaaguccauccuccgggucggcacgcugaccagcgacgaccugcucacccuggccgccgaccuggagaagcucaagagcaaggugauccgcaccgagcggccccuguccagcgggguguacaugggcaaccuguccacgcagcagcucgagcagcgccgggcccugcugaaccucaucgggauggucggcggcgcgcaggggacccagccgggccgcgacgggguggugcgggucugggacgugaagaaccccgaccugcugaacaaccaguucggcaccaugcccagccucacccuggccugccugacgaagcagggccagguggaccucaacgacgccguccuggcccugaccgaccucgggcugaucuacaccgcgaaguaccccaacuccagcgaccuggaccgccucucccagagccacccgauccugaacaugguggacaccaagaaguccagccugaacaucagcggcuucaacuucucccucggggccgccgugaaggccggcgccugcaugcuggacgggggcaacaugcuggagacgaucaaggucacgccccagaccauggacggcauccucaagagcauccugaaggugaagaagucccuggggauguucgugagcgacacccccggcgagcggaaccccuacgagaacauccucuacaagaucugccuguccggggacggcuggccguacaucgcgagccgcaccuccaucgucgggcgggccugggagaacaccaccguggaccuggagagcgacggcaagccccacaaggugggcaccgccggguccaacaagagccuccaguccgccggcuuccccacggggcugaccuacagccagcugaugacccugaaggacuccaugaugcagcucgaccccagcgccaagaccuggaucgacaucgagggccgcccggaggaccccgucgagaucgcgcuguaccagcccauguccgggugcuacauccacuucuuccgggagcccacggaccugaagcaguucaagcaggacgccaaguacagccacggcaucgacguggccgaccucuucccggcccagcccggccugaccuccgccgucaucgaggcgcugccccgcaacauggugcugaccugccaggggagcgacgacaucaagcggcuccuggacagccagggccgccgcgacaucaagcucaucgacaucgcccuguccaaggccgacagccggcgcuucgagaacgccgugugggaccagugcaaggaccugugccacaugcacaccggggucgugguggagaagaagaagcggggcgggaaggaggagaucacgccccacugcgcccucauggacugcaucauguacgacgcggccgucuccggcggccugaacaucccggugcugcgcgccgugcucccccgggacauggucuuccgcaccagcucccccaagguggugcugugaggacuaguaauaaggaaacuguaugaaugucugugggcaggaagugaagagauccuucuguaaagguuuuuggaauuaugucugcugaauaauaaacuuuuuugaaauaauaaaucugguagaaaaaugagaucucaaaggcucuuuucagagccaccaaaaaaaaaaaaaaaaaaaaaaaaaaaaaaaaaaaaaaaaaaaaaaaaaaaaaaaaaaaaaaaaaaaaaaaaaaaaaaaaaaaaaaaaaaaaaaaaaaaaa

SEQ ID NO: 21549 - RNA, 2097 nt, Artificial Sequence
  mRNA product Design b-4 (hSL-A100) comprising derived and/or modified sequence from LASV(Lassa virus/H.sapiens-wt/NGA/2015/ISTH_0543;Clade II)__AVO03640__SP-IgE_NP(2-569) (opt1)
aggagagucccgcagucggcguccagcggcucugcuuguucgugugugugucguugcaggccuuauucaagcuuaccauggacuggaccuggauccuguuccucguggccgccgcgacccgcguccacagcagcgccuccaaggaggugaaguccuuccuguggacccagagccuccgccgggagcugagcggcuacugcuccaacaucaagcugcaggucgugaaggacgcccaggcgcuccugcacgggcuggacuucagcgagguguccaacguccagcgccucaugcggaagcagaagcgcgacgacagcgaccugaagcggcugcgcgaccucaaccaggccgugaacaaccugguggagcugaaguccacccagcagaaguccauccuccgggucggcacgcugaccagcgacgaccugcucacccuggccgccgaccuggagaagcucaagagcaaggugauccgcaccgagcggccccuguccagcgggguguacaugggcaaccuguccacgcagcagcucgagcagcgccgggcccugcugaacaugaucgggauggucggcggcgcgcaggggacccagccgggccgcgacgggguggugcgggucugggacgugaagaaccccgaccuccugaacaaccaguucggcaccaugcccagccugacccucgccugccugacgaagcagggccagguggaccugaacgacgccguccucgcccugaccgaccuggggcucaucuacaccgcgaaguaccccaacuccagcgaccuggaccgccugucccagagccacccgauccucaacaugguggacaccaagaaguccagccugaacaucagcggcuacaacuucucccugggggccgccgugaaggccggcgccugcaugcucgacgggggcaacaugcuggagacgaucaaggucacgccccagaccauggacggcauccucaagagcauccugaaggugaagaagucccuggggauguucgugagcgacacccccggcgagcggaaccccuacgagaacauccuguacaagaucugccucuccggggacggcuggccguacaucgcgagccgcaccuccaucgucgggcgggccugggagaacaccaccguggaccuggagagcgacggcaagccccagaaggugggcuccgccgggagcaacaagucccugcagagcgccggcuuccccaccgggcucacguacucccagcugaugacccugaaggacagcaugaugcagcuggaccccuccgccaagaccuggaucgacaucgagggccgcccggaggaccccgucgagaucgcgcucuaccagcccaugagcgggugcuacauccacuucuuccgggagcccaccgaccugaagcaguucaagcaggacgccaaguacucccacggcaucgacguggccgaccuguucccggcccagcccggccucacgagcgccgucaucgaggcgcugccccgcaacauggugcugaccugccaggggagcgacgacaucaagcggcuccuggacucccagggccgcaaggacaucaagcugaucgacaucgcccucagcaaggccgacucccgccgguucgagaacgccgugugggaccagugcaaggaccugugccacaugcacaccggggucgugguggagaagaagaagcgcggcgggaaggaggagaucacgccccacugcgcccugauggacugcaucauguacgacgcggccgucagcggcggccucaacaucccggugcugcgggccgugcugccccgcgacauggucuuccggaccuccagccccaagguggugcucugaggacuaguaauaaggaaacuguaugaaugucugugggcaggaagugaagagauccuucuguaaagguuuuuggaauuaugucugcugaauaauaaacuuuuuugaaauaauaaaucugguagaaaaaugagaucucaaaggcucuuuucagagccaccaaaaaaaaaaaaaaaaaaaaaaaaaaaaaaaaaaaaaaaaaaaaaaaaaaaaaaaaaaaaaaaaaaaaaaaaaaaaaaaaaaaaaaaaaaaaaaaaaaaaa

SEQ ID NO: 21550 - RNA, 2097 nt, Artificial Sequence
  mRNA product Design b-4 (hSL-A100) comprising derived and/or modified sequence from LASV(Lassa virus/H.sapiens-wt/NGA/2016/ISTH_0009;Clade II)__AVO03572__SP-IgE_NP(2-569) (opt1)
aggagagucccgcagucggcguccagcggcucugcuuguucgugugugugucguugcaggccuuauucaagcuuaccauggacuggaccuggauccuguuccucguggccgccgcgacccgcguccacagcagcgccuccaaggaggugaaguccuuccuguggacccagagccuccgccgggagcugagcggcuacugcuccaacaucaagcugcaggucgugaaggacgcccaggcgcuccugcacgggcuggacuucagcgagguguccaacguccagcgccucaugcggaagcagaagcgcgacgacagcgaccugaagcggcugcgcgaccucaaccaggccgugaacaaccugguggagcugaaguccacccagcagaaguccauccuccgggucggcacgcugaccagcgacgaccugcucacccuggccgccgaccuggagaagcucaagagcaaggugauccgcaccgagcggccccuguccagcgggguguacaugggcaaccuguccacgcagcagcucgagcagcgccgggcccugcugaacaugaucgggauggucggcggcgcgcaggggacccagccgggccgcgacgggguggugcgggucugggacgugaagaaccccgaccuccugaacaaccaguucggcaccaugcccagccugacccucgccugccugacgaagcagggccagguggaccugaacgacgccguccucgcccugaccgaccuggggcucaucuacaccgcgaaguaccccaacuccagcgaccuggaccgccugucccagagccacccgauccucaacaugguggacaccaagaaguccagccugaacaucagcggcuacaacuucucccugggggccgccgugaaggccggcgccugcaugcucgacgggggcaacaugcuggagacgaucaaggucacgccccagaccauggacggcauccucaagagcauccugaaggugaagaagucccuggggauguucgugagcgacacccccggcgagcggaaccccuacgagaacauccuguacaagaucugccucuccggggacggcuggccguacaucgcgagccgcaccuccaucgucgggcgggccugggagaacaccaccguggaccuggagagcgacggcaagccccagaaggugggcuccgccgggagcaacaagucccugcagagcgccggcuuccccaccgggcucacguacucccagcugaugacccugaaggacagcaugaugcagcuggaccccuccgccaagaccuggaucgacaucgagggccgcccggaggaccccgucgagaucgcgcucuaccagcccaugagcgggugcuacauccacuucuuccgggagcccaccgaccugaagcaguucaagcaggacgccaaguacucccacggcaucgacguggccgaccuguucccggcccagcccggccucacgagcgccgucaucgaggcgcugccccgcaacauggugcugaccugccaggggagcgacgacaucaagcggcuccuggacucccagggccgccgcgacaucaagcugaucgacaucgcccucagcaaggccgacucccggcgcuucgagaacgccgugugggaccagugcaaggaccugugccacaugcacaccggggucgugguggagaagaagaagcggggcgggaaggaggagaucacgccccacugcgcccugauggacugcaucauguacgacgcggccgucagcggcggccucaacaucccggugcugcgcgccgugcugccccgggacauggucuuccgcaccuccagccccaagguggugcucugaggacuaguaauaaggaaacuguaugaaugucugugggcaggaagugaagagauccuucuguaaagguuuuuggaauuaugucugcugaauaauaaacuuuuuugaaauaauaaaucugguagaaaaaugagaucucaaaggcucuuuucagagccaccaaaaaaaaaaaaaaaaaaaaaaaaaaaaaaaaaaaaaaaaaaaaaaaaaaaaaaaaaaaaaaaaaaaaaaaaaaaaaaaaaaaaaaaaaaaaaaaaaaaaa

SEQ ID NO: 21551 - RNA, 2097 nt, Artificial Sequence
  mRNA product Design b-4 (hSL-A100) comprising derived and/or modified sequence from LASV(Lassa virus/H.sapiens-wt/NGA/2016/ISTH_0017;Clade II)__AVO03568__SP-IgE_NP(2-569) (opt1)
aggagagucccgcagucggcguccagcggcucugcuuguucgugugugugucguugcaggccuuauucaagcuuaccauggacuggaccuggauccuguuccucguggccgccgcgacccgcguccacagcagcgccuccaaggaggugaaguccuuccuguggacccagagccuccgccgggagcugagcggcuacugcuccagcaucaagcugcaggucgugaaggacgcccaggcgcuccugcacgggcuggacuucuccgaggugagcaacguccagcgccucaugcggaagcagaagcgcgacgacuccgaccugaagcggcugcgcgaccucaaccaggccgugaacaaccugguggagcucaagagcacccagcagaaguccauccugcgggucggcacgcugaccagcgacgaccugcucacccuggccgccgaccuggagaagcucaaguccaaggugauccgcaccgagcggccccugagcuccgggguguacaugggcaaccugagcacgcagcagcucgagcagcgccgggcccugcugaacaugaucgggauggcgggcggcgcccaggggacccagccgggccgcgacggggucgugcgggugugggacgucaagaaccccgaccuccugaacaaccaguucggcaccaugcccucccugacccucgccugccugacgaagcagggccagguggaccugaacgacgccgugcucgcgcugaccgaccuggggcucaucuacaccgccaaguaccccaacagcuccgaccuggaccgccugagccagagccacccgauccucaacauggucgacaccaagaaguccagccugaacaucuccggcuacaacuucagccugggggccgccgugaaggccggcgcgugcaugcucgacgggggcaacaugcuggagacgaucaaggugacgccccagaccauggacggcauccugaaguccauccucaaggucaagcggagccuggggauguucguguccgacgcccccggcgagcgcaaccccuacgagaacauccuguacaagaucugccucagcggggacggcuggccguacaucgccucccggaccagcaucguggggcgcgccugggagaacaccaccgucgaccuggaguccgacggcaagccccagaaggugggcgccaccgggagcaacaagucccugcagagcgcgggcuuccccaccgggcucacguacucccagcugaugacccugaaggacagcaugaugcagcuggaccccuccgccaagaccuggaucgacaucgagggccggccggaggaccccguggaggucgcccucuaccagcccgugagcgggugcuacauccacuucuuccgcgagcccaccgaccugaagcaguucaagcaggacgccaaguacucccacggcaucgacgucgccgaccuguucccggcgcagcccggccucacgagcgccgugaucgaggcccugccccggaacauggugcugaccugccaggggagcgacgacaucaagaagcuccuggacucccagggccgcaaggacaucaagcugaucgacaucgcccucagcaaggccgacucccgccgguucgagaacgcggucugggaccagugcaaggaccugugccacaugcacaccggggugguggucgagaagaagaagcgcggcgggaaggaggagaucacgccccacugcgcccugauggacugcaucauguacgacgccgccgugagcggcggccucaacaucccggugcugcgggcgguccugccccgcgacaugguguuccggaccuccagccccaaggugguccucugaggacuaguaauaaggaaacuguaugaaugucugugggcaggaagugaagagauccuucuguaaagguuuuuggaauuaugucugcugaauaauaaacuuuuuugaaauaauaaaucugguagaaaaaugagaucucaaaggcucuuuucagagccaccaaaaaaaaaaaaaaaaaaaaaaaaaaaaaaaaaaaaaaaaaaaaaaaaaaaaaaaaaaaaaaaaaaaaaaaaaaaaaaaaaaaaaaaaaaaaaaaaaaaaa

SEQ ID NO: 21552 - RNA, 2097 nt, Artificial Sequence
  mRNA product Design b-4 (hSL-A100) comprising derived and/or modified sequence from LASV(Lassa virus/H.sapiens-wt/NGA/2018/ISTH_0959;Clade II)__AVV65100__SP-IgE_NP(2-569) (opt1)
aggagagucccgcagucggcguccagcggcucugcuuguucgugugugugucguugcaggccuuauucaagcuuaccauggacuggaccuggauccuguuccucguggccgccgcgacccgcguccacagcagcgccuccaaggaggugaaguccuuccuguggacccagagccuccgccgggagcugagcggcuacugcuccaacaucaagcugcaggucgugaaggacgcccaggcgcuccugcacgggcuggacuucagcgagguguccaacguccagcgccucaugcggaagcagaagcgcgacgacagcgaccugaagcggcugcgcgaccucaaccaggccgugaacaaccugguggagcugaaguccacccagcagaaguccauccuccgggucggcacccugaccagcgacgaccugcucacccuggccgccgaccuggagaagcucaagagcaaggugauccgcaccgagcggccccuguccagcgggguguacaugggcaaccuguccacgcagcagcucgagcagcgccgggcccugcugaaccucaucgggauggucggcggcgcgcaggggacccagccgggccgcgacgggguggugcgggucugggacgugaagaaccccgaccugcugaacaaccaguucggcaccaugcccagccucacccuggccugccugacgaagcagggccagguggaccucaacgacgucgugcuggcccugaccgaccucgggcugaucuacaccgccaaguaccccaacuccagcgaccuggaccgccucucccagagccacccgauccugaacaugguggacaccaagaaguccagccugaacaucagcggcuucaacuucucccucggggcggccgucaaggccggcgccugcaugcuggacgggggcaacaugcuggagacgaucaaggugacgccccagaccauggacggcauccucaagagcauccugaaggugaagaagucccuggggauguucgucagcgacacccccggcgagcggaaccccuacgagaacauccucuacaagaucugccuguccggggacggcuggccguacaucgccagccgcaccuccaucguggggcgggcgugggagaacaccaccguggaccuggagagcgacggcaagccccacaaggucggcaccgccggguccaacaagagccuccaguccgccggcuuccccacggggcugaccuacagccagcugaugacccugaaggacuccaugaugcagcucgaccccagcgccaagaccuggaucgacaucgagggccgcccggaggaccccguggagaucgcccuguaccagcccauguccgggugcuacauccacuucuuccgggagcccacggaccugaagcaguucaagcaggacgcgaaguacagccacggcaucgacgucgccgaccucuucccggcccagcccggccugaccuccgccgugaucgaggcccugccccgcaacauggugcugaccugccaggggagcgacgacaucaagcggcuccuggacagccagggccgcaaggacaucaagcucaucgacaucgcgcuguccaagaccgacagccgccgguucgagaacgccgucugggaccagugcaaggaccugugccacaugcacacgggggugguggucgagaagaagaagcgcggcgggaaggaggagaucacgccccacugcgcccucauggacugcaucauguacgacgccgccguguccggcggccugaacaucccggugcugcgggcgguccucccccgcgacaugguguuccggaccagcucccccaaggugguccugugaggacuaguaauaaggaaacuguaugaaugucugugggcaggaagugaagagauccuucuguaaagguuuuuggaauuaugucugcugaauaauaaacuuuuuugaaauaauaaaucugguagaaaaaugagaucucaaaggcucuuuucagagccaccaaaaaaaaaaaaaaaaaaaaaaaaaaaaaaaaaaaaaaaaaaaaaaaaaaaaaaaaaaaaaaaaaaaaaaaaaaaaaaaaaaaaaaaaaaaaaaaaaaaaa

SEQ ID NO: 21553 - RNA, 2097 nt, Artificial Sequence
  mRNA product Design b-4 (hSL-A100) comprising derived and/or modified sequence from LASV(LASV003-NIG-2008;Clade II)__AIT17581__SP-IgE_NP(2-569) (opt1)
aggagagucccgcagucggcguccagcggcucugcuuguucgugugugugucguugcaggccuuauucaagcuuaccauggacuggaccuggauccuguuccucguggccgccgcgacccgcguccacagcagcgccuccaaggaggugaaguccuuccuguggacccagagccuccgccgggagcugagcggcuacugcuccagcaucaagcugcaggucgugaaggacgcccaggcgcuccugcacgggcuggacuucuccgaggugagcaacguccagcgccucaugcggaagcagaagcgcgacgacuccgaccugaagcggcugcgcgaccucaaccaggccgugaacaaccugguggagcucaagagcacccagcagaaguccguccugcgggugggcacccugaccagcgacgaccugcucacccuggccgccgaccuggagaagcucaaguccaaggugauccgcaccgagcggccccugagcuccggggucuacaugggcaaccugagcgcccagcagcucgagcagcgccggacgcugcugaacaugaucgggauggugggcggcgcgcaggggacccagccgggccgcgacggggugguccgggugugggacgugaagaaccccgaccuccugaacaaccaguucggcaccaugcccucccugacccucgccugccugacgaagcaggggcaggucgaccugaacgacguggugcucgcccugaccgaccugggccucaucuacaccgccaaguaccccaacagcuccgaccuggaccgccugagccagagccacccgauccucuccauggucgacaccaagaaguccagccugaacaucagcggcuacaacuucucccugggggcggccgugaaggccggcgccugcaugcucgacgggggcaacaugcuggagacgaucaaggugacgccccagaccauggacggcauccucaagagcauccugaaggucaagaagucccuggggauguucgugagcgacacccccggcgagcggaaccccuacgagaacauccuguacaagaucugccucuccggggacggcuggccguacaucgccagccgcaccuccaucguggggcgggcgugggagaacaccaccgucgaccuggagagcgacggcaagccccagaaggugggcaccgccggguccaacaagagccugcaguccgccggcuuccccacggggcucaccuacagccagcugaugacccugaaggacuccaugaugcagcuggaccccagcgccaagaccuggaucgacaucgagggccgcccggaggaccccgucgagaucgcccucuaccagcccauguccgggugcuacauccacuucuuccgggagcccacggaccugaagcaguucaagcaggacgcgaaguacagccacggcaucgacgugaccgaccuguucccggcccagcccggccucaccagcgccgugaucgaggcccugccccgcaacaugguccugaccugccagggguccgacgacaucaagcggcuccuggacagccagggccgccgcgacaucaagcugaucgacaucgcccucuccaaggcggacagccggcgcuucgagaacgccgugugggaccagugcaaggaccugugccacaugcacacggggguggucguggagaagaagaagcggggcgggaaggaggagaucacgccccacugcgcccugauggacugcaucauguacgacgccgccguguccggcggccucaacaucccgguccugcgcgcggugcugccccgggacaugguguuccgcaccagcucccccaaggucgugcucugaggacuaguaauaaggaaacuguaugaaugucugugggcaggaagugaagagauccuucuguaaagguuuuuggaauuaugucugcugaauaauaaacuuuuuugaaauaauaaaucugguagaaaaaugagaucucaaaggcucuuuucagagccaccaaaaaaaaaaaaaaaaaaaaaaaaaaaaaaaaaaaaaaaaaaaaaaaaaaaaaaaaaaaaaaaaaaaaaaaaaaaaaaaaaaaaaaaaaaaaaaaaaaaaa

SEQ ID NO: 21554 - RNA, 2097 nt, Artificial Sequence
  mRNA product Design b-4 (hSL-A100) comprising derived and/or modified sequence from LASV(LASV035-NIG-2009;Clade II)__AIT17589__SP-IgE_NP(2-569) (opt1)
aggagagucccgcagucggcguccagcggcucugcuuguucgugugugugucguugcaggccuuauucaagcuuaccauggacuggaccuggauccuguuccucguggccgccgcgacccgcguccacagcagcgccuccaaggaggugaaguccuuccuguggacccagagccuccgccgggagcugagcggcuacugcuccagcaucaagcugcaggucgugaaggacgcccaggcgcuccugcacgggcuggacuucuccgaggugagcaacguccagcgccucaugcggaagcagaagcgcgacgacuccgaccugaagcggcugcgcgaccucaaccaggccgugaacaaccugguggagcucaagagcacccagcagaaguccauccugcgggucggcacgcugaccagcgacgaccugcucacccuggccgccgaccuggagaagcucaaguccaaggugauccgcaccgagcggccccugagcuccgggguguacaugggcaaccugagcgcccagcagcucgagcagcgccgggcgcugcugaacaugaucgggauggucggcggcgcccaggggacgcagccgggccgcgacgggguggugcgggucugggacgugaagaaccccgaccuccugaacaaccaguucggcaccaugcccucccugacccucgccugccugaccaagcagggccagguggaccugaacgacgccguccucgcgcugacggaccuggggcucaucuacaccgccaaguaccccaacagcuccgaccuggaccgccugagccagagccacccgauccucaacaugguggacaccaagaaguccagccugaacaucuccggcuacaacuucagccugggggccgccgugaaggccggcgcgugcaugcucgacgggggcaacaugcuggagaccaucaaggucacgccccagaccauggacggcauccugaaguccauccucaaggugaagcggagccuggggauguucguguccgacacccccggcgagcgcaaccccuacgagaacauccuguacaagaucugccucagcggggacggcuggccguacaucgccucccggaccagcaucgucgggcgcgccugggagaacacgaccguggaccuggaguccgacggcaagccccagaaggugggcaccaccgggagcaacaagucccugcagagcgccggcuuccccacggggcucaccuacucccagcugaugacccugaaggacagcaugaugcagcuggaccccuccgccaagaccuggaucgacaucgagggccggccggaggaccccgucgagaucgcgcucuaccagcccaugagcgggugcuacauccacuucuuccgcgagcccacggaccugaagcaguucaagcaggacgccaaguacucccacggcaucgacguggccgaccuguucccggcccagcccggccucaccagcgccgucaucgaggcgcugccccggaacauggugcugaccugccaggggagcgacgacaucaagaagcuccuggacucccagggccgccgcgacaucaagcugaucgacaucgcccucagcaaggccgacucccggaaguucgagaacgccgugugggaccagugcaaggaccugugccacaugcacaccggggucgugguggagaagaagaagcgcggcgggaaggaggagaucacgccccacugcgcccugauggacugcaucauguacgacgcggccgucagcggcggccucaacaucccggugcugcgggccgugcugccccgcgacauggucuuccggaccuccagccccaagguggugcucugaggacuaguaauaaggaaacuguaugaaugucugugggcaggaagugaagagauccuucuguaaagguuuuuggaauuaugucugcugaauaauaaacuuuuuugaaauaauaaaucugguagaaaaaugagaucucaaaggcucuuuucagagccaccaaaaaaaaaaaaaaaaaaaaaaaaaaaaaaaaaaaaaaaaaaaaaaaaaaaaaaaaaaaaaaaaaaaaaaaaaaaaaaaaaaaaaaaaaaaaaaaaaaaaa

SEQ ID NO: 21555 - RNA, 2097 nt, Artificial Sequence
  mRNA product Design b-4 (hSL-A100) comprising derived and/or modified sequence from LASV(LASV1000-NIG-2009;Clade II)__AIT17783__SP-IgE_NP(2-569) (opt1)
aggagagucccgcagucggcguccagcggcucugcuuguucgugugugugucguugcaggccuuauucaagcuuaccauggacuggaccuggauccuguuccucguggccgccgcgacccgcguccacagcagcgccuccaaggaggugaaguccuuccuguggacccagagccuccgccgggagcugagcggcuacugcuccaacaucaagcugcaggucgugaaggacgcccaggcgcuccugcacgggcuggacuucagcgagguguccaacguccagcgccucaugcggaagcagaagcgcgacgacagcgaccugaagcggcugcgcgaccucaaccaggccgugaacaaccugguggagcugaaguccacccagcagaaguccauccuccgggucggcacgcugaccagcgacgaccugcucacccuggccgccgaccuggagaagcucaagagcaaggugauccgcaccgagcggccccuguccagcgggguguacaugggcaaccuguccacgcagcagcucgagcagcgccgggcccugcugaacaugaucgggauggucggcggcgcgcaggggacccagccgggccgcgacgggguggugcgggucugggacgugaagaaccccgaccuccugaacaaccaguucggcaccaugcccagccugacccucgccugccugacgaagcagggccagguggaccugaacgacgucgugcucgcccugaccgaccuggggcucaucuacaccgccaaguaccccaacuccagcgaccuggaccgccugucccagagccacccgauccucaacaugguggacaccaagaaguccagccugaacaucagcggcuacaacuucucccugggggcggccgucaaggccggcgccugcaugcucgacgggggcaacaugcuggagacgaucaaggugacgccccagaccauggacggcauccucaagagcauccugaaggugaagaagucccuggggauguucgucagcgacacccccggcgagcggaaccccuacgagaacauccuguacaagaucugccucuccggggacggcuggccguacaucgccagccgcaccuccaucguggggcgggcgugggagaacaccaccguggaccuggagagcgacggcaagccccagaaggucggcaccgccggguccaacaagagccugcaguccgccggcuuccccacggggcucaccuacagccagcugaugacccugaaggacuccaugaugcagcuggaccccagcgccaagaccuggaucgacaucgagggccgcccggaggaccccguggagaucgcccucuaccagcccgucuccgggugcuacauccacuucuuccgggagcccacggaccugaagcaguucaagcaggacgcgaaguacagccacggcaucgacguggccgaccuguucccggcccagcccggccucaccuccgccgugaucgaggcccugccccgcaacaugguccugaccugccaggggagcgacgacaucaagcggcuccuggacagccagggccgccgcgacaucaagcugaucgacaucgcgcucuccaaggccgacagccggcgcuucgagaacgccgugugggaccagugcaaggaccugugccacaugcacaccgggguggucguggagaagaagaagcggggcgggaaggaggagaucacgccccacugcgcccugauggacugcaucauguacgacgccgcgguguccggcggccucaacaucccgguccugcgcgccgugcugccccgggacaugguguuccgcaccagcucccccaaggucgugcucugaggacuaguaauaaggaaacuguaugaaugucugugggcaggaagugaagagauccuucuguaaagguuuuuggaauuaugucugcugaauaauaaacuuuuuugaaauaauaaaucugguagaaaaaugagaucucaaaggcucuuuucagagccaccaaaaaaaaaaaaaaaaaaaaaaaaaaaaaaaaaaaaaaaaaaaaaaaaaaaaaaaaaaaaaaaaaaaaaaaaaaaaaaaaaaaaaaaaaaaaaaaaaaaaa

SEQ ID NO: 21556 - RNA, 2097 nt, Artificial Sequence
  mRNA product Design b-4 (hSL-A100) comprising derived and/or modified sequence from LASV(LASV221-NIG-2010;Clade II)__AIT17625__SP-IgE_NP(2-569) (opt1)
aggagagucccgcagucggcguccagcggcucugcuuguucgugugugugucguugcaggccuuauucaagcuuaccauggacuggaccuggauccuguuccucguggccgccgcgacccgcguccacagcagcgccuccaaggaggugaaguccuuccuguggacccagagccuccgccgggagcugagcggcuacugcuccagcaucaagcugcaggucgugaaggacgcccaggcgcuccugcacgggcuggacuucuccgaggugagcaacguccagcgccucaugcggaagcagcgccgggacgacuccgaccugaagcgccugcgggaccucaaccaggccgugaacaaccugguggagcucaagagcacccagcagaaguccauccugcgcgucggcacgcugaccagcgacgaccugcucacccuggccgccgaccuggagaagcucaaguccaaggugauccggaccgagcgcccccugagcuccgggguguacaugggcaaccugagcacgcagcagcucgagcagcggcgcgcccugcugaacaugaucgggauggucggcggcgcgcaggggacccagccgggccgggacgggguggugcgcgucugggacgugaagaaccccgaccuccugaacaaccaguucggcaccaugcccucccugacccucgccugccugacgaagcagggccagguggaccugaacgacgccguccucgcccugaccgaccuggggcucaucuacaccgcgaaguaccccaacagcuccgaccuggaccggcugagccagagccacccgauccucaacaugguggacaccaagaaguccagccugaacaucuccggcuacaacuucagccugggggccgccgugaaggccggcgccugcaugcucgacgggggcaacaugcuggagacgaucaaggucacgccccagaccguggacggcauccugaaguccauccucaaggugaagcgcagccuggggauguucgucuccgacacccccggcgagcggaaccccuacgagaacauccuguacaagaucugccucagcggggacggcuggccguacaucgcgucccgcaccagcaucguggggcgggccugggagaacaccaccguggaccuggaguccgacggcaagccccagaaggucggcaccgccgggagcaacaagucccugcagagcgccggcuuccccacggggcucaccuacucccagcugaugacccugaaggacagcaugaugcagcuggaccccuccgccaagaccuggaucgacaucgagggccgcccggaggaccccguggagaucgcgcucuaccagcccaugagcgggugcuacauccacuucuuccgggagcccacggaccugaagcaguucaagcaggacgccaaguacucccacggcaucgacgucgccgaccuguucccggcccagcccggccucaccagcgccgugaucgaggcgcugccccgcaacauggugcugaccugccaggggagcgacgacaucaagcgccuccuggacucccagggccggcgcgacaucaagcugaucgacaucgcccucagcaaggccgacucccggaaguucgagaacgccgucugggaccagugcaaggaccugugccacaugcacaccggggugguggucgagaagaagaagcgcggcgggaaggaggagaucacgccccacugcgcccugauggacugcaucauguacgacgcggccgugagcggcggccucaacaucccggugcugcgggccguccugccccgcgacaugguguuccggaccuccagccccaaggugguccucugaggacuaguaauaaggaaacuguaugaaugucugugggcaggaagugaagagauccuucuguaaagguuuuuggaauuaugucugcugaauaauaaacuuuuuugaaauaauaaaucugguagaaaaaugagaucucaaaggcucuuuucagagccaccaaaaaaaaaaaaaaaaaaaaaaaaaaaaaaaaaaaaaaaaaaaaaaaaaaaaaaaaaaaaaaaaaaaaaaaaaaaaaaaaaaaaaaaaaaaaaaaaaaaaa

SEQ ID NO: 21557 - RNA, 2097 nt, Artificial Sequence
  mRNA product Design b-4 (hSL-A100) comprising derived and/or modified sequence from LASV(LASV237-NIG-2010;Clade II)__AIT17639__SP-IgE_NP(2-569) (opt1)
aggagagucccgcagucggcguccagcggcucugcuuguucgugugugugucguugcaggccuuauucaagcuuaccauggacuggaccuggauccuguuccucguggccgccgcgacccgcguccacagcagcgccuccaaggaggugaaguccuuccuguggacccagagccuccgccgggagcugagcggcuacugcuccaacaucaagcugcaggucgugaaggacgcccaggcgcuccugcacgggcuggacuucagcgagguguccaacguccagcgccucaugcggaagcagaagcgcgacgacagcgaccugaagcggcugcgcgaccucaaccaggccgugaacaaccugguggagcugaaguccacccagcagaaguccauccuccgggucggcacccugaccagcgacgaccugcucacccuggccgccgaccuggagaagcucaagagcaaggugauccgcaccgagcggccccuguccagcgggguguacaugggcaaccuguccacgcagcagcucgagcagcgccgggcccugcugaacaugaucgggauggucggcggcgcgcaggggacccagccgggccgcgacgggguggugcgggucugggacgugaagaaccccgaccuccugaacaaccaguucggcaccaugcccagccugacccucgccugccugacgaagcagggccagguggaccugaacgacgccguccucgcccugaccgaccuggggcucaucuacaccgcgaaguaccccaacuccagcgaccuggaccgccugucccagagccacccgauccucaacaugguggacaucaagaaguccagccugaacaucagcggcuacaacuucucccugggggccgccgugaaggccggcgccugcaugcucgacgggggcaacaugcuggagaccaucaaggucacgccccagaccauggacggcauccucaagagcauccugaaggugaagcggucccuggggauguucgugagcgacacccccggcgagcgcaaccccuacgagaacauccuguacaagaucugccucuccggggacggcuggccguacaucgcgagccggaccuccaucgucgggcgcgccugggagaacacgaccguggaccuggagagcgacggcaagccccagaaggugggcuccgccgggagcaacaagucccugcagagcgccggcuuccccaccgggcucaccuacucccagcugaugacgcugaaggacagcaugaugcagcuggaccccuccgccaagaccuggaucgacaucgagggccggccggaggaccccgucgagaucgcgcucuaccagcccaugagcgggugcuacauccacuucuuccgcgagcccaccgaccugaagcaguucaagcaggacgccaaguacucccacggcaucgacguggccgaccuguucccggcccagcccggccucaccagcgccgucaucgaggcgcugccccggaacauggugcugacgugccaggggagcgacgacaucaagcgccuccuggacucccagggccgccgggacaucaagcugaucgacaucgcccucagcaaggccgacucccgccgguucgagaacgccgugugggaccagugcaaggaccugugccacaugcacaccggggucgugguggagaagaagaagcgcggcgggaaggaggagaucacgccccacugcgcccugauggacugcaucauguacgacgcggccgucagcggcggccucaacaucccggugcugcgggccgugcugccccgcgacauggucuuccggaccuccagccccaagguggugcucugaggacuaguaauaaggaaacuguaugaaugucugugggcaggaagugaagagauccuucuguaaagguuuuuggaauuaugucugcugaauaauaaacuuuuuugaaauaauaaaucugguagaaaaaugagaucucaaaggcucuuuucagagccaccaaaaaaaaaaaaaaaaaaaaaaaaaaaaaaaaaaaaaaaaaaaaaaaaaaaaaaaaaaaaaaaaaaaaaaaaaaaaaaaaaaaaaaaaaaaaaaaaaaaaa

SEQ ID NO: 21558 - RNA, 2097 nt, Artificial Sequence
  mRNA product Design b-4 (hSL-A100) comprising derived and/or modified sequence from LASV(LASV253-NIG-2011;Clade II)__AIT17671__SP-IgE_NP(2-569) (opt1)
aggagagucccgcagucggcguccagcggcucugcuuguucgugugugugucguugcaggccuuauucaagcuuaccauggacuggaccuggauccuguuccucguggccgccgcgacccgcguccacagcagcgccuccaaggaggugaaguccuuccuguggacccagagccuccgccgggagcugagcggcuacugcuccagcaucaagcugcaggucgugaaggacgcccaggcgcuccugcacgggcuggacuucuccgaggugagcaacguccagcgccucaugcggaagcagaagcgcgacgacuccgaccugaagcggcugcgcgaccucaaccaggccgugaacaaccugguggagcucaagagcacccagcagaaguccguccugcgggugggcacccugaccagcgacgaccugcucacccuggccgccgaccuggagaagcucaaguccaaggugauccgcaccgagcggccccugagcuccggggucuacaugggcaaccugagcacgcagcagcucgagcagcgccgggcccugcugaacaugaucgggauggugggcggcgcgcaggggacccagccgggccgcgacggggugguccgggugugggacgugaagaaccccgaccuccugaacaaccaguucggcaccaugcccucccugacccucgccugccugacgaagcaggggcaggucgaccugaacgacguggugcucgcccugaccgaccugggccucaucuacaccgccaaguaccccaacagcuccgaccuggaccgccugagccagagccacccgauccucaacauggucgacaccaagaaguccagccugaacaucuccggcuacaacuucagccugggggcggccgugaaggccggcgccugcaugcucgacgggggcaacaugcuggagacgaucaaggugacgccccagaccauggacggcauccugaaguccauccucaaggucaagaagucccuggggauguucgugagcgacacccccggcgagcggaaccccuacgagaacauccuguacaagaucugccucagcggggacggcuggccguacaucgccucccgcaccagcaucguggggcgggcgugggagaacaccaccgucgaccuggaguccgacggcaagccccagaaggugggcaccgccgggagcaacaagucccugcagagcgccggcuuccccacggggcucaccuacucccagcugaugacccugaaggacagcaugaugcagcuggaccccuccgccaagaccuggaucgacaucgagggccgcccggaggaccccgucgagaucgcccucuaccagcccaugagcgggugcuacauccacuucuuccgggagcccacggaccugaagcaguucaagcaggacgcgaaguacucccacggcaucgacgugaccgaccuguucccggcccagcccggccucaccagcgccgugaucgaggcccugccccgcaacaugguccugaccugccaggggagcgacgacaucaagcggcuccuggacucccagggccgccgcgacaucaagcugaucgacaucgcccucagcaaggcggacucccggcgcuucgagaacgccgugugggaccagugcaaggaccugugccacaugcacacggggguggucguggagaagaagaagcggggcgggaaggaggagaucacgccccacugcgcccugauggacugcaucauguacgacgccgccgugagcggcggccucaacaucccgguccugcgcgcggugcugccccgggacaugguguuccgcaccuccagccccaaggucgugcucugaggacuaguaauaaggaaacuguaugaaugucugugggcaggaagugaagagauccuucuguaaagguuuuuggaauuaugucugcugaauaauaaacuuuuuugaaauaauaaaucugguagaaaaaugagaucucaaaggcucuuuucagagccaccaaaaaaaaaaaaaaaaaaaaaaaaaaaaaaaaaaaaaaaaaaaaaaaaaaaaaaaaaaaaaaaaaaaaaaaaaaaaaaaaaaaaaaaaaaaaaaaaaaaaa

SEQ ID NO: 21559 - RNA, 2097 nt, Artificial Sequence
  mRNA product Design b-4 (hSL-A100) comprising derived and/or modified sequence from LASV(LASV254-NIG-2011;Clade II)__AIT17675__SP-IgE_NP(2-569) (opt1)
aggagagucccgcagucggcguccagcggcucugcuuguucgugugugugucguugcaggccuuauucaagcuuaccauggacuggaccuggauccuguuccucguggccgccgcgacccgcguccacagcagcgccuccaaggaggugaaguccuuccuguggacccagagccuccgccgggagcugagcggcuacugcuccagcaucaagcugcaggucgugaaggacgcccaggcgcuccugcacgggcuggacuucuccgaggugagcaacguccagcgccucaugcggaagcagaagcgcgacgacuccgaccugaagcggcugcgcgaccucaaccaggccgugaacaaccugguggagcucaagagcacccagcagaaguccguccugcgggugggcacgcugaccagcgacgaccugcucacccuggccgccgaccuggagaagcucaaguccaaggugauccgcaccgagcggccccugagcuccggggucuacaugggcaaccugagcacgcagcagcucgagcagcgccgggcccugcugaacaugaucgggauggugggcggcgcgcaggggacccagccgggccgcgacggggugguccgggugugggacgugaagaaccccgaccuccugaacaaccaguucggcaccaugcccucccugacccucgccugccugacgaagcaggggcaggucgaccugaacgacgccgugcucgcccugaccgaccugggccucaucuacaccgcgaaguaccccaacagcuccgaccuggaccgccugagccagagccacccgauccucaacaugguggacaccaagaaguccagccugaacaucuccggcuacaacuucagccugggggccgccgucaaggccggcgccugcaugcucgacgggggcaacaugcuggagacgaucaaggugacgccccagaccauggacggcauccugaaguccauccucaaggugaagaagucccuggggauguucgucagcgacacccccggcgagcggaaccccuacgagaacauccuguacaagaucugccucagcggggacggcuggccguacaucgcgucccgcaccagcaucguggggcgggccugggagaacaccaucguggaccuggaguccgacggcaagccccagaaggucggcaccgccgggagcaacaagucccugcagagcgccggcuuccccaccgggcucacguacucccagcugaugacccugaaggacagcaugaugcagcuggaccccuccgccaagaccuggaucgacaucgagggccgcccggaggaccccguggagaucgcgcucuaccagcccaugagcgggugcuacauccacuucuuccgggagcccaccgaccugaagcaguucaagcaggacgccaaguacucccacggcaucgacgucgccgaccuguucccggcccagcccggccucacgagcgccgugaucgaggcgcugccccgcaacauggugcugaccugccaggggagcgacgacaucaagcggcuccuggacucccagggccgccgcgacaucaagcugaucgacaucgcccucagcaaggccgacucccggcgcuucgagaacgccgucugggaccagugcaaggaccugugccacaugcacaccggggugguggucgagaagaagaagcggggcgggaaggaggagaucacgccccacugcgcccugauggacugcaucauguacgacgcggccgugagcggcggccucaacaucccggugcugcgcgccguccugccccgggacaugguguuccgcaccuccagccccaaggugguccucugaggacuaguaauaaggaaacuguaugaaugucugugggcaggaagugaagagauccuucuguaaagguuuuuggaauuaugucugcugaauaauaaacuuuuuugaaauaauaaaucugguagaaaaaugagaucucaaaggcucuuuucagagccaccaaaaaaaaaaaaaaaaaaaaaaaaaaaaaaaaaaaaaaaaaaaaaaaaaaaaaaaaaaaaaaaaaaaaaaaaaaaaaaaaaaaaaaaaaaaaaaaaaaaaa

SEQ ID NO: 21560 - RNA, 2097 nt, Artificial Sequence
  mRNA product Design b-4 (hSL-A100) comprising derived and/or modified sequence from LASV(Nig08-04;Clade II)__ADU56611__SP-IgE_NP(2-569) (opt1)
aggagagucccgcagucggcguccagcggcucugcuuguucgugugugugucguugcaggccuuauucaagcuuaccauggacuggaccuggauccuguuccucguggccgccgcgacccgcguccacagcagcgccuccaaggaggugaaguccuuccuguggacccagagccuccgccgggagcugagcggcuacugcuccaacaucaagcugcaggucgugaaggacgcccaggcgcuccugcacgggcuggacuucagcgagguguccaacguccagcgccucaugcggaagcagaagcgcgacgacggcgaccugaagcggcugcgcgaccucaaccaggccgugaacaaccugguggagcucaagagcacccagcagaaguccguccugcggguggggacccugaccagcgacgaccugcucacccuggccgccgaccuggagaagcucaaguccaaggugauccgcaccgagcggccccugagcuccggcgucuacauggggaaccugagcacgcagcagcucgagcagcgcaaggcccugcuguccaugaucggcauggugggcggggcgcagggcacccagccggggcgggacggcgugguccgcgugugggacgugaagaaccccgaccuccugaacaaccaguucgggaccaugcccagccugacccucgccugccugacgaagcagggccaggucgaccugaacgacgccgugcucgcccugaccgaccugggccucaucuacaccgcgaaguaccccaacuccagcgaccuggaccggcugucccagagccacccgauccucaacaugguggacaccaagaaguccagccugaacaucagcggguacaacuucucccugggcgccgccgucaaggccggggccugcaugcucgacggcggcaacaugcuggagacgaucaaggugacgccccagaccauggacgggauccucaagagcauccugaaggugaagcgcucccugggcauguucgucagcgacacccccggggagcggaaccccuacgagaacauccuguacaagaucugccucuccggcgacggguggccguacaucgcgagccgcaccuccaucgugggccgggccugggagaacaccaccguggaccuggagagcgacggcaagccccagaaggucgggaccgccggcuccaacaagagccugcaguccgccggguuccccacgggccucaccuacagccagcugaugacccugaaggacuccaugaugcagcuggaccccagcgccaagaccuggaucgacaucgaggggcgcccggaggaccccguggagaucgcgcucuaccagcccauguccggcugcuacauccacuucuuccgggagcccacggaccugaagcaguucaagcaggacgccaaguacagccacggcaucgacgucaccgaccuguucuccgcccagccggggcucaccagcgccgugaucgaggcccugccccgcaacauggugcugaccugccagggcagcgacgacaucaagaagcuccuggacucccaggggcggcgcgacaucaagcugaucgacaucagccucaacaaggcggacucccgccgguucgagaacgccgucugggaccagugcaaggaccugugccacaugcacacgggcgugguggucgagaagaagaagcgcgggggcaaggaggagaucacgccccacugcgcccugauggacugcaucauguucgacgccgccgugagcggcgggcucaacauccccauccugcgggcggugcugccgcgcgacauggucuuccggaccuccagccccaagguggugcucugaggacuaguaauaaggaaacuguaugaaugucugugggcaggaagugaagagauccuucuguaaagguuuuuggaauuaugucugcugaauaauaaacuuuuuugaaauaauaaaucugguagaaaaaugagaucucaaaggcucuuuucagagccaccaaaaaaaaaaaaaaaaaaaaaaaaaaaaaaaaaaaaaaaaaaaaaaaaaaaaaaaaaaaaaaaaaaaaaaaaaaaaaaaaaaaaaaaaaaaaaaaaaaaaa

SEQ ID NO: 21561 - RNA, 2100 nt, Artificial Sequence
  mRNA product Design b-4 (hSL-A100) comprising derived and/or modified sequence from LASV(GA391;Clade III)__AAA46284__SP-IgE_NP(2-570) (opt1)
aggagagucccgcagucggcguccagcggcucugcuuguucgugugugugucguugcaggccuuauucaagcuuaccauggacuggaccuggauccuguuccucguggccgccgcgacccgcguccacagcagcgccuccaaggaggugcgcagcugccuguggacccagucccuccggcgcgagcugagcggcuacugcuccaacaucaagcugcaggucgugaaggacgcccaggcgcuccugcacgggcuggacuucagcgagguguccaacguccagcggcucaugcgcaagcagaagcgggacgacggcgaccugaagcgccugcgggaccucaaccaggccgugaacaaccugguggagcugaaguccacccagcagaaguccguccuccgcguggggacgcugagcuccgacgaccugcucauccuggccgccgaccuggagaagcucaagagcaaggugacccggaccgagcgcccccuguccagcggcgucuacauggggaaccuguccagccagcagcucgaccagcggcgcgcccugcugaacaugaucggcaugaccggcguguccgggggcgggaagggcgcgagcaacgggaucgugcgggucugggacgugaagaacgccgagcuccugaacaaccaguucggcacgaugccgucccugacccucgccugccugaccaagcagggccagguggaccugaacgacgccguccaggcgcucaccgaccuggggcugaucuacacggccaaguaccccaacagcagcgaccucgaccgccugucccagagccaccccauccugaacaugaucgacaccaagaaguccagccucaacaucuccggcuacaacuucagccugggggccgccgugaaggccggcgcgugcaugcuggacggcgggaacaugcucgagaccaucaaggugagcccccagaccauggacggcauccucaagagcauccugaaggucaagaagucccuggggauguucgugagcgacacgccgggcgagcggaaccccuacgagaacauccuguacaagaucugccuguccggggacggcuggagcuacaucgccucccgcaccagcaucgugggccgggccugggagaacaccgucguggaccucgagcaggacaacaagccccagaagaucgggaacggcggguccaacaagagccugcaguccgccggcuucgccgcggggcugaucuacagccagcucaugacccugaaggacuucaagugcuucaaccugauccccaacgccaagacguggauggacaucgagggccgcccggaggaccccguggagaucgcccuguaccagcccuccagcggcugcuacguccacuucuuccgggagcccaccgaccucaagcaguucaagcaggacgccaaguacagccacgggcgcgacgugaccgaccuguucgccgcgcagccgggccugaccuccgccgucaucgaggcccucccccggaacauggugaucacgugccaggggagcgaggacauccgcaagcugcuggagucccagggccgccgggacaucaagcucaucgacaucacccugagcaaggccgacucccgcaaguucgagaacgccgugugggaccaguucaaggaccugugccacaugcacaccggggucgugguggagaagaagaagcggggcggcaaggaggagaucacgccccacugcgcgcucauggacugcaucauguucgacgccgccgucagcgggggccuggacgccaaggugcugcgcgugguccucccccgggacaugguguuccgcaccuccaccccgaaggugguccugugaggacuaguaauaaggaaacuguaugaaugucugugggcaggaagugaagagauccuucuguaaagguuuuuggaauuaugucugcugaauaauaaacuuuuuugaaauaauaaaucugguagaaaaaugagaucucaaaggcucuuuucagagccaccaaaaaaaaaaaaaaaaaaaaaaaaaaaaaaaaaaaaaaaaaaaaaaaaaaaaaaaaaaaaaaaaaaaaaaaaaaaaaaaaaaaaaaaaaaaaaaaaaaaaa

SEQ ID NO: 21562 - RNA, 2097 nt, Artificial Sequence
  mRNA product Design b-4 (hSL-A100) comprising derived and/or modified sequence from LASV(Nig08-A19;Clade III)__ADU56619__SP-IgE_NP(2-569) (opt1)
aggagagucccgcagucggcguccagcggcucugcuuguucgugugugugucguugcaggccuuauucaagcuuaccauggacuggaccuggauccuguuccucguggccgccgcgacccgcguccacagcagcgccuccaaggaggugaaguccuuccuguggacccagucccuccgccgggagcugagcggcuacugcuccaacaucaagcugcaggucgugaaggacgcccaggcgcuccugcacgggcuggacuucagcgagguguccaacguccagcgccucaugcggaagcagaagcgcgacgacggcgaccugaagcggcugcgcgaccucaaccaggccgugaacaaccugguggagcucaagagcacccagcagaaguccguccugcggguggggacccugagcuccgacgaccugcucgugcuggccgccgaccuggagaagcucaagagcaaggucgugcgcaccgagcggccccuguccagcggcaucuacauggggaaccuguccagccagcagcucgaccagcgcaaggcccugcugaacaugaucggcaugaccggcgggaacggcgggcggaacaccacguccgacggcaucgugcgcgucugggacgugaagaacgcggagcuccugaacaaccaguucgggaccaugccgagccugacccucgccugccugaccaagcagggccagguggaccugaacgacgccguccaggcccucacggaccugggccugaucuacaccgcgaaguaccccaacuccagcgaccucgaccggcuggcccagagccaccccauccugaacaugaucgacaccaagaaguccagccucaacaucuccggguacaacuucagccugggcgccgccgugaaggccggggcgugcaugcuggacggcggcaacaugcucgagaccaucaaggugagcccccagacgauggacgggauccucaagagcauccugaaggucaagcgcucccugggcauguucaucagcgacaccccgggggagcggaaccccuacgagaacauccuguacaagaucugccuguccggcgacggguggcccuacaucgccagccgcaccuccaucgugggccgggccugggagaacaccguggucgaccucgagagcgacaacaagccccagaagacgggcaacgggggcuccaacaagagccugcaguccgccggguucgccgcgggccugaccuacagccagcucaugacccugaaggacuccaugcugcagcuggacccgaacgccaagaccuggauggacaucgaggggcgccccgaggaccccguggagaucgcccucuaccagcccagcuccggcugcuacauccacuucuuccgggagccgacggaccugaagcaguucaagcaggacgccaaguacagccacggcaucgacgugaccgaccuguucgccgcgcagcccgggcucaccagcgccgucaucgaggcccugccccgcaacauggugaucacgugccagggcuccgaggacauccggaagcugcucgagagccaggggcgccgcgacaucaagcugaucgacaucucccugagcaaggucgacucccggaaguucgagaacgccgugugggaccaguucaaggaccucugccacaugcacaccggcaucguggucgagaagaagaagcgcgggggcaaggaggagaucacgccccacugcgcccugauggacugcaucauguucgacgcggccgugagcggcgggguggacgccaagguccugcgggccgugcucccgcgcgacaugguguuccggaccuccacccccaaggucgugcugugaggacuaguaauaaggaaacuguaugaaugucugugggcaggaagugaagagauccuucuguaaagguuuuuggaauuaugucugcugaauaauaaacuuuuuugaaauaauaaaucugguagaaaaaugagaucucaaaggcucuuuucagagccaccaaaaaaaaaaaaaaaaaaaaaaaaaaaaaaaaaaaaaaaaaaaaaaaaaaaaaaaaaaaaaaaaaaaaaaaaaaaaaaaaaaaaaaaaaaaaaaaaaaaaa

SEQ ID NO: 21563 - RNA, 2097 nt, Artificial Sequence
  mRNA product Design b-4 (hSL-A100) comprising derived and/or modified sequence from LASV(G1180-SLE-2010;Clade IV)__AIT17169__SP-IgE_NP(2-569) (opt1)
aggagagucccgcagucggcguccagcggcucugcuuguucgugugugugucguugcaggccuuauucaagcuuaccauggacuggaccuggauccuguuccucguggccgccgcgacccgcguccacagcagcgccuccaaggagaucaagagcuuccuguggacccagucccuccgccgggagcugagcggcuacugcuccaacaucaagcuccagguggucaaggacgcccaggcgcugcugcacgggcuggacuucagcgagguguccaacgugcagcgccucaugcggaaggagcgccgggacgacaacgaccugaagcgccugcgggaccucaaccaggccgucaacaaccugguggagcucaagagcacccagcagaaguccauccugcgcgugggcacccugaccagcgacgaccugcucauccuggccgccgaccuggagaagcucaaguccaaggucauccggaccgagcgcccccugagcgccgggguguacaugggcaaccuguccagccagcagcucgaccagcggcgcgcgcugcuguccaugaucgggaugagcuccggcaaccagcgggcccaggccggccgcgacggggugguccgggugugggacgugaagaacgucgagcuccugaacaaccaguucggcaccaugccgagccugacgcucgccugccugaccaagcagggccagguggaccugaacgacgcggugcaggcccucaccgaccuggggcugaucuacaccgccaaguaccccaacacguccgaccucgaccgccugacccagagccaccccauccugaacaugaucgacaccaagaaguccagccucaacaucagcggguacaacuucucccugggcgccgccgucaaggcgggcgccugcaugcuggacgggggcaacaugcucgagaccaucaaggugagcccccagacgauggacgggauccugaaguccauccugaaggugaagaaggcccucggcauguucaucagcgacaccccgggcgagcggaaccccuacgagaacauccuguacaagaucugccuguccggggacggcuggcccuacaucgccagccgcaccuccaucaccgggcgggccugggagaacacggucguggaccucgagagcgacggcaagccccagaaggcgggguccaacaacagcaacaagucccugcagagcgugggcuucaccgccggccugaccuacucccagcucaugacccugaaggacgccaugcugcagcuggacccgaacgccaagacguggauggacaucgaggggcgccccgaggaccccgucgagaucgcccucuaccagcccagcuccggcugcuacauccacuucuuccgggagccgaccgaccugaagcaguucaagcaggacgcgaaguacagccacgggaucgacgugaccgaccuguucgccgcccagcccggccucaccuccgccgugaucgacgcccugccccgcaacauggucaucacgugccaggggagcgacgacauccgcaagcugcucgagagccagggccggaaggacaucaagcugaucgacaucgcgcuguccaagaccgacagccgcaaguacgagaacgccgugugggaccaguacaaggaccucugccacaugcacaccggcgucgugguggagaagaagaagcgcgggggcaaggaggagaucacgccccacugcgcccugauggacugcaucauguucgacgccgcggucuccgggggccugaacaccagcgugcuccgggccgugcugccgcgggacauggucuuccgcaccuccacgccccggguggugcugugaggacuaguaauaaggaaacuguaugaaugucugugggcaggaagugaagagauccuucuguaaagguuuuuggaauuaugucugcugaauaauaaacuuuuuugaaauaauaaaucugguagaaaaaugagaucucaaaggcucuuuucagagccaccaaaaaaaaaaaaaaaaaaaaaaaaaaaaaaaaaaaaaaaaaaaaaaaaaaaaaaaaaaaaaaaaaaaaaaaaaaaaaaaaaaaaaaaaaaaaaaaaaaaaa

SEQ ID NO: 21564 - RNA, 2097 nt, Artificial Sequence
  mRNA product Design b-4 (hSL-A100) comprising derived and/or modified sequence from LASV(G1442-SLE-2011;Clade IV)__AIT17181__SP-IgE_NP(2-569) (opt1)
aggagagucccgcagucggcguccagcggcucugcuuguucgugugugugucguugcaggccuuauucaagcuuaccauggacuggaccuggauccuguuccucguggccgccgcgacccgcguccacagcagcgccuccaaggaggugaaguccuuccuguggacccagagccuccgccgggagcugagcggcuacugcuccaacaucaagcugcaggucgugaaggacgcccaggcgcuccugcacgggcuggacuucagcgagguguccaacguccagcgccucaugcggaagcagcgccgggacgacaacgaccugaagcgccugcgggaccucaaccaggccgugaacaaccugguggagcucaagagcacccagcagaaguccguccugcgcgugggcacccugaccagcgacgaccugcucgugcuggccgccgaccuggagaagcucaaguccaaggucauccggaccgagcgcccccugagcgccgggguguacaugggcaaccuguccagccagcagcucgaccagcggcgcgcgcugcugaacaugaucgggauguccggcggcauccaggggacccggacgggccgcgacggggugguccgggugugggacgugaagaacgccgaccuccugaacaaccaguucggcaccaugccgagccugacccucgccugccugaccaagcaggggcaggucgaccugaacgacguggugcaggcccucacggaccugggccugaucuacaccgcgaaguaccccaacgccuccgaccucgaccgccugacccagagccaccccauccugaacaugaucgacaccaagaaguccagccucaacaucagcggcuacaacuucucccugggggccgccgucaaggccggcgcgugcaugcuggacgggggcaacaugcucgagacgaucaaggugagcccccagaccauggacggcauccugaaguccauccugaaggugaagaagacccucgggauguucaucagcgacaccccgggcgagcggaaccccuacgagaacauccuguacaagaucugccuguccggggacggcuggcccuacaucgccagccgcacguccaucaccgggcgggccugggagaacaccgucguggaccucgagagcgacggcaagccccagaaggccggcuccaacaacagcaacaagucccugcagagcgccggguucgcggccggccugaccuacucccagcucaugacgcugaaggacgccaugcugcagcuggacccgaacgccaagaccuggauggacaucgaggggcgccccgaggaccccguggagaucgcccucuaccagcccagcuccggcugcuacauccacuucuuccgggagccgaccgaccugaagcaguucaagcaggacgcgaaguacagccacgggaucgacgucaccgaccuguucgccgcccagcccggccucacguccgccgugaucgaggcccugccccgcaacauggucaucacgugccagggcagcgacgacaucaagaagcugcucgagucccaggggcgcaaggacaucaagcugaucgacaucgcgcugagcaagaccgacagccggaaguacgagaacgccgugugggaccaguacaaggaccucugccacaugcacaccggcguggucguggagaagaagaagcgcgggggcaaggaggagaucaccccgcacugcgcccugauggacugcaucauguucgacgccgcgguguccgggggccugaacacccucguccugcgggccgugcugccccgcgacaugguguuccggaccagcacgccccgcgucgugcucugaggacuaguaauaaggaaacuguaugaaugucugugggcaggaagugaagagauccuucuguaaagguuuuuggaauuaugucugcugaauaauaaacuuuuuugaaauaauaaaucugguagaaaaaugagaucucaaaggcucuuuucagagccaccaaaaaaaaaaaaaaaaaaaaaaaaaaaaaaaaaaaaaaaaaaaaaaaaaaaaaaaaaaaaaaaaaaaaaaaaaaaaaaaaaaaaaaaaaaaaaaaaaaaaa

SEQ ID NO: 21565 - RNA, 2097 nt, Artificial Sequence
  mRNA product Design b-4 (hSL-A100) comprising derived and/or modified sequence from LASV(G3010-SLE-2013;Clade IV)__AIT17345__SP-IgE_NP(2-569) (opt1)
aggagagucccgcagucggcguccagcggcucugcuuguucgugugugugucguugcaggccuuauucaagcuuaccauggacuggaccuggauccuguuccucguggccgccgcgacccgcguccacagcagcgccuccaaggagaucaagagcuuccuguggacccagucccuccgccgggagcugagcggcuacugcuccaacaucaagcuccagguggucaaggacgcccaggcgcugcugcacgggcuggacuucagcgagguguccaacgugcagcgccucaugcggaaggagcgccgggacgacaacgaccugaagcgccugcgggaccucaaccaggccgucaacaaccugguggagcucaagagcacccagcagaaguccauccugcgcgugggcacccugaccagcgacgaccugcucauccuggccgccgaccuggagaagcucaaguccaaggucacccggaccgagcgcccccugagcgccgggguguacaugggcaaccuguccagccagcagcucgaccagcggcgcgcgcugcuguccaugaucgggaugagcuccggcgugcagggcgcccgggccgggcgcgacggcgucgugcgggugugggacgucaagaacgccgagcuccugaacaaccaguucgggacgaugccgagccugacccucgcgugccugaccaagcagggccagguggaccugaacgacgugguccaggcccucaccgaccuggggcugaucuacacggccaaguaccccaacaccuccgaccucgaccgccugacccagagccaccccauccugaacaugaucgacaccaagaaguccagccucaacaucagcggcuacaacuucucccugggcgccgccgugaaggcgggggccugcaugcuggacggcgggaacaugcucgagacgaucaaggugagcccccagaccauggacggcauccugaaguccauccugaaggucaagaaggcccucggcauguucaucagcgagaccccgggggagcggaaccccuacgagaacauccuguacaagaucugccuguccggcgacggguggcccuacaucgccagccgcaccuccaucacgggccgggccugggagaacaccgugguggaccucgagagcgacgggaagccccagaaggcgggcuccaacaacagcaacaagucccugcagagcgccggcuucaccgccgggcugaccuacucccagcucaugacgcugaaggacgccaugcugcagcuggacccgaacgccaagaccuggauggacaucgagggccgccccgaggaccccgucgagguggcgcucuaccagcccagcuccgggugcuacauccacuucuuccgggagccgaccgaccugaagcaguucaagcaggacgccaaguacagccacggcaucgacgugaccgaccuguucgccgcccagcccgggcucacguccgccgucaucgacgcgcugccccgcaacauggugaucacgugccagggcagcgacgacaucaagaagcugcucgagagccagggccgcaaggacaucaagcugaucgacaucgcccuguccaagaccgacagccggaaguacgagaacgccgucugggaccaguacaaggaccucugccacaugcacaccggggugguggucgagaagaagaagcgcggcgggaaggaggagaucaccccgcacugcgcccugauggacugcaucauguucgacgcggccguguccggcgggcugaacaccagcgugcuccgggccguccugccccgcgacaugguguuccggaccuccacgccccgcgugguccugugaggacuaguaauaaggaaacuguaugaaugucugugggcaggaagugaagagauccuucuguaaagguuuuuggaauuaugucugcugaauaauaaacuuuuuugaaauaauaaaucugguagaaaaaugagaucucaaaggcucuuuucagagccaccaaaaaaaaaaaaaaaaaaaaaaaaaaaaaaaaaaaaaaaaaaaaaaaaaaaaaaaaaaaaaaaaaaaaaaaaaaaaaaaaaaaaaaaaaaaaaaaaaaaaa

SEQ ID NO: 21566 - RNA, 2097 nt, Artificial Sequence
  mRNA product Design b-4 (hSL-A100) comprising derived and/or modified sequence from LASV(G502-SLE-2009;Clade IV)__AIT17127__SP-IgE_NP(2-569) (opt1)
aggagagucccgcagucggcguccagcggcucugcuuguucgugugugugucguugcaggccuuauucaagcuuaccauggacuggaccuggauccuguuccucguggccgccgcgacccgcguccacagcagcgccuccaaggagaucaagagcuuccuguggacccagucccuccgccgggagcugagcggcuacugcuccaacaucaagcuccagguggucaaggacgcccaggcgcugcugcacgggcuggacuucagcgagguguccaacgugcagcgccucaugcggaaggagcgccgggacgacaacgaccugaagcgccugcgggaccucaaccaggccgucaacaaccugguggagcucaagagcacccagcagaaguccauccugcgcgugggcacccugaccagcgacgaccugcucauccuggccgccgaccuggagaagcucaaguccaaggucauccggaccgagcgcccccugagcgccgggguguacaugggcaaccuguccagccagcagcucgaccagcggcgcgcgcugcuguccaugaucgggaugagcggcggcaaccagggggugcgggccggcaaggacggggucgugcgcgugugggacgucaagaacgccgagcuccugaacaaccaguucggcaccaugccgucccugacgcucgccugccugaccaagcagggccagguggaccugaacgacgcggugcaggcccucaccgaccuggggcugaucuacaccgccaaguaccccaacacgagcgaccucgaccggcugacccagucccaccccauccugaacaugaucgacaccaagaaguccagccucaacaucuccggcuacaacuucagccugggggccgccgucaaggcgggcgccugcaugcuggacgggggcaacaugcucgagaccaucaaggugagcccccagacgauggacggcauccucaagagcauccugaaggugaagaaggcccuggggauguucaucuccgacaccccgggcgagcgcaaccccuacgagaacauccuguacaagaucugccugagcggggacggcuggcccuacaucgccucccggaccagcaucaccgggcgcgccugggagaacacggucguggaccucgaguccgacggcaagccccagaaggcgggcagcaacaacuccaacaagagccugcaguccgccggguucaccgccggccugaccuacagccagcucaugacccugaaggacgccaugcugcagcuggacccgaacacgaagaccuggauggacaucgaggggcggcccgaggaccccguggagaucgcccucuaccagcccuccagcggcugcuacauccacuucuuccgcgagccgaccgaccugaagcaguucaagcaggacgcgaaguacucccacgggaucgacgucaccgaccuguucgccgcccagcccggccucacgagcgccgugaucgacgcccugccccggaacauggugaucacgugccagggcuccgacgacauccgcaagcugcucgagagccaggggcgcaaggacaucaagcugaucgacaucgcgcugaacaagaccgacagccggaaguacgagaacgccgucugggaccaguacaaggaccucugccacaugcacaccggcguggucguggagaagaagaagcgcgggggcaaggaggagaucaccccgcacugcgcccugauggacugcaucauguucgacgccgcgguguccgggggccugaacaccagcguccuccgggccgugcugccccgcgacaugguguuccggaccuccacgccccgcgucgugcugugaggacuaguaauaaggaaacuguaugaaugucugugggcaggaagugaagagauccuucuguaaagguuuuuggaauuaugucugcugaauaauaaacuuuuuugaaauaauaaaucugguagaaaaaugagaucucaaaggcucuuuucagagccaccaaaaaaaaaaaaaaaaaaaaaaaaaaaaaaaaaaaaaaaaaaaaaaaaaaaaaaaaaaaaaaaaaaaaaaaaaaaaaaaaaaaaaaaaaaaaaaaaaaaaa

SEQ ID NO: 21567 - RNA, 2097 nt, Artificial Sequence
  mRNA product Design b-4 (hSL-A100) comprising derived and/or modified sequence from LASV(G733-SLE-2010;Clade IV)__AIT17155__SP-IgE_NP(2-569) (opt1)
aggagagucccgcagucggcguccagcggcucugcuuguucgugugugugucguugcaggccuuauucaagcuuaccauggacuggaccuggauccuguuccucguggccgccgcgacccgcguccacagcagcgccuccaaggagaucaagagcuuccuguggacccagucccuccgccgggagcugagcggcuacugcuccaacaucaagcuccagguggucaaggacgcccaggcgcugcugcacgggcuggacuucagcgagguguccaacgugcagcgccucaugcggaaggagcgccgggacgacaacgaccugaagcgccugcgggaccucaaccaggccgucaacaaccugguggagcucaagagcacccagcagaaguccgugcugcgcgucggcacccugaccagcgacgagcugcucgugcuggccgccgaccuggagaagcucaaguccaaggugauccggaccgagcgcccccugagcgccggggucuacaugggcaaccuguccagccagcagcucgaccagcggcgcgcgcugcuguccaugaucgggaugagcggcggcaaccagggggcccggaccggccgcgacgggguggugcgggucugggacgugaagaacgccgagcuccugaacaaccaguucggcaccaugccgucccugacccucgccugccugaccaagcagggccagguggaccugaacgacgcgguccaggcccucaccgaccuggggcugaucuacacggccaaguaccccaacaccagcgaccucgaccgccugacccagucccaccccauccugaacaugaucgacaccaagaaguccagccucaacaucuccggcuacaacuucagccugggggccgccgugaaggcgggcgccugcaugcuggacgggggcaacaugcucgagacgaucaaggugagcccccagaccauggacggcauccucaagagcauccugaaggucaagaaggcccuggggauguucaucuccgacaccccgggcgagcggaaccccuacgagaacauccuguacaagaucugccugagcggggacggcuggcccuacaucgccucccgcaccagcaucacggggcgggccugggagaacaccgugguggaccucgaguccgacggcaagccccagaaggcgggcagcaacaacuccaacaagagccugcaguccgccggguucaccgccggccugaccuacagccagcucaugacgcugaaggacgccaugcugcagcuggacccgaacgccaagaccuggauggacaucgaggggcgccccgaggaccccgucgagaucgcgcucuaccagcccuccagcggcugcuacauccacuucuuccgggagccgaccgaccugaagcaguucaagcaggacgccaaguacucccacgggaucgacgugaccgaccuguucgccgcccagcccggccucacgagcgccgugaucgacgcgcugccccgcaacauggucaucacgugccagggcuccgacgacauccgcaagcugcucgagagccaggggcggaaggacaucaagcugaucgacaucgcccugagcaagaucgacucccgcaaguacgagaacgccgugugggaccaguacaaggaccucugccacaugcacaccggcgucgugguggagaagaagaagcgcgggggcaaggaggagaucacgccccacugcgcccugauggacugcaucauguucgacgcggccgucagcgggggccugaacucccucgugcugcgggccgugcugccgcgggacauggucuuccgcaccagcacgccccggguggugcucugaggacuaguaauaaggaaacuguaugaaugucugugggcaggaagugaagagauccuucuguaaagguuuuuggaauuaugucugcugaauaauaaacuuuuuugaaauaauaaaucugguagaaaaaugagaucucaaaggcucuuuucagagccaccaaaaaaaaaaaaaaaaaaaaaaaaaaaaaaaaaaaaaaaaaaaaaaaaaaaaaaaaaaaaaaaaaaaaaaaaaaaaaaaaaaaaaaaaaaaaaaaaaaaaa

SEQ ID NO: 21568 - RNA, 2097 nt, Artificial Sequence
  mRNA product Design b-4 (hSL-A100) comprising derived and/or modified sequence from MOPV/LASV reassortant(IGS-1;Clade IV)__AFY05578__SP-IgE_NP(2-569) (opt1)
aggagagucccgcagucggcguccagcggcucugcuuguucgugugugugucguugcaggccuuauucaagcuuaccauggacuggaccuggauccuguuccucguggccgccgcgacccgcguccacagcagcgccuccaaggagaucaagagcuuccuguggacccagucccuccgccgggagcugagcggcuacugcuccaacaucaagcuccagguggucaaggacgcccaggcgcugcugcacgggcuggacuucagcgagguguccaacgugcagcgccucaugcggaaggagcgccgggacgacaacgaccugaagcgccugcgggaccucaaccaggccgucaacaaccugguggagcucaagagcacccagcagaaguccauccugcgcgugggcacccugaccagcgacgaccugcucauccuggccgccgaccuggagaagcuccgguccaaggucauccgcaccgagcggccccugagcgccgggguguacaugggcaaccuguccagccagcagcucgaccagcgccgggcgcugcugaacaugaucgggauguccggcggcaaccagggggcccgcgccggccgggacggggugguccgcgugugggacgugaagaacgccgagcuccugagcaaccaguucggcaccaugccgucccugacgcucgcgugccugaccaagcaggggcaggucgaccugaacgacgccgugcaggcccucaccgaccugggccugaucuacaccgccaaguaccccaacacgagcgaccucgaccggcugacccagucccaccccauccugaacaugaucgacaccaagaaguccagccucaacaucuccggcuacaacuucagccugggggccgcggugaaggccggcgccugcaugcuggacgggggcaacaugcucgagaccaucaaggucagcccccagacgauggacggcauccucaagagcauccugaaggugaagaaggcccuggggauguucaucuccgacaccccgggcgagcgcaaccccuacgagaacauccuguacaagaucugccugagcggggacggcuggcccuacaucgccucccggaccagcaucaccgggcgcgcgugggagaacacgguggucgaccucgaguccgacggcaagccccagaaggccgacagcaacaacuccagcaagucccugcagagcgccggcuucaccgccgggcugaccuacucccagcucaugacccugaaggacgccaugcugcagcuggacccgaacgcgaagacguggauggacaucgagggccggcccgaggaccccguggagaucgcccucuaccagcccagcuccgggugcuacauccacuucuuccgcgagccgaccgaccugaagcaguucaagcaggacgccaaguacagccacggcaucgacgugaccgaccuguucgccacccagcccgggcucacguccgccgucaucgacgcgcugccccgcaacauggugaucacgugccagggcagcgacgacauccggaagcugcucgagagccagggccgcaaggacaucaagcugaucgacaucgaccuguccaagaccgacagccggaaguacgagaacgccgugugggaccaguacaaggaccucugccacaugcacaccggggucguggucgagaagaagaagcgcggcgggaaggaggagaucaccccgcacugcgcccugauggacugcaucauguucgacgccgcgguguccggcgggcugaacaccagcgugcuccgggccguccugccccgcgacaugguguuccggaccuccacgccccgcgugguccugugaggacuaguaauaaggaaacuguaugaaugucugugggcaggaagugaagagauccuucuguaaagguuuuuggaauuaugucugcugaauaauaaacuuuuuugaaauaauaaaucugguagaaaaaugagaucucaaaggcucuuuucagagccaccaaaaaaaaaaaaaaaaaaaaaaaaaaaaaaaaaaaaaaaaaaaaaaaaaaaaaaaaaaaaaaaaaaaaaaaaaaaaaaaaaaaaaaaaaaaaaaaaaaaaa

SEQ ID NO: 21569 - RNA, 2097 nt, Artificial Sequence
  mRNA product Design b-4 (hSL-A100) comprising derived and/or modified sequence from LASV(LM765-SLE-2012;Clade IV)__AIT17815__SP-IgE_NP(2-569) (opt1)
aggagagucccgcagucggcguccagcggcucugcuuguucgugugugugucguugcaggccuuauucaagcuuaccauggacuggaccuggauccuguuccucguggccgccgcgacccgcguccacagcagcgccuccaaggagaucaagagcuuccuguggacccagucccuccgccgggagcugagcggcuacugcuccaacaucaagcuccagguggucaaggacgcccaggcgcugcugcacgggcuggacuucagcgagguguccaacgugcagcgccucaugcggaaggagcgccgggacgacaacgaccugaagcgccugcgggaccucaaccaggccgucaacaaccugguggagcucaagagcacccagcagaaguccauccugcgcgugggcacccugaccagcgacgaccugcucauccuggccgccgaccuggagaagcucaaguccaaggucacccggaccgagcgcccccugagcgccgggguguacaugggcaaccuguccagccagcagcucgaccagcggcgcgcgcugcuggacaugaucgggauguccggcagcaaccagggcgcccgggccgggcgcgacggcgugguccgggugugggacgugaagaacgccgagcuccugaacaaccaguucgggacgaugccgucccugacccucgcgugccugaccaagcagggccaggucgaccugaacgacgccgugcaggcccucaccgaccuggggcugaucuacacggccaaguaccccaacaccagcgaccucgaccgccugacccagucccaccccauccugaacaugaucgacaccaagaaguccagccucaacaucuccggcuacaacuucagccugggcgccgcggugaaggccggggccugcaugcuggacggcgggaacaugcucgagacgaucaaggucagcccccagaccauggacggcauccucaagagcauccugaaggugaagaaggcccugggcauguucaucuccgacgccccgggggagcggaaccccuacgagaacauccuguacaagaucugccugagcggcgacggguggcccuacaucgcgucccgcaccagcaucaccggccgggccugggagaacacgguggucgaccucgaguccgacgggaagccccagaaggccggcagcaacggcuccaacaagagccugcaguccgccggguucaccgccggccugaccuacagccagcucaugacccugaaggacgcgaugcugcagcuggacccgaacgccaagacguggauggacaucgaggggcgccccgaggaccccguggagaucgcccucuaccagcccuccagcggcugcuacauccacuucuuccgggagccgaccgaccugaagcaguucaagcaggacgccaaguacucccacgggaucgacgugaccgaccuguucgccgcgcagcccggccucaccagcgccgucaucgacgcccugccccgcaacauggugaucacgugccagggcuccgacgacauccgcaagcuguucgagagccaggggcggaaggacaucaagcucaucgacaucgcccugagcaagaccgacucccgcaaguacgagaacgcggugugggaccaguacaaggaccugugccacaugcacaccggcaucgucguggagaagaagaagcgcgggggcaaggaggagaucacgccccacugcgcccucauggacugcaucauguucgacgccgccgucagcgggggccugaacaccuccgugcugcgggccgugcucccgcgggacauggucuuccgcaccagcacgccccggguggugcugugaggacuaguaauaaggaaacuguaugaaugucugugggcaggaagugaagagauccuucuguaaagguuuuuggaauuaugucugcugaauaauaaacuuuuuugaaauaauaaaucugguagaaaaaugagaucucaaaggcucuuuucagagccaccaaaaaaaaaaaaaaaaaaaaaaaaaaaaaaaaaaaaaaaaaaaaaaaaaaaaaaaaaaaaaaaaaaaaaaaaaaaaaaaaaaaaaaaaaaaaaaaaaaaaa

SEQ ID NO: 21570 - RNA, 2097 nt, Artificial Sequence
  mRNA product Design b-4 (hSL-A100) comprising derived and/or modified sequence from LASV(LM776-SLE-2012;Clade IV)__AIT17825__SP-IgE_NP(2-569) (opt1)
aggagagucccgcagucggcguccagcggcucugcuuguucgugugugugucguugcaggccuuauucaagcuuaccauggacuggaccuggauccuguuccucguggccgccgcgacccgcguccacagcagcgccuccaaggagaucaagagcuuccuguggacccagucccuccgccgggagcugagcuccuacugcagcaacaucaagcuccagguggucaaggacgcccaggcgcugcugcacggccuggacuucuccgaggugagcaacgugcagcgccucaugcggaaggagcgccgggacgacaacgaccugaagcgccugcgggaccucaaccaggccgucaacaaccugguggagcugaaguccacccagcagaaguccauccuccgcguggggacccugaccuccgacgaccugcucauccuggccgccgaccuggagaagcucaagagcaaggucacccggaccgagcgcccccuguccgccggcguguacauggggaaccugagcucccagcagcucgaccagcggcgcgcgcugcugagcaugaucggcauguccgggagcaaccagggcgcccgggccggccgcgacggggugguccgggugugggacgugaagaacgccgagcuccugaacaaccaguucggcacgaugccgucccugacccucgcgugccugaccaagcaggggcaggucgaccugaacgacgccgugcaggcccucaccgaccugggccugaucuacacggccaaguaccccaacaccagcgaccucgaccgccugacccagagccaccccauccugaacaugaucgacaccaagaaguccagccucaacaucuccggguacaacuucagccugggcgccgcggugaaggccggcgccugcaugcuggacgggggcaacaugcucgagacgaucaaggucagcccccagaccauggacgggauccucaagagcauccugaaggugaagaaggcccugggcauguucaucuccgacaccccgggcgagcggaaccccuacgagaacauccuguacaagaucugccugagcggggacggcuggcccuacaucgccucccgcaccagcaucacggggcgggcgugggagaacaccguggucgaccucgaguccgacggcaagccccagaaggccgggagcaacaacuccaacaagagccugcaguccgccggcuucaccgccggccugaccuacagccagcucaugacgcugaaggacgccaugcugcagcuggacccgaacgcgaagaccuggauggacaucgaggggcgccccgaggaccccguggagguggcccucuaccagcccuccagcggcugcuacauccacuucuuccgggagccgaccgaccugaagcaguucaagcaggacgccaaguacucccacgggaucgacgucaccgaccuguucgccgcccagcccggccucacgagcgcggugaucgacgcccugccccgcaacauggugaucacgugccaggggagcgacgacauccgcaagcugcucgagucccagggccggaaggacaucaagcugaucgacaucgcccugagcaagaccgacucccgcaaguacgagaacgccgucugggaccaguacaaggaccucugccacaugcacaccggcguggucguggagaagaagaagcgcgggggcaaggaggagaucaccccgcacugcgcgcugauggacugcaucauguucgacgccgccgugagcgggggccugaacaccuccguccuccgggccgugcugccccgggacaugguguuccgcaccagcacgccccgggucgugcugugaggacuaguaauaaggaaacuguaugaaugucugugggcaggaagugaagagauccuucuguaaagguuuuuggaauuaugucugcugaauaauaaacuuuuuugaaauaauaaaucugguagaaaaaugagaucucaaaggcucuuuucagagccaccaaaaaaaaaaaaaaaaaaaaaaaaaaaaaaaaaaaaaaaaaaaaaaaaaaaaaaaaaaaaaaaaaaaaaaaaaaaaaaaaaaaaaaaaaaaaaaaaaaaaa

SEQ ID NO: 21571 - RNA, 2097 nt, Artificial Sequence
  mRNA product Design b-4 (hSL-A100) comprising derived and/or modified sequence from LASV(Mad39;Clade IV)__ANH09723__SP-IgE_NP(2-569) (opt1)
aggagagucccgcagucggcguccagcggcucugcuuguucgugugugugucguugcaggccuuauucaagcuuaccauggacuggaccuggauccuguuccucguggccgccgcgacccgcguccacagcagcgccuccaaggagaucaagagcuuccuguggacccagucccuccgccgggagcugagcggcuacugcuccaacaucaagcuccagguggucaaggacgcccaggcgcugcugcacgggcuggacuucagcgagguguccaacgugcagcgccucaugcggaagcagcgccgggacgacaacgaccugaagcgccugcgggaccucaaccaggccgucaacaaccugguggagcugaaguccacccagcagaaguccgugcuccgcgucggcacgcugaccagcgacgaccugcucacccuggccgccgaccuggagaagcucaaguccaaggugacccggacggagcgcccccugaccgccgggguguacaugggcaaccugagcucccagcagcucgaccagcggcgcgcgcugcugaacaugaucgggaugagcggcggcaaccagggggcccggaccggccgcgacggggucgugcgggugugggacgucaagaacgccgagcuccugaacaaccaguucggcaccaugccgucccugacgcucgccugccugaccaagcagggccagguggaccugaacgacgugguccaggcgcucaccgaccuggggcugaucuacaccgccaaguaccccaacacgagcgaccucgaccgccugacccagucccaccccauccugaacaugaucgacaccaacaagagcucccucaacaucagcggcuacaacuucagccugggggccgccgugaaggccggcgcgugcaugcuggacgggggcaacaugcucgagaccaucaaggugagcccccagacgauggacggcauccucaagagcauccugaaggucaagaagucccuggggauguucaucagcgacaccccgggcgagcggaaccccuacgagaacauccuguacaagaucugccuguccggggacggcuggcccuacaucgccagccgcaccuccaucaccgggcgggccugggagaacacggugguggaccucgagagcggcggcaagccccagaaggccggguccaacaacagcaacaagucccugcagagcgccggcuucgcggccgggcugaccuacucccagcucaugacccugaaggacgccaugcugcagcuggacccgaacgccaagaccuggauggacaucgagggccgccccgaggaccccgucgagaucgcccucuaccagcccaucagcgggugcuacauccacuucuuccgggagccgacggaccugaagcaguucaagcaggacgcgaaguacucccacggcaucgacgugaccgaccuguucgccgcccagcccggccucaccagcgccgugaucgaggcccugccccgcaacauggucaucacgugccagggguccgacgacauccgcaagcuguucgagagccagggccggaaggacaucaagcucaucgacaucgcgcuguccaagaccgacagccgcaaguacgagaacgccgugugggaccaguacaaggaccugugccacaugcacaccggggucgugguggagaagaagaagaagggcgggaaggaggagaucacgccccacugcgcccucauggacugcaucauguucgacgccgcggucagcggcggccugaacacccuggugcuccgggccgugcugccgcgcgacauggucuuccggaccuccacccccaagguggugcugugaggacuaguaauaaggaaacuguaugaaugucugugggcaggaagugaagagauccuucuguaaagguuuuuggaauuaugucugcugaauaauaaacuuuuuugaaauaauaaaucugguagaaaaaugagaucucaaaggcucuuuucagagccaccaaaaaaaaaaaaaaaaaaaaaaaaaaaaaaaaaaaaaaaaaaaaaaaaaaaaaaaaaaaaaaaaaaaaaaaaaaaaaaaaaaaaaaaaaaaaaaaaaaaaa

SEQ ID NO: 21572 - RNA, 2097 nt, Artificial Sequence
  mRNA product Design b-4 (hSL-A100) comprising derived and/or modified sequence from LASV(Z0947-SLE-2011;Clade IV)__AIT17841__SP-IgE_NP(2-569) (opt1)
aggagagucccgcagucggcguccagcggcucugcuuguucgugugugugucguugcaggccuuauucaagcuuaccauggacuggaccuggauccuguuccucguggccgccgcgacccgcguccacagcagcgccuccaaggagaucaagagcuuccuguggacccagucccuccgccgggagcugagcggcuacugcuccaacaucaagcuccagguggucaaggacgcccaggcgcugcugcacgggcuggacuucagcgagguguccaacgugcagcgccucaugcggaaggagcgccgggacgacaacgaccugaagcgccugcgggaccucaaccaggccgucaacaaccugguggagcucaagagcacccagcagaaguccauccugcgcgugggcacccugaccagcgacgaccugcucauccuggccgccgaccuggagaagcucaaguccaaggucacccggaccgagcgcccccugagcgccgggguguacaugggcaaccuguccagccagcagcucgaccagcggcgcgcgcugcugaacaugaucgggauguccggcagcaaccagggcgcccggacggggcgcgacggcgugguccgggugugggacgugaagaacgccgagcuccugaacaaccaguucgggaccaugccgucccugacccucgccugccugaccaagcagggccaggucgaccugaacgacgcggugcaggcccucacggaccuggggcugaucuacaccgccaaguaccccaacaccagcgaccucgaccgccugacccagucccaccccauccugaacaugaucgacacgaagaaguccagccucaacaucuccggcuacaacuucagccugggcgccgccgugaaggcgggggccugcaugcuggacggcgggaacaugcucgagaccaucaaggucagcccccagaccauggacggcauccucaagagcauccugaaggugaagaaggcccugggcauguucaucuccgacgccccgggggagcggaaccccuacgagaacauccuguacaagaucugccugagcggcgacggguggcccuacaucgccucccgcaccagcaucacgggccgggcgugggagaacaccguggucgaccucgaguccgacgggaagccccagaaggccggcagcaacggcuccaacaagagccugcaguccgccggguucaccgccggccugaccuacagccagcucaugacgcugaaggacgccaugcugcagcuggacccgaacgcgaagaccuggauggacaucgaggggcgccccgaggaccccguggagaucgcccucuaccagcccuccagcggcugcuacauccacuucuuccgggagccgaccgaccugaagcaguucaagcaggacgccaaguacucccacgggaucgacgugaccgaccuguucgccgcccagcccggccucacgagcgcggucaucgacgcccugccccgcaacauggugaucacgugccagggcuccgacgacauccgcaagcuguucgagagccaggggcggaaggacaucaagcucaucgacaucgcccugagcaagaccgacucccgcaaguacgagaacgccgugugggaccaguacaaggaccugugccacaugcacaccggcaucgucguggagaagaagaagcgcgggggcaaggaggagaucaccccgcacugcgcgcucauggacugcaucauguucgacgccgccgucagcgggggccugaacaccuccgugcugcgggccgugcucccccgggacauggucuuccgcaccagcacgccccggguggugcugugaggacuaguaauaaggaaacuguaugaaugucugugggcaggaagugaagagauccuucuguaaagguuuuuggaauuaugucugcugaauaauaaacuuuuuugaaauaauaaaucugguagaaaaaugagaucucaaaggcucuuuucagagccaccaaaaaaaaaaaaaaaaaaaaaaaaaaaaaaaaaaaaaaaaaaaaaaaaaaaaaaaaaaaaaaaaaaaaaaaaaaaaaaaaaaaaaaaaaaaaaaaaaaaaa

SEQ ID NO: 21573 - RNA, 2097 nt, Artificial Sequence
  mRNA product Design b-4 (hSL-A100) comprising derived and/or modified sequence from LASV(Josiah;Clade IV)__NP_694869__SP-IgE_NP(2-569) (opt4)
aggagagucccgcagucggcguccagcggcucugcuuguucgugugugugucguugcaggccuuauucaagcuuaccauggacuggaccuggauccuguuccugguggccgccgccaccagagugcacagcagcgccagcaaggagaucaagagcuuccuguggacccagagccugagaagagagcugagcggcuacugcagcaacaucaagcugcagguggugaaggacgcccaggcccugcugcacggccuggacuucagcgaggugagcaacgugcagagacugaugagaaaggagagaagagacgacaacgaccugaagagacugagagaccugaaccaggccgugaacaaccugguggagcugaagagcacccagcagaagagcauccugagagugggcacccugaccagcgacgaccugcugauccuggccgccgaccuggagaagcugaagagcaaggugaucagaaccgagagaccccugagcgccggcguguacaugggcaaccugagcagccagcagcuggaccagagaagagcccugcugaacaugaucggcaugagcggcggcaaccagggcgccagagccggcagagacggcguggugagagugugggacgugaagaacgccgagcugcugaacaaccaguucggcaccaugcccagccugacccuggccugccugaccaagcagggccagguggaccugaacgacgccgugcaggcccugaccgaccugggccugaucuacaccgccaaguaccccaacaccagcgaccuggacagacugacccagagccaccccauccugaacaugaucgacaccaagaagagcagccugaacaucagcggcuacaacuucagccugggcgccgccgugaaggccggcgccugcaugcuggacggcggcaacaugcuggagaccaucaaggugagcccccagaccauggacggcauccugaagagcauccugaaggugaagaaggcccugggcauguucaucagcgacacccccggcgagagaaaccccuacgagaacauccuguacaagaucugccugagcggcgacggcuggcccuacaucgccagcagaaccagcaucaccggcagagccugggagaacaccgugguggaccuggagagcgacggcaagccccagaaggccgacagcaacaacagcagcaagagccugcagagcgccggcuucaccgccggccugaccuacagccagcugaugacccugaaggacgccaugcugcagcuggaccccaacgccaagaccuggauggacaucgagggcagacccgaggaccccguggagaucgcccuguaccagcccagcagcggcugcuacauccacuucuucagagagcccaccgaccugaagcaguucaagcaggacgccaaguacagccacggcaucgacgugaccgaccuguucgccacccagcccggccugaccagcgccgugaucgacgcccugcccagaaacauggugaucaccugccagggcagcgacgacaucagaaagcugcuggagagccagggcagaaaggacaucaagcugaucgacaucgcccugagcaagaccgacagcagaaaguacgagaacgccgugugggaccaguacaaggaccugugccacaugcacaccggcguggugguggagaagaagaagagaggcggcaaggaggagaucaccccccacugcgcccugauggacugcaucauguucgacgccgccgugagcggcggccugaacaccagcgugcugagagccgugcugcccagagacaugguguucagaaccagcacccccagaguggugcugugaggacuaguaauaaggaaacuguaugaaugucugugggcaggaagugaagagauccuucuguaaagguuuuuggaauuaugucugcugaauaauaaacuuuuuugaaauaauaaaucugguagaaaaaugagaucucaaaggcucuuuucagagccaccaaaaaaaaaaaaaaaaaaaaaaaaaaaaaaaaaaaaaaaaaaaaaaaaaaaaaaaaaaaaaaaaaaaaaaaaaaaaaaaaaaaaaaaaaaaaaaaaaaaaa

SEQ ID NO: 21574 - RNA, 2097 nt, Artificial Sequence
  mRNA product Design b-4 (hSL-A100) comprising derived and/or modified sequence from LASV(LP;Clade I)__AAF86702__SP-IgE_NP(2-569) (opt4)
aggagagucccgcagucggcguccagcggcucugcuuguucgugugugugucguugcaggccuuauucaagcuuaccauggacuggaccuggauccuguuccugguggccgccgccaccagagugcacagcagcaacagcaaggagaucaagagcuuccuguggacccagagccugagaagagagcugagcggcuacugcagcaacaucaagcugcagguggugaaggacgcccaggcccugcugcacggccuggacuucagcgaggugagcaacgugcagagacugaugagaaagcagaagagagacgacgccgaccugaagagacugagagaccugaaccaggccgugaacaaccugguggagcugaagagcacccagcagaagaacgugcugagagugggcacccugagcagcgacgaccugaucacccuggccgccgaccuggagaagcugaagagcaaggugaucagaaccgagagaccccugagcagcggcguguacaugggcaaccugagcagccagcagcuggaccagagaagagcccugcugagcaugaucggcaugagcggcggcccccagggcaacagaaccggcggcgacggcguggugagagugugggacgugaagaacgccgagcugcugaacaaccaguucggcaccaugcccagccugacccuggccugccugaccaagcagggccagguggaccugaacgacgccgugcaggcccugaccgaccugggccugaucuacaccgccaaguaccccaacagcagcgaccuggacaugcugacccagagccaccccauccugggcaugguggacaccaagaagagcagccugaacaucagcggcuacaacuucagccugggcgccgccgugaaggccggcgccugcaugcuggacggcggcaacaugcuggagaccaucaaggugagcccccagaccauggacggcauccugaagagcauccugaaggugaagagaagccugggcauguucaucagcgacacccccggcgagagaaaccccuacgagaacauccuguacaagaucugccugagcggcgagggcuggcccuacaucgccagcagaaccagcaucaccggcagagccugggagaacacccugguggaccuggagagcgacaacaagccccccaagcugaacagcgccggcagcaacaagagccugcaggccgccggccugaacgccggccugaccuacagccagcugaugacccugaaggacugcaugcugcagcuggaccccagcagcaagaccuggaucgacaucgagggcagacccgaggaccccguggagaucgcccuguuccagcccagcagcggcugcuacauccacuucuucagagagcccaccgaccugaagcaguucaagcaggacgccaaguacagccacggcaucgacgugaccgaccuguucagcacccagcccggccugaccagcgccgugaucgaggcccugcccagaaacauggugcugaccugccagggcagcgacgacaucaagaagcugcuggagagccagggcagaagagacaucaagcugaucgacaucagccugagcaaggccgacagcagaaaguucgagaacgccgugugggaccaguacaaggaccugugccacaugcacaccggcguggugguggagaagaagaagagaggcggcaaggaggagaucaccccccacugcgcccugcuggacugcaucauguucgacgccgccaccaccggcagccugaacaucaccacccugagagccgugcugcccagagacaugguguucagaaccagcacccccaagguggugcugugaggacuaguaauaaggaaacuguaugaaugucugugggcaggaagugaagagauccuucuguaaagguuuuuggaauuaugucugcugaauaauaaacuuuuuugaaauaauaaaucugguagaaaaaugagaucucaaaggcucuuuucagagccaccaaaaaaaaaaaaaaaaaaaaaaaaaaaaaaaaaaaaaaaaaaaaaaaaaaaaaaaaaaaaaaaaaaaaaaaaaaaaaaaaaaaaaaaaaaaaaaaaaaaaa

SEQ ID NO: 21575 - RNA, 2097 nt, Artificial Sequence
  mRNA product Design b-4 (hSL-A100) comprising derived and/or modified sequence from LASV(803213;Clade II)__AAF86704__SP-IgE_NP(2-569) (opt4)
aggagagucccgcagucggcguccagcggcucugcuuguucgugugugugucguugcaggccuuauucaagcuuaccauggacuggaccuggauccuguuccugguggccgccgccaccagagugcacagcagcgccagcaaggaggugaagagcuuccuguggacccagagccugagaagagagcugagcggcuacugcagcaacaucaagcugcagguggugaaggacgcccaggcccugcugcacggccuggacuucagcgaggugaacaacgugcagagacugaugagaaagcagaagagagacgacggcgaccugaagagacugagagaccugaaccaggccgugaacaaccugguggagcugaagagcacccagcagaagagcauccugagagugggcacccugaccagcgacgaccugcugacccuggccgccgaccuggagaagcugaagagcaaggugaucagaaccgagagaccccugagcagcggcguguacaugggcaaccugagcacccagcagcuggagcagagaagagcccugcugaacaugaucggcauggugggcggcgcccagggcacccagcccggcagagacggcguggugagagugugggacgugaagaaccccgaccugcugaacaaccaguucggcaccaugcccagccugacccuggccugccugaccaagcagggccagguggaccugaacgacgccgugcuggcccugaccgaccugggccugaucuacaccgccaaguaccccaacagcagcgaccuggacagacugagccagagccaccccauccugaacaugguggacaccaagaagagcagccugaacaucagcggcuacaacuucagccugggcgccgccgugaaggccggcgccugcaugcuggacggcggcaacaugcuggagaccaucaaggugaccccccagaccauggacggcauccugaagagcauccugaaggugaagagaagccugggcauguucgugagcgacacccccggcgagagaaaccccuacgagaacauccuguacaagaucugccugagcggcgacggcuggcccuacaucgccagcagaaccagcaucgugggcagagccugggagaacaccaccguggaccuggagagcgacggcaagccccagaaggugggcaccgccggcagcaacaagagccugcagagcgccggcuuccccaccggccugaccuacagccagcugaugacccugaaggacagcaugaugcagcuggaccccagcgccaagaccuggaucgacaucgagggcagacccgaggaccccguggagaucgcccuguaccagcccaugagcggcugcuacauccacuucuucagagagcccaccgaccugaagcaguucaagcaggacgccaaguacagccacggcaucgacguggccgaccuguuccccgcccagcccggccugaccagcgccgugaucgaggcccugcccagaaacauggugcugaccugccagggcagcgacgacaucaagaagcugcuggacagccagggcagaagagacaucaagcugaucgacaucagccugagcaagguggacagcagaaaguucgagaacgccgugugggaccagugcaaggaccugugccacaugcacaccggcguggugguggagaagaagaagagaggcggcaaggaggagaucaccccccacugcgcccugauggacugcaucauguucgacgccgccgugagcggcggccugaacauccccgugcugagagccgugcugcccagagacaugguguucagaaccagcagccccaagguggugcugugaggacuaguaauaaggaaacuguaugaaugucugugggcaggaagugaagagauccuucuguaaagguuuuuggaauuaugucugcugaauaauaaacuuuuuugaaauaauaaaucugguagaaaaaugagaucucaaaggcucuuuucagagccaccaaaaaaaaaaaaaaaaaaaaaaaaaaaaaaaaaaaaaaaaaaaaaaaaaaaaaaaaaaaaaaaaaaaaaaaaaaaaaaaaaaaaaaaaaaaaaaaaaaaaa

SEQ ID NO: 21576 - RNA, 2100 nt, Artificial Sequence
  mRNA product Design b-4 (hSL-A100) comprising derived and/or modified sequence from LASV(GA391;Clade III)__CAA36646__SP-IgE_NP(2-570) (opt4)
aggagagucccgcagucggcguccagcggcucugcuuguucgugugugugucguugcaggccuuauucaagcuuaccauggacuggaccuggauccuguuccugguggccgccgccaccagagugcacagcagcgccagcaaggaggugagaagcuuccuguggacccagagccugagaagagagcugagcggcuacugcagcaacaucaagcugcagguggugaaggacgcccaggcccugcugcacggccuggacuucagcgaggugagcaacgugcagagacugaugagaaagcagaagagagacgacggcgaccugaagagacugagagaccugaaccaggccgugaacaaccugguggagcugaagagcacccagcagaagagcgugcugagagugggcacccugagcagcgacgaccugcugauccuggccgccgaccuggagaagcugaagagcaaggugaccagaaccgagagaccccugagcagcggcguguacaugggcaaccugagcagccagcagcuggaccagagaagagcccugcugaacaugaucggcaugaccggcgugagcggcggcggcaagggcgccagcgacggcaucgugagagugugggacgugaagaacgccgagcugcugaacaaccaguucggcaccaugcccagccugacccuggccugccugaccaagcagggccagguggaccugaacgacgccgugcaggcccugaccgaccugggccugaucuacaccgccaaguaccccaacagcagcgaccuggacagacugagccagagccaccccauccugaacaugaucgacaccaagaagagcagccugaacaucagcggcuacaacuucagccugggcgccgccgugaaggccggcgccugcaugcuggacggcggcaacaugcuggagaccaucaaggugagcccccagaccauggacggcauccugaagagcauccugaaggugaagaagagccugggcauguucgugagcgacacccccggcgagagaaaccccuacgagaacauccuguacaagaucugccugagcggcgacggcuggcccuacaucgccagcagaaccagcaucgugggcagagccugggagaacaccgugguggaccuggagcaggacaacaagccccagaagaucggcaacggcggcagcaacaagagccugcagagcgccggcuucgccgccggccugaccuacagccagcugaugacccugaaggacuucaagugcuucaaccugauccccaacgccaagaccuggauggacaucgagggcagacccgaggaccccguggagaucgcccuguaccagcccagcagcggcugcuacgugcacuucuucagagagcccaccgaccugaagcaguucaagcaggacgccaaguacagccacggcaucgacgugaccgaccuguucgccgcccagcccggccugaccagcgccgugaucgaggcccugcccagaaacauggugaucaccugccagggcagcgaggacaucagaaagcugcuggagagccagggcagaagagacaucaagcugaucgacaucacccugagcaaggccgacagcagaaaguucgagaacgccgugugggaccaguucaaggaccugugccacaugcacaccggcguggugguggagaagaagaagagaggcggcaaggaggagaucaccccccacugcgcccugauggacugcaucauguucgacgccgccgugagcggcggccuggacgccaaggugcugagaguggugcugcccagagacaugguguucagaaccagcacccccaagguggugcugugaggacuaguaauaaggaaacuguaugaaugucugugggcaggaagugaagagauccuucuguaaagguuuuuggaauuaugucugcugaauaauaaacuuuuuugaaauaauaaaucugguagaaaaaugagaucucaaaggcucuuuucagagccaccaaaaaaaaaaaaaaaaaaaaaaaaaaaaaaaaaaaaaaaaaaaaaaaaaaaaaaaaaaaaaaaaaaaaaaaaaaaaaaaaaaaaaaaaaaaaaaaaaaaaa

SEQ ID NO: 21577 - RNA, 2097 nt, Artificial Sequence
  mRNA product Design b-4 (hSL-A100) comprising derived and/or modified sequence from LASV(AV;Clade V)__CCA30315__SP-IgE_NP(2-569) (opt4)
aggagagucccgcagucggcguccagcggcucugcuuguucgugugugugucguugcaggccuuauucaagcuuaccauggacuggaccuggauccuguuccugguggccgccgccaccagagugcacagcagcgccagcaaggaggugaagagcuuccuguggacccagagccugagaagagagcugagcggcuacugcagcaacaucaagcugcagguggugaaggacgcccaggcccugcugcacggccuggacuucagcgaggugagcaacgugcagagacugaugagaaagcagagaagagacgacagcgaccugaagagacugagagaccugaaccaggccgugaacaaccugguggagcugaagagcacccagcagaagagcgugcugagagugggcacccugagcagcgacgaccugcugacccuggccgccgaccuggagaagcugaagagcaaggugaccagaaccgagagaccccugagcagcggcguguacaugggcaaccugagcagccagcagcuggaccagagaagagcccugcugaaccugaucggcaugaccaacggcagccagggcagccaggccggcagagacggcguggugagagugugggacgugaagaacgccgagcugcugaacaaccaguucggcaccaugcccagccugacccuggccugccugaccaagcagggccagguggaccugaacgacguggugcaggcccugaccgaccugggccugaucuacaccgccaaguaccccaacaccagcgaccuggacagacugacccagagccaccccauccugaacaugaucgacaccaagaagagcagccugaacaucagcggcuacaacuucagccugggcgccgccgugaaggccggcgccugcaugcuggacggcggcaacaugcuggagaccaucaaggugagcccccagagcauggacggcauccugaagagcauccugaaggugaagagagcccugggcauguucgugagcgacacccccggcgagagaaaccccuacgagaacauccuguacaagaucugccugagcggcgacggcuggcccuacaucgccagcagaaccagcaucgugggcagagccugggagaacaccgugguggaccuggagaccgacggcaagccccagaagaucggcagcggcaacagcaacaagagccugcagagcgccggcuucagcgccggccugaccuacagccagcugaugacccugaaggacgccaugcugcagcuggaccccaacgccaagaccuggauggacaucgagggcagacccgaggaccccguggagguggcccuguaccagcccaucagcggcugcuacauccacuucuucagagagcccaccgaccugaagcaguucaagcaggacgccaaguacagccacggcaucgacaucgccgaccuguucgccgcccagcccggccugaccagcgccgugaucgaggcccugcccagaaacauggugaucaccugccagggcagcgaggacaucaagaagcugcuggagagccagggcagaaaggacaucaagcugaucgacaucgcccugagcaagaucgacagcagaaaguucgagaacgccgugugggaccaguacaaggaccugugccacaugcacaccggcguggugguggagaagaagaagagaggcggcaaggaggagaucaccccccacugcgcccugauggacugcaucauguucgacgccgccgugagcggcggccugaacacccuggugcugagagccgugcugcccagagacaugguguucagaaccagcacccccagaguggugcugugaggacuaguaauaaggaaacuguaugaaugucugugggcaggaagugaagagauccuucuguaaagguuuuuggaauuaugucugcugaauaauaaacuuuuuugaaauaauaaaucugguagaaaaaugagaucucaaaggcucuuuucagagccaccaaaaaaaaaaaaaaaaaaaaaaaaaaaaaaaaaaaaaaaaaaaaaaaaaaaaaaaaaaaaaaaaaaaaaaaaaaaaaaaaaaaaaaaaaaaaaaaaaaaaa

SEQ ID NO: 21578 - RNA, 2097 nt, Artificial Sequence
  mRNA product Design b-4 (hSL-A100) comprising derived and/or modified sequence from LASV(Togo/2016/7082;Clade VI)__AMR44578__SP-IgE_NP(2-569) (opt4)
aggagagucccgcagucggcguccagcggcucugcuuguucgugugugugucguugcaggccuuauucaagcuuaccauggacuggaccuggauccuguuccugguggccgccgccaccagagugcacagcagcaacagcaaggaggugaagagcuuccuguggacccagagccugagaagagagcugagcggcuacugcagcaacaucaagcugcagguggugaaggacgcccaggcccugcugcacggccuggacuucagcgaggugagcaacgugcagagacugaugagaaagcagaagagagacgacggcgaccugaagagacugagagaccugaaccaggccgugaacaaccugguggagcugaagagcgugcagcagaagagcauccugagagugggcacccugaccagcgacgaccugcugacccuggccgccgaccuggagaagcugaagagcaaggugaccagaaccgagagaccccugagcagcggcguguacaugggcaaccugagcagccagcagcuggaccagagaagagcccugcugagcaugaucggcaugagcggcggcaaccagaacagccagcccaagggcgacggcguggugagagugugggacgugaagaacgccgaccugcugaacaaccaguucggcaccaugcccagccugacccuggccugccugaccaagcagggccagguggaccugaacgacgccgugcaggcccugaccgaccugggccugaucuacaccgccaaguaccccaacagcagcgaccuggacagacugagccagagccaccccauccugaacaugaucgacaccaagaagagcagccugaacaucagcggcuacaacuucagccugggcgccgccaucaagaccggcgccugcaugcuggacggcggcaacaugcuggagaccaucaaggugaccccccagaccauggacggcauccugaagagcauccugaaggugaagagaagccugggcauguucaucagcgacacccccggcgagagaaaccccuacgagaacauccuguacaagaucugccugagcggcgacggcuggcccuacaucgccagcagaaccgccaucaucggcagagccugggagaacaccgugguggaccuggagagcgacagcaagccccagaagaucggcagcaacggcagcaacaagagccugcagagcgccggcuucgcccccggccugaccuacagccagcugaugacccugaaggacagcaugcugcagcuggaccccaacgccaagaccuggaucgacaucgagggcagacccgaggaccccguggagguggcccuguuccagcccaucagcggcugcuacauccacuucuucagagagcccaccgaccugaagcaguucaagcaggacgccaaguacagccacggcaucgacgugaccgaccuguucgccgcccagcccggccugaccagcgccgugaucgaggcccugcccagaaacauggugcugaccugccagggcagcgacgacaucaagaagcugcuggacagccagggcagaagagacaucaagcugaucgacgugagccugaacaagaucgacagcagaaaguucgagaacgccgugugggaccaguacaaggaccugugccacaugcacaccggcguggugguggagaagaagaagaagggcggcaaggaggagaucaccccccacugcgcccugcuggacugcaucauguucgacgccgccgugagcggcggccugaacgccaccgugcugagagccgugcugcccagagacaugguguucagaaccagcagccccaagguggugcugugaggacuaguaauaaggaaacuguaugaaugucugugggcaggaagugaagagauccuucuguaaagguuuuuggaauuaugucugcugaauaauaaacuuuuuugaaauaauaaaucugguagaaaaaugagaucucaaaggcucuuuucagagccaccaaaaaaaaaaaaaaaaaaaaaaaaaaaaaaaaaaaaaaaaaaaaaaaaaaaaaaaaaaaaaaaaaaaaaaaaaaaaaaaaaaaaaaaaaaaaaaaaaaaaa

SEQ ID NO: 21579 - RNA, 2097 nt, Artificial Sequence
  mRNA product Design b-4 (hSL-A100) comprising derived and/or modified sequence from LASV(KAK-428;Clade n.d. (VII))__ANH09741__SP-IgE_NP(2-569) (opt4)
aggagagucccgcagucggcguccagcggcucugcuuguucgugugugugucguugcaggccuuauucaagcuuaccauggacuggaccuggauccuguuccugguggccgccgccaccagagugcacagcagcaacagcaaggaggugaagagcuuccuguggacccagagccugagaagagagcugagcggcuacugcaccaacaucaagcugcagguggugaaggacgcccaggcccugcugcacggccuggacuucagcgaggugagcaacgugcagagacugaugagaaagcagaagagagacgacaacgaccugaagagacugagagaccugaaccaggccgugaacaaccugguggagcugaagagcgugcagcagaagagcgugcugaaggugggcacccugaacagcgacgaccugcugacccuggccgccgaccuggagaagcugaagagcaagguggugagaaccgagagaccccugagcagcggcguguacaugggcaaccugagcagccagcagcuggaccagagaagagcccugcugaacaugaucggcauggccggcggcagccagggcaaccagcccagcagagacggcguggugagagugugggacgugaagaacgccgaccugcugaacaaccaguucggcaccaugcccagccugacccuggccugccugaccaagcagggccagguggaccugaacgacguggugcuggcccugaccgaccugggccugaucuacaccgccaaguaccccaacagcagcgaccuggacagacugagccagaaccaccccgugcugaacaugaucgacgugaacaagagcagccugaacaucagcggcuacaacuucagccugggcgccgccgugaaggccggcgccugcaugcuggacggcggcaacaugcuggagaccaucaagaucagcccccagaccguggacggcauccugaagagcauccugaaggugaagagagcccugggcauguucgugagcgacacccccggcgagagaaaccccuacgagaacauccuguacaaggugugccugagcggcaacggcuggcccuacaucgccagcagaaccagcaucgugggcagagccugggagaacaccgugguggaccuggagagcaacaagaaccagcccaaggugggcaacaacggcagcaacaagaugcugcagagcagcggcuucgccaccggccugaccuacagccagcugaugacccugagagacagcaugcugcagcuggaccccaccgccaagaccuggaucgacaucgagggcagacccgaggaccccguggagcuggcccuguuccagcccagcagcggcugcuacauccacuucuucagagagcccaccgaccugaagcaguucaagcaggacgccaaguacagccacggcaucgacgugaacgaccuguucagcgcccagcccggccugaccagcgccgugcuggaggcccugcccagaaacauggugcugaccugccagggcagcgacgacaucagaaagcugcuggacagccaggacagaaaggacaucaagcugaucgacaucagccugagcaaggccgacgccagaaaguucgagaacgacgugugggaccaguucaaggaccugugccacaugcacaccggcaucgugguggagaagaagaagaagggcggcaagcaggagaugaccccccacugcgcccugcuggacugcaucauguucgacgccgccgugagcggcggccugaacgugcccacccugagagccgugcugcccaccgacaugguguucagaaccaucaccaccaagguggugcugugaggacuaguaauaaggaaacuguaugaaugucugugggcaggaagugaagagauccuucuguaaagguuuuuggaauuaugucugcugaauaauaaacuuuuuugaaauaauaaaucugguagaaaaaugagaucucaaaggcucuuuucagagccaccaaaaaaaaaaaaaaaaaaaaaaaaaaaaaaaaaaaaaaaaaaaaaaaaaaaaaaaaaaaaaaaaaaaaaaaaaaaaaaaaaaaaaaaaaaaaaaaaaaaaa

SEQ ID NO: 21580 - RNA, 2097 nt, Artificial Sequence; identical to SEQ ID NO: 21574
  mRNA product Design b-4 (hSL-A100) comprising derived and/or modified sequence from LASV(Pinneo-NIG-1969;Clade I)__AIT17837__SP-IgE_NP(2-569) (opt4)

SEQ ID NO: 21581 - RNA, 2097 nt, Artificial Sequence
  mRNA product Design b-4 (hSL-A100) comprising derived and/or modified sequence from LASV(ISTH0009-NIG-2011;Clade II)__AIT17405__SP-IgE_NP(2-569) (opt4)
aggagagucccgcagucggcguccagcggcucugcuuguucgugugugugucguugcaggccuuauucaagcuuaccauggacuggaccuggauccuguuccugguggccgccgccaccagagugcacagcagcgugagcaaggaggugaagagcuuccuguggacccagagccugagaagagagcugagcggcuacugcagcaacaucaagcugcagguggugaaggacgcccaggcccugcugcacggccuggacuucagcgaggugagcaacgugcagagacugaugagaaagcagaagagagacgacagcgaccugaagagacugagagaccugaaccaggccgugaacaaccugguggagcugaagagcacccagcagaagagcauccugagagugggcacccugaccagcgacgaccugcugacccuggccgccgaccuggagaagcugaagagcaaggugaucagaaccgagagaccccugagcagcggcguguacaugggcaaccugagcacccagcagcuggagcagagaagagcccugcugaacaugaucggcauggugggcggcgcccagggcacccagcccggcagagacggcguggugagagugugggacgugaagaaccccgaccugcugaacaaccaguucggcaccaugcccagccugacccuggccugccugaccaagcagggccagguggaccugaacgacgccgugcuggcccugaccgaccugggccugaucuacaccgccaaguaccccaacagcagcgaccuggacagacugagccagagccaccccauccugaacaugguggacaucaagaagagcagccugaacaucagcggcuacaacuucagccugggcgccgccgugaaggccggcgccugcaugcuggacggcggcaacaugcuggagaccaucaaggugaccccccagaccauggacggcauccugaagagcauccugaaggugaagagaagccugggcauguucgugagcgacacccccggcgagagaaaccccuacgagaacauccuguacaagaucugccugagcggcgacggcuggcccuacaucgccagcagaaccagcaucgugggcagagccugggagaacaccaccguggaccuggagagcgacggcaagccccagaaggugggcagcgccggcagcaacaagagccugcagagcgccggcuuccccaccggccugaccuacagccagcugaugacccugaaggacagcaugaugcagcuggaccccagcgccaagaccuggaucgacaucgagggcagacccgaggaccccguggagaucgcccuguaccagcccaugagcggcugcuacauccacuucuucagagagcccaccgaccugaagcaguucaagcaggacgccaaguacagccacggcaucgacguggccgaccuguuccccgcccagcccggccugaccagcgccgugaucgaggcccugcccagaaacauggugcugaccugccagggcagcgacgacaucaagagacugcuggacagccagggcagaagagacaucaagcugaucgacaucgcccugagcaaggccgacagcagaagauucgagaacgccgugugggaccagugcaaggaccugugccacaugcacaccggcguggugguggagaagaagaagagaggcggcaaggaggagaucaccccccacugcgcccugauggacugcaucauguacgacgccgccgugagcggcggccugaacauccccgugcugagagccgugcugcccagagacaugguguucagaaccagcagccccaagguggugcugugaggacuaguaauaaggaaacuguaugaaugucugugggcaggaagugaagagauccuucuguaaagguuuuuggaauuaugucugcugaauaauaaacuuuuuugaaauaauaaaucugguagaaaaaugagaucucaaaggcucuuuucagagccaccaaaaaaaaaaaaaaaaaaaaaaaaaaaaaaaaaaaaaaaaaaaaaaaaaaaaaaaaaaaaaaaaaaaaaaaaaaaaaaaaaaaaaaaaaaaaaaaaaaaaa

SEQ ID NO: 21582 - RNA, 2097 nt, Artificial Sequence
  mRNA product Design b-4 (hSL-A100) comprising derived and/or modified sequence from LASV(ISTH2010-NIG-2012;Clade II)__AIT17483__SP-IgE_NP(2-569) (opt4)
aggagagucccgcagucggcguccagcggcucugcuuguucgugugugugucguugcaggccuuauucaagcuuaccauggacuggaccuggauccuguuccugguggccgccgccaccagagugcacagcagcgccagcaaggaggugaagagcuuccuguggacccagagccugagaagagagcugagcggcuacugcagcaacaucaagcugcagguggugaaggacgcccaggcccugcugcacggccuggacuucagcgaggugagcaacgugcagagacugaugagaaagcagaagagagacgacagcgaccugaagagacugagagaccugaaccaggccgugaacaaccugguggagcugaagagcacccagcagaagagcauccugagagugggcacccugaccagcgacgaccugcugacccuggccgccgaccuggagaagcugaagagcaaggugaucagaaccgagagaccccugagcagcggcguguacaugggcaaccugagcacccagcagcuggagcagagaagagcccugcugaaccugaucggcauggugggcggcgcccagggcacccagcccggcagagacggcguggugagagugugggacgugaagaaccccgaccugcugaacaaccaguucggcaccaugcccagccugacccuggccugccugaccaagcagggccagguggaccugaacgacgccgugcuggcccugaccgaccugggccugaucuacaccgccaaguaccccaacagcagcgaccuggacagacugagccagagccaccccauccugaacaugguggacaccaagaagagcagccugaacaucagcggcuucaacuucagccugggcgccgccgugaaggccggcgccugcaugcuggacggcggcaacaugcuggagaccaucaaggugaccccccagaccauggacggcauccugaagagcauccugaaggugaagaagagccugggcauguucgugagcgacacccccggcgagagaaaccccuacgagaacauccuguacaagaucugccugagcggcgacggcuggcccuacaucgccagcagaaccagcaucgugggcagagccugggagaacaccaccguggaccuggagagcgacggcaagccccacaaggugggcaccgccggcagcaacaagagccugcagagcgccggcuuccccaccggccugaccuacagccagcugaugacccugaaggacagcaugaugcagcuggaccccagcgccaagaccuggaucgacaucgagggcagacccgaggaccccguggagaucgcccuguaccagcccaugagcggcugcuacauccacuucuucagagagcccaccgaccugaagcaguucaagcaggacgccaaguacagccacggcaucgacguggccgaccuguuccccgcccagcccggccugaccagcgccgugaucgaggcccugcccagaaacauggugcugaccugccagggcagcgacgacaucaagagacugcuggacagccagggcagaagagacaucaagcugaucgacaucgcccugagcaaggccgacagcagaagauucgagaacgccgugugggaccagugcaaggaccugugccacaugcacaccggcguggugguggagaagaagaagagaggcggcaaggaggagaucaccccccacugcgcccugauggacugcaucauguacgacgccgccgugagcggcggccugaacauccccgugcugagagccgugcugcccagagacaugguguucagaaccagcagccccaagguggugcugugaggacuaguaauaaggaaacuguaugaaugucugugggcaggaagugaagagauccuucuguaaagguuuuuggaauuaugucugcugaauaauaaacuuuuuugaaauaauaaaucugguagaaaaaugagaucucaaaggcucuuuucagagccaccaaaaaaaaaaaaaaaaaaaaaaaaaaaaaaaaaaaaaaaaaaaaaaaaaaaaaaaaaaaaaaaaaaaaaaaaaaaaaaaaaaaaaaaaaaaaaaaaaaaaa

SEQ ID NO: 21583 - RNA, 2097 nt, Artificial Sequence
  mRNA product Design b-4 (hSL-A100) comprising derived and/or modified sequence from LASV(Lassa virus/H.sapiens-wt/NGA/2015/ISTH_0543;Clade II)__AVO03640__SP-IgE_NP(2-569) (opt4)
aggagagucccgcagucggcguccagcggcucugcuuguucgugugugugucguugcaggccuuauucaagcuuaccauggacuggaccuggauccuguuccugguggccgccgccaccagagugcacagcagcgccagcaaggaggugaagagcuuccuguggacccagagccugagaagagagcugagcggcuacugcagcaacaucaagcugcagguggugaaggacgcccaggcccugcugcacggccuggacuucagcgaggugagcaacgugcagagacugaugagaaagcagaagagagacgacagcgaccugaagagacugagagaccugaaccaggccgugaacaaccugguggagcugaagagcacccagcagaagagcauccugagagugggcacccugaccagcgacgaccugcugacccuggccgccgaccuggagaagcugaagagcaaggugaucagaaccgagagaccccugagcagcggcguguacaugggcaaccugagcacccagcagcuggagcagagaagagcccugcugaacaugaucggcauggugggcggcgcccagggcacccagcccggcagagacggcguggugagagugugggacgugaagaaccccgaccugcugaacaaccaguucggcaccaugcccagccugacccuggccugccugaccaagcagggccagguggaccugaacgacgccgugcuggcccugaccgaccugggccugaucuacaccgccaaguaccccaacagcagcgaccuggacagacugagccagagccaccccauccugaacaugguggacaccaagaagagcagccugaacaucagcggcuacaacuucagccugggcgccgccgugaaggccggcgccugcaugcuggacggcggcaacaugcuggagaccaucaaggugaccccccagaccauggacggcauccugaagagcauccugaaggugaagaagagccugggcauguucgugagcgacacccccggcgagagaaaccccuacgagaacauccuguacaagaucugccugagcggcgacggcuggcccuacaucgccagcagaaccagcaucgugggcagagccugggagaacaccaccguggaccuggagagcgacggcaagccccagaaggugggcagcgccggcagcaacaagagccugcagagcgccggcuuccccaccggccugaccuacagccagcugaugacccugaaggacagcaugaugcagcuggaccccagcgccaagaccuggaucgacaucgagggcagacccgaggaccccguggagaucgcccuguaccagcccaugagcggcugcuacauccacuucuucagagagcccaccgaccugaagcaguucaagcaggacgccaaguacagccacggcaucgacguggccgaccuguuccccgcccagcccggccugaccagcgccgugaucgaggcccugcccagaaacauggugcugaccugccagggcagcgacgacaucaagagacugcuggacagccagggcagaaaggacaucaagcugaucgacaucgcccugagcaaggccgacagcagaagauucgagaacgccgugugggaccagugcaaggaccugugccacaugcacaccggcguggugguggagaagaagaagagaggcggcaaggaggagaucaccccccacugcgcccugauggacugcaucauguacgacgccgccgugagcggcggccugaacauccccgugcugagagccgugcugcccagagacaugguguucagaaccagcagccccaagguggugcugugaggacuaguaauaaggaaacuguaugaaugucugugggcaggaagugaagagauccuucuguaaagguuuuuggaauuaugucugcugaauaauaaacuuuuuugaaauaauaaaucugguagaaaaaugagaucucaaaggcucuuuucagagccaccaaaaaaaaaaaaaaaaaaaaaaaaaaaaaaaaaaaaaaaaaaaaaaaaaaaaaaaaaaaaaaaaaaaaaaaaaaaaaaaaaaaaaaaaaaaaaaaaaaaaa

SEQ ID NO: 21584 - RNA, 2097 nt, Artificial Sequence
  mRNA product Design b-4 (hSL-A100) comprising derived and/or modified sequence from LASV(Lassa virus/H.sapiens-wt/NGA/2016/ISTH_0009;Clade II)__AVO03572__SP-IgE_NP(2-569) (opt4)
aggagagucccgcagucggcguccagcggcucugcuuguucgugugugugucguugcaggccuuauucaagcuuaccauggacuggaccuggauccuguuccugguggccgccgccaccagagugcacagcagcgccagcaaggaggugaagagcuuccuguggacccagagccugagaagagagcugagcggcuacugcagcaacaucaagcugcagguggugaaggacgcccaggcccugcugcacggccuggacuucagcgaggugagcaacgugcagagacugaugagaaagcagaagagagacgacagcgaccugaagagacugagagaccugaaccaggccgugaacaaccugguggagcugaagagcacccagcagaagagcauccugagagugggcacccugaccagcgacgaccugcugacccuggccgccgaccuggagaagcugaagagcaaggugaucagaaccgagagaccccugagcagcggcguguacaugggcaaccugagcacccagcagcuggagcagagaagagcccugcugaacaugaucggcauggugggcggcgcccagggcacccagcccggcagagacggcguggugagagugugggacgugaagaaccccgaccugcugaacaaccaguucggcaccaugcccagccugacccuggccugccugaccaagcagggccagguggaccugaacgacgccgugcuggcccugaccgaccugggccugaucuacaccgccaaguaccccaacagcagcgaccuggacagacugagccagagccaccccauccugaacaugguggacaccaagaagagcagccugaacaucagcggcuacaacuucagccugggcgccgccgugaaggccggcgccugcaugcuggacggcggcaacaugcuggagaccaucaaggugaccccccagaccauggacggcauccugaagagcauccugaaggugaagaagagccugggcauguucgugagcgacacccccggcgagagaaaccccuacgagaacauccuguacaagaucugccugagcggcgacggcuggcccuacaucgccagcagaaccagcaucgugggcagagccugggagaacaccaccguggaccuggagagcgacggcaagccccagaaggugggcagcgccggcagcaacaagagccugcagagcgccggcuuccccaccggccugaccuacagccagcugaugacccugaaggacagcaugaugcagcuggaccccagcgccaagaccuggaucgacaucgagggcagacccgaggaccccguggagaucgcccuguaccagcccaugagcggcugcuacauccacuucuucagagagcccaccgaccugaagcaguucaagcaggacgccaaguacagccacggcaucgacguggccgaccuguuccccgcccagcccggccugaccagcgccgugaucgaggcccugcccagaaacauggugcugaccugccagggcagcgacgacaucaagagacugcuggacagccagggcagaagagacaucaagcugaucgacaucgcccugagcaaggccgacagcagaagauucgagaacgccgugugggaccagugcaaggaccugugccacaugcacaccggcguggugguggagaagaagaagagaggcggcaaggaggagaucaccccccacugcgcccugauggacugcaucauguacgacgccgccgugagcggcggccugaacauccccgugcugagagccgugcugcccagagacaugguguucagaaccagcagccccaagguggugcugugaggacuaguaauaaggaaacuguaugaaugucugugggcaggaagugaagagauccuucuguaaagguuuuuggaauuaugucugcugaauaauaaacuuuuuugaaauaauaaaucugguagaaaaaugagaucucaaaggcucuuuucagagccaccaaaaaaaaaaaaaaaaaaaaaaaaaaaaaaaaaaaaaaaaaaaaaaaaaaaaaaaaaaaaaaaaaaaaaaaaaaaaaaaaaaaaaaaaaaaaaaaaaaaaa

SEQ ID NO: 21585 - RNA, 2097 nt, Artificial Sequence
  mRNA product Design b-4 (hSL-A100) comprising derived and/or modified sequence from LASV(Lassa virus/H.sapiens-wt/NGA/2016/ISTH_0017;Clade II)__AVO03568__SP-IgE_NP(2-569) (opt4)
aggagagucccgcagucggcguccagcggcucugcuuguucgugugugugucguugcaggccuuauucaagcuuaccauggacuggaccuggauccuguuccugguggccgccgccaccagagugcacagcagcgccagcaaggaggugaagagcuuccuguggacccagagccugagaagagagcugagcggcuacugcagcagcaucaagcugcagguggugaaggacgcccaggcccugcugcacggccuggacuucagcgaggugagcaacgugcagagacugaugagaaagcagaagagagacgacagcgaccugaagagacugagagaccugaaccaggccgugaacaaccugguggagcugaagagcacccagcagaagagcauccugagagugggcacccugaccagcgacgaccugcugacccuggccgccgaccuggagaagcugaagagcaaggugaucagaaccgagagaccccugagcagcggcguguacaugggcaaccugagcacccagcagcuggagcagagaagagcccugcugaacaugaucggcauggccggcggcgcccagggcacccagcccggcagagacggcguggugagagugugggacgugaagaaccccgaccugcugaacaaccaguucggcaccaugcccagccugacccuggccugccugaccaagcagggccagguggaccugaacgacgccgugcuggcccugaccgaccugggccugaucuacaccgccaaguaccccaacagcagcgaccuggacagacugagccagagccaccccauccugaacaugguggacaccaagaagagcagccugaacaucagcggcuacaacuucagccugggcgccgccgugaaggccggcgccugcaugcuggacggcggcaacaugcuggagaccaucaaggugaccccccagaccauggacggcauccugaagagcauccugaaggugaagagaagccugggcauguucgugagcgacgcccccggcgagagaaaccccuacgagaacauccuguacaagaucugccugagcggcgacggcuggcccuacaucgccagcagaaccagcaucgugggcagagccugggagaacaccaccguggaccuggagagcgacggcaagccccagaaggugggcgccaccggcagcaacaagagccugcagagcgccggcuuccccaccggccugaccuacagccagcugaugacccugaaggacagcaugaugcagcuggaccccagcgccaagaccuggaucgacaucgagggcagacccgaggaccccguggagguggcccuguaccagcccgugagcggcugcuacauccacuucuucagagagcccaccgaccugaagcaguucaagcaggacgccaaguacagccacggcaucgacguggccgaccuguuccccgcccagcccggccugaccagcgccgugaucgaggcccugcccagaaacauggugcugaccugccagggcagcgacgacaucaagaagcugcuggacagccagggcagaaaggacaucaagcugaucgacaucgcccugagcaaggccgacagcagaagauucgagaacgccgugugggaccagugcaaggaccugugccacaugcacaccggcguggugguggagaagaagaagagaggcggcaaggaggagaucaccccccacugcgcccugauggacugcaucauguacgacgccgccgugagcggcggccugaacauccccgugcugagagccgugcugcccagagacaugguguucagaaccagcagccccaagguggugcugugaggacuaguaauaaggaaacuguaugaaugucugugggcaggaagugaagagauccuucuguaaagguuuuuggaauuaugucugcugaauaauaaacuuuuuugaaauaauaaaucugguagaaaaaugagaucucaaaggcucuuuucagagccaccaaaaaaaaaaaaaaaaaaaaaaaaaaaaaaaaaaaaaaaaaaaaaaaaaaaaaaaaaaaaaaaaaaaaaaaaaaaaaaaaaaaaaaaaaaaaaaaaaaaaa

SEQ ID NO: 21586 - RNA, 2097 nt, Artificial Sequence
  mRNA product Design b-4 (hSL-A100) comprising derived and/or modified sequence from LASV(Lassa virus/H.sapiens-wt/NGA/2018/ISTH_0959;Clade II)__AVV65100__SP-IgE_NP(2-569) (opt4)
aggagagucccgcagucggcguccagcggcucugcuuguucgugugugugucguugcaggccuuauucaagcuuaccauggacuggaccuggauccuguuccugguggccgccgccaccagagugcacagcagcgccagcaaggaggugaagagcuuccuguggacccagagccugagaagagagcugagcggcuacugcagcaacaucaagcugcagguggugaaggacgcccaggcccugcugcacggccuggacuucagcgaggugagcaacgugcagagacugaugagaaagcagaagagagacgacagcgaccugaagagacugagagaccugaaccaggccgugaacaaccugguggagcugaagagcacccagcagaagagcauccugagagugggcacccugaccagcgacgaccugcugacccuggccgccgaccuggagaagcugaagagcaaggugaucagaaccgagagaccccugagcagcggcguguacaugggcaaccugagcacccagcagcuggagcagagaagagcccugcugaaccugaucggcauggugggcggcgcccagggcacccagcccggcagagacggcguggugagagugugggacgugaagaaccccgaccugcugaacaaccaguucggcaccaugcccagccugacccuggccugccugaccaagcagggccagguggaccugaacgacguggugcuggcccugaccgaccugggccugaucuacaccgccaaguaccccaacagcagcgaccuggacagacugagccagagccaccccauccugaacaugguggacaccaagaagagcagccugaacaucagcggcuucaacuucagccugggcgccgccgugaaggccggcgccugcaugcuggacggcggcaacaugcuggagaccaucaaggugaccccccagaccauggacggcauccugaagagcauccugaaggugaagaagagccugggcauguucgugagcgacacccccggcgagagaaaccccuacgagaacauccuguacaagaucugccugagcggcgacggcuggcccuacaucgccagcagaaccagcaucgugggcagagccugggagaacaccaccguggaccuggagagcgacggcaagccccacaaggugggcaccgccggcagcaacaagagccugcagagcgccggcuuccccaccggccugaccuacagccagcugaugacccugaaggacagcaugaugcagcuggaccccagcgccaagaccuggaucgacaucgagggcagacccgaggaccccguggagaucgcccuguaccagcccaugagcggcugcuacauccacuucuucagagagcccaccgaccugaagcaguucaagcaggacgccaaguacagccacggcaucgacguggccgaccuguuccccgcccagcccggccugaccagcgccgugaucgaggcccugcccagaaacauggugcugaccugccagggcagcgacgacaucaagagacugcuggacagccagggcagaaaggacaucaagcugaucgacaucgcccugagcaagaccgacagcagaagauucgagaacgccgugugggaccagugcaaggaccugugccacaugcacaccggcguggugguggagaagaagaagagaggcggcaaggaggagaucaccccccacugcgcccugauggacugcaucauguacgacgccgccgugagcggcggccugaacauccccgugcugagagccgugcugcccagagacaugguguucagaaccagcagccccaagguggugcugugaggacuaguaauaaggaaacuguaugaaugucugugggcaggaagugaagagauccuucuguaaagguuuuuggaauuaugucugcugaauaauaaacuuuuuugaaauaauaaaucugguagaaaaaugagaucucaaaggcucuuuucagagccaccaaaaaaaaaaaaaaaaaaaaaaaaaaaaaaaaaaaaaaaaaaaaaaaaaaaaaaaaaaaaaaaaaaaaaaaaaaaaaaaaaaaaaaaaaaaaaaaaaaaaa

SEQ ID NO: 21587 - RNA, 2097 nt, Artificial Sequence
  mRNA product Design b-4 (hSL-A100) comprising derived and/or modified sequence from LASV(LASV003-NIG-2008;Clade II)__AIT17581__SP-IgE_NP(2-569) (opt4)
aggagagucccgcagucggcguccagcggcucugcuuguucgugugugugucguugcaggccuuauucaagcuuaccauggacuggaccuggauccuguuccugguggccgccgccaccagagugcacagcagcgccagcaaggaggugaagagcuuccuguggacccagagccugagaagagagcugagcggcuacugcagcagcaucaagcugcagguggugaaggacgcccaggcccugcugcacggccuggacuucagcgaggugagcaacgugcagagacugaugagaaagcagaagagagacgacagcgaccugaagagacugagagaccugaaccaggccgugaacaaccugguggagcugaagagcacccagcagaagagcgugcugagagugggcacccugaccagcgacgaccugcugacccuggccgccgaccuggagaagcugaagagcaaggugaucagaaccgagagaccccugagcagcggcguguacaugggcaaccugagcgcccagcagcuggagcagagaagaacccugcugaacaugaucggcauggugggcggcgcccagggcacccagcccggcagagacggcguggugagagugugggacgugaagaaccccgaccugcugaacaaccaguucggcaccaugcccagccugacccuggccugccugaccaagcagggccagguggaccugaacgacguggugcuggcccugaccgaccugggccugaucuacaccgccaaguaccccaacagcagcgaccuggacagacugagccagagccaccccauccugagcaugguggacaccaagaagagcagccugaacaucagcggcuacaacuucagccugggcgccgccgugaaggccggcgccugcaugcuggacggcggcaacaugcuggagaccaucaaggugaccccccagaccauggacggcauccugaagagcauccugaaggugaagaagagccugggcauguucgugagcgacacccccggcgagagaaaccccuacgagaacauccuguacaagaucugccugagcggcgacggcuggcccuacaucgccagcagaaccagcaucgugggcagagccugggagaacaccaccguggaccuggagagcgacggcaagccccagaaggugggcaccgccggcagcaacaagagccugcagagcgccggcuuccccaccggccugaccuacagccagcugaugacccugaaggacagcaugaugcagcuggaccccagcgccaagaccuggaucgacaucgagggcagacccgaggaccccguggagaucgcccuguaccagcccaugagcggcugcuacauccacuucuucagagagcccaccgaccugaagcaguucaagcaggacgccaaguacagccacggcaucgacgugaccgaccuguuccccgcccagcccggccugaccagcgccgugaucgaggcccugcccagaaacauggugcugaccugccagggcagcgacgacaucaagagacugcuggacagccagggcagaagagacaucaagcugaucgacaucgcccugagcaaggccgacagcagaagauucgagaacgccgugugggaccagugcaaggaccugugccacaugcacaccggcguggugguggagaagaagaagagaggcggcaaggaggagaucaccccccacugcgcccugauggacugcaucauguacgacgccgccgugagcggcggccugaacauccccgugcugagagccgugcugcccagagacaugguguucagaaccagcagccccaagguggugcugugaggacuaguaauaaggaaacuguaugaaugucugugggcaggaagugaagagauccuucuguaaagguuuuuggaauuaugucugcugaauaauaaacuuuuuugaaauaauaaaucugguagaaaaaugagaucucaaaggcucuuuucagagccaccaaaaaaaaaaaaaaaaaaaaaaaaaaaaaaaaaaaaaaaaaaaaaaaaaaaaaaaaaaaaaaaaaaaaaaaaaaaaaaaaaaaaaaaaaaaaaaaaaaaaa

SEQ ID NO: 21588 - RNA, 2097 nt, Artificial Sequence
  mRNA product Design b-4 (hSL-A100) comprising derived and/or modified sequence from LASV(LASV035-NIG-2009;Clade II)__AIT17589__SP-IgE_NP(2-569) (opt4)
aggagagucccgcagucggcguccagcggcucugcuuguucgugugugugucguugcaggccuuauucaagcuuaccauggacuggaccuggauccuguuccugguggccgccgccaccagagugcacagcagcgccagcaaggaggugaagagcuuccuguggacccagagccugagaagagagcugagcggcuacugcagcagcaucaagcugcagguggugaaggacgcccaggcccugcugcacggccuggacuucagcgaggugagcaacgugcagagacugaugagaaagcagaagagagacgacagcgaccugaagagacugagagaccugaaccaggccgugaacaaccugguggagcugaagagcacccagcagaagagcauccugagagugggcacccugaccagcgacgaccugcugacccuggccgccgaccuggagaagcugaagagcaaggugaucagaaccgagagaccccugagcagcggcguguacaugggcaaccugagcgcccagcagcuggagcagagaagagcccugcugaacaugaucggcauggugggcggcgcccagggcacccagcccggcagagacggcguggugagagugugggacgugaagaaccccgaccugcugaacaaccaguucggcaccaugcccagccugacccuggccugccugaccaagcagggccagguggaccugaacgacgccgugcuggcccugaccgaccugggccugaucuacaccgccaaguaccccaacagcagcgaccuggacagacugagccagagccaccccauccugaacaugguggacaccaagaagagcagccugaacaucagcggcuacaacuucagccugggcgccgccgugaaggccggcgccugcaugcuggacggcggcaacaugcuggagaccaucaaggugaccccccagaccauggacggcauccugaagagcauccugaaggugaagagaagccugggcauguucgugagcgacacccccggcgagagaaaccccuacgagaacauccuguacaagaucugccugagcggcgacggcuggcccuacaucgccagcagaaccagcaucgugggcagagccugggagaacaccaccguggaccuggagagcgacggcaagccccagaaggugggcaccaccggcagcaacaagagccugcagagcgccggcuuccccaccggccugaccuacagccagcugaugacccugaaggacagcaugaugcagcuggaccccagcgccaagaccuggaucgacaucgagggcagacccgaggaccccguggagaucgcccuguaccagcccaugagcggcugcuacauccacuucuucagagagcccaccgaccugaagcaguucaagcaggacgccaaguacagccacggcaucgacguggccgaccuguuccccgcccagcccggccugaccagcgccgugaucgaggcccugcccagaaacauggugcugaccugccagggcagcgacgacaucaagaagcugcuggacagccagggcagaagagacaucaagcugaucgacaucgcccugagcaaggccgacagcagaaaguucgagaacgccgugugggaccagugcaaggaccugugccacaugcacaccggcguggugguggagaagaagaagagaggcggcaaggaggagaucaccccccacugcgcccugauggacugcaucauguacgacgccgccgugagcggcggccugaacauccccgugcugagagccgugcugcccagagacaugguguucagaaccagcagccccaagguggugcugugaggacuaguaauaaggaaacuguaugaaugucugugggcaggaagugaagagauccuucuguaaagguuuuuggaauuaugucugcugaauaauaaacuuuuuugaaauaauaaaucugguagaaaaaugagaucucaaaggcucuuuucagagccaccaaaaaaaaaaaaaaaaaaaaaaaaaaaaaaaaaaaaaaaaaaaaaaaaaaaaaaaaaaaaaaaaaaaaaaaaaaaaaaaaaaaaaaaaaaaaaaaaaaaaa

SEQ ID NO: 21589 - RNA, 2097 nt, Artificial Sequence
  mRNA product Design b-4 (hSL-A100) comprising derived and/or modified sequence from LASV(LASV1000-NIG-2009;Clade II)__AIT17783__SP-IgE_NP(2-569) (opt4)
aggagagucccgcagucggcguccagcggcucugcuuguucgugugugugucguugcaggccuuauucaagcuuaccauggacuggaccuggauccuguuccugguggccgccgccaccagagugcacagcagcgccagcaaggaggugaagagcuuccuguggacccagagccugagaagagagcugagcggcuacugcagcaacaucaagcugcagguggugaaggacgcccaggcccugcugcacggccuggacuucagcgaggugagcaacgugcagagacugaugagaaagcagaagagagacgacagcgaccugaagagacugagagaccugaaccaggccgugaacaaccugguggagcugaagagcacccagcagaagagcauccugagagugggcacccugaccagcgacgaccugcugacccuggccgccgaccuggagaagcugaagagcaaggugaucagaaccgagagaccccugagcagcggcguguacaugggcaaccugagcacccagcagcuggagcagagaagagcccugcugaacaugaucggcauggugggcggcgcccagggcacccagcccggcagagacggcguggugagagugugggacgugaagaaccccgaccugcugaacaaccaguucggcaccaugcccagccugacccuggccugccugaccaagcagggccagguggaccugaacgacguggugcuggcccugaccgaccugggccugaucuacaccgccaaguaccccaacagcagcgaccuggacagacugagccagagccaccccauccugaacaugguggacaccaagaagagcagccugaacaucagcggcuacaacuucagccugggcgccgccgugaaggccggcgccugcaugcuggacggcggcaacaugcuggagaccaucaaggugaccccccagaccauggacggcauccugaagagcauccugaaggugaagaagagccugggcauguucgugagcgacacccccggcgagagaaaccccuacgagaacauccuguacaagaucugccugagcggcgacggcuggcccuacaucgccagcagaaccagcaucgugggcagagccugggagaacaccaccguggaccuggagagcgacggcaagccccagaaggugggcaccgccggcagcaacaagagccugcagagcgccggcuuccccaccggccugaccuacagccagcugaugacccugaaggacagcaugaugcagcuggaccccagcgccaagaccuggaucgacaucgagggcagacccgaggaccccguggagaucgcccuguaccagcccgugagcggcugcuacauccacuucuucagagagcccaccgaccugaagcaguucaagcaggacgccaaguacagccacggcaucgacguggccgaccuguuccccgcccagcccggccugaccagcgccgugaucgaggcccugcccagaaacauggugcugaccugccagggcagcgacgacaucaagagacugcuggacagccagggcagaagagacaucaagcugaucgacaucgcccugagcaaggccgacagcagaagauucgagaacgccgugugggaccagugcaaggaccugugccacaugcacaccggcguggugguggagaagaagaagagaggcggcaaggaggagaucaccccccacugcgcccugauggacugcaucauguacgacgccgccgugagcggcggccugaacauccccgugcugagagccgugcugcccagagacaugguguucagaaccagcagccccaagguggugcugugaggacuaguaauaaggaaacuguaugaaugucugugggcaggaagugaagagauccuucuguaaagguuuuuggaauuaugucugcugaauaauaaacuuuuuugaaauaauaaaucugguagaaaaaugagaucucaaaggcucuuuucagagccaccaaaaaaaaaaaaaaaaaaaaaaaaaaaaaaaaaaaaaaaaaaaaaaaaaaaaaaaaaaaaaaaaaaaaaaaaaaaaaaaaaaaaaaaaaaaaaaaaaaaaa

SEQ ID NO: 21590 - RNA, 2097 nt, Artificial Sequence
  mRNA product Design b-4 (hSL-A100) comprising derived and/or modified sequence from LASV(LASV221-NIG-2010;Clade II)__AIT17625__SP-IgE_NP(2-569) (opt4)
aggagagucccgcagucggcguccagcggcucugcuuguucgugugugugucguugcaggccuuauucaagcuuaccauggacuggaccuggauccuguuccugguggccgccgccaccagagugcacagcagcgccagcaaggaggugaagagcuuccuguggacccagagccugagaagagagcugagcggcuacugcagcagcaucaagcugcagguggugaaggacgcccaggcccugcugcacggccuggacuucagcgaggugagcaacgugcagagacugaugagaaagcagagaagagacgacagcgaccugaagagacugagagaccugaaccaggccgugaacaaccugguggagcugaagagcacccagcagaagagcauccugagagugggcacccugaccagcgacgaccugcugacccuggccgccgaccuggagaagcugaagagcaaggugaucagaaccgagagaccccugagcagcggcguguacaugggcaaccugagcacccagcagcuggagcagagaagagcccugcugaacaugaucggcauggugggcggcgcccagggcacccagcccggcagagacggcguggugagagugugggacgugaagaaccccgaccugcugaacaaccaguucggcaccaugcccagccugacccuggccugccugaccaagcagggccagguggaccugaacgacgccgugcuggcccugaccgaccugggccugaucuacaccgccaaguaccccaacagcagcgaccuggacagacugagccagagccaccccauccugaacaugguggacaccaagaagagcagccugaacaucagcggcuacaacuucagccugggcgccgccgugaaggccggcgccugcaugcuggacggcggcaacaugcuggagaccaucaaggugaccccccagaccguggacggcauccugaagagcauccugaaggugaagagaagccugggcauguucgugagcgacacccccggcgagagaaaccccuacgagaacauccuguacaagaucugccugagcggcgacggcuggcccuacaucgccagcagaaccagcaucgugggcagagccugggagaacaccaccguggaccuggagagcgacggcaagccccagaaggugggcaccgccggcagcaacaagagccugcagagcgccggcuuccccaccggccugaccuacagccagcugaugacccugaaggacagcaugaugcagcuggaccccagcgccaagaccuggaucgacaucgagggcagacccgaggaccccguggagaucgcccuguaccagcccaugagcggcugcuacauccacuucuucagagagcccaccgaccugaagcaguucaagcaggacgccaaguacagccacggcaucgacguggccgaccuguuccccgcccagcccggccugaccagcgccgugaucgaggcccugcccagaaacauggugcugaccugccagggcagcgacgacaucaagagacugcuggacagccagggcagaagagacaucaagcugaucgacaucgcccugagcaaggccgacagcagaaaguucgagaacgccgugugggaccagugcaaggaccugugccacaugcacaccggcguggugguggagaagaagaagagaggcggcaaggaggagaucaccccccacugcgcccugauggacugcaucauguacgacgccgccgugagcggcggccugaacauccccgugcugagagccgugcugcccagagacaugguguucagaaccagcagccccaagguggugcugugaggacuaguaauaaggaaacuguaugaaugucugugggcaggaagugaagagauccuucuguaaagguuuuuggaauuaugucugcugaauaauaaacuuuuuugaaauaauaaaucugguagaaaaaugagaucucaaaggcucuuuucagagccaccaaaaaaaaaaaaaaaaaaaaaaaaaaaaaaaaaaaaaaaaaaaaaaaaaaaaaaaaaaaaaaaaaaaaaaaaaaaaaaaaaaaaaaaaaaaaaaaaaaaaa

SEQ ID NO: 21591 - RNA, 2097 nt, Artificial Sequence
  mRNA product Design b-4 (hSL-A100) comprising derived and/or modified sequence from LASV(LASV237-NIG-2010;Clade II)__AIT17639__SP-IgE_NP(2-569) (opt4)
aggagagucccgcagucggcguccagcggcucugcuuguucgugugugugucguugcaggccuuauucaagcuuaccauggacuggaccuggauccuguuccugguggccgccgccaccagagugcacagcagcgccagcaaggaggugaagagcuuccuguggacccagagccugagaagagagcugagcggcuacugcagcaacaucaagcugcagguggugaaggacgcccaggcccugcugcacggccuggacuucagcgaggugagcaacgugcagagacugaugagaaagcagaagagagacgacagcgaccugaagagacugagagaccugaaccaggccgugaacaaccugguggagcugaagagcacccagcagaagagcauccugagagugggcacccugaccagcgacgaccugcugacccuggccgccgaccuggagaagcugaagagcaaggugaucagaaccgagagaccccugagcagcggcguguacaugggcaaccugagcacccagcagcuggagcagagaagagcccugcugaacaugaucggcauggugggcggcgcccagggcacccagcccggcagagacggcguggugagagugugggacgugaagaaccccgaccugcugaacaaccaguucggcaccaugcccagccugacccuggccugccugaccaagcagggccagguggaccugaacgacgccgugcuggcccugaccgaccugggccugaucuacaccgccaaguaccccaacagcagcgaccuggacagacugagccagagccaccccauccugaacaugguggacaucaagaagagcagccugaacaucagcggcuacaacuucagccugggcgccgccgugaaggccggcgccugcaugcuggacggcggcaacaugcuggagaccaucaaggugaccccccagaccauggacggcauccugaagagcauccugaaggugaagagaagccugggcauguucgugagcgacacccccggcgagagaaaccccuacgagaacauccuguacaagaucugccugagcggcgacggcuggcccuacaucgccagcagaaccagcaucgugggcagagccugggagaacaccaccguggaccuggagagcgacggcaagccccagaaggugggcagcgccggcagcaacaagagccugcagagcgccggcuuccccaccggccugaccuacagccagcugaugacccugaaggacagcaugaugcagcuggaccccagcgccaagaccuggaucgacaucgagggcagacccgaggaccccguggagaucgcccuguaccagcccaugagcggcugcuacauccacuucuucagagagcccaccgaccugaagcaguucaagcaggacgccaaguacagccacggcaucgacguggccgaccuguuccccgcccagcccggccugaccagcgccgugaucgaggcccugcccagaaacauggugcugaccugccagggcagcgacgacaucaagagacugcuggacagccagggcagaagagacaucaagcugaucgacaucgcccugagcaaggccgacagcagaagauucgagaacgccgugugggaccagugcaaggaccugugccacaugcacaccggcguggugguggagaagaagaagagaggcggcaaggaggagaucaccccccacugcgcccugauggacugcaucauguacgacgccgccgugagcggcggccugaacauccccgugcugagagccgugcugcccagagacaugguguucagaaccagcagccccaagguggugcugugaggacuaguaauaaggaaacuguaugaaugucugugggcaggaagugaagagauccuucuguaaagguuuuuggaauuaugucugcugaauaauaaacuuuuuugaaauaauaaaucugguagaaaaaugagaucucaaaggcucuuuucagagccaccaaaaaaaaaaaaaaaaaaaaaaaaaaaaaaaaaaaaaaaaaaaaaaaaaaaaaaaaaaaaaaaaaaaaaaaaaaaaaaaaaaaaaaaaaaaaaaaaaaaaa

SEQ ID NO: 21592 - RNA, 2097 nt, Artificial Sequence
  mRNA product Design b-4 (hSL-A100) comprising derived and/or modified sequence from LASV(LASV253-NIG-2011;Clade II)__AIT17671__SP-IgE_NP(2-569) (opt4)
aggagagucccgcagucggcguccagcggcucugcuuguucgugugugugucguugcaggccuuauucaagcuuaccauggacuggaccuggauccuguuccugguggccgccgccaccagagugcacagcagcgccagcaaggaggugaagagcuuccuguggacccagagccugagaagagagcugagcggcuacugcagcagcaucaagcugcagguggugaaggacgcccaggcccugcugcacggccuggacuucagcgaggugagcaacgugcagagacugaugagaaagcagaagagagacgacagcgaccugaagagacugagagaccugaaccaggccgugaacaaccugguggagcugaagagcacccagcagaagagcgugcugagagugggcacccugaccagcgacgaccugcugacccuggccgccgaccuggagaagcugaagagcaaggugaucagaaccgagagaccccugagcagcggcguguacaugggcaaccugagcacccagcagcuggagcagagaagagcccugcugaacaugaucggcauggugggcggcgcccagggcacccagcccggcagagacggcguggugagagugugggacgugaagaaccccgaccugcugaacaaccaguucggcaccaugcccagccugacccuggccugccugaccaagcagggccagguggaccugaacgacguggugcuggcccugaccgaccugggccugaucuacaccgccaaguaccccaacagcagcgaccuggacagacugagccagagccaccccauccugaacaugguggacaccaagaagagcagccugaacaucagcggcuacaacuucagccugggcgccgccgugaaggccggcgccugcaugcuggacggcggcaacaugcuggagaccaucaaggugaccccccagaccauggacggcauccugaagagcauccugaaggugaagaagagccugggcauguucgugagcgacacccccggcgagagaaaccccuacgagaacauccuguacaagaucugccugagcggcgacggcuggcccuacaucgccagcagaaccagcaucgugggcagagccugggagaacaccaccguggaccuggagagcgacggcaagccccagaaggugggcaccgccggcagcaacaagagccugcagagcgccggcuuccccaccggccugaccuacagccagcugaugacccugaaggacagcaugaugcagcuggaccccagcgccaagaccuggaucgacaucgagggcagacccgaggaccccguggagaucgcccuguaccagcccaugagcggcugcuacauccacuucuucagagagcccaccgaccugaagcaguucaagcaggacgccaaguacagccacggcaucgacgugaccgaccuguuccccgcccagcccggccugaccagcgccgugaucgaggcccugcccagaaacauggugcugaccugccagggcagcgacgacaucaagagacugcuggacagccagggcagaagagacaucaagcugaucgacaucgcccugagcaaggccgacagcagaagauucgagaacgccgugugggaccagugcaaggaccugugccacaugcacaccggcguggugguggagaagaagaagagaggcggcaaggaggagaucaccccccacugcgcccugauggacugcaucauguacgacgccgccgugagcggcggccugaacauccccgugcugagagccgugcugcccagagacaugguguucagaaccagcagccccaagguggugcugugaggacuaguaauaaggaaacuguaugaaugucugugggcaggaagugaagagauccuucuguaaagguuuuuggaauuaugucugcugaauaauaaacuuuuuugaaauaauaaaucugguagaaaaaugagaucucaaaggcucuuuucagagccaccaaaaaaaaaaaaaaaaaaaaaaaaaaaaaaaaaaaaaaaaaaaaaaaaaaaaaaaaaaaaaaaaaaaaaaaaaaaaaaaaaaaaaaaaaaaaaaaaaaaaa

SEQ ID NO: 21593 - RNA, 2097 nt, Artificial Sequence
  mRNA product Design b-4 (hSL-A100) comprising derived and/or modified sequence from LASV(LASV254-NIG-2011;Clade II)__AIT17675__SP-IgE_NP(2-569) (opt4)
aggagagucccgcagucggcguccagcggcucugcuuguucgugugugugucguugcaggccuuauucaagcuuaccauggacuggaccuggauccuguuccugguggccgccgccaccagagugcacagcagcgccagcaaggaggugaagagcuuccuguggacccagagccugagaagagagcugagcggcuacugcagcagcaucaagcugcagguggugaaggacgcccaggcccugcugcacggccuggacuucagcgaggugagcaacgugcagagacugaugagaaagcagaagagagacgacagcgaccugaagagacugagagaccugaaccaggccgugaacaaccugguggagcugaagagcacccagcagaagagcgugcugagagugggcacccugaccagcgacgaccugcugacccuggccgccgaccuggagaagcugaagagcaaggugaucagaaccgagagaccccugagcagcggcguguacaugggcaaccugagcacccagcagcuggagcagagaagagcccugcugaacaugaucggcauggugggcggcgcccagggcacccagcccggcagagacggcguggugagagugugggacgugaagaaccccgaccugcugaacaaccaguucggcaccaugcccagccugacccuggccugccugaccaagcagggccagguggaccugaacgacgccgugcuggcccugaccgaccugggccugaucuacaccgccaaguaccccaacagcagcgaccuggacagacugagccagagccaccccauccugaacaugguggacaccaagaagagcagccugaacaucagcggcuacaacuucagccugggcgccgccgugaaggccggcgccugcaugcuggacggcggcaacaugcuggagaccaucaaggugaccccccagaccauggacggcauccugaagagcauccugaaggugaagaagagccugggcauguucgugagcgacacccccggcgagagaaaccccuacgagaacauccuguacaagaucugccugagcggcgacggcuggcccuacaucgccagcagaaccagcaucgugggcagagccugggagaacaccaucguggaccuggagagcgacggcaagccccagaaggugggcaccgccggcagcaacaagagccugcagagcgccggcuuccccaccggccugaccuacagccagcugaugacccugaaggacagcaugaugcagcuggaccccagcgccaagaccuggaucgacaucgagggcagacccgaggaccccguggagaucgcccuguaccagcccaugagcggcugcuacauccacuucuucagagagcccaccgaccugaagcaguucaagcaggacgccaaguacagccacggcaucgacguggccgaccuguuccccgcccagcccggccugaccagcgccgugaucgaggcccugcccagaaacauggugcugaccugccagggcagcgacgacaucaagagacugcuggacagccagggcagaagagacaucaagcugaucgacaucgcccugagcaaggccgacagcagaagauucgagaacgccgugugggaccagugcaaggaccugugccacaugcacaccggcguggugguggagaagaagaagagaggcggcaaggaggagaucaccccccacugcgcccugauggacugcaucauguacgacgccgccgugagcggcggccugaacauccccgugcugagagccgugcugcccagagacaugguguucagaaccagcagccccaagguggugcugugaggacuaguaauaaggaaacuguaugaaugucugugggcaggaagugaagagauccuucuguaaagguuuuuggaauuaugucugcugaauaauaaacuuuuuugaaauaauaaaucugguagaaaaaugagaucucaaaggcucuuuucagagccaccaaaaaaaaaaaaaaaaaaaaaaaaaaaaaaaaaaaaaaaaaaaaaaaaaaaaaaaaaaaaaaaaaaaaaaaaaaaaaaaaaaaaaaaaaaaaaaaaaaaaa

SEQ ID NO: 21594 - RNA, 2097 nt, Artificial Sequence
  mRNA product Design b-4 (hSL-A100) comprising derived and/or modified sequence from LASV(Nig08-04;Clade II)__ADU56611__SP-IgE_NP(2-569) (opt4)
aggagagucccgcagucggcguccagcggcucugcuuguucgugugugugucguugcaggccuuauucaagcuuaccauggacuggaccuggauccuguuccugguggccgccgccaccagagugcacagcagcgccagcaaggaggugaagagcuuccuguggacccagagccugagaagagagcugagcggcuacugcagcaacaucaagcugcagguggugaaggacgcccaggcccugcugcacggccuggacuucagcgaggugagcaacgugcagagacugaugagaaagcagaagagagacgacggcgaccugaagagacugagagaccugaaccaggccgugaacaaccugguggagcugaagagcacccagcagaagagcgugcugagagugggcacccugaccagcgacgaccugcugacccuggccgccgaccuggagaagcugaagagcaaggugaucagaaccgagagaccccugagcagcggcguguacaugggcaaccugagcacccagcagcuggagcagagaaaggcccugcugagcaugaucggcauggugggcggcgcccagggcacccagcccggcagagacggcguggugagagugugggacgugaagaaccccgaccugcugaacaaccaguucggcaccaugcccagccugacccuggccugccugaccaagcagggccagguggaccugaacgacgccgugcuggcccugaccgaccugggccugaucuacaccgccaaguaccccaacagcagcgaccuggacagacugagccagagccaccccauccugaacaugguggacaccaagaagagcagccugaacaucagcggcuacaacuucagccugggcgccgccgugaaggccggcgccugcaugcuggacggcggcaacaugcuggagaccaucaaggugaccccccagaccauggacggcauccugaagagcauccugaaggugaagagaagccugggcauguucgugagcgacacccccggcgagagaaaccccuacgagaacauccuguacaagaucugccugagcggcgacggcuggcccuacaucgccagcagaaccagcaucgugggcagagccugggagaacaccaccguggaccuggagagcgacggcaagccccagaaggugggcaccgccggcagcaacaagagccugcagagcgccggcuuccccaccggccugaccuacagccagcugaugacccugaaggacagcaugaugcagcuggaccccagcgccaagaccuggaucgacaucgagggcagacccgaggaccccguggagaucgcccuguaccagcccaugagcggcugcuacauccacuucuucagagagcccaccgaccugaagcaguucaagcaggacgccaaguacagccacggcaucgacgugaccgaccuguucagcgcccagcccggccugaccagcgccgugaucgaggcccugcccagaaacauggugcugaccugccagggcagcgacgacaucaagaagcugcuggacagccagggcagaagagacaucaagcugaucgacaucagccugaacaaggccgacagcagaagauucgagaacgccgugugggaccagugcaaggaccugugccacaugcacaccggcguggugguggagaagaagaagagaggcggcaaggaggagaucaccccccacugcgcccugauggacugcaucauguucgacgccgccgugagcggcggccugaacauccccauccugagagccgugcugcccagagacaugguguucagaaccagcagccccaagguggugcugugaggacuaguaauaaggaaacuguaugaaugucugugggcaggaagugaagagauccuucuguaaagguuuuuggaauuaugucugcugaauaauaaacuuuuuugaaauaauaaaucugguagaaaaaugagaucucaaaggcucuuuucagagccaccaaaaaaaaaaaaaaaaaaaaaaaaaaaaaaaaaaaaaaaaaaaaaaaaaaaaaaaaaaaaaaaaaaaaaaaaaaaaaaaaaaaaaaaaaaaaaaaaaaaaa

SEQ ID NO: 21595 - RNA, 2100 nt, Artificial Sequence
  mRNA product Design b-4 (hSL-A100) comprising derived and/or modified sequence from LASV(GA391;Clade III)__AAA46284__SP-IgE_NP(2-570) (opt4)
aggagagucccgcagucggcguccagcggcucugcuuguucgugugugugucguugcaggccuuauucaagcuuaccauggacuggaccuggauccuguuccugguggccgccgccaccagagugcacagcagcgccagcaaggaggugagaagcugccuguggacccagagccugagaagagagcugagcggcuacugcagcaacaucaagcugcagguggugaaggacgcccaggcccugcugcacggccuggacuucagcgaggugagcaacgugcagagacugaugagaaagcagaagagagacgacggcgaccugaagagacugagagaccugaaccaggccgugaacaaccugguggagcugaagagcacccagcagaagagcgugcugagagugggcacccugagcagcgacgaccugcugauccuggccgccgaccuggagaagcugaagagcaaggugaccagaaccgagagaccccugagcagcggcguguacaugggcaaccugagcagccagcagcuggaccagagaagagcccugcugaacaugaucggcaugaccggcgugagcggcggcggcaagggcgccagcaacggcaucgugagagugugggacgugaagaacgccgagcugcugaacaaccaguucggcaccaugcccagccugacccuggccugccugaccaagcagggccagguggaccugaacgacgccgugcaggcccugaccgaccugggccugaucuacaccgccaaguaccccaacagcagcgaccuggacagacugagccagagccaccccauccugaacaugaucgacaccaagaagagcagccugaacaucagcggcuacaacuucagccugggcgccgccgugaaggccggcgccugcaugcuggacggcggcaacaugcuggagaccaucaaggugagcccccagaccauggacggcauccugaagagcauccugaaggugaagaagagccugggcauguucgugagcgacacccccggcgagagaaaccccuacgagaacauccuguacaagaucugccugagcggcgacggcuggagcuacaucgccagcagaaccagcaucgugggcagagccugggagaacaccgugguggaccuggagcaggacaacaagccccagaagaucggcaacggcggcagcaacaagagccugcagagcgccggcuucgccgccggccugaucuacagccagcugaugacccugaaggacuucaagugcuucaaccugauccccaacgccaagaccuggauggacaucgagggcagacccgaggaccccguggagaucgcccuguaccagcccagcagcggcugcuacgugcacuucuucagagagcccaccgaccugaagcaguucaagcaggacgccaaguacagccacggcagagacgugaccgaccuguucgccgcccagcccggccugaccagcgccgugaucgaggcccugcccagaaacauggugaucaccugccagggcagcgaggacaucagaaagcugcuggagagccagggcagaagagacaucaagcugaucgacaucacccugagcaaggccgacagcagaaaguucgagaacgccgugugggaccaguucaaggaccugugccacaugcacaccggcguggugguggagaagaagaagagaggcggcaaggaggagaucaccccccacugcgcccugauggacugcaucauguucgacgccgccgugagcggcggccuggacgccaaggugcugagaguggugcugcccagagacaugguguucagaaccagcacccccaagguggugcugugaggacuaguaauaaggaaacuguaugaaugucugugggcaggaagugaagagauccuucuguaaagguuuuuggaauuaugucugcugaauaauaaacuuuuuugaaauaauaaaucugguagaaaaaugagaucucaaaggcucuuuucagagccaccaaaaaaaaaaaaaaaaaaaaaaaaaaaaaaaaaaaaaaaaaaaaaaaaaaaaaaaaaaaaaaaaaaaaaaaaaaaaaaaaaaaaaaaaaaaaaaaaaaaaa

SEQ ID NO: 21596 - RNA, 2097 nt, Artificial Sequence
  mRNA product Design b-4 (hSL-A100) comprising derived and/or modified sequence from LASV(Nig08-A19;Clade III)__ADU56619__SP-IgE_NP(2-569) (opt4)
aggagagucccgcagucggcguccagcggcucugcuuguucgugugugugucguugcaggccuuauucaagcuuaccauggacuggaccuggauccuguuccugguggccgccgccaccagagugcacagcagcgccagcaaggaggugaagagcuuccuguggacccagagccugagaagagagcugagcggcuacugcagcaacaucaagcugcagguggugaaggacgcccaggcccugcugcacggccuggacuucagcgaggugagcaacgugcagagacugaugagaaagcagaagagagacgacggcgaccugaagagacugagagaccugaaccaggccgugaacaaccugguggagcugaagagcacccagcagaagagcgugcugagagugggcacccugagcagcgacgaccugcuggugcuggccgccgaccuggagaagcugaagagcaagguggugagaaccgagagaccccugagcagcggcaucuacaugggcaaccugagcagccagcagcuggaccagagaaaggcccugcugaacaugaucggcaugaccggcggcaacggcggcagaaacaccaccagcgacggcaucgugagagugugggacgugaagaacgccgagcugcugaacaaccaguucggcaccaugcccagccugacccuggccugccugaccaagcagggccagguggaccugaacgacgccgugcaggcccugaccgaccugggccugaucuacaccgccaaguaccccaacagcagcgaccuggacagacuggcccagagccaccccauccugaacaugaucgacaccaagaagagcagccugaacaucagcggcuacaacuucagccugggcgccgccgugaaggccggcgccugcaugcuggacggcggcaacaugcuggagaccaucaaggugagcccccagaccauggacggcauccugaagagcauccugaaggugaagagaagccugggcauguucaucagcgacacccccggcgagagaaaccccuacgagaacauccuguacaagaucugccugagcggcgacggcuggcccuacaucgccagcagaaccagcaucgugggcagagccugggagaacaccgugguggaccuggagagcgacaacaagccccagaagaccggcaacggcggcagcaacaagagccugcagagcgccggcuucgccgccggccugaccuacagccagcugaugacccugaaggacagcaugcugcagcuggaccccaacgccaagaccuggauggacaucgagggcagacccgaggaccccguggagaucgcccuguaccagcccagcagcggcugcuacauccacuucuucagagagcccaccgaccugaagcaguucaagcaggacgccaaguacagccacggcaucgacgugaccgaccuguucgccgcccagcccggccugaccagcgccgugaucgaggcccugcccagaaacauggugaucaccugccagggcagcgaggacaucagaaagcugcuggagagccagggcagaagagacaucaagcugaucgacaucagccugagcaagguggacagcagaaaguucgagaacgccgugugggaccaguucaaggaccugugccacaugcacaccggcaucgugguggagaagaagaagagaggcggcaaggaggagaucaccccccacugcgcccugauggacugcaucauguucgacgccgccgugagcggcggcguggacgccaaggugcugagagccgugcugcccagagacaugguguucagaaccagcacccccaagguggugcugugaggacuaguaauaaggaaacuguaugaaugucugugggcaggaagugaagagauccuucuguaaagguuuuuggaauuaugucugcugaauaauaaacuuuuuugaaauaauaaaucugguagaaaaaugagaucucaaaggcucuuuucagagccaccaaaaaaaaaaaaaaaaaaaaaaaaaaaaaaaaaaaaaaaaaaaaaaaaaaaaaaaaaaaaaaaaaaaaaaaaaaaaaaaaaaaaaaaaaaaaaaaaaaaaa

SEQ ID NO: 21597 - RNA, 2097 nt, Artificial Sequence
  mRNA product Design b-4 (hSL-A100) comprising derived and/or modified sequence from LASV(G1180-SLE-2010;Clade IV)__AIT17169__SP-IgE_NP(2-569) (opt4)
aggagagucccgcagucggcguccagcggcucugcuuguucgugugugugucguugcaggccuuauucaagcuuaccauggacuggaccuggauccuguuccugguggccgccgccaccagagugcacagcagcgccagcaaggagaucaagagcuuccuguggacccagagccugagaagagagcugagcggcuacugcagcaacaucaagcugcagguggugaaggacgcccaggcccugcugcacggccuggacuucagcgaggugagcaacgugcagagacugaugagaaaggagagaagagacgacaacgaccugaagagacugagagaccugaaccaggccgugaacaaccugguggagcugaagagcacccagcagaagagcauccugagagugggcacccugaccagcgacgaccugcugauccuggccgccgaccuggagaagcugaagagcaaggugaucagaaccgagagaccccugagcgccggcguguacaugggcaaccugagcagccagcagcuggaccagagaagagcccugcugagcaugaucggcaugagcagcggcaaccagagagcccaggccggcagagacggcguggugagagugugggacgugaagaacguggagcugcugaacaaccaguucggcaccaugcccagccugacccuggccugccugaccaagcagggccagguggaccugaacgacgccgugcaggcccugaccgaccugggccugaucuacaccgccaaguaccccaacaccagcgaccuggacagacugacccagagccaccccauccugaacaugaucgacaccaagaagagcagccugaacaucagcggcuacaacuucagccugggcgccgccgugaaggccggcgccugcaugcuggacggcggcaacaugcuggagaccaucaaggugagcccccagaccauggacggcauccugaagagcauccugaaggugaagaaggcccugggcauguucaucagcgacacccccggcgagagaaaccccuacgagaacauccuguacaagaucugccugagcggcgacggcuggcccuacaucgccagcagaaccagcaucaccggcagagccugggagaacaccgugguggaccuggagagcgacggcaagccccagaaggccggcagcaacaacagcaacaagagccugcagagcgugggcuucaccgccggccugaccuacagccagcugaugacccugaaggacgccaugcugcagcuggaccccaacgccaagaccuggauggacaucgagggcagacccgaggaccccguggagaucgcccuguaccagcccagcagcggcugcuacauccacuucuucagagagcccaccgaccugaagcaguucaagcaggacgccaaguacagccacggcaucgacgugaccgaccuguucgccgcccagcccggccugaccagcgccgugaucgacgcccugcccagaaacauggugaucaccugccagggcagcgacgacaucagaaagcugcuggagagccagggcagaaaggacaucaagcugaucgacaucgcccugagcaagaccgacagcagaaaguacgagaacgccgugugggaccaguacaaggaccugugccacaugcacaccggcguggugguggagaagaagaagagaggcggcaaggaggagaucaccccccacugcgcccugauggacugcaucauguucgacgccgccgugagcggcggccugaacaccagcgugcugagagccgugcugcccagagacaugguguucagaaccagcacccccagaguggugcugugaggacuaguaauaaggaaacuguaugaaugucugugggcaggaagugaagagauccuucuguaaagguuuuuggaauuaugucugcugaauaauaaacuuuuuugaaauaauaaaucugguagaaaaaugagaucucaaaggcucuuuucagagccaccaaaaaaaaaaaaaaaaaaaaaaaaaaaaaaaaaaaaaaaaaaaaaaaaaaaaaaaaaaaaaaaaaaaaaaaaaaaaaaaaaaaaaaaaaaaaaaaaaaaaa

SEQ ID NO: 21598 - RNA, 2097 nt, Artificial Sequence
  mRNA product Design b-4 (hSL-A100) comprising derived and/or modified sequence from LASV(G1442-SLE-2011;Clade IV)__AIT17181__SP-IgE_NP(2-569) (opt4)
aggagagucccgcagucggcguccagcggcucugcuuguucgugugugugucguugcaggccuuauucaagcuuaccauggacuggaccuggauccuguuccugguggccgccgccaccagagugcacagcagcgccagcaaggaggugaagagcuuccuguggacccagagccugagaagagagcugagcggcuacugcagcaacaucaagcugcagguggugaaggacgcccaggcccugcugcacggccuggacuucagcgaggugagcaacgugcagagacugaugagaaagcagagaagagacgacaacgaccugaagagacugagagaccugaaccaggccgugaacaaccugguggagcugaagagcacccagcagaagagcgugcugagagugggcacccugaccagcgacgaccugcuggugcuggccgccgaccuggagaagcugaagagcaaggugaucagaaccgagagaccccugagcgccggcguguacaugggcaaccugagcagccagcagcuggaccagagaagagcccugcugaacaugaucggcaugagcggcggcauccagggcaccagaaccggcagagacggcguggugagagugugggacgugaagaacgccgaccugcugaacaaccaguucggcaccaugcccagccugacccuggccugccugaccaagcagggccagguggaccugaacgacguggugcaggcccugaccgaccugggccugaucuacaccgccaaguaccccaacgccagcgaccuggacagacugacccagagccaccccauccugaacaugaucgacaccaagaagagcagccugaacaucagcggcuacaacuucagccugggcgccgccgugaaggccggcgccugcaugcuggacggcggcaacaugcuggagaccaucaaggugagcccccagaccauggacggcauccugaagagcauccugaaggugaagaagacccugggcauguucaucagcgacacccccggcgagagaaaccccuacgagaacauccuguacaagaucugccugagcggcgacggcuggcccuacaucgccagcagaaccagcaucaccggcagagccugggagaacaccgugguggaccuggagagcgacggcaagccccagaaggccggcagcaacaacagcaacaagagccugcagagcgccggcuucgccgccggccugaccuacagccagcugaugacccugaaggacgccaugcugcagcuggaccccaacgccaagaccuggauggacaucgagggcagacccgaggaccccguggagaucgcccuguaccagcccagcagcggcugcuacauccacuucuucagagagcccaccgaccugaagcaguucaagcaggacgccaaguacagccacggcaucgacgugaccgaccuguucgccgcccagcccggccugaccagcgccgugaucgaggcccugcccagaaacauggugaucaccugccagggcagcgacgacaucaagaagcugcuggagagccagggcagaaaggacaucaagcugaucgacaucgcccugagcaagaccgacagcagaaaguacgagaacgccgugugggaccaguacaaggaccugugccacaugcacaccggcguggugguggagaagaagaagagaggcggcaaggaggagaucaccccccacugcgcccugauggacugcaucauguucgacgccgccgugagcggcggccugaacacccuggugcugagagccgugcugcccagagacaugguguucagaaccagcacccccagaguggugcugugaggacuaguaauaaggaaacuguaugaaugucugugggcaggaagugaagagauccuucuguaaagguuuuuggaauuaugucugcugaauaauaaacuuuuuugaaauaauaaaucugguagaaaaaugagaucucaaaggcucuuuucagagccaccaaaaaaaaaaaaaaaaaaaaaaaaaaaaaaaaaaaaaaaaaaaaaaaaaaaaaaaaaaaaaaaaaaaaaaaaaaaaaaaaaaaaaaaaaaaaaaaaaaaaa

SEQ ID NO: 21599 - RNA, 2097 nt, Artificial Sequence
  mRNA product Design b-4 (hSL-A100) comprising derived and/or modified sequence from LASV(G3010-SLE-2013;Clade IV)__AIT17345__SP-IgE_NP(2-569) (opt4)
aggagagucccgcagucggcguccagcggcucugcuuguucgugugugugucguugcaggccuuauucaagcuuaccauggacuggaccuggauccuguuccugguggccgccgccaccagagugcacagcagcgccagcaaggagaucaagagcuuccuguggacccagagccugagaagagagcugagcggcuacugcagcaacaucaagcugcagguggugaaggacgcccaggcccugcugcacggccuggacuucagcgaggugagcaacgugcagagacugaugagaaaggagagaagagacgacaacgaccugaagagacugagagaccugaaccaggccgugaacaaccugguggagcugaagagcacccagcagaagagcauccugagagugggcacccugaccagcgacgaccugcugauccuggccgccgaccuggagaagcugaagagcaaggugaccagaaccgagagaccccugagcgccggcguguacaugggcaaccugagcagccagcagcuggaccagagaagagcccugcugagcaugaucggcaugagcagcggcgugcagggcgccagagccggcagagacggcguggugagagugugggacgugaagaacgccgagcugcugaacaaccaguucggcaccaugcccagccugacccuggccugccugaccaagcagggccagguggaccugaacgacguggugcaggcccugaccgaccugggccugaucuacaccgccaaguaccccaacaccagcgaccuggacagacugacccagagccaccccauccugaacaugaucgacaccaagaagagcagccugaacaucagcggcuacaacuucagccugggcgccgccgugaaggccggcgccugcaugcuggacggcggcaacaugcuggagaccaucaaggugagcccccagaccauggacggcauccugaagagcauccugaaggugaagaaggcccugggcauguucaucagcgagacccccggcgagagaaaccccuacgagaacauccuguacaagaucugccugagcggcgacggcuggcccuacaucgccagcagaaccagcaucaccggcagagccugggagaacaccgugguggaccuggagagcgacggcaagccccagaaggccggcagcaacaacagcaacaagagccugcagagcgccggcuucaccgccggccugaccuacagccagcugaugacccugaaggacgccaugcugcagcuggaccccaacgccaagaccuggauggacaucgagggcagacccgaggaccccguggagguggcccuguaccagcccagcagcggcugcuacauccacuucuucagagagcccaccgaccugaagcaguucaagcaggacgccaaguacagccacggcaucgacgugaccgaccuguucgccgcccagcccggccugaccagcgccgugaucgacgcccugcccagaaacauggugaucaccugccagggcagcgacgacaucaagaagcugcuggagagccagggcagaaaggacaucaagcugaucgacaucgcccugagcaagaccgacagcagaaaguacgagaacgccgugugggaccaguacaaggaccugugccacaugcacaccggcguggugguggagaagaagaagagaggcggcaaggaggagaucaccccccacugcgcccugauggacugcaucauguucgacgccgccgugagcggcggccugaacaccagcgugcugagagccgugcugcccagagacaugguguucagaaccagcacccccagaguggugcugugaggacuaguaauaaggaaacuguaugaaugucugugggcaggaagugaagagauccuucuguaaagguuuuuggaauuaugucugcugaauaauaaacuuuuuugaaauaauaaaucugguagaaaaaugagaucucaaaggcucuuuucagagccaccaaaaaaaaaaaaaaaaaaaaaaaaaaaaaaaaaaaaaaaaaaaaaaaaaaaaaaaaaaaaaaaaaaaaaaaaaaaaaaaaaaaaaaaaaaaaaaaaaaaaa

SEQ ID NO: 21600 - RNA, 2097 nt, Artificial Sequence
  mRNA product Design b-4 (hSL-A100) comprising derived and/or modified sequence from LASV(G502-SLE-2009;Clade IV)__AIT17127__SP-IgE_NP(2-569) (opt4)
aggagagucccgcagucggcguccagcggcucugcuuguucgugugugugucguugcaggccuuauucaagcuuaccauggacuggaccuggauccuguuccugguggccgccgccaccagagugcacagcagcgccagcaaggagaucaagagcuuccuguggacccagagccugagaagagagcugagcggcuacugcagcaacaucaagcugcagguggugaaggacgcccaggcccugcugcacggccuggacuucagcgaggugagcaacgugcagagacugaugagaaaggagagaagagacgacaacgaccugaagagacugagagaccugaaccaggccgugaacaaccugguggagcugaagagcacccagcagaagagcauccugagagugggcacccugaccagcgacgaccugcugauccuggccgccgaccuggagaagcugaagagcaaggugaucagaaccgagagaccccugagcgccggcguguacaugggcaaccugagcagccagcagcuggaccagagaagagcccugcugagcaugaucggcaugagcggcggcaaccagggcgugagagccggcaaggacggcguggugagagugugggacgugaagaacgccgagcugcugaacaaccaguucggcaccaugcccagccugacccuggccugccugaccaagcagggccagguggaccugaacgacgccgugcaggcccugaccgaccugggccugaucuacaccgccaaguaccccaacaccagcgaccuggacagacugacccagagccaccccauccugaacaugaucgacaccaagaagagcagccugaacaucagcggcuacaacuucagccugggcgccgccgugaaggccggcgccugcaugcuggacggcggcaacaugcuggagaccaucaaggugagcccccagaccauggacggcauccugaagagcauccugaaggugaagaaggcccugggcauguucaucagcgacacccccggcgagagaaaccccuacgagaacauccuguacaagaucugccugagcggcgacggcuggcccuacaucgccagcagaaccagcaucaccggcagagccugggagaacaccgugguggaccuggagagcgacggcaagccccagaaggccggcagcaacaacagcaacaagagccugcagagcgccggcuucaccgccggccugaccuacagccagcugaugacccugaaggacgccaugcugcagcuggaccccaacaccaagaccuggauggacaucgagggcagacccgaggaccccguggagaucgcccuguaccagcccagcagcggcugcuacauccacuucuucagagagcccaccgaccugaagcaguucaagcaggacgccaaguacagccacggcaucgacgugaccgaccuguucgccgcccagcccggccugaccagcgccgugaucgacgcccugcccagaaacauggugaucaccugccagggcagcgacgacaucagaaagcugcuggagagccagggcagaaaggacaucaagcugaucgacaucgcccugaacaagaccgacagcagaaaguacgagaacgccgugugggaccaguacaaggaccugugccacaugcacaccggcguggugguggagaagaagaagagaggcggcaaggaggagaucaccccccacugcgcccugauggacugcaucauguucgacgccgccgugagcggcggccugaacaccagcgugcugagagccgugcugcccagagacaugguguucagaaccagcacccccagaguggugcugugaggacuaguaauaaggaaacuguaugaaugucugugggcaggaagugaagagauccuucuguaaagguuuuuggaauuaugucugcugaauaauaaacuuuuuugaaauaauaaaucugguagaaaaaugagaucucaaaggcucuuuucagagccaccaaaaaaaaaaaaaaaaaaaaaaaaaaaaaaaaaaaaaaaaaaaaaaaaaaaaaaaaaaaaaaaaaaaaaaaaaaaaaaaaaaaaaaaaaaaaaaaaaaaaa

SEQ ID NO: 21601 - RNA, 2097 nt, Artificial Sequence
  mRNA product Design b-4 (hSL-A100) comprising derived and/or modified sequence from LASV(G733-SLE-2010;Clade IV)__AIT17155__SP-IgE_NP(2-569) (opt4)
aggagagucccgcagucggcguccagcggcucugcuuguucgugugugugucguugcaggccuuauucaagcuuaccauggacuggaccuggauccuguuccugguggccgccgccaccagagugcacagcagcgccagcaaggagaucaagagcuuccuguggacccagagccugagaagagagcugagcggcuacugcagcaacaucaagcugcagguggugaaggacgcccaggcccugcugcacggccuggacuucagcgaggugagcaacgugcagagacugaugagaaaggagagaagagacgacaacgaccugaagagacugagagaccugaaccaggccgugaacaaccugguggagcugaagagcacccagcagaagagcgugcugagagugggcacccugaccagcgacgagcugcuggugcuggccgccgaccuggagaagcugaagagcaaggugaucagaaccgagagaccccugagcgccggcguguacaugggcaaccugagcagccagcagcuggaccagagaagagcccugcugagcaugaucggcaugagcggcggcaaccagggcgccagaaccggcagagacggcguggugagagugugggacgugaagaacgccgagcugcugaacaaccaguucggcaccaugcccagccugacccuggccugccugaccaagcagggccagguggaccugaacgacgccgugcaggcccugaccgaccugggccugaucuacaccgccaaguaccccaacaccagcgaccuggacagacugacccagagccaccccauccugaacaugaucgacaccaagaagagcagccugaacaucagcggcuacaacuucagccugggcgccgccgugaaggccggcgccugcaugcuggacggcggcaacaugcuggagaccaucaaggugagcccccagaccauggacggcauccugaagagcauccugaaggugaagaaggcccugggcauguucaucagcgacacccccggcgagagaaaccccuacgagaacauccuguacaagaucugccugagcggcgacggcuggcccuacaucgccagcagaaccagcaucaccggcagagccugggagaacaccgugguggaccuggagagcgacggcaagccccagaaggccggcagcaacaacagcaacaagagccugcagagcgccggcuucaccgccggccugaccuacagccagcugaugacccugaaggacgccaugcugcagcuggaccccaacgccaagaccuggauggacaucgagggcagacccgaggaccccguggagaucgcccuguaccagcccagcagcggcugcuacauccacuucuucagagagcccaccgaccugaagcaguucaagcaggacgccaaguacagccacggcaucgacgugaccgaccuguucgccgcccagcccggccugaccagcgccgugaucgacgcccugcccagaaacauggugaucaccugccagggcagcgacgacaucagaaagcugcuggagagccagggcagaaaggacaucaagcugaucgacaucgcccugagcaagaucgacagcagaaaguacgagaacgccgugugggaccaguacaaggaccugugccacaugcacaccggcguggugguggagaagaagaagagaggcggcaaggaggagaucaccccccacugcgcccugauggacugcaucauguucgacgccgccgugagcggcggccugaacagccuggugcugagagccgugcugcccagagacaugguguucagaaccagcacccccagaguggugcugugaggacuaguaauaaggaaacuguaugaaugucugugggcaggaagugaagagauccuucuguaaagguuuuuggaauuaugucugcugaauaauaaacuuuuuugaaauaauaaaucugguagaaaaaugagaucucaaaggcucuuuucagagccaccaaaaaaaaaaaaaaaaaaaaaaaaaaaaaaaaaaaaaaaaaaaaaaaaaaaaaaaaaaaaaaaaaaaaaaaaaaaaaaaaaaaaaaaaaaaaaaaaaaaaa

SEQ ID NO: 21602 - RNA, 2097 nt, Artificial Sequence
  mRNA product Design b-4 (hSL-A100) comprising derived and/or modified sequence from MOPV/LASV reassortant(IGS-1;Clade IV)__AFY05578__SP-IgE_NP(2-569) (opt4)
aggagagucccgcagucggcguccagcggcucugcuuguucgugugugugucguugcaggccuuauucaagcuuaccauggacuggaccuggauccuguuccugguggccgccgccaccagagugcacagcagcgccagcaaggagaucaagagcuuccuguggacccagagccugagaagagagcugagcggcuacugcagcaacaucaagcugcagguggugaaggacgcccaggcccugcugcacggccuggacuucagcgaggugagcaacgugcagagacugaugagaaaggagagaagagacgacaacgaccugaagagacugagagaccugaaccaggccgugaacaaccugguggagcugaagagcacccagcagaagagcauccugagagugggcacccugaccagcgacgaccugcugauccuggccgccgaccuggagaagcugagaagcaaggugaucagaaccgagagaccccugagcgccggcguguacaugggcaaccugagcagccagcagcuggaccagagaagagcccugcugaacaugaucggcaugagcggcggcaaccagggcgccagagccggcagagacggcguggugagagugugggacgugaagaacgccgagcugcugagcaaccaguucggcaccaugcccagccugacccuggccugccugaccaagcagggccagguggaccugaacgacgccgugcaggcccugaccgaccugggccugaucuacaccgccaaguaccccaacaccagcgaccuggacagacugacccagagccaccccauccugaacaugaucgacaccaagaagagcagccugaacaucagcggcuacaacuucagccugggcgccgccgugaaggccggcgccugcaugcuggacggcggcaacaugcuggagaccaucaaggugagcccccagaccauggacggcauccugaagagcauccugaaggugaagaaggcccugggcauguucaucagcgacacccccggcgagagaaaccccuacgagaacauccuguacaagaucugccugagcggcgacggcuggcccuacaucgccagcagaaccagcaucaccggcagagccugggagaacaccgugguggaccuggagagcgacggcaagccccagaaggccgacagcaacaacagcagcaagagccugcagagcgccggcuucaccgccggccugaccuacagccagcugaugacccugaaggacgccaugcugcagcuggaccccaacgccaagaccuggauggacaucgagggcagacccgaggaccccguggagaucgcccuguaccagcccagcagcggcugcuacauccacuucuucagagagcccaccgaccugaagcaguucaagcaggacgccaaguacagccacggcaucgacgugaccgaccuguucgccacccagcccggccugaccagcgccgugaucgacgcccugcccagaaacauggugaucaccugccagggcagcgacgacaucagaaagcugcuggagagccagggcagaaaggacaucaagcugaucgacaucgaccugagcaagaccgacagcagaaaguacgagaacgccgugugggaccaguacaaggaccugugccacaugcacaccggcguggugguggagaagaagaagagaggcggcaaggaggagaucaccccccacugcgcccugauggacugcaucauguucgacgccgccgugagcggcggccugaacaccagcgugcugagagccgugcugcccagagacaugguguucagaaccagcacccccagaguggugcugugaggacuaguaauaaggaaacuguaugaaugucugugggcaggaagugaagagauccuucuguaaagguuuuuggaauuaugucugcugaauaauaaacuuuuuugaaauaauaaaucugguagaaaaaugagaucucaaaggcucuuuucagagccaccaaaaaaaaaaaaaaaaaaaaaaaaaaaaaaaaaaaaaaaaaaaaaaaaaaaaaaaaaaaaaaaaaaaaaaaaaaaaaaaaaaaaaaaaaaaaaaaaaaaaa

SEQ ID NO: 21603 - RNA, 2097 nt, Artificial Sequence
  mRNA product Design b-4 (hSL-A100) comprising derived and/or modified sequence from LASV(LM765-SLE-2012;Clade IV)__AIT17815__SP-IgE_NP(2-569) (opt4)
aggagagucccgcagucggcguccagcggcucugcuuguucgugugugugucguugcaggccuuauucaagcuuaccauggacuggaccuggauccuguuccugguggccgccgccaccagagugcacagcagcgccagcaaggagaucaagagcuuccuguggacccagagccugagaagagagcugagcggcuacugcagcaacaucaagcugcagguggugaaggacgcccaggcccugcugcacggccuggacuucagcgaggugagcaacgugcagagacugaugagaaaggagagaagagacgacaacgaccugaagagacugagagaccugaaccaggccgugaacaaccugguggagcugaagagcacccagcagaagagcauccugagagugggcacccugaccagcgacgaccugcugauccuggccgccgaccuggagaagcugaagagcaaggugaccagaaccgagagaccccugagcgccggcguguacaugggcaaccugagcagccagcagcuggaccagagaagagcccugcuggacaugaucggcaugagcggcagcaaccagggcgccagagccggcagagacggcguggugagagugugggacgugaagaacgccgagcugcugaacaaccaguucggcaccaugcccagccugacccuggccugccugaccaagcagggccagguggaccugaacgacgccgugcaggcccugaccgaccugggccugaucuacaccgccaaguaccccaacaccagcgaccuggacagacugacccagagccaccccauccugaacaugaucgacaccaagaagagcagccugaacaucagcggcuacaacuucagccugggcgccgccgugaaggccggcgccugcaugcuggacggcggcaacaugcuggagaccaucaaggugagcccccagaccauggacggcauccugaagagcauccugaaggugaagaaggcccugggcauguucaucagcgacgcccccggcgagagaaaccccuacgagaacauccuguacaagaucugccugagcggcgacggcuggcccuacaucgccagcagaaccagcaucaccggcagagccugggagaacaccgugguggaccuggagagcgacggcaagccccagaaggccggcagcaacggcagcaacaagagccugcagagcgccggcuucaccgccggccugaccuacagccagcugaugacccugaaggacgccaugcugcagcuggaccccaacgccaagaccuggauggacaucgagggcagacccgaggaccccguggagaucgcccuguaccagcccagcagcggcugcuacauccacuucuucagagagcccaccgaccugaagcaguucaagcaggacgccaaguacagccacggcaucgacgugaccgaccuguucgccgcccagcccggccugaccagcgccgugaucgacgcccugcccagaaacauggugaucaccugccagggcagcgacgacaucagaaagcuguucgagagccagggcagaaaggacaucaagcugaucgacaucgcccugagcaagaccgacagcagaaaguacgagaacgccgugugggaccaguacaaggaccugugccacaugcacaccggcaucgugguggagaagaagaagagaggcggcaaggaggagaucaccccccacugcgcccugauggacugcaucauguucgacgccgccgugagcggcggccugaacaccagcgugcugagagccgugcugcccagagacaugguguucagaaccagcacccccagaguggugcugugaggacuaguaauaaggaaacuguaugaaugucugugggcaggaagugaagagauccuucuguaaagguuuuuggaauuaugucugcugaauaauaaacuuuuuugaaauaauaaaucugguagaaaaaugagaucucaaaggcucuuuucagagccaccaaaaaaaaaaaaaaaaaaaaaaaaaaaaaaaaaaaaaaaaaaaaaaaaaaaaaaaaaaaaaaaaaaaaaaaaaaaaaaaaaaaaaaaaaaaaaaaaaaaaa

SEQ ID NO: 21604 - RNA, 2097 nt, Artificial Sequence
  mRNA product Design b-4 (hSL-A100) comprising derived and/or modified sequence from LASV(LM776-SLE-2012;Clade IV)__AIT17825__SP-IgE_NP(2-569) (opt4)
aggagagucccgcagucggcguccagcggcucugcuuguucgugugugugucguugcaggccuuauucaagcuuaccauggacuggaccuggauccuguuccugguggccgccgccaccagagugcacagcagcgccagcaaggagaucaagagcuuccuguggacccagagccugagaagagagcugagcagcuacugcagcaacaucaagcugcagguggugaaggacgcccaggcccugcugcacggccuggacuucagcgaggugagcaacgugcagagacugaugagaaaggagagaagagacgacaacgaccugaagagacugagagaccugaaccaggccgugaacaaccugguggagcugaagagcacccagcagaagagcauccugagagugggcacccugaccagcgacgaccugcugauccuggccgccgaccuggagaagcugaagagcaaggugaccagaaccgagagaccccugagcgccggcguguacaugggcaaccugagcagccagcagcuggaccagagaagagcccugcugagcaugaucggcaugagcggcagcaaccagggcgccagagccggcagagacggcguggugagagugugggacgugaagaacgccgagcugcugaacaaccaguucggcaccaugcccagccugacccuggccugccugaccaagcagggccagguggaccugaacgacgccgugcaggcccugaccgaccugggccugaucuacaccgccaaguaccccaacaccagcgaccuggacagacugacccagagccaccccauccugaacaugaucgacaccaagaagagcagccugaacaucagcggcuacaacuucagccugggcgccgccgugaaggccggcgccugcaugcuggacggcggcaacaugcuggagaccaucaaggugagcccccagaccauggacggcauccugaagagcauccugaaggugaagaaggcccugggcauguucaucagcgacacccccggcgagagaaaccccuacgagaacauccuguacaagaucugccugagcggcgacggcuggcccuacaucgccagcagaaccagcaucaccggcagagccugggagaacaccgugguggaccuggagagcgacggcaagccccagaaggccggcagcaacaacagcaacaagagccugcagagcgccggcuucaccgccggccugaccuacagccagcugaugacccugaaggacgccaugcugcagcuggaccccaacgccaagaccuggauggacaucgagggcagacccgaggaccccguggagguggcccuguaccagcccagcagcggcugcuacauccacuucuucagagagcccaccgaccugaagcaguucaagcaggacgccaaguacagccacggcaucgacgugaccgaccuguucgccgcccagcccggccugaccagcgccgugaucgacgcccugcccagaaacauggugaucaccugccagggcagcgacgacaucagaaagcugcuggagagccagggcagaaaggacaucaagcugaucgacaucgcccugagcaagaccgacagcagaaaguacgagaacgccgugugggaccaguacaaggaccugugccacaugcacaccggcguggugguggagaagaagaagagaggcggcaaggaggagaucaccccccacugcgcccugauggacugcaucauguucgacgccgccgugagcggcggccugaacaccagcgugcugagagccgugcugcccagagacaugguguucagaaccagcacccccagaguggugcugugaggacuaguaauaaggaaacuguaugaaugucugugggcaggaagugaagagauccuucuguaaagguuuuuggaauuaugucugcugaauaauaaacuuuuuugaaauaauaaaucugguagaaaaaugagaucucaaaggcucuuuucagagccaccaaaaaaaaaaaaaaaaaaaaaaaaaaaaaaaaaaaaaaaaaaaaaaaaaaaaaaaaaaaaaaaaaaaaaaaaaaaaaaaaaaaaaaaaaaaaaaaaaaaaa

SEQ ID NO: 21605 - RNA, 2097 nt, Artificial Sequence
  mRNA product Design b-4 (hSL-A100) comprising derived and/or modified sequence from LASV(Mad39;Clade IV)__ANH09723__SP-IgE_NP(2-569) (opt4)
aggagagucccgcagucggcguccagcggcucugcuuguucgugugugugucguugcaggccuuauucaagcuuaccauggacuggaccuggauccuguuccugguggccgccgccaccagagugcacagcagcgccagcaaggagaucaagagcuuccuguggacccagagccugagaagagagcugagcggcuacugcagcaacaucaagcugcagguggugaaggacgcccaggcccugcugcacggccuggacuucagcgaggugagcaacgugcagagacugaugagaaagcagagaagagacgacaacgaccugaagagacugagagaccugaaccaggccgugaacaaccugguggagcugaagagcacccagcagaagagcgugcugagagugggcacccugaccagcgacgaccugcugacccuggccgccgaccuggagaagcugaagagcaaggugaccagaaccgagagaccccugaccgccggcguguacaugggcaaccugagcagccagcagcuggaccagagaagagcccugcugaacaugaucggcaugagcggcggcaaccagggcgccagaaccggcagagacggcguggugagagugugggacgugaagaacgccgagcugcugaacaaccaguucggcaccaugcccagccugacccuggccugccugaccaagcagggccagguggaccugaacgacguggugcaggcccugaccgaccugggccugaucuacaccgccaaguaccccaacaccagcgaccuggacagacugacccagagccaccccauccugaacaugaucgacaccaacaagagcagccugaacaucagcggcuacaacuucagccugggcgccgccgugaaggccggcgccugcaugcuggacggcggcaacaugcuggagaccaucaaggugagcccccagaccauggacggcauccugaagagcauccugaaggugaagaagagccugggcauguucaucagcgacacccccggcgagagaaaccccuacgagaacauccuguacaagaucugccugagcggcgacggcuggcccuacaucgccagcagaaccagcaucaccggcagagccugggagaacaccgugguggaccuggagagcggcggcaagccccagaaggccggcagcaacaacagcaacaagagccugcagagcgccggcuucgccgccggccugaccuacagccagcugaugacccugaaggacgccaugcugcagcuggaccccaacgccaagaccuggauggacaucgagggcagacccgaggaccccguggagaucgcccuguaccagcccaucagcggcugcuacauccacuucuucagagagcccaccgaccugaagcaguucaagcaggacgccaaguacagccacggcaucgacgugaccgaccuguucgccgcccagcccggccugaccagcgccgugaucgaggcccugcccagaaacauggugaucaccugccagggcagcgacgacaucagaaagcuguucgagagccagggcagaaaggacaucaagcugaucgacaucgcccugagcaagaccgacagcagaaaguacgagaacgccgugugggaccaguacaaggaccugugccacaugcacaccggcguggugguggagaagaagaagaagggcggcaaggaggagaucaccccccacugcgcccugauggacugcaucauguucgacgccgccgugagcggcggccugaacacccuggugcugagagccgugcugcccagagacaugguguucagaaccagcacccccaagguggugcugugaggacuaguaauaaggaaacuguaugaaugucugugggcaggaagugaagagauccuucuguaaagguuuuuggaauuaugucugcugaauaauaaacuuuuuugaaauaauaaaucugguagaaaaaugagaucucaaaggcucuuuucagagccaccaaaaaaaaaaaaaaaaaaaaaaaaaaaaaaaaaaaaaaaaaaaaaaaaaaaaaaaaaaaaaaaaaaaaaaaaaaaaaaaaaaaaaaaaaaaaaaaaaaaaa

SEQ ID NO: 21606 - RNA, 2097 nt, Artificial Sequence
  mRNA product Design b-4 (hSL-A100) comprising derived and/or modified sequence from LASV(Z0947-SLE-2011;Clade IV)__AIT17841__SP-IgE_NP(2-569) (opt4)
aggagagucccgcagucggcguccagcggcucugcuuguucgugugugugucguugcaggccuuauucaagcuuaccauggacuggaccuggauccuguuccugguggccgccgccaccagagugcacagcagcgccagcaaggagaucaagagcuuccuguggacccagagccugagaagagagcugagcggcuacugcagcaacaucaagcugcagguggugaaggacgcccaggcccugcugcacggccuggacuucagcgaggugagcaacgugcagagacugaugagaaaggagagaagagacgacaacgaccugaagagacugagagaccugaaccaggccgugaacaaccugguggagcugaagagcacccagcagaagagcauccugagagugggcacccugaccagcgacgaccugcugauccuggccgccgaccuggagaagcugaagagcaaggugaccagaaccgagagaccccugagcgccggcguguacaugggcaaccugagcagccagcagcuggaccagagaagagcccugcugaacaugaucggcaugagcggcagcaaccagggcgccagaaccggcagagacggcguggugagagugugggacgugaagaacgccgagcugcugaacaaccaguucggcaccaugcccagccugacccuggccugccugaccaagcagggccagguggaccugaacgacgccgugcaggcccugaccgaccugggccugaucuacaccgccaaguaccccaacaccagcgaccuggacagacugacccagagccaccccauccugaacaugaucgacaccaagaagagcagccugaacaucagcggcuacaacuucagccugggcgccgccgugaaggccggcgccugcaugcuggacggcggcaacaugcuggagaccaucaaggugagcccccagaccauggacggcauccugaagagcauccugaaggugaagaaggcccugggcauguucaucagcgacgcccccggcgagagaaaccccuacgagaacauccuguacaagaucugccugagcggcgacggcuggcccuacaucgccagcagaaccagcaucaccggcagagccugggagaacaccgugguggaccuggagagcgacggcaagccccagaaggccggcagcaacggcagcaacaagagccugcagagcgccggcuucaccgccggccugaccuacagccagcugaugacccugaaggacgccaugcugcagcuggaccccaacgccaagaccuggauggacaucgagggcagacccgaggaccccguggagaucgcccuguaccagcccagcagcggcugcuacauccacuucuucagagagcccaccgaccugaagcaguucaagcaggacgccaaguacagccacggcaucgacgugaccgaccuguucgccgcccagcccggccugaccagcgccgugaucgacgcccugcccagaaacauggugaucaccugccagggcagcgacgacaucagaaagcuguucgagagccagggcagaaaggacaucaagcugaucgacaucgcccugagcaagaccgacagcagaaaguacgagaacgccgugugggaccaguacaaggaccugugccacaugcacaccggcaucgugguggagaagaagaagagaggcggcaaggaggagaucaccccccacugcgcccugauggacugcaucauguucgacgccgccgugagcggcggccugaacaccagcgugcugagagccgugcugcccagagacaugguguucagaaccagcacccccagaguggugcugugaggacuaguaauaaggaaacuguaugaaugucugugggcaggaagugaagagauccuucuguaaagguuuuuggaauuaugucugcugaauaauaaacuuuuuugaaauaauaaaucugguagaaaaaugagaucucaaaggcucuuuucagagccaccaaaaaaaaaaaaaaaaaaaaaaaaaaaaaaaaaaaaaaaaaaaaaaaaaaaaaaaaaaaaaaaaaaaaaaaaaaaaaaaaaaaaaaaaaaaaaaaaaaaaa

SEQ ID NO: 21607 - RNA, 2097 nt, Artificial Sequence
  mRNA product Design b-4 (hSL-A100) comprising derived and/or modified sequence from LASV(Josiah;Clade IV)__NP_694869__SP-IgE_NP(2-569) (opt5)
aggagagucccgcagucggcguccagcggcucugcuuguucgugugugugucguugcaggccuuauucaagcuuaccauggacuggaccuggauccuguuccucguggccgcugccacaagaguccacagcagcgccuccaaggagaucaaaucuuuccuguggacccagagccucagacgggaacuguccggcuacugcucuaacauuaagcugcaaguggucaaagacgcucaggcccugcuccacgggcuggauuuuagcgagguuuccaaugugcagcgccuuaugagaaaggaacggcgcgacgauaacgaccugaaaagacuccgggaucugaaucaggcggugaacaaucuggucgagcucaagucuacacaacaaaagagcauccugcgcgugggaacgcuuaccuccgacgaucugcucauucuggcugccgaccuugaaaaacuuaagagcaaaguuaucagaacagagcggccccucucugccggcguguauauggggaaccuguccagccagcagcuggaucagcgcagagcucuccugaauaugauuggaaugucuggcgggaaccagggagcccgggcuggccgcgacggcgucgugagaguuugggaugugaagaaugccgagcuucugaacaaucaguucgggaccaugccuucccucacacuggcgugucuuaccaaacagggacaagucgaccugaacgaugccgugcaggcucucacagaccugggccugaucuacaccgccaaguauccgaauacgagcgaccucgaucggcugacccagucucaucccauccuuaacaugauugacacaaagaaauccagccugaauaucuccggguacaacuuuucucucggagcugccgugaaggcgggcgccugcaugcuggaugggggaaacaugcuugaaaccauuaaagucagcccucaaacaauggacggcauccugaaguccauucucaaaguuaagaaagcucugggcauguucaucagcgauacccccggggagcgcaauccuuaugaaaacauucuguacaagaucugucucucuggagacggcuggcccuauaucgccuccagaacgagcauuacagggcgggcuugggagaauaccgugguggaucuggagucugacggaaagccucagaaagccgauagcaacaauuccucuaagagccuucaguccgccggcuuuacagcugggcugaccuacagccagcucaugacccugaaagacgcgaugcugcaacuugauccgaacgccaagacauggauggacaucgaaggaagacccgaggacccugucgaaauugcucucuaccagcccucuuccggcugcuauauccacuucuuucgcgagccuacggaucugaaacaguucaagcaggacgccaaguacagccauggcauugaugugaccgaccuguuugccacacaacccgggcucaccucugcuguuaucgaugcccugccgcggaauauggugaucacaugucagggauccgacgauauuagaaaacuucuggaaagccagggccgcaaggacaucaaacucauugauaucgcgcuguccaagaccgacucucggaaauaugagaacgcugucugggaucaguacaaggaccugugccacaugcauacgggggugguuguggagaagaaaaagagaggaggcaaagaagagauuacaccucacugugcccuuauggauugcaucauguucgacgccgcugucagcgggggccucaauaccuccgugcugcgcgccguccugccccgggacaugguguuuagaaccucuacaccucgcguugugcucugaggacuaguaauaaggaaacuguaugaaugucugugggcaggaagugaagagauccuucuguaaagguuuuuggaauuaugucugcugaauaauaaacuuuuuugaaauaauaaaucugguagaaaaaugagaucucaaaggcucuuuucagagccaccaaaaaaaaaaaaaaaaaaaaaaaaaaaaaaaaaaaaaaaaaaaaaaaaaaaaaaaaaaaaaaaaaaaaaaaaaaaaaaaaaaaaaaaaaaaaaaaaaaaaa

SEQ ID NO: 21608 - RNA, 2097 nt, Artificial Sequence
  mRNA product Design b-4 (hSL-A100) comprising derived and/or modified sequence from LASV(LP;Clade I)__AAF86702__SP-IgE_NP(2-569) (opt5)
aggagagucccgcagucggcguccagcggcucugcuuguucgugugugugucguugcaggccuuauucaagcuuaccauggacuggaccuggauccuguuccucguggccgcugccacaagaguccacagcagcaacuccaaggagaucaaaucuuuccuguggacccagagccucagacgggaacuguccggcuacugcucuaauauuaagcuccaaguggucaaagacgcccaggcucugcuccacgggcuggauuuuagcgagguuuccaacgugcagcgccuuaugagaaagcagaaacgggacgaugccgaccugaagcgccucagagaucugaaucaagcggugaacaaucuggucgaacucaagucuacacagcagaaaaacgugcugcggguuggaacgcuuagcuccgacgaucugaucacccucgcugccgaccuggagaaacuuaaaagcaaggugauucgcacagaaagaccccugucuuccggcgucuauauggggaaucucagcucucagcaacuggaucagcggcgcgcccugcucuccaugaucggaaugagcggcgggccucagggaaacagaaccggcggcgacggggugguucgggugugggaugucaaaaaugcugagcugcuuaacaaucaguucggaacaaugccgucucugacccucgccugucugacaaagcaaggccagguggaccuuaacgaugcugugcaggcccugaccgaccucgggcugauuuacacggcgaaguaucccaauuccagcgaccuggauaugcucacccaaucccauccuauccugggaauggucgacacaaagaagucuagccuuaacaucuccggcuacaauuuuagccugggggccgcuguuaaagccggagcuugcaugcucgauggcggcaacaugcuggagaccauuaaggugucuccccagacaauggacgggauccuuaaauccauucugaaggugaaacgcagccucggaauguucaucucugauaccccuggcgaaagaaaccccuaugagaauauucuguacaagaucugucugagcggggaaggauggccuuauauugccucccggacgucuaucacaggccgcgcgugggagaacacccucgucgaccuggagagcgauaauaagccgcccaaacuuaacuccgccgggagcaauaagucucugcaggcugccggacucaacgcuggccugacauacucccagcugaugacccuuaaagacugcaugcuccaacuggauccuagcucuaagaccuggaucgacauugaaggcagacccgaggauccuguggaaaucgcccuguuucagcccuccagcggguguuacauucacuucuuucgggagccgacagaccucaaacaguucaagcaggacgccaaguauucccauggaaucgauguuacggaccuguuuucuacccaaccuggccuuacaagcgcugugauugaagcgcugcccagaaauaugguccuuaccugccagggguccgaugacaucaaaaagcugcuggagucucagggacgccgggauaucaaacuuauugacaucagccucuccaaggccgauagcagaaaauucgagaacgcugugugggaccaguacaaggaucugugucacaugcauacaggcguuguggucgaaaagaaaaagcgcgggggcaaagaggaaauuaccccucacugcgcccugcucgacuguaucauguuugaugccgcuacgacaggaucucugaauauuaccacccuucgggccgugcugcccagagacauggucuuccgcacauccacccccaaggugguucucugaggacuaguaauaaggaaacuguaugaaugucugugggcaggaagugaagagauccuucuguaaagguuuuuggaauuaugucugcugaauaauaaacuuuuuugaaauaauaaaucugguagaaaaaugagaucucaaaggcucuuuucagagccaccaaaaaaaaaaaaaaaaaaaaaaaaaaaaaaaaaaaaaaaaaaaaaaaaaaaaaaaaaaaaaaaaaaaaaaaaaaaaaaaaaaaaaaaaaaaaaaaaaaaaa

SEQ ID NO: 21609 - RNA, 2097 nt, Artificial Sequence
  mRNA product Design b-4 (hSL-A100) comprising derived and/or modified sequence from LASV(803213;Clade II)__AAF86704__SP-IgE_NP(2-569) (opt5)
aggagagucccgcagucggcguccagcggcucugcuuguucgugugugugucguugcaggccuuauucaagcuuaccauggacuggaccuggauccuguuccucguggccgcugccacaagaguccacagcagcgccuccaaggaggugaaaucuuuccuguggacccagagccucagacgggaacuguccggcuacugcucuaacaucaaacuucaagucguuaaggacgcucaggcccugcuccacgggcuggauuuuagcgaggugaauaacgugcagcgccuuaugagaaagcagaaacgggacgauggagaccugaagcgccucagagaucugaaucaagcggucaacaaucugguggaacucaaguccacacagcagaaaucuauucugcggguuggcacgcuuaccagcgacgaucugcucacacuggcugccgaccuugagaagcugaaauccaaggugauccgcaccgaaagaccccucagcucuggggucuauaugggaaaccuguccacacagcaacuggagcagcggcgcgcccuccugaauaugauuggcauggugggaggagcucagggcacccagccuggcagagaugggguugugcgggucugggacgugaaaaacccggaucuucugaauaaccaauucggaacaaugcccagccucacccuggccugucuuacgaagcagggccagguggaccugaaugaugcuguccucgcccugaccgaccuggggcucaucuacacagcgaaguauccuaacucuuccgaccuggaucgccuuagccaaucucaucccauucugaauaugguugacaccaaaaaguccagccucaacaucuccggauacaauuuuucucugggcgccgcugugaaagccggggcuugcaugcuugauggaggcaacaugcuggagacaaucaaggugaccccucagacgauggacggcauucucaaaagcauccugaaggucaaaagaucccuggggauguucgugagcgauacacccggagaacggaacccuuaugagaauauucucuacaagaucugucugucuggcgacggguggccguauauugccucccgcaccagcaucguugggagagcgugggaaaacacaaccguggaucuugagucugacggcaagccccagaaagucgggaccgccggaagcaauaagucccugcagucugcuggcuuuccuacaggccucacguacagccaacugaugacccugaaagauuccaugaugcagcuugaccccagcgccaagacauggauugauaucgaggggcggccugaagaccccguggagaucgcucucuaccagccgaugucuggaugcuauauucacuucuuuagagaaccuaccgaccugaaacaguucaagcaagaugccaaguacucccauggcaucgacguugccgaucuguuucccgcucagccugggcucacaagcgcggugauugaggcccugccccgcaacaugguccuuaccugucagggaucugacgauaucaaaaagcugcucgacucccagggccggagagauauuaaacugaucgacaucagccuguccaagguggauucucgcaaauucgaaaaugcugucugggaccaaugcaaggaucuuugucacaugcauacgggggugguuguggagaagaaaaagcggggcggaaaagaggaaauuacaccccacugcgcccucauggacuguaucauguuugaugccgcugucagcggcgggcugaacauuccugugcugagagccguucucccgcgcgacaugguguuccggaccuccucucccaaggucgugcugugaggacuaguaauaaggaaacuguaugaaugucugugggcaggaagugaagagauccuucuguaaagguuuuuggaauuaugucugcugaauaauaaacuuuuuugaaauaauaaaucugguagaaaaaugagaucucaaaggcucuuuucagagccaccaaaaaaaaaaaaaaaaaaaaaaaaaaaaaaaaaaaaaaaaaaaaaaaaaaaaaaaaaaaaaaaaaaaaaaaaaaaaaaaaaaaaaaaaaaaaaaaaaaaaa

SEQ ID NO: 21610 - RNA, 2100 nt, Artificial Sequence
  mRNA product Design b-4 (hSL-A100) comprising derived and/or modified sequence from LASV(GA391;Clade III)__CAA36646__SP-IgE_NP(2-570) (opt5)
aggagagucccgcagucggcguccagcggcucugcuuguucgugugugugucguugcaggccuuauucaagcuuaccauggacuggaccuggauccuguuccucguggccgcugccacaagaguccacagcagcgccuccaaggaggugagaucuuuccuguggacccagagccuccggcgcgaacuguccggcuacugcucuaacaucaaacuucaagucguuaaggacgcucaggcccugcuccacgggcuggauuuuagcgagguguccaaugugcagagacuuaugcggaaacagaagcgcgacgauggagaccugaaaagacuccgggaucugaaccaagcggucaauaaccugguggaacucaagucuacacagcagaaaagcguucugcgcgugggcacgcuuuccagcgacgaucugcucauucuggcugccgaccuugagaaacugaagucuaaagucaccagaacagaacggccccucuccagcgggguguauaugggaaaucugucuucccagcaacuggaucagcgcagagcccuccugaacaugaucggcaugaccgggguuagcggaggcggcaagggggcuucugacggaauugugcgggucugggaugugaaaaaugccgagcuucugaacaaucaguucggcacaaugccuucccucacccuggcuugucuuacaaagcaggggcaaguggaccugaacgaugccguccaggcgcucaccgaccugggacugaucuacacggccaaguauccgaauagcuccgaccucgaucgccugucucagagccaucccauucuuaacaugaucgacaccaaaaaguccagccugaauaucucuggcuacaacuuuucccucggggcugccguuaaagcuggagccugcaugcuggauggcggcaauaugcuugagacaauuaaggugagcccucaaaccauggacgggauccugaaaucuauucucaaggugaaaaagagccugggaauguucgucuccgauacacccggcgaaagaaacccuuaugagaacauccuguacaagauuugucucucuggggacggauggcccuauaucgcgagccggaccuccauugugggccgcgccugggaaaauacgguuguggaucuggagcaggacaacaaaccucagaagaucgggaauggaggcagcaacaaaucucuucaguccgcuggcuuugccgcugggcugacauacagccaacucaugacccugaaggauuucaaaugcuuuaaucugaucccgaacgccaagacauggauggacauugagggaagacccgaagauccugucgagaucgcccuuuaccagcccucuuccggcuguuaugugcacuucuuucgggaaccuaccgaccucaagcaguucaaacaggacgcuaaguacagccaugggauugauguuaccgaccuguuugcggcccaacccggacugacauccgcugugaucgaggcccucccgagaaauauggucauuacgugccagggcucugaagauauccgcaaacugcuugagagccaggggcggagagacaucaagcugauugauaucacccucuccaaagccgacucucgcaaguucgagaacgcugugugggaucaguuuaaggaccugugucacaugcauacaggcgucgugguugaaaagaagaaacggggaggcaaggaggaaauuaccccucacugcgcccugauggauuguaucauguucgacgcggcugugagcgggggacuugaugccaaaguccucagagugguucugccccgcgacaugguguuccggacauccaccccuaaggucgugcugugaggacuaguaauaaggaaacuguaugaaugucugugggcaggaagugaagagauccuucuguaaagguuuuuggaauuaugucugcugaauaauaaacuuuuuugaaauaauaaaucugguagaaaaaugagaucucaaaggcucuuuucagagccaccaaaaaaaaaaaaaaaaaaaaaaaaaaaaaaaaaaaaaaaaaaaaaaaaaaaaaaaaaaaaaaaaaaaaaaaaaaaaaaaaaaaaaaaaaaaaaaaaaaaaa

SEQ ID NO: 21611 - RNA, 2097 nt, Artificial Sequence
  mRNA product Design b-4 (hSL-A100) comprising derived and/or modified sequence from LASV(AV;Clade V)__CCA30315__SP-IgE_NP(2-569) (opt5)
aggagagucccgcagucggcguccagcggcucugcuuguucgugugugugucguugcaggccuuauucaagcuuaccauggacuggaccuggauccuguuccucguggccgcugccacaagaguccacagcagcgccuccaaggaggugaaaucuuuccuguggacccagagccucagacgggaacuguccggcuacugcucuaacaucaaacuucaagucguuaaggacgcucaggcccugcuccacgggcuggauuuuagcgagguguccaaugugcagcgccuuaugagaaagcagcggcgcgacgauucugaccugaaaagacuccgggaucugaaccaagcggucaauaaccugguggaacucaagagcacacagcagaaguccguucugcgcgugggaacgcuuagcucugacgaucugcucacccuggcugccgaccuugagaaacugaaguccaaagucacaagaaccgaacggccccucagcucuggcguguauauggggaaucuguccagccagcaacuggaucagcgcagagcccuccugaaccuuauuggaaugacaaauggcucucaggggucccaggcuggacgggacggcguugugcgcgucugggaugugaagaacgccgagcugcucaauaaccaauucggcaccaugccuagccugacacuugcuugucugaccaaacagggacagguggaccucaaugaugucguucaagcccugacggaccuggggcucaucuacaccgcgaaguauccgaacacauccgaccuggauagacuuacccagucucaucccauucugaauaugaucgacacaaagaaaagcucccucaacauuagcggcuacaauuuuucucugggggccgcugugaaggccggagcuugcaugcuugauggcgggaacaugcuggagaccaucaaaguguccccucagagcauggacggaauccucaagucuauucugaaagucaagcgggcccugggcauguucgugagcgauacgcccggcgaacgcaacccuuaugagaauauccucuacaaaauuugucuguccggggacggauggcccuauaucgcgucuagaacaagcauuguuggccgggccugggaaaacaccguggucgaucuugagacagacgggaagccucagaagaucggauccggcaauagcaacaaaucucugcaauccgcuggguuuagcgccggacucaccuacucucagcugaugacccugaaggaugcuaugcuucagcucgacccgaaugccaaaacauggauggauauugagggcagacccgaagacccuguggagguugcccuguaccagcccaucuccggcugcuauauccacuucuuucgcgaaccuacggaccugaagcaauucaaacaggaugcuaaguacagccaugggauugacaucgcggaucucuuugccgcucagcccggacugaccuccgccgugauugaggcccuuccgcggaacauggucaucacaugucagggcucugaagacauuaagaaacugcucgagagccaagggagaaaggauaucaaacugaucgacauugcucuguccaagaucgauucucgcaaauucgagaaugccgugugggaccaguauaaggaucuuugccacaugcauaccggagucgugguugaaaagaaaaagcggggcgggaaagaggaaauuacaccucacugugcgcucauggacugcaucauguuugaugcugccgugagcggcggacugaacacccugguccucagagccgugcugccccgcgacaugguuuuccggacguccacaccuagagugguccuuugaggacuaguaauaaggaaacuguaugaaugucugugggcaggaagugaagagauccuucuguaaagguuuuuggaauuaugucugcugaauaauaaacuuuuuugaaauaauaaaucugguagaaaaaugagaucucaaaggcucuuuucagagccaccaaaaaaaaaaaaaaaaaaaaaaaaaaaaaaaaaaaaaaaaaaaaaaaaaaaaaaaaaaaaaaaaaaaaaaaaaaaaaaaaaaaaaaaaaaaaaaaaaaaaa

SEQ ID NO: 21612 - RNA, 2097 nt, Artificial Sequence
  mRNA product Design b-4 (hSL-A100) comprising derived and/or modified sequence from LASV(Togo/2016/7082;Clade VI)__AMR44578__SP-IgE_NP(2-569) (opt5)
aggagagucccgcagucggcguccagcggcucugcuuguucgugugugugucguugcaggccuuauucaagcuuaccauggacuggaccuggauccuguuccucguggccgcugccacaagaguccacagcagcaacuccaaggaggugaaaucuuuccuguggacccagagccucagacgggaacuguccggcuacugcucuaauaucaaacuucaagucguuaaagacgcccaggcucugcuccacgggcuggauuuuagcgagguguccaacgugcagcgccuuaugagaaagcagaaacgggacgauggagaccugaagcgccucagagaucugaaucaagccgucaacaaucugguggaacucaagucuguucagcagaaaagcauucugcgggugggcacacuuacguccgacgaucugcucacccuggcggcugaccuugagaagcugaaaagcaaggucacacgcaccgaaagaccccucucuuccgggguguauaugggaaaccugagcucucagcaacuggaucagcggcgcgcccuccuguccaugaucggcaugagcgggggaaaucagaacucucagccuaaaggcgacggcguugugagagucugggaugugaagaaugccgaccuucugaacaaucaauucgggacaaugccgucccucacccuggcuugucuuacaaagcagggacagguggaucugaacgacgccguccaagcucucaccgaccugggccugauuuacacggccaaauaucccaauagcuccgaucucgaccggcugucucagagccauccuauccuuaacaugauugauaccaagaaauccagccugaauaucucuggguacaacuuuucccucggagcggccaucaagacaggcgcuugcaugcuggacgggggaaacaugcuugagaccauuaaaguuacaccccagaccauggauggcauccucaagagcauucugaaagugaagcgcucucugggcauguucaucagcgacacgccuggggagagaaaucccuaugaaaacauucuguacaagaucugucucuccggagauggcuggccuuauauugccucucggacagcuaucaucgggcgcgccugggagaauaccguggucgaccuggaaagcgauuccaaaccgcagaagauuggaagcaacggcucuaauaaaucccuucaaagcgcgggguuugcccccggacugacauacucucagcucaugacccugaaggacuccaugcugcagcuugauccuaacgcuaaaaccuggaucgacauugagggcagacccgaggacccuguggaaguugcccucuuccagcccaucagcggcugcuacauucacuuuuuccgggagccgacagaucugaagcaauuuaagcaggacgcuaaauauucccaugggaucgaugugacggaccuguucgccgcccagccuggacucaccucugcugucaucgaagcgcugcccagaaauauggugcuuacaugucagggcagcgaugacauuaagaaacugcucgauucccaagggcgccgggacaucaagcugauugauguuucucugaacaaaaucgacagcagaaaguuugagaaugccgugugggaucaguacaaggaccuuugccacaugcauaccggagucguggucgaaaagaagaaaaagggcgggaaagaggagauuacaccucacugugcucuccuggauugcaucauguucgacgccgccguguccggcggacugaacgcuaccguucuccgcgccgugcugccccgggacauggucuuuagaacgagcucucccaaggugguucuuugaggacuaguaauaaggaaacuguaugaaugucugugggcaggaagugaagagauccuucuguaaagguuuuuggaauuaugucugcugaauaauaaacuuuuuugaaauaauaaaucugguagaaaaaugagaucucaaaggcucuuuucagagccaccaaaaaaaaaaaaaaaaaaaaaaaaaaaaaaaaaaaaaaaaaaaaaaaaaaaaaaaaaaaaaaaaaaaaaaaaaaaaaaaaaaaaaaaaaaaaaaaaaaaaa

SEQ ID NO: 21613 - RNA, 2097 nt, Artificial Sequence
  mRNA product Design b-4 (hSL-A100) comprising derived and/or modified sequence from LASV(KAK-428;Clade n.d. (VII))__ANH09741__SP-IgE_NP(2-569) (opt5)
aggagagucccgcagucggcguccagcggcucugcuuguucgugugugugucguugcaggccuuauucaagcuuaccauggacuggaccuggauccuguuccucguggccgcugccacaagaguccacagcagcaacuccaaggaggugaaaucuuuccuguggacccagagccucagacgggaacuguccggcuacugcacaaauaucaaacuucaagucguuaaggacgcccaggcucugcuccacgggcuggauuuuucugaggugagcaacgugcagcgccuuaugagaaagcagaaacgggacgauaaugaccugaagcgccucagagaucugaaccaagccgucaauaaccugguggaacucaaguccguucagcagaaaucugugcugaaggucggaacgcuuaauagcgacgaucugcucacccuggcggcugaccuugagaaacugaaguccaaagugguucggacagaacgcccccucagcucuggcguguauauggggaaccuguccagccagcaacuggaucagagacgggcccuccugaauaugauuggaauggccggcgggucucagggaaaccagccuucccgcgacggcgucgugagagugugggaugucaagaaugcugaccuucugaacaaucaauucggcaccaugccgagccucacacuggccugucuuaccaagcaggggcagguugaucugaacgacguggugcucgcucugacagaccugggacucaucuacaccgccaaauaucccaauucuuccgaucuggaccggcuuagccaaaaccauccuguccugaacaugauugaugugaauaaguccucucucaacaucagcggcuacaauuuuucccugggggcggccguuaaagcuggagccugcaugcuugacggcgggaacaugcuggagacgauuaagaucagcccccagaccguggauggaauccucaaaucuauucugaaggucaaacgcgcucugggcauguucguguccgacacaccuggcgagagaaaucccuaugaaaacauccucuacaagguuugucugagcgggaauggauggccuuauauugccucucggaccagcaucgugggccgcgcgugggagaacacagucguggaucuugaauccaauaagaaccagccgaaagucgggaauaacggaucuaauaagaugcugcagagcuccggcuuugccaccgggcucacguacagccaacugaugacacugagagacucuaugcuucagcucgaucccaccgcuaaaacauggauugacaucgagggacggccugaggaucccguggaacuggcccuguuccagccuuccagcggcugcuacauucacuuuuucagagagcccaccgaccucaagcaguuuaaacaagacgcuaaguauucucauggcaucgauguuaacgaccuguucuccgcccagccggggcuuaccagcgccgugcuggaagcucucccucgcaauaugguccugacaugucagggauccgaugacauccggaagcugcuugauucucaggacagaaaagauauuaagcucaucgacauuagccuguccaaagcggaugcccgcaaguuugagaacgacgugugggaucaauucaaagaccugugccacaugcauacgggcaucguuguggaaaagaagaaaaagggagggaaacaggagaugacaccccacugugcucuccuggauugcauuauguuugacgccgccgucucuggcgggcuuaacgugccuacccugcgggcugugcuccccaccgacaugguuuucagaacaaucaccacgaaggucgugcugugaggacuaguaauaaggaaacuguaugaaugucugugggcaggaagugaagagauccuucuguaaagguuuuuggaauuaugucugcugaauaauaaacuuuuuugaaauaauaaaucugguagaaaaaugagaucucaaaggcucuuuucagagccaccaaaaaaaaaaaaaaaaaaaaaaaaaaaaaaaaaaaaaaaaaaaaaaaaaaaaaaaaaaaaaaaaaaaaaaaaaaaaaaaaaaaaaaaaaaaaaaaaaaaaa

SEQ ID NO: 21614 - RNA, 2097 nt, Artificial Sequence; identical to SEQ ID NO: 21608
  mRNA product Design b-4 (hSL-A100) comprising derived and/or modified sequence from LASV(Pinneo-NIG-1969;Clade I)__AIT17837__SP-IgE_NP(2-569) (opt5)

SEQ ID NO: 21615 - RNA, 2097 nt, Artificial Sequence
  mRNA product Design b-4 (hSL-A100) comprising derived and/or modified sequence from LASV(ISTH0009-NIG-2011;Clade II)__AIT17405__SP-IgE_NP(2-569) (opt5)
aggagagucccgcagucggcguccagcggcucugcuuguucgugugugugucguugcaggccuuauucaagcuuaccauggacuggaccuggauccuguuccucguggccgcugccacaagaguccacagcagcguguccaaggaggucaaaucuuuccuguggacccagagccucagacgggaacuguccggcuacugcucuaacaucaaacuucaaguugugaaggacgcccaggcucugcuccacgggcuggauuuuagcgagguguccaauguccagcgccuuaugagaaagcagaaacgggacgauucugaccugaagcgccucagagaucugaaccaagccgugaauaaccugguugaacucaagagcacacagcagaaauccauucugcgggugggaacgcuuaccagcgacgaucugcucacacuggcggcugaccuugagaagcugaaaucuaaggucauccgcaccgaaagaccccucuccagcggcguguauauggggaaucugucuacacagcaacuggagcagcggcgcgcccuccugaacaugauuggaaugguuggcggggcccagggaacccagccuggcagagauggcgugguccgggugugggacgugaaaaauccggaucuucugaacaaucaauucgggacaaugcccucccucacccuggcuugucuuacgaagcagggacaggucgaccugaacgaugccguucucgcucugaccgaccugggccucaucuacacagccaaguauccuaauagcucugaccuggaucgccuuucccaaagccaucccauucugaacaugguggacaucaaaaaguccucucucaauaucagcggguacaacuuuucccugggagcggccgugaaagcuggcgccugcaugcuugaugggggaaauaugcuggagaccauuaaggucacaccucagaccauggacggcauccucaaaagcauucugaaggugaaaagaucucugggcauguucguuuccgauacgcccggggaacggaacccuuaugagaacauccucuacaagauuugucugagcggagacggcuggccguauaucgcuucucgcacaagcauuguggggagagccugggaaaauaccacagucgaucuugaguccgacggaaagccccagaaagugggcucugcggggagcaacaagucccugcagagcgccggauuuccuaccggccucaccuacucucaacugaugacacugaaagauuccaugaugcagcuugaccccagcgcuaagacguggaucgauaucgagggccggccugaagaccccguugagauugcccucuaccagccgaugucugggugcuauauccacuucuuuagagaaccuaccgaccugaaacaguucaagcaagaugcuaaguacucccauggaauugacguggccgaucuguuucccgcccagccuggccucacaagcgcugucaucgaggcgcugccccgcaauauggugcuuaccugucagggguccgacgauauuaaacggcugcucgacucucagggaagacgcgauaucaagcugaucgacauugcccugagcaaagcugauucccggagauucgaaaacgccgucugggaccaaugcaaggaucuuugucacaugcauacaggcgugguuguggagaaaaagaagcgcgggggcaaagaggaaaucacgccccacugcgcccucauggacuguauuauguaugaugcugccgucucuggaggccugaauaucccugugcugcgggcgguucucccgagagacaugguguuucgcaccagcucccccaaggucgugcugugaggacuaguaauaaggaaacuguaugaaugucugugggcaggaagugaagagauccuucuguaaagguuuuuggaauuaugucugcugaauaauaaacuuuuuugaaauaauaaaucugguagaaaaaugagaucucaaaggcucuuuucagagccaccaaaaaaaaaaaaaaaaaaaaaaaaaaaaaaaaaaaaaaaaaaaaaaaaaaaaaaaaaaaaaaaaaaaaaaaaaaaaaaaaaaaaaaaaaaaaaaaaaaaaa

SEQ ID NO: 21616 - RNA, 2097 nt, Artificial Sequence
  mRNA product Design b-4 (hSL-A100) comprising derived and/or modified sequence from LASV(ISTH2010-NIG-2012;Clade II)__AIT17483__SP-IgE_NP(2-569) (opt5)
aggagagucccgcagucggcguccagcggcucugcuuguucgugugugugucguugcaggccuuauucaagcuuaccauggacuggaccuggauccuguuccucguggccgcugccacaagaguccacagcagcgccuccaaggaggugaaaucuuuccuguggacccagagccucagacgggaacuguccggcuacugcucuaacaucaaacuucaagucguuaaggacgcucaggcccugcuccacgggcuggauuuuagcgagguguccaaugugcagcgccuuaugagaaagcagaaacgggacgauucugaccugaagcgccucagagaucugaaccaagcggucaauaaccugguggaacucaagagcacacagcagaaauccauucugcggguuggaacgcuuaccagcgacgaucugcucacacuggcugccgaccuugagaagcugaaaucuaaggugauccgcaccgaaagaccccucuccagcggcgucuauauggggaaucugucuacacagcaacuggagcagcggcgcgcccuccugaaccuuauuggaauggugggcggggcucagggaacccagccuggcagagauggcguugugcgggucugggacgugaaaaauccggaucugcucaacaaucaauucgggacaaugcccucccugacccuugccugucugacgaagcagggacagguggaccucaacgaugcuguccuggcccugaccgaccucggccugaucuacacagcgaaguauccuaauagcucugaccuugaucgccugucccaaagccaucccauucucaacaugguugacaccaaaaaguccucucugaauaucagcggguuuaacuucucccuuggagccgcugugaaagccggcgcuugcaugcuggaugggggaaauaugcucgagacaaucaaggugaccccucagacgauggacggcauucugaaaagcauccugaaggucaaaaagucucucggcauguuuguguccgauacacccggggaaagaaacccuuacgagaacauucuguauaagaucugucuuagcggagacggcuggccguacauugccucucggaccagcaucguugggcgcgcgugggaaaauacaaccguggaucuggaguccgacggaaaaccccacaaggucggcaccgccgggucuaacaaaagccuccaguccgcuggauucccuacaggccugacguauagccagcugaugacccuuaaggauucuaugaugcaacucgaccccuccgccaaaacauggauugauaucgagggcagaccugaagaccccguggagaucgcucuguaccagccgaugagcgggugcuacauucacuuuuuccgggaaccuaccgaccugaagcaguuuaagcaggaugccaaauauucucauggaaucgacguugccgaucucuuccccgcucaaccuggccugacauccgcggugauugaggcccuucccagaaauaugguccugaccugucaggggagcgacgauaucaagcgccuccuggacucccagggacggagagauauuaaacugaucgacaucgcucuuucuaaggccgauagccgccgguuugaaaacgccgugugggaccagugcaaagaucucugucauaugcacacgggcgucgugguugagaagaagaaaagagggggcaaggaggaaauuacaccccacugcgcucugauggacuguaucauguacgaugccgcgguguccggaggccugaauauuccuguccuccgcgcugugcugccgcgggacaugguuuucagaaccucuagccccaaagugguccuuugaggacuaguaauaaggaaacuguaugaaugucugugggcaggaagugaagagauccuucuguaaagguuuuuggaauuaugucugcugaauaauaaacuuuuuugaaauaauaaaucugguagaaaaaugagaucucaaaggcucuuuucagagccaccaaaaaaaaaaaaaaaaaaaaaaaaaaaaaaaaaaaaaaaaaaaaaaaaaaaaaaaaaaaaaaaaaaaaaaaaaaaaaaaaaaaaaaaaaaaaaaaaaaaaa

SEQ ID NO: 21617 - RNA, 2097 nt, Artificial Sequence
  mRNA product Design b-4 (hSL-A100) comprising derived and/or modified sequence from LASV(Lassa virus/H.sapiens-wt/NGA/2015/ISTH_0543;Clade II)__AVO03640__SP-IgE_NP(2-569) (opt5)
aggagagucccgcagucggcguccagcggcucugcuuguucgugugugugucguugcaggccuuauucaagcuuaccauggacuggaccuggauccuguuccucguggccgcugccacaagaguccacagcagcgccuccaaggaggugaaaucuuuccuguggacccagagccucagacgggaacuguccggcuacugcucuaacaucaaacuucaagucguuaaggacgcucaggcccugcuccacgggcuggauuuuagcgagguguccaaugugcagcgccuuaugagaaagcagaaacgggacgauucugaccugaagcgccucagagaucugaaccaagcggucaauaaccugguggaacucaagagcacacagcagaaauccauucugcggguuggaacgcuuaccagcgacgaucugcucacacuggcugccgaccuugagaagcugaaaucuaaggugauccgcaccgaaagaccccucuccagcggcgucuauauggggaaucugucuacacagcaacuggagcagcggcgcgcccuccugaacaugauuggaauggugggcggggcucagggaacccagccuggcagagauggcguugugcgggucugggacgugaaaaauccggaucuucugaacaaucaauucgggacaaugcccucccucacccuggccugucuuacgaagcagggacagguggaccugaacgaugcuguccucgcccugaccgaccugggccucaucuacacagcgaaguauccuaauagcucugaccuggaucgccuuucccaaagccaucccauucugaacaugguugacaccaaaaaguccucucucaauaucagcggguacaacuuuucccugggagccgcugugaaagccggcgcuugcaugcuugaugggggaaauaugcuggagacaaucaaggugaccccucagacgauggacggcauucucaaaagcauccugaaggucaaaaagucucugggcauguucguguccgauacacccggggaaagaaacccuuaugagaacauucucuacaagaucugucugagcggagacggcuggccguauauugccucucggaccagcaucguugggcgcgcgugggaaaauacaaccguggaucuugaguccgacggaaaaccccagaaggucggcucugccgggagcaacaaaucccugcagagcgcuggauuuccuaccggccucacauacucucaacugaugacgcugaaggauuccaugaugcagcuugaccccagcgccaaaaccuggauugauaucgagggcagaccugaagaccccguggagaucgcucucuaccagccgaugucugggugcuauauucacuucuuucgggaaccuacagaccugaagcaguucaagcaagaugccaaauacucccauggaaucgacguugccgaucuguuucccgcucagccuggccucaccagcgcggugauugaggcccugcccagaaauaugguccuuacaugucagggguccgacgauaucaagcgccugcucgacucucagggacggaaagauauuaagcugaucgacaucgcucugagcaaagccgauuccagacgcuucgaaaacgccgugugggaccaaugcaaggaucuuugucacaugcauaccggcgucgugguugagaagaaaaagagagggggcaaagaggaaauuacgccccacugcgcucucauggacuguaucauguaugaugccgcggugucuggaggccugaauauuccuguccugcgggcugugcucccgcgcgacaugguuuuucggacaagcucccccaaggugguccugugaggacuaguaauaaggaaacuguaugaaugucugugggcaggaagugaagagauccuucuguaaagguuuuuggaauuaugucugcugaauaauaaacuuuuuugaaauaauaaaucugguagaaaaaugagaucucaaaggcucuuuucagagccaccaaaaaaaaaaaaaaaaaaaaaaaaaaaaaaaaaaaaaaaaaaaaaaaaaaaaaaaaaaaaaaaaaaaaaaaaaaaaaaaaaaaaaaaaaaaaaaaaaaaaa

SEQ ID NO: 21618 - RNA, 2097 nt, Artificial Sequence
  mRNA product Design b-4 (hSL-A100) comprising derived and/or modified sequence from LASV(Lassa virus/H.sapiens-wt/NGA/2016/ISTH_0009;Clade II)__AVO03572__SP-IgE_NP(2-569) (opt5)
aggagagucccgcagucggcguccagcggcucugcuuguucgugugugugucguugcaggccuuauucaagcuuaccauggacuggaccuggauccuguuccucguggccgcugccacaagaguccacagcagcgccuccaaggaggugaaaucuuuccuguggacccagagccucagacgggaacuguccggcuacugcucuaacaucaaacuucaagucguuaaggacgcucaggcccugcuccacgggcuggauuuuagcgagguguccaaugugcagcgccuuaugagaaagcagaaacgggacgauucugaccugaagcgccucagagaucugaaccaagcggucaauaaccugguggaacucaagagcacacagcagaaauccauucugcggguuggaacgcuuaccagcgacgaucugcucacacuggcugccgaccuugagaagcugaaaucuaaggugauccgcaccgaaagaccccucuccagcggcgucuauauggggaaucugucuacacagcaacuggagcagcggcgcgcccuccugaacaugauuggaauggugggcggggcucagggaacccagccuggcagagauggcguugugcgggucugggacgugaaaaauccggaucuucugaacaaucaauucgggacaaugcccucccucacccuggccugucuuacgaagcagggacagguggaccugaacgaugcuguccucgcccugaccgaccugggccucaucuacacagcgaaguauccuaauagcucugaccuggaucgccuuucccaaagccaucccauucugaacaugguugacaccaaaaaguccucucucaauaucagcggguacaacuuuucccugggagccgcugugaaagccggcgcuugcaugcuugaugggggaaauaugcuggagacaaucaaggugaccccucagacgauggacggcauucucaaaagcauccugaaggucaaaaagucucugggcauguucguguccgauacacccggggaaagaaacccuuaugagaacauucucuacaagaucugucugagcggagacggcuggccguauauugccucucggaccagcaucguugggcgcgcgugggaaaauacaaccguggaucuugaguccgacggaaaaccccagaaggucggcucugccgggagcaacaaaucccugcagagcgcuggauuuccuaccggccucacauacucucaacugaugacgcugaaggauuccaugaugcagcuugaccccagcgccaaaaccuggauugauaucgagggcagaccugaagaccccguggagaucgcucucuaccagccgaugucugggugcuauauucacuucuuucgggaaccuacagaccugaagcaguucaagcaagaugccaaauacucccauggaaucgacguugccgaucuguuucccgcucagccuggccucaccagcgcggugauugaggcccugcccagaaauaugguccuuacaugucagggguccgacgauaucaagcgccugcucgacucucagggacggagagauauuaaacugaucgacaucgcucugagcaaggccgauucccgccgguucgaaaacgccgugugggaccaaugcaaagaucuuugucacaugcauaccggcgucgugguugagaagaagaaaagagggggcaaggaggaaauuacgccccacugcgcucucauggacuguaucauguaugaugccgcggugucuggaggccugaauauuccuguccugcgcgcugugcucccgcgggacaugguuuuuagaacaagcucccccaaagugguccugugaggacuaguaauaaggaaacuguaugaaugucugugggcaggaagugaagagauccuucuguaaagguuuuuggaauuaugucugcugaauaauaaacuuuuuugaaauaauaaaucugguagaaaaaugagaucucaaaggcucuuuucagagccaccaaaaaaaaaaaaaaaaaaaaaaaaaaaaaaaaaaaaaaaaaaaaaaaaaaaaaaaaaaaaaaaaaaaaaaaaaaaaaaaaaaaaaaaaaaaaaaaaaaaaa

SEQ ID NO: 21619 - RNA, 2097 nt, Artificial Sequence
  mRNA product Design b-4 (hSL-A100) comprising derived and/or modified sequence from LASV(Lassa virus/H.sapiens-wt/NGA/2016/ISTH_0017;Clade II)__AVO03568__SP-IgE_NP(2-569) (opt5)
aggagagucccgcagucggcguccagcggcucugcuuguucgugugugugucguugcaggccuuauucaagcuuaccauggacuggaccuggauccuguuccucguggccgcugccacaagaguccacagcagcgccuccaaggaggugaaaucuuuccuguggacccagagccucagacgggaacuguccggcuacugcucuagcaucaaacuucaagucguuaaggacgcucaggcccugcuccacgggcuggauuuuuccgaggugucuaacgugcagcgccuuaugagaaagcagaaacgggacgauagcgaccugaagcgccucagagaucugaaucaagcggucaacaaucugguggaacucaaguccacacagcagaaaagcauucugcggguuggaacgcuuaccucugacgaucugcucacacuggcugccgaccuugagaagcugaaauccaaggugauccgcaccgaaagaccccucagcucuggcgucuauauggggaaccuguccacacagcaacuggagcagcggcgcgcccuccugaauaugauuggaauggcuggcggggcccagggaacccagccuggcagagauggcgugguucgggugugggacgucaaaaacccggaucuucugaauaaccaauucgggacaaugcccagccucacccuggcuugucuuacgaagcagggacagguggaccugaaugaugccgugcucgcgcugaccgaccugggccucaucuacacagccaaguauccuaacucuuccgaccuggaucgccuuagccaaucccaucccauucugaauauggucgacaccaaaaagucuagccucaacaucuccggguacaauuuuagccugggagcugccguuaaagcuggcgccugcaugcuugaugggggaaacaugcuggagacaaucaaggugaccccucagacgauggacggcauucucaaaucuauccugaaggugaaaagaucccugggcauguucgucagcgaugcgcccggggaacggaauccuuaugagaacauucucuacaagaucugucugucuggagacggcuggccguauauugccagccgcacauccaucguggggagagcuugggaaaacaccacaguugaucuugagucugacggaaagccccagaaagugggcgccaccgggagcaauaagucccugcagagcgcuggauuuccuaccggccucacauacucucaacugaugacgcugaaagauuccaugaugcagcuugaccccagcgccaagaccuggauugauaucgagggccggccugaagaccccgucgagguggcccucuaccagccgguuucugggugcuauauccacuucuuuagagaaccuacagaccugaaacaguucaagcaagaugcuaaguacucccauggaauugacguggcggaucuguuucccgcccagccuggccucaccagcgcugucaucgaggcccugccccgcaacauggugcuuacaugucagggguccgacgauauuaaaaagcugcucgacucucagggacggaaagauaucaagcugauugacaucgcccugagcaaagcugauuccagacgcuucgaaaaugccgucugggaccaaugcaaggaucuuugucacaugcauaccggcgugguuguggagaagaaaaagagagggggcaaagaggaaaucacgccccacugcgcgcucauggacuguauuauguaugaugcugccgucucuggaggccugaacaucccugugcugcgggccguucucccgcgcgacaugguguuucggacaagcucccccaaggucgugcugugaggacuaguaauaaggaaacuguaugaaugucugugggcaggaagugaagagauccuucuguaaagguuuuuggaauuaugucugcugaauaauaaacuuuuuugaaauaauaaaucugguagaaaaaugagaucucaaaggcucuuuucagagccaccaaaaaaaaaaaaaaaaaaaaaaaaaaaaaaaaaaaaaaaaaaaaaaaaaaaaaaaaaaaaaaaaaaaaaaaaaaaaaaaaaaaaaaaaaaaaaaaaaaaaa

SEQ ID NO: 21620 - RNA, 2097 nt, Artificial Sequence
  mRNA product Design b-4 (hSL-A100) comprising derived and/or modified sequence from LASV(Lassa virus/H.sapiens-wt/NGA/2018/ISTH_0959;Clade II)__AVV65100__SP-IgE_NP(2-569) (opt5)
aggagagucccgcagucggcguccagcggcucugcuuguucgugugugugucguugcaggccuuauucaagcuuaccauggacuggaccuggauccuguuccucguggccgcugccacaagaguccacagcagcgccuccaaggaggugaaaucuuuccuguggacccagagccucagacgggaacuguccggcuacugcucuaacaucaaacuucaagucguuaaggacgcucaggcccugcuccacgggcuggauuuuagcgagguguccaaugugcagcgccuuaugagaaagcagaaacgggacgauucugaccugaagcgccucagagaucugaaccaagcggucaauaaccugguggaacucaagagcacccagcagaaauccauucugcggguuggaacgcuuaccagcgacgaucugcucacacuggcugccgaccuugagaagcugaaaucuaaggugauccgcaccgaaagaccccucuccagcggcgucuauauggggaaucugucuacacagcaacuggagcagcggcgcgcccuccugaaccuuauuggaauggugggcggggcucagggaacccagccuggcagagauggcguugugcgggucugggacgugaaaaauccggaucugcucaacaaucaauucgggacaaugcccucccugacccuugccugucugacgaagcagggacagguggaccucaacgaugucguucuggcucugaccgaccucggccugaucuacacagccaaguauccuaauagcucugaccuugaucgccugucccaaagccaucccauucucaacaugguggacaccaaaaaguccucucugaauaucagcggguuuaacuucucccuuggagcggccgugaaagcuggcgccugcaugcuggaugggggaaauaugcucgagacaaucaaggucaccccucagacgauggacggcauucugaaaagcauccugaaggugaaaaagucucucggcauguuuguuuccgauacacccggggaaagaaacccuuacgagaacauucuguauaagaucugucuuagcggagacggcuggccguacauugcuucucggaccagcaucguggggcgcgccugggaaaauacaaccgucgaucuggaguccgacggaaaaccccacaaggugggcaccgcggggucuaacaaaagccuccaguccgccggauucccuacaggccugacguauagccagcugaugacccuuaaggauucuaugaugcaacucgaccccuccgcuaaaacauggauugauaucgagggcagaccugaagaccccguugagaucgcccuguaccagccgaugagcgggugcuacauucacuuuuuccgggaaccuaccgaccugaagcaguuuaagcaggaugcuaaauauucucauggaaucgacguggccgaucucuuccccgcccaaccuggccugacauccgcugucauugaggcgcuucccagaaauauggugcugaccugucaggggagcgacgauaucaagcgccuccuggacucccagggacggaaagauauuaagcugaucgacaucgcccuuucuaaaacggauagcagacgcuuugaaaacgcugucugggaccagugcaaggaucucugucauaugcacacaggcgugguuguggagaagaaaaagagagggggcaaagaggaaauuacaccccacugcgcccugauggacuguaucauguacgaugccgcugucuccggaggccugaauauuccugugcuccgggccguucugccgcgcgacaugguguuccggaccucuagccccaaggucgugcuuugaggacuaguaauaaggaaacuguaugaaugucugugggcaggaagugaagagauccuucuguaaagguuuuuggaauuaugucugcugaauaauaaacuuuuuugaaauaauaaaucugguagaaaaaugagaucucaaaggcucuuuucagagccaccaaaaaaaaaaaaaaaaaaaaaaaaaaaaaaaaaaaaaaaaaaaaaaaaaaaaaaaaaaaaaaaaaaaaaaaaaaaaaaaaaaaaaaaaaaaaaaaaaaaaa

SEQ ID NO: 21621 - RNA, 2097 nt, Artificial Sequence
  mRNA product Design b-4 (hSL-A100) comprising derived and/or modified sequence from LASV(LASV003-NIG-2008;Clade II)__AIT17581__SP-IgE_NP(2-569) (opt5)
aggagagucccgcagucggcguccagcggcucugcuuguucgugugugugucguugcaggccuuauucaagcuuaccauggacuggaccuggauccuguuccucguggccgcugccacaagaguccacagcagcgccuccaaggaggugaaaucuuuccuguggacccagagccucagacgggaacuguccggcuacugcucuagcaucaaacuucaagucguuaaggacgcucaggcccugcuccacgggcuggauuuuuccgaggugucuaacgugcagcgccuuaugagaaagcagaaacgggacgauagcgaccugaagcgccucagagaucugaaucaagcggucaacaaucugguggaacucaaguccacccagcagaaaagcguucugcgggugggaacgcuuaccucugacgaucugcucacacuggcugccgaccuugagaagcugaaauccaaggucauucgcaccgaaagaccccucagcucuggcguguauauggggaaccuguccgcccagcaacuggagcagcggcgcacacuccugaauaugaucggaaugguuggcggggcucagggaacccagccuggcagagauggcgugguccgggugugggacgugaaaaacccggaucuucugaauaaccaauucgggacaaugcccagccucacccuggccugucuuacgaagcagggacaggucgaccugaaugauguugugcucgcucugaccgaccugggccucauuuacacagccaaguauccuaacucuuccgaccuggaucgccuuagccaaucccaucccauccugucuaugguggacaccaaaaagagcucccucaauauuagcggguacaacuuuucucugggagcggccgucaaagcuggcgccugcaugcuugaugggggaaauaugcuggagacaaucaaggugaccccucagacgauggacggcauccucaaauccauucugaagguuaaaaagagccugggcauguucgugucugauacacccggggaaagaaacccuuaugagaauauccucuacaagauuugucugagcggagacggcuggccguauaucgcuucccggaccucuauugucgggcgcgccugggaaaacacaaccguggaucuugagagcgacggaaaaccccagaagguuggcaccgcgggguccaacaaaagccugcagucugccggauuuccuacaggccucacguacucccaacugaugacccugaaggauagcaugaugcagcuugaccccucugcuaaaacauggaucgauauugagggcagaccugaagaccccguggagaucgcccucuaccagccgauguccgggugcuauauccacuucuuucgggaaccuaccgaccugaagcaguucaagcaagaugcuaaauacagccauggaauugacgucacagaucuguuucccgcccagccuggccucaccuccgccgugaucgaggcucugcccagaaauaugguccuuacgugucaggggucugacgauauuaagcgccugcucgacagccagggacggagagauaucaaacugauugacaucgcgcuguccaaggccgauucucgccgguucgaaaacgcugugugggaccaaugcaaagaucuuugucacaugcauacaggcguuguggucgagaagaagaaaagagggggcaaggaggaaaucacaccccacugcgcccucauggacuguauuauguaugaugccgcugugagcggaggccugaauaucccuguucugcgcgccgugcucccgcgggacauggucuuuagaaccuccagccccaaaguggugcugugaggacuaguaauaaggaaacuguaugaaugucugugggcaggaagugaagagauccuucuguaaagguuuuuggaauuaugucugcugaauaauaaacuuuuuugaaauaauaaaucugguagaaaaaugagaucucaaaggcucuuuucagagccaccaaaaaaaaaaaaaaaaaaaaaaaaaaaaaaaaaaaaaaaaaaaaaaaaaaaaaaaaaaaaaaaaaaaaaaaaaaaaaaaaaaaaaaaaaaaaaaaaaaaaa

SEQ ID NO: 21622 - RNA, 2097 nt, Artificial Sequence
  mRNA product Design b-4 (hSL-A100) comprising derived and/or modified sequence from LASV(LASV035-NIG-2009;Clade II)__AIT17589__SP-IgE_NP(2-569) (opt5)
aggagagucccgcagucggcguccagcggcucugcuuguucgugugugugucguugcaggccuuauucaagcuuaccauggacuggaccuggauccuguuccucguggccgcugccacaagaguccacagcagcgccuccaaggaggugaaaucuuuccuguggacccagagccucagacgggaacuguccggcuacugcucuagcaucaaacuucaagucguuaaagacgcucaggcccugcuccacgggcuggauuuuuccgaggugucuaacgugcagcgccuuaugagaaagcagaaacgggacgauagcgaccugaagcgccucagagaucugaaucaagcggucaacaaucugguggaacucaaguccacacagcagaaaagcauucugcggguuggaacgcuuaccucugacgaucugcucacacuggcugccgaccuugagaagcugaaauccaaggugauccgcaccgaaagaccccucagcucuggcgucuauauggggaaccuguccgcccagcaacuggagcagcggcgcgcucuccugaauaugauuggaauggugggcggggcccagggaacacagccuggcagagauggcguugugcgggucugggacgugaaaaacccggaucuucugaauaaccaauucgggaccaugcccagccucacacuggcuugucuuaccaagcagggacagguggaccugaaugaugccguccucgcgcugacggaccugggccucaucuacaccgccaaguauccuaacucuuccgaccuggaucgccuuagccaaucccaucccauucugaauaugguugacacaaagaagucuagccucaacaucuccggguacaauuuuagccugggagcugccgugaaagcuggcgccugcaugcuugaugggggaaacaugcuggagaccaucaaggugacaccucagaccauggacggcauucucaaaucuauccugaaggucaaaagaucccugggcauguucgugagcgauacgcccggggaacggaauccuuaugagaacauucucuacaagaucugucugucuggagacggcuggccguauauugcgagccgcacauccaucguugggagagccugggaaaacaccacaguggaucuugagucugacggaaagccccagaaagucggcaccaccgggagcaauaagucccugcagagcgcuggauuuccuacaggccucacguacucucaacugaugacccugaaagauuccaugaugcagcuugaccccagcgccaagacauggauugauaucgagggccggccugaagaccccguggagaucgcucucuaccagccgaugucugggugcuauauucacuucuuuagagaaccuaccgaccugaaacaguucaagcaagaugccaaguacucccauggaaucgacguugccgaucuguuucccgcucagccuggccucacaagcgcggugauugaggcccugccccgcaacaugguccuuaccugucagggguccgacgauaucaaaaagcugcucgacucucagggacggagagauauuaaacugaucgacaucgcucugagcaaggccgauucccgcaaauucgaaaaugccgugugggaccaaugcaaggaucuuugucacaugcauacgggcgucgugguugagaagaaaaagagagggggcaaagaggaaauuacaccccacugcgcucucauggacuguaucauguaugaugccgcggugucuggaggccugaacauuccuguccugcgggcugugcucccgcgcgacaugguuuuucggaccagcucccccaaggugguccugugaggacuaguaauaaggaaacuguaugaaugucugugggcaggaagugaagagauccuucuguaaagguuuuuggaauuaugucugcugaauaauaaacuuuuuugaaauaauaaaucugguagaaaaaugagaucucaaaggcucuuuucagagccaccaaaaaaaaaaaaaaaaaaaaaaaaaaaaaaaaaaaaaaaaaaaaaaaaaaaaaaaaaaaaaaaaaaaaaaaaaaaaaaaaaaaaaaaaaaaaaaaaaaaaa

SEQ ID NO: 21623 - RNA, 2097 nt, Artificial Sequence
  mRNA product Design b-4 (hSL-A100) comprising derived and/or modified sequence from LASV(LASV1000-NIG-2009;Clade II)__AIT17783__SP-IgE_NP(2-569) (opt5)
aggagagucccgcagucggcguccagcggcucugcuuguucgugugugugucguugcaggccuuauucaagcuuaccauggacuggaccuggauccuguuccucguggccgcugccacaagaguccacagcagcgccuccaaggaggugaaaucuuuccuguggacccagagccucagacgggaacuguccggcuacugcucuaacaucaaacuucaagucguuaaggacgcucaggcccugcuccacgggcuggauuuuagcgagguguccaaugugcagcgccuuaugagaaagcagaaacgggacgauucugaccugaagcgccucagagaucugaaccaagcggucaauaaccugguggaacucaagagcacacagcagaaauccauucugcggguuggaacgcuuaccagcgacgaucugcucacacuggcugccgaccuugagaagcugaaaucuaaggugauccgcaccgaaagaccccucuccagcggcgucuauauggggaaucugucuacacagcaacuggagcagcggcgcgcccuccugaacaugauuggaauggugggcggggcucagggaacccagccuggcagagauggcguugugcgggucugggacgugaaaaauccggaucuucugaacaaucaauucgggacaaugcccucccucacccuggccugucuuacgaagcagggacagguggaccugaacgaugucguucucgcucugaccgaccugggccucaucuacacagccaaguauccuaauagcucugaccuggaucgccuuucccaaagccaucccauucugaacaugguggacaccaaaaaguccucucucaauaucagcggguacaacuuuucccugggagcggccgugaaagcuggcgccugcaugcuugaugggggaaauaugcuggagacaaucaaggucaccccucagacgauggacggcauucucaaaagcauccugaaggugaaaaagucucugggcauguucguuuccgauacacccggggaaagaaacccuuaugagaacauucucuacaagaucugucugagcggagacggcuggccguauauugcuucucggaccagcaucguggggcgcgccugggaaaauacaaccgucgaucuugaguccgacggaaaaccccagaaggugggcaccgcggggucuaacaaaagccugcaguccgccggauuuccuacaggccucacguacagccaacugaugacccugaaggauucuaugaugcagcuugaccccuccgcuaaaacauggauugauaucgagggcagaccugaagaccccguugagaucgcccucuaccagccggugagcgggugcuauauucacuucuuucgggaaccuaccgaccugaagcaguucaagcaagaugcuaaauacucucauggaaucgacgucgccgaucuguuucccgcccagccuggccucacauccgcugugauugaggcgcugcccagaaauaugguccuuaccugucaggggagcgacgauaucaagcgccugcucgacucccagggacggagagauauuaaacugaucgacaucgcccugucuaaggcugauagccgccgguucgaaaacgccgugugggaccaaugcaaagaucuuugucacaugcauacgggcguuguggucgagaagaagaaaagagggggcaaggaggaaauuacaccccacugcgcccucauggacuguaucauguaugaugcugccguguccggaggccugaauauuccuguucugcgcgcggugcucccgcgggacauggucuuuagaaccucuagccccaaaguggugcugugaggacuaguaauaaggaaacuguaugaaugucugugggcaggaagugaagagauccuucuguaaagguuuuuggaauuaugucugcugaauaauaaacuuuuuugaaauaauaaaucugguagaaaaaugagaucucaaaggcucuuuucagagccaccaaaaaaaaaaaaaaaaaaaaaaaaaaaaaaaaaaaaaaaaaaaaaaaaaaaaaaaaaaaaaaaaaaaaaaaaaaaaaaaaaaaaaaaaaaaaaaaaaaaaa

SEQ ID NO: 21624 - RNA, 2097 nt, Artificial Sequence
  mRNA product Design b-4 (hSL-A100) comprising derived and/or modified sequence from LASV(LASV221-NIG-2010;Clade II)__AIT17625__SP-IgE_NP(2-569) (opt5)
aggagagucccgcagucggcguccagcggcucugcuuguucgugugugugucguugcaggccuuauucaagcuuaccauggacuggaccuggauccuguuccucguggccgcugccacaagaguccacagcagcgccuccaaggaggugaaaucuuuccuguggacccagagccucagacgggaacuguccggcuacugcucuagcaucaaacuucaagucguuaaggacgcucaggcccugcuccacgggcuggauuuuuccgaggugucuaacgugcagcgccuuaugagaaagcagcggcgcgacgauagcgaccugaaaagacuccgggaucugaaucaagcggucaacaaucugguggaacucaaguccacacagcaaaagagcauucugcgcguuggaacgcuuaccucugacgaucugcucacacuggcugccgaccuugagaaacugaaguccaaagugaucagaaccgaacggccccucagcucuggcgucuauauggggaaccuguccacacagcagcuggagcagcgcagagcccuccugaauaugauuggaauggugggcggggcucagggaacccagccuggccgggauggcguugugcgcgucugggacgugaagaacccggaucuucugaauaaccaauucgggacaaugcccagccucacccuggccugucuuacgaaacagggacagguggaccugaaugaugcuguccucgcccugaccgaccugggccucaucuacacagcgaaguauccuaacucuuccgaccuggauagacuuagccaaucccaucccauucugaauaugguugacaccaagaaaucuagccucaacaucuccggguacaauuuuagccugggagccgcugugaaggccggcgcuugcaugcuugaugggggaaacaugcuggagacaaucaaagugaccccucagacggucgacggcauucucaagucuauccugaaagugaagcggucccugggcauguucguuagcgauacacccggggaacgcaauccuuaugagaacauucucuacaaaaucugucugucuggagacggcuggccguauauugccagcagaaccuccaucguggggcgggcgugggaaaacacaaccgucgaucuugagucugacggaaagccccagaaggugggcaccgccgggagcaauaaaucccugcagagcgcuggauuuccuacaggccucacguacucucaacugaugacccugaaggauuccaugaugcagcuugaccccagcgccaaaacauggauugauaucgagggcagaccugaagaccccguugagaucgcucucuaccagccgaugucugggugcuauauucacuucuuucgcgaaccuaccgaccugaagcaguucaaacaagaugccaaguacucccauggaaucgacguggccgaucuguuucccgcucagccuggccucacaagcgcggucauugaggcccugccccggaacauggugcuuaccugucagggguccgacgauaucaagagacugcucgacucucagggacgccgggauauuaaacugaucgacaucgcucugagcaaggccgauuccagaaaauucgaaaaugccgucugggaccaaugcaaggaucuuugucacaugcauacgggcgugguuguggagaaaaagaagcgcgggggcaaagaggaaauuacaccccacugcgcucucauggacuguaucauguaugaugccgcggucucuggaggccugaacauuccugugcugcgggcuguucucccgagagacaugguguuucgcaccagcucccccaaggucgugcugugaggacuaguaauaaggaaacuguaugaaugucugugggcaggaagugaagagauccuucuguaaagguuuuuggaauuaugucugcugaauaauaaacuuuuuugaaauaauaaaucugguagaaaaaugagaucucaaaggcucuuuucagagccaccaaaaaaaaaaaaaaaaaaaaaaaaaaaaaaaaaaaaaaaaaaaaaaaaaaaaaaaaaaaaaaaaaaaaaaaaaaaaaaaaaaaaaaaaaaaaaaaaaaaaa

SEQ ID NO: 21625 - RNA, 2097 nt, Artificial Sequence
  mRNA product Design b-4 (hSL-A100) comprising derived and/or modified sequence from LASV(LASV237-NIG-2010;Clade II)__AIT17639__SP-IgE_NP(2-569) (opt5)
aggagagucccgcagucggcguccagcggcucugcuuguucgugugugugucguugcaggccuuauucaagcuuaccauggacuggaccuggauccuguuccucguggccgcugccacaagaguccacagcagcgccuccaaggaggugaaaucuuuccuguggacccagagccucagacgggaacuguccggcuacugcucuaacaucaaacuucaagucguuaaggacgcucaggcccugcuccacgggcuggauuuuagcgagguguccaaugugcagcgccuuaugagaaagcagaaacgggacgauucugaccugaagcgccucagagaucugaaccaagcggucaauaaccugguggaacucaagagcacacagcagaaauccauucugcggguuggaacgcuuaccagcgacgaucugcucacacuggcugccgaccuugagaagcugaaaucuaaggugauccgcaccgaaagaccccucuccagcggcgucuauauggggaaucugucuacacagcaacuggagcagcggcgcgcccuccugaacaugauuggaauggugggcggggcucagggaacccagccuggcagagauggcguugugcgggucugggacgugaaaaauccggaucuucugaacaaucaauucgggacaaugcccucccucacccuggccugucuuacgaagcagggacagguggaccugaacgaugcuguccucgcccugaccgaccugggccucaucuacacagcgaaguauccuaauagcucugaccuggaucgccuuucccaaagccaucccauucugaacaugguugacaucaaaaaguccucucucaauaucagcggguacaacuuuucccugggagccgcugugaaagccggcgcuugcaugcuugaugggggaaauaugcuggagaccauuaaggugacaccucagaccauggacggcauccucaaaagcauucugaaggucaaaagaucucugggcauguucguguccgauacgcccggggaacggaacccuuaugagaacauccucuacaagauuugucugagcggagacggcuggccguauaucgccucucgcacaagcauuguugggagagcgugggaaaauaccacaguggaucuugaguccgacggaaagccccagaaagucggcucugccgggagcaacaagucccugcagagcgcuggauuuccuaccggccucaccuacucucaacugaugacacugaaagauuccaugaugcagcuugaccccagcgccaagacguggaucgauaucgagggccggccugaagaccccguggagauugcucucuaccagccgaugucugggugcuauauccacuucuuuagagaaccuaccgaccugaaacaguucaagcaagaugccaaguacucccauggaauugacguugccgaucuguuucccgcucagccuggccucacaagcgcggugaucgaggcccugccccgcaauaugguccuuaccugucagggguccgacgauauuaaacggcugcucgacucucagggaagacgcgauaucaagcugaucgacauugcucugagcaaagccgauucccggagauucgaaaacgccgugugggaccaaugcaaggaucuuugucacaugcauacaggcgucgugguugagaaaaagaagcgcgggggcaaagaggaaaucacgccccacugcgcucucauggacuguauuauguaugaugccgcggugucuggaggccugaauaucccuguccugcgggcugugcucccgagagacaugguuuuucgcaccagcucccccaaggugguccugugaggacuaguaauaaggaaacuguaugaaugucugugggcaggaagugaagagauccuucuguaaagguuuuuggaauuaugucugcugaauaauaaacuuuuuugaaauaauaaaucugguagaaaaaugagaucucaaaggcucuuuucagagccaccaaaaaaaaaaaaaaaaaaaaaaaaaaaaaaaaaaaaaaaaaaaaaaaaaaaaaaaaaaaaaaaaaaaaaaaaaaaaaaaaaaaaaaaaaaaaaaaaaaaaa

SEQ ID NO: 21626 - RNA, 2097 nt, Artificial Sequence
  mRNA product Design b-4 (hSL-A100) comprising derived and/or modified sequence from LASV(LASV253-NIG-2011;Clade II)__AIT17671__SP-IgE_NP(2-569) (opt5)
aggagagucccgcagucggcguccagcggcucugcuuguucgugugugugucguugcaggccuuauucaagcuuaccauggacuggaccuggauccuguuccucguggccgcugccacaagaguccacagcagcgccuccaaggaggugaaaucuuuccuguggacccagagccucagacgggaacuguccggcuacugcucuagcaucaaacuucaagucguuaaggacgcucaggcccugcuccacgggcuggauuuuuccgaggugucuaacgugcagcgccuuaugagaaagcagaaacgggacgauagcgaccugaagcgccucagagaucugaaucaagcggucaacaaucugguggaacucaaguccacccagcagaaaagcguucugcgggugggaacgcuuaccucugacgaucugcucacacuggcugccgaccuugagaagcugaaauccaaggucauucgcaccgaaagaccccucagcucuggcguguauauggggaaccuguccacacagcaacuggagcagcggcgcgcccuccugaauaugaucggaaugguuggcggggcucagggaacccagccuggcagagauggcgugguccgggugugggacgugaaaaacccggaucuucugaauaaccaauucgggacaaugcccagccucacccuggccugucuuacgaagcagggacaggucgaccugaaugauguugugcucgcucugaccgaccugggccucauuuacacagccaaguauccuaacucuuccgaccuggaucgccuuagccaaucccaucccauccugaauaugguggacaccaaaaagucuagccucaacauuuccggguacaauuuuagccugggagcggccgucaaagcuggcgccugcaugcuugaugggggaaacaugcuggagacaaucaaggugaccccucagacgauggacggcauccucaaaucuauucugaagguuaaaaagucccugggcauguucgugagcgauacacccggggaaagaaauccuuaugagaacauccucuacaagauuugucugucuggagacggcuggccguauaucgcuagccggaccuccauugucgggcgcgccugggaaaacacaaccguggaucuugagucugacggaaaaccccagaagguuggcaccgcggggagcaauaaaucccugcagagcgccggauuuccuacaggccucacguacucucaacugaugacccugaaggauuccaugaugcagcuugaccccagcgcuaaaacauggaucgauauugagggcagaccugaagaccccguggagaucgcccucuaccagccgaugucugggugcuauauccacuucuuucgggaaccuaccgaccugaagcaguucaagcaagaugcuaaauacucccauggaauugacgucacagaucuguuucccgcccagccuggccucaccagcgccgugaucgaggcucugcccagaaacaugguccuuacgugucagggguccgacgauauuaagcgccugcucgacucucagggacggagagauaucaaacugauugacaucgcgcugagcaaggccgauucccgccgguucgaaaaugcugugugggaccaaugcaaagaucuuugucacaugcauacaggcguuguggucgagaagaagaaaagagggggcaaggaggaaaucacaccccacugcgcccucauggacuguauuauguaugaugccgcugugucuggaggccugaacaucccuguucugcgcgccgugcucccgcgggacauggucuuuagaaccagcucccccaaaguggugcugugaggacuaguaauaaggaaacuguaugaaugucugugggcaggaagugaagagauccuucuguaaagguuuuuggaauuaugucugcugaauaauaaacuuuuuugaaauaauaaaucugguagaaaaaugagaucucaaaggcucuuuucagagccaccaaaaaaaaaaaaaaaaaaaaaaaaaaaaaaaaaaaaaaaaaaaaaaaaaaaaaaaaaaaaaaaaaaaaaaaaaaaaaaaaaaaaaaaaaaaaaaaaaaaaa

SEQ ID NO: 21627 - RNA, 2097 nt, Artificial Sequence
  mRNA product Design b-4 (hSL-A100) comprising derived and/or modified sequence from LASV(LASV254-NIG-2011;Clade II)__AIT17675__SP-IgE_NP(2-569) (opt5)
aggagagucccgcagucggcguccagcggcucugcuuguucgugugugugucguugcaggccuuauucaagcuuaccauggacuggaccuggauccuguuccucguggccgcugccacaagaguccacagcagcgccuccaaggaggugaaaucuuuccuguggacccagagccucagacgggaacuguccggcuacugcucuagcaucaaacuucaagucguuaaggacgcucaggcccugcuccacgggcuggauuuuuccgaggugucuaacgugcagcgccuuaugagaaagcagaaacgggacgauagcgaccugaagcgccucagagaucugaaucaagcggucaacaaucugguggaacucaaguccacacagcagaaaagcguucugcgggugggaacgcuuaccucugacgaucugcucacacuggcugccgaccuugagaagcugaaauccaaggucauucgcaccgaaagaccccucagcucuggcguguauauggggaaccuguccacacagcaacuggagcagcggcgcgcccuccugaauaugaucggaaugguuggcggggcucagggaacccagccuggcagagauggcgugguccgggugugggacgugaaaaacccggaucuucugaauaaccaauucgggacaaugcccagccucacccuggccugucuuacgaagcagggacaggucgaccugaaugaugcuguucucgcccugaccgaccugggccucauuuacacagcgaaguauccuaacucuuccgaccuggaucgccuuagccaaucccaucccauccugaauaugguggacaccaaaaagucuagccucaacauuuccggguacaauuuuagccugggagccgcugugaaagccggcgcuugcaugcuugaugggggaaacaugcuggagacaaucaaggucaccccucagacgauggacggcauccucaaaucuauucugaaggugaaaaagucccugggcauguucguuagcgauacacccggggaaagaaauccuuaugagaacauccucuacaagauuugucugucuggagacggcuggccguauaucgccagccggaccuccauuguggggcgcgcgugggaaaacacaaucgucgaucuugagucugacggaaaaccccagaaggugggcaccgccgggagcaauaaaucccugcagagcgcuggauuuccuaccggccucacauacucucaacugaugacgcugaaggauuccaugaugcagcuugaccccagcgccaaaaccuggauugauaucgagggcagaccugaagaccccguugagaucgcucucuaccagccgaugucugggugcuauauucacuucuuucgggaaccuacagaccugaagcaguucaagcaagaugccaaauacucccauggaaucgacguggccgaucuguuucccgcucagccuggccucaccagcgcggucauugaggcccugcccagaaacauggugcuuacaugucagggguccgacgauaucaagcgccugcucgacucucagggacggagagauauuaaacugaucgacaucgcucugagcaaggccgauucccgccgguucgaaaaugccgucugggaccaaugcaaagaucuuugucacaugcauaccggcgugguuguggagaagaagaaaagagggggcaaggaggaaauuacgccccacugcgcucucauggacuguaucauguaugaugccgcggucucuggaggccugaacauuccugugcugcgcgcuguucucccgcgggacaugguguuuagaacaagcucccccaaagucgugcugugaggacuaguaauaaggaaacuguaugaaugucugugggcaggaagugaagagauccuucuguaaagguuuuuggaauuaugucugcugaauaauaaacuuuuuugaaauaauaaaucugguagaaaaaugagaucucaaaggcucuuuucagagccaccaaaaaaaaaaaaaaaaaaaaaaaaaaaaaaaaaaaaaaaaaaaaaaaaaaaaaaaaaaaaaaaaaaaaaaaaaaaaaaaaaaaaaaaaaaaaaaaaaaaaa

SEQ ID NO: 21628 - RNA, 2097 nt, Artificial Sequence
  mRNA product Design b-4 (hSL-A100) comprising derived and/or modified sequence from LASV(Nig08-04;Clade II)__ADU56611__SP-IgE_NP(2-569) (opt5)
aggagagucccgcagucggcguccagcggcucugcuuguucgugugugugucguugcaggccuuauucaagcuuaccauggacuggaccuggauccuguuccucguggccgcugccacaagaguccacagcagcgccuccaaggaggugaaaucuuuccuguggacccagagccucagacgggaacuguccggcuacugcucuaacaucaaacuucaagucguuaaggacgcucaggcccugcuccacgggcuggauuuuagcgagguguccaaugugcagcgccuuaugagaaagcagaaacgggacgauggagaccugaagcgccucagagaucugaaccaagcggucaauaaccugguggaacucaagucuacccagcagaaaagcguucugcgggugggcacgcuuaccuccgacgaucugcucacacuggcugccgaccuugagaagcugaaaagcaaggucauucgcaccgaaagaccccucucuuccgggguguauaugggaaaucugagcacacagcaacuggagcagcggaaagcccuccugucuaugaucggcaugguugggggagcucagggcacccagccuggccgcgaugggguggucagagugugggacgugaagaacccggaucuucugaauaaccaauucggaacaaugcccucccucacccuggccugucuuacgaagcagggccaggucgaccugaaugaugcuguucucgcccugaccgaccuggggcucauuuacacagcgaaauauccuaacagcucugaccuggaucggcuuucccaaagccaucccauccugaauaugguggacaccaagaaauccucucucaacauuagcggauacaauuuuucccugggcgccgcugugaaggccggggcuugcaugcuugauggaggcaacaugcuggagacaaucaaagucaccccucagacgauggacggcauccucaagagcauucugaaagugaagcgcucucuggggauguucguuuccgauacacccggagaaagaaauccuuaugagaacauccucuacaagauuugucugagcggcgacggguggccguauaucgccucucggaccagcauugugggacgcgcgugggaaaacacaaccgucgaucuugaguccgacggcaaaccccagaagguggggaccgccggaucuaauaaaagccugcaguccgcuggcuuuccuacaggccucacguacagccaacugaugacccugaaggauucuaugaugcagcuugaccccuccgccaaaacauggaucgauauugaggggagaccugaagaccccguugagaucgcucucuaccagccgaugagcggaugcuauauccacuucuuucgggaaccuaccgaccugaagcaguucaagcaagaugccaaauacucucauggcauugacgugacagaucuguuuuccgcccagcccgggcucaccagcgcugucaucgaggcgcugccuagaaacauggugcuuacgugucagggauccgacgauauuaagaaacugcucgacucucagggccgccgggauaucaagcugauugacaucagccugaauaaagccgauuccagacgcuucgaaaacgcugucugggaccaaugcaaggaucuuugucacaugcauacaggggugguuguggagaagaaaaagcggggcggaaaagaggaaaucacaccccacugcgcccucauggacuguauuauguuugaugccgcugucucuggcgggcugaauauccccauucugagagccgugcucccucgcgacaugguuuuccggaccagcuccccgaaggugguccugugaggacuaguaauaaggaaacuguaugaaugucugugggcaggaagugaagagauccuucuguaaagguuuuuggaauuaugucugcugaauaauaaacuuuuuugaaauaauaaaucugguagaaaaaugagaucucaaaggcucuuuucagagccaccaaaaaaaaaaaaaaaaaaaaaaaaaaaaaaaaaaaaaaaaaaaaaaaaaaaaaaaaaaaaaaaaaaaaaaaaaaaaaaaaaaaaaaaaaaaaaaaaaaaaa

SEQ ID NO: 21629 - RNA, 2100 nt, Artificial Sequence
  mRNA product Design b-4 (hSL-A100) comprising derived and/or modified sequence from LASV(GA391;Clade III)__AAA46284__SP-IgE_NP(2-570) (opt5)
aggagagucccgcagucggcguccagcggcucugcuuguucgugugugugucguugcaggccuuauucaagcuuaccauggacuggaccuggauccuguuccucguggccgcugccacaagaguccacagcagcgccuccaaggaggugagaucuugccuguggacccagagccuccggcgcgaacuguccggcuacuguucuaacaucaaacuucaagucguuaaggacgcucaggcccugcuccacgggcuggauuucagcgagguguccaaugugcagagacuuaugcggaaacagaagcgcgacgauggagaccugaaaagacuccgggaucugaaccaagcggucaauaaccugguggaacucaagucuacacagcagaaaagcguucugcgcgugggcacgcuuuccagcgacgaucugcucauucuggcugccgaccuugagaaacugaagucuaaagucaccagaacagaacggccccucuccagcgggguguauaugggaaaucugucuucccagcaacuggaucagcgcagagcccuccugaacaugaucggcaugaccgggguuagcggaggcggcaagggggcuucuaauggaauugugcgggucugggacgugaaaaacgccgagcuucugaauaaccaguuuggcacaaugccuucccucacccuggcuugccuuacaaagcaggggcaaguggaucugaaugacgccguccaggcgcucaccgaucugggacugaucuacacggccaaguauccgaacagcuccgaccucgaccgccugucucagagccaucccauucuuaauaugaucgauaccaaaaaguccagccugaacaucucuggcuacaauuucucccucggggcugccguuaaagcuggagccuguaugcuggacggcggcaacaugcuugagacaauuaaggugagcccucaaaccauggaugggauccugaaaucuauucucaaggugaaaaagagccugggaauguuugucuccgacacacccggcgaaagaaacccuuaugagaauauccuguacaagauuugccucucuggggauggauggagcuauaucgcgucccggaccagcauugugggccgcgccugggaaaacacgguuguggaccuggagcaggauaauaaaccccagaagaucgggaacggaggcucuaauaaaucccuucagagcgcuggcuucgccgcugggcugaucuacucucaacucaugacacugaaggacuuuaaauguuucaaccugauuccuaaugccaagaccuggauggauaucgagggaagaccggaagaccccgucgagauugcccuuuaccagccuuccagcggcugcuaugugcacuuuuuccgggaacccacagaucucaagcaguuuaaacaggacgcuaaguacucccaugggagagacguuaccgaucuguucgcggcccaaccuggacugaccucugcugugaucgaggcccucccccgcaacauggucauuacaugucagggcagcgaagacauccggaaacugcuugagucccaggggagacgcgauaucaagcugauugacaucacgcucucuaaagccgauagccggaaguuugagaaugcugugugggaccaguucaaggaucugugccacaugcauaccggcgucgugguugaaaagaagaaaagaggaggcaaggaggaaauuacaccgcacugugcccugauggacugcaucauguuugaugcggcuguguccgggggacuugacgccaaaguccuccgcgugguucugccucgggauaugguguucagaaccagcacacccaaggucgugcugugaggacuaguaauaaggaaacuguaugaaugucugugggcaggaagugaagagauccuucuguaaagguuuuuggaauuaugucugcugaauaauaaacuuuuuugaaauaauaaaucugguagaaaaaugagaucucaaaggcucuuuucagagccaccaaaaaaaaaaaaaaaaaaaaaaaaaaaaaaaaaaaaaaaaaaaaaaaaaaaaaaaaaaaaaaaaaaaaaaaaaaaaaaaaaaaaaaaaaaaaaaaaaaaaa

SEQ ID NO: 21630 - RNA, 2097 nt, Artificial Sequence
  mRNA product Design b-4 (hSL-A100) comprising derived and/or modified sequence from LASV(Nig08-A19;Clade III)__ADU56619__SP-IgE_NP(2-569) (opt5)
aggagagucccgcagucggcguccagcggcucugcuuguucgugugugugucguugcaggccuuauucaagcuuaccauggacuggaccuggauccuguuccucguggccgcugccacaagaguccacagcagcgccuccaaggaggugaaaucuuuccuguggacccagagccucagacgggaacuguccggcuacugcucuaacaucaaacuucaagucguuaaggacgcucaggcccugcuccacgggcuggauuuuagcgagguguccaaugugcagcgccuuaugagaaagcagaaacgggacgauggagaccugaagcgccucagagaucugaaccaagcggucaauaaccugguggaacucaagucuacacagcagaaaagcguucugcgggugggcacgcuuuccagcgacgaucugcucguccuggcugccgaccuugagaagcugaaaucuaaggugguucgcaccgaaagaccccucuccagcgggauuuauaugggaaaucugucuucccagcaacuggaucagcggaaagcccuccugaacaugaucggcaugacagggggaaauggcggccgcaacaccacaagcgacgggauugugagagucugggaugugaagaaugcugagcuucugaacaaucaguucggaaccaugccuucucucacacuggccugucuuaccaagcagggccaaguggaccugaacgaugcuguccaggcccucacggaccuggggcugaucuacaccgcgaaauaucccaauuccagcgaccucgaucggcuggcccagucccauccgauucuuaacaugaucgacacaaagaaaucuagccugaauaucuccggauacaacuuuagccucggcgcugccguuaaggcuggggccugcaugcuggauggaggcaacaugcuugagaccauuaaagugucuccucaaacaauggacggcauccugaaguccauucucaaagugaagcgcagccuggggauguucaucucugauacccccggagaaagaaauccuuaugagaacauucuguacaagaucugucucagcggcgacggguggcccuauauugcgucccggacgucuaucgucggacgcgccugggaaaauacagugguugaucuggagagcgacaacaaaccucagaagaccggcaaugggggauccaacaaaagccuucagucugcuggcuuugccgcuggccugacauacucccagcucaugacccugaaggauagcaugcugcaacuugacccgaaugccaaaaccuggauggauaucgaggggagacccgaagacccuguggagauugcccucuaccagcccucuuccggaugcuauauccacuucuuucgggaaccuacagaccugaagcaguucaagcaggaugcuaaauacagccauggcauugacgucacggaucuguuugcggcccaacccgggcucaccuccgcugugaucgaggcccugccgagaaacaugguuauuacaugucagggaucugaagacauccgcaaacuucuggagagccagggccggagagauaucaagcucauugacaucucccugucuaagguggauagccgcaaauucgagaaugccgucugggaccaguuuaaggaucugugccacaugcauaccgggauuguggucgaaaagaaaaagcggggcggaaaagaggaaaucacaccucacugugcucuuauggacugcauuauguucgaugccgcgguguccggcgggguugacgcuaaggugcucagagccguccugccccgcgauaugguguuucggaccagcacgccuaaaguugugcugugaggacuaguaauaaggaaacuguaugaaugucugugggcaggaagugaagagauccuucuguaaagguuuuuggaauuaugucugcugaauaauaaacuuuuuugaaauaauaaaucugguagaaaaaugagaucucaaaggcucuuuucagagccaccaaaaaaaaaaaaaaaaaaaaaaaaaaaaaaaaaaaaaaaaaaaaaaaaaaaaaaaaaaaaaaaaaaaaaaaaaaaaaaaaaaaaaaaaaaaaaaaaaaaaa

SEQ ID NO: 21631 - RNA, 2097 nt, Artificial Sequence
  mRNA product Design b-4 (hSL-A100) comprising derived and/or modified sequence from LASV(G1180-SLE-2010;Clade IV)__AIT17169__SP-IgE_NP(2-569) (opt5)
aggagagucccgcagucggcguccagcggcucugcuuguucgugugugugucguugcaggccuuauucaagcuuaccauggacuggaccuggauccuguuccucguggccgcugccacaagaguccacagcagcgccuccaaggagaucaaaucuuuccuguggacccagagccucagacgggaacuguccggcuacugcucuaacauuaagcugcaaguggucaaagacgcucaggcccugcuccacgggcuggauuuuagcgagguuuccaaugugcagcgccuuaugagaaaggaacggcgcgacgauaacgaccugaaaagacuccgggaucugaaucaggcggugaacaaucuggucgagcucaagucuacacaacaaaagagcauccugcgcgugggaacgcuuaccuccgacgaucugcucauucuggcugccgaccuugaaaaacuuaagagcaaaguuaucagaacagagcggccccucucugccggcguguauauggggaaccuguccagccagcagcuggaucagcgcagagcucuccugucuaugauuggaauguccagcggcaaucagcgggcccaggcugggcgcgacggagucgugagaguuugggaugugaagaacgucgagcuucugaauaaccaguucggcaccaugccuucucucacacuggccugucuuaccaaacaaggccagguggaccugaaugaugcggugcaggcccucacagaccuggggcugaucuacaccgcuaaguauccgaacacguccgaccucgaucggcugacccaaagccaucccauccuuaauaugauugacacaaagaaauccucucugaacaucagcggauacaauuuuucccucggcgccgcugucaaggccggggcgugcaugcuggauggaggcaacaugcuugaaaccauuaaaguuagcccucagacaauggacgggauccugaagucuauucucaaagugaagaaagcccugggaauguucaucuccgauacccccggcgagcgcaacccuuaugaaaauauucuguacaagaucugucucagcggcgacggguggcccuauaucgcuucuagaacgagcauuacaggacgggccugggagaacaccguggucgaucuggaguccgacggcaagccucagaaagcugggucuaauaacagcaauaagucccuucagagcgugggauuuacagccggccugaccuacucucaacucaugacccugaaagaugccaugcugcagcuugacccgaacgcuaagacauggauggauaucgaagggagacccgaggacccuguugaaauugcgcucuaccagcccuccagcggaugcuauauccacuucuuucgcgagccuacggaccugaaacaguucaagcaagaugccaaguacucucauggcauugacgugaccgaucuguuugcugcccagcccggccucacauccgccgucaucgacgcucugccgcggaauauggugaucaccugucaggggagcgaugacauuagaaaacuucuggaaucccagggacgcaaggauaucaaacucauugacaucgcccugucuaagacagauagccggaaauaugagaacgcgguuugggaccaauacaaggaucugugccacaugcauaccggcguggucguggagaagaaaaagagagggggaaaagaagagauuacgccucacugugcucuuauggacugcaucauguucgaugccgccgucuccggcgggcucaauacaucugugcugcgcgcuguucugccccgggacaugguguuuagaaccagcaccccucgcgucgugcucugaggacuaguaauaaggaaacuguaugaaugucugugggcaggaagugaagagauccuucuguaaagguuuuuggaauuaugucugcugaauaauaaacuuuuuugaaauaauaaaucugguagaaaaaugagaucucaaaggcucuuuucagagccaccaaaaaaaaaaaaaaaaaaaaaaaaaaaaaaaaaaaaaaaaaaaaaaaaaaaaaaaaaaaaaaaaaaaaaaaaaaaaaaaaaaaaaaaaaaaaaaaaaaaaa

SEQ ID NO: 21632 - RNA, 2097 nt, Artificial Sequence
  mRNA product Design b-4 (hSL-A100) comprising derived and/or modified sequence from LASV(G1442-SLE-2011;Clade IV)__AIT17181__SP-IgE_NP(2-569) (opt5)
aggagagucccgcagucggcguccagcggcucugcuuguucgugugugugucguugcaggccuuauucaagcuuaccauggacuggaccuggauccuguuccucguggccgcugccacaagaguccacagcagcgccuccaaggaggugaaaucuuuccuguggacccagagccucagacgggaacuguccggcuacugcucuaacaucaaacuucaagucguuaaggacgcucaggcccugcuccacgggcuggauuuuagcgagguguccaaugugcagcgccuuaugagaaagcagcggcgcgacgauaacgaccugaaaagacuccgggaucugaaucaagcggucaacaaucugguggaacucaagucuacacagcaaaagagcguucugcgcgugggaacgcuuaccuccgacgaucugcucguccuggcugccgaccuugagaaacuuaagagcaaagugauuagaacagaacggccccucucugccggcguuuauauggggaaccuguccagccagcagcuggaucagcgcagagcucuccugaauaugaucggaaugucuggcgggauucagggaacccggacaggccgcgacggcguggucagagugugggaugugaagaacgccgaccuucugaauaaccaguucgggaccaugccuucccucacacuggcuugucuuaccaaacaaggacaggucgaucugaaugacguugugcaggcccucacggaccugggccugaucuacaccgcgaaguauccgaacgccagcgaucucgaccggcugacacaaucucaucccauucuuaauaugaucgauaccaagaaauccagccugaacaucuccggguacaauuuuucucucggagcugccgugaaggcuggcgccugcaugcuggacgggggaaacaugcuugagacaauuaaagucagcccucagaccauggauggcauccugaaguccauucucaaagugaagaaaacgcugggcauguucaucagcgacacacccggggagcgcaacccuuaugaaaauauucuguacaagaucugucucucuggagauggcuggcccuauauugcguccagaaccagcaucacagggcgggccugggagaacaccguuguggaccuggaaucugauggaaagccucagaaagcuggcagcaauaacuccaauaagucucuucagagcgccggguuugcugccggacugaccuacucccaacucaugacacugaaagacgccaugcugcagcuugauccgaacgcuaagacguggauggacaucgagggcagacccgaggacccugucgaaauugcgcucuaccagcccagcucuggcugcuauauccacuucuuucgcgagccuaccgaucugaaacaguucaagcaagacgccaaguacucccaugggauugaugugacagaccuguuugcugcccagcccggacucaccagcgccguuaucgaagcucugccgcggaauauggugauuacaugucagggcucugaugacaucaaaaagcugcuggagucccaggggagaaaagauaucaagcucauugacaucgcccugagcaaaaccgauucccgcaaguaugaaaacgcggucugggaccaauacaaggaucugugccacaugcauacgggaguggucguggagaaaaagaaacggggcgggaaggaggaaauuacaccucacugugcucuuauggacugcaucauguucgaugccgccguuucuggcggacucaauacccuggugcugagagcuguccucccccgcgacaugguguuucggaccagcacaccuagaguugugcugugaggacuaguaauaaggaaacuguaugaaugucugugggcaggaagugaagagauccuucuguaaagguuuuuggaauuaugucugcugaauaauaaacuuuuuugaaauaauaaaucugguagaaaaaugagaucucaaaggcucuuuucagagccaccaaaaaaaaaaaaaaaaaaaaaaaaaaaaaaaaaaaaaaaaaaaaaaaaaaaaaaaaaaaaaaaaaaaaaaaaaaaaaaaaaaaaaaaaaaaaaaaaaaaaa

SEQ ID NO: 21633 - RNA, 2097 nt, Artificial Sequence
  mRNA product Design b-4 (hSL-A100) comprising derived and/or modified sequence from LASV(G3010-SLE-2013;Clade IV)__AIT17345__SP-IgE_NP(2-569) (opt5)
aggagagucccgcagucggcguccagcggcucugcuuguucgugugugugucguugcaggccuuauucaagcuuaccauggacuggaccuggauccuguuccucguggccgcugccacaagaguccacagcagcgccuccaaggagaucaaaucuuuccuguggacccagagccucagacgggaacuguccggcuacugcucuaacauuaaacuucaaguggucaaagacgcucaggcccugcuccacgggcuggauuuuagcgagguuuccaaugugcagcgccuuaugagaaaggaacggcgcgacgauaacgaccugaaaagacuccgggaucugaaucaggcggugaacaaucuggucgagcucaagucuacacaacaaaagagcauccugcgcgugggaacgcuuaccuccgacgaucugcucauucuggcugccgaccuugaaaaacuuaagagcaaaguuacaagaaccgagcggccccucucugccggcguguauauggggaaccuguccagccagcagcuggaucagcgcagagcucuccugucuaugaucggaauguccagcggcguccagggggcccgggcuggacgcgacggcgugguuagagugugggaugucaagaaugccgagcuucugaacaaucaguucggcacaaugccuucucucacccuggcgugucuuacaaaacaggggcaaguggaccugaacgaugugguccaggcccucaccgaccugggacugauuuacacggcuaaguauccgaauaccuccgaccucgaucggcugacacagagccaucccauccuuaacaugaucgacaccaagaaauccucucugaauauuagcggcuacaacuuuucccucggggccgcuguuaaggccggagcgugcaugcuggauggcgggaauaugcuugaaacaaucaaagugagcccucaaaccauggacggcauucugaagucuauccucaaagugaagaaagcccugggaauguucauuuccgagacgcccggcgaacgcaacccuuaugagaacauccuguacaagauuugucucagcggggauggauggcccuauaucgcuucuagaacaagcaucaccggccgggccugggagaauacagucguggaccuggaauccgaugggaagccucagaaagcuggaucuaacaauagcaacaagucccuucagagcgccggcuuuaccgccgggcugaccuacucucagcucaugacacugaaagacgcuaugcugcaacuugauccgaaugcgaagacguggauggacauugagggaagacccgaagauccuguugagguggcccucuaccagcccuccagcggcugcuauauccacuucuuucgcgaaccuaccgaccugaaacaguucaagcaggacgcuaaguacucucauggcauugaugucacagaccuguuugccgcccaacccgggcucaccuccgcugugaucgaugcccugccgcggaacaugguuauuacaugucagggaagcgacgauaucaaaaagcugcuggagucccagggcagaaaagacaucaagcucauugauaucgcgcugucuaaaaccgacagccgcaaguaugagaaugcugugugggaucaguacaaggaccugugccacaugcauacgggggucguggucgaaaagaagaaacggggaggcaaggaggaaauuacaccucacugugcccuuauggauugcaucauguucgacgccgcuguguccgggggccucaacaccucuguucugagagccgugcugccccgcgauauggucuuucggaccagcacaccuagagugguucucugaggacuaguaauaaggaaacuguaugaaugucugugggcaggaagugaagagauccuucuguaaagguuuuuggaauuaugucugcugaauaauaaacuuuuuugaaauaauaaaucugguagaaaaaugagaucucaaaggcucuuuucagagccaccaaaaaaaaaaaaaaaaaaaaaaaaaaaaaaaaaaaaaaaaaaaaaaaaaaaaaaaaaaaaaaaaaaaaaaaaaaaaaaaaaaaaaaaaaaaaaaaaaaaaa

SEQ ID NO: 21634 - RNA, 2097 nt, Artificial Sequence
  mRNA product Design b-4 (hSL-A100) comprising derived and/or modified sequence from LASV(G502-SLE-2009;Clade IV)__AIT17127__SP-IgE_NP(2-569) (opt5)
aggagagucccgcagucggcguccagcggcucugcuuguucgugugugugucguugcaggccuuauucaagcuuaccauggacuggaccuggauccuguuccucguggccgcugccacaagaguccacagcagcgccuccaaggagaucaaaucuuuccuguggacccagagccucagacgggaacuguccggcuacugcucuaacauuaagcugcaaguggucaaagacgcucaggcccugcuccacgggcuggauuuuagcgagguuuccaaugugcagcgccuuaugagaaaggaacggcgcgacgauaacgaccugaaaagacuccgggaucugaaucaggcggugaacaaucuggucgagcucaagucuacacaacaaaagagcauccugcgcgugggaacgcuuaccuccgacgaucugcucauucuggcugccgaccuugaaaaacuuaagagcaaaguuaucagaacagagcggccccucucugccggcguguauauggggaaccuguccagccagcagcuggaucagcgcagagcucuccugucuaugauuggaauguccggcgggaaucagggaguccgggccggcaaggacggcgugguucgcgugugggaugucaaaaacgcugagcuucugaauaaccaguucgggaccaugccuagccucacacuggccugucuuaccaagcagggacaaguggaccugaaugaugcggugcaggcccucacagaccugggccugaucuacaccgcuaaguauccgaacacgucugaccucgauagacugacccagucccaucccauccuuaauaugauugacaccaaaaagagcucccugaacaucucuggguacaauuuuagccucggagccgcugucaaagccggcgcgugcaugcuggaugggggaaacaugcuugaaacaauuaagguuuccccucaaacaauggacggcauccugaaaagcauucucaaggugaaaaaggcccugggcauguucaucucugauacccccggggagcggaacccuuaugaaaauauucuguacaagaucugucucuccggagacggcuggcccuauaucgcuagccgcacgucuauuacagggagagccugggagaacaccguggucgaucuggagagcgacggaaaaccucagaaggcuggcuccaauaacucuaauaaaagccuucaguccgccggguuuacagccggacugaccuacagccagcucaugacccugaaggaugcuaugcugcaacuugacccgaacacaaaaacguggauggauaucgaaggccggcccgaggacccuguggaaauugcgcucuaccagcccucuuccggcugcuauauccacuucuuuagagagccuaccgaccugaagcaguucaagcaggaugccaaauacagccaugggauugacguuacagaucuguuugcugcccaacccggacucaccucugccgugaucgacgcucugccgcgcaauauggucaucacaugucagggcuccgaugacauucggaaacuucuggaaagccaggggagaaaggauaucaagcucauugacaucgcccugaacaaaaccgauucccgcaaguaugagaaugcggugugggaccaguacaaggaucugugccacaugcauacgggaguuguggucgagaaaaagaaacggggcgggaaggaagagauuacaccucacugugcucuuauggacugcaucauguucgaugccgccgugucuggcggacucaacaccagcguccugagagcugugcugccccgcgacaugguuuuucggaccuccacaccuagagugguccucugaggacuaguaauaaggaaacuguaugaaugucugugggcaggaagugaagagauccuucuguaaagguuuuuggaauuaugucugcugaauaauaaacuuuuuugaaauaauaaaucugguagaaaaaugagaucucaaaggcucuuuucagagccaccaaaaaaaaaaaaaaaaaaaaaaaaaaaaaaaaaaaaaaaaaaaaaaaaaaaaaaaaaaaaaaaaaaaaaaaaaaaaaaaaaaaaaaaaaaaaaaaaaaaaa

SEQ ID NO: 21635 - RNA, 2097 nt, Artificial Sequence
  mRNA product Design b-4 (hSL-A100) comprising derived and/or modified sequence from LASV(G733-SLE-2010;Clade IV)__AIT17155__SP-IgE_NP(2-569) (opt5)
aggagagucccgcagucggcguccagcggcucugcuuguucgugugugugucguugcaggccuuauucaagcuuaccauggacuggaccuggauccuguuccucguggccgcugccacaagaguccacagcagcgccuccaaggagaucaaaucuuuccuguggacccagagccucagacgggaacuguccggcuacugcucuaacauuaagcugcaaguggucaaagacgcucaggcccugcuccacgggcuggauuuuagcgagguuuccaaugugcagcgccuuaugagaaaggaacggcgcgacgauaacgaccugaaaagacuccgggaucugaaucaggcggugaacaaucuggucgagcucaagucuacacaacaaaagagcgugcugcgcguuggaacgcuuaccuccgacgaacugcucgugcuggcugccgaucuugagaaacuuaagagcaaagucaucagaacagagcggccccucucugccggcguguauauggggaaccuguccagccagcagcuggaccagcgcagagcucuccugucuaugauuggaauguccggcgggaaucagggagcccggaccggccgcgauggcguugugagagucugggacgugaagaacgcugaacuucugaauaaccaguucgggacaaugccuagccucacccuggccugucuuacaaaacagggacaaguggaucugaaugacgcgguccaggcccucaccgaucugggccugaucuacacggcuaaguauccgaacaccucugaccucgaccggcugacacagucccaucccauucuuaauaugaucgauaccaagaaaagcucccugaacaucucuggguacaauuuuagccucggagccgcuguuaaggccggcgcgugcaugcuggacgggggaaacaugcuugagacaauuaaaguguccccucaaaccauggauggcauccucaagagcauucugaaagugaagaaagcccugggcauguucaucucugacacgcccggggaacgcaacccuuaugagaauauucuguacaagaucugucucuccggagauggcuggcccuauauugcuagcagaacaucuaucaccgggcgggccugggagaacacagucguggaccuggaaagcgauggaaagccucagaaagcuggcuccaauaacucuaauaagagccuucaguccgccggguuuaccgccggacugaccuacagccagcucaugacacugaaagacgcuaugcugcaacuugauccgaacgcgaagacguggauggacaucgagggcagacccgaagauccuguugagauugcccucuaccagcccucuuccggcugcuauauccacuucuuucgcgaaccuaccgaccugaaacaguucaagcaggacgcuaaguacagccaugggauugaugugacagaccuguuugccgcccaacccggacucaccucugcugucaucgaugcccugccgcggaauauggugauuacaugucagggcuccgacgauaucagaaaacuucuggagagccaggggcgcaaggacaucaaacucauugauaucgcgcuguccaagauugacucucggaaauaugagaacgcuguuugggaucaguacaaggaccugugccacaugcauaccggaguggucguggaaaagaaaaagagaggcgggaaagaggaaaucacgccucacugugcccuuauggauugcauuauguucgacgccgcugucagcggcggacucaauucccuggugcugcgcgccguucucccccgggauaugguguuuagaacaucuaccccucgcgucgugcugugaggacuaguaauaaggaaacuguaugaaugucugugggcaggaagugaagagauccuucuguaaagguuuuuggaauuaugucugcugaauaauaaacuuuuuugaaauaauaaaucugguagaaaaaugagaucucaaaggcucuuuucagagccaccaaaaaaaaaaaaaaaaaaaaaaaaaaaaaaaaaaaaaaaaaaaaaaaaaaaaaaaaaaaaaaaaaaaaaaaaaaaaaaaaaaaaaaaaaaaaaaaaaaaaa

SEQ ID NO: 21636 - RNA, 2097 nt, Artificial Sequence
  mRNA product Design b-4 (hSL-A100) comprising derived and/or modified sequence from MOPV/LASV reassortant(IGS-1;Clade IV)__AFY05578__SP-IgE_NP(2-569) (opt5)
aggagagucccgcagucggcguccagcggcucugcuuguucgugugugugucguugcaggccuuauucaagcuuaccauggacuggaccuggauccuguuccucguggccgcugccacaagaguccacagcagcgccuccaaggagaucaaaucuuuccuguggacccagagccucagacgggaacuguccggcuacugcucuaacauuaaacuucaaguggucaaggacgcucaggcccugcuccacgggcuggauuuuagcgagguuuccaaugugcagcgccuuaugagaaaggaacggcgcgacgauaacgaccugaaaagacuccgggaucugaaucaggcggugaacaaucuggucgagcucaagucuacacaacaaaagagcauccugcgcgugggaacgcuuaccuccgacgaucugcucauucuggcugccgaccuugaaaaacugagaagcaagguuauccggacagagcgcccccucucugccggcguguauauggggaaccuguccagccagcagcuggaucagagacgggcucuccugaauaugauuggaaugucuggcgggaaccagggagcccgcgcuggcagagacggcgucgugcggguuugggaugugaaaaaugccgagcuucuguccaaccaguucgggaccaugccuagccucacacuggcgugucuuaccaagcagggacaagucgaccugaaugaugccgugcaggcucucacagaccugggccugaucuacaccgccaaauauccgaacacgucugaccucgaucgccugacccagucccaucccauccuuaauaugauugacacaaagaaaagcucccugaacaucucuggguacaauuuuagccucggagcugccgugaaggcgggcgccugcaugcuggaugggggaaacaugcuugaaaccauuaaggucuccccucaaacaauggacggcauccugaaaagcauucucaagguuaaaaaggcucugggcauguucaucucugauacccccggggagagaaacccuuaugaaaauauucuguacaaaaucugucucuccggagacggcuggcccuauaucgccagccggacgucuauuacagggagagcuugggagaacaccgugguggaucuggagagcgacggaaagccucagaaggccgauuccaauaacucuagcaaaucccuucagagcgccggcuuuacagcugggcugaccuacucucagcucaugacccugaaggacgcgaugcugcaacuugauccgaaugccaaaacauggauggacaucgaaggacgccccgaggacccugucgaaauugcucucuaccagcccuccagcggcugcuauauccacuucuuucgggagccuacggaucugaagcaguucaaacaggacgccaaguacucucauggcauugaugugaccgaccuguuugccacacaacccgggcucaccuccgcuguuaucgaugcccugccgagaaacauggugaucacaugucagggaagcgacgauauucgcaaacuucuggaaucccagggccggaaggacaucaagcucauugauaucgaccugucuaaaaccgauagcagaaaguaugagaaugcggucugggaccaguacaaagaucugugccacaugcauacgggggugguuguggagaagaagaaacgcggaggcaaggaagagauuacaccucacugugcucuuauggacugcaucauguucgacgccgccgucuccgggggccucaacaccucugugcugcgggcuguccugcccagagauaugguguuucgcaccagcacaccucggguugugcucugaggacuaguaauaaggaaacuguaugaaugucugugggcaggaagugaagagauccuucuguaaagguuuuuggaauuaugucugcugaauaauaaacuuuuuugaaauaauaaaucugguagaaaaaugagaucucaaaggcucuuuucagagccaccaaaaaaaaaaaaaaaaaaaaaaaaaaaaaaaaaaaaaaaaaaaaaaaaaaaaaaaaaaaaaaaaaaaaaaaaaaaaaaaaaaaaaaaaaaaaaaaaaaaaa

SEQ ID NO: 21637 - RNA, 2097 nt, Artificial Sequence
  mRNA product Design b-4 (hSL-A100) comprising derived and/or modified sequence from LASV(LM765-SLE-2012;Clade IV)__AIT17815__SP-IgE_NP(2-569) (opt5)
aggagagucccgcagucggcguccagcggcucugcuuguucgugugugugucguugcaggccuuauucaagcuuaccauggacuggaccuggauccuguuccucguggccgcugccacaagaguccacagcagcgccuccaaggagaucaaaucuuuccuguggacccagagccucagacgggaacuguccggcuacugcucuaacauuaagcugcaaguggucaaagacgcucaggcccugcuccacgggcuggauuuuagcgagguuuccaaugugcagcgccuuaugagaaaggaacggcgcgacgauaacgaccugaaaagacuccgggaucugaaucaggcggugaacaaucuggucgagcucaagucuacacaacaaaagagcauccugcgcgugggaacgcuuaccuccgacgaucugcucauucuggcugccgaccuugaaaaacuuaagagcaaaguuacaagaaccgagcggccccucucugccggcguguauauggggaaccuguccagccagcagcuggaucagcgcagagcucuccuggacaugaucggaaugucuggcuccaaucagggggcccgggcuggacgcgauggcgucgugagaguuugggacgugaagaacgccgagcuucugaauaaccaguucggcacaaugccuagccucacccuggcgugucuuacaaaacaggggcaagucgaucugaaugacgccgugcaggcucucaccgaccugggacugauuuacacggccaaguauccgaacaccucugaucucgaccggcugacacagucccaucccauccuuaauaugaucgauaccaagaaaagcucccugaacauuucuggcuacaauuuuagccucggggcugccgugaaggcgggagccugcaugcuggacggcgggaacaugcuugaaacaaucaaagucuccccucaaaccauggauggcauucucaagagcauccugaaaguuaagaaagcucugggaauguucauuucugacgcccccggcgagcgcaacccuuaugaaaauauccuguacaagauuugucucuccggggauggauggcccuauaucgcuagcagaacgucuaucacaggccgggccugggagaacaccgugguggaccuggagagcgaugggaagccucagaaagccggauccaauggcucuaacaagagccuucaguccgcuggguuuacagcgggacugaccuacagccagcucaugacccugaaagacgccaugcugcaacuugauccgaaugcuaagacauggauggacauugaaggcagacccgaggacccugucgaaaucgcccucuaccagcccucuuccggcugcuauauucacuucuuucgcgagccuacggaucugaaacaguucaagcaggacgccaaguacagccaugggaucgaugugaccgaccuguuugcugcccaacccggacucacaucugcgguuauugaugcucugccgcggaacauggugaucaccugucagggcuccgacgauaucagaaaacuuuucgaaagccaggggcgcaaggacauuaaacugaucgauauugcccucuccaagacagacucucggaaauaugagaaugccgucugggaucaguacaaggaccugugccacaugcauaccggaaucgugguugagaagaaaaagagaggcgggaaagaagagauuacgccucacugugcucugauggauugcaucauguuugacgccgcugugagcggcggacuuaacacauccguccuccgcgccgugcugccccgggacauggucuucagaaccucuaccccucgcgugguucugugaggacuaguaauaaggaaacuguaugaaugucugugggcaggaagugaagagauccuucuguaaagguuuuuggaauuaugucugcugaauaauaaacuuuuuugaaauaauaaaucugguagaaaaaugagaucucaaaggcucuuuucagagccaccaaaaaaaaaaaaaaaaaaaaaaaaaaaaaaaaaaaaaaaaaaaaaaaaaaaaaaaaaaaaaaaaaaaaaaaaaaaaaaaaaaaaaaaaaaaaaaaaaaaaa

SEQ ID NO: 21638 - RNA, 2097 nt, Artificial Sequence
  mRNA product Design b-4 (hSL-A100) comprising derived and/or modified sequence from LASV(LM776-SLE-2012;Clade IV)__AIT17825__SP-IgE_NP(2-569) (opt5)
aggagagucccgcagucggcguccagcggcucugcuuguucgugugugugucguugcaggccuuauucaagcuuaccauggacuggaccuggauccuguuccucguggccgcugccacaagaguccacagcagcgccuccaaggagaucaaaucuuuccuguggacccagagccucagacgggaacuguccucuuacugcagcaacauuaaacuucaaguggucaaggacgcucaggcccugcuccacggccuggauuuuuccgagguuucuaaugugcagcgccuuaugagaaaggaacggcgcgacgauaacgaccugaaaagacuccgggaucugaaucaggcggugaacaaucuggucgagcucaagagcacacaacagaaguccauccugcgcguggggacgcuuaccagcgacgaucugcucauucuggcugccgaccuugaaaaacugaagucuaaaguuacaagaaccgagcggccccucuccgccggaguguauaugggcaaccugagcucucagcagcuggaucaacgcagagcucuccuguccaugaucgggaugagcggaucuaaucagggcgcccgggcugggcgcgacggagucgugagaguuugggaugugaagaacgccgagcuucugaauaaccaguucggcacaaugccuucccucacccuggcgugucuuacaaaacagggccaagucgaccugaaugaugccgugcaggcucucaccgaccuggggcugauuuacacggccaaguauccgaacaccagcgaccucgaucggcugacacagucccaucccauccuuaauaugaucgacaccaagaaaucuagccugaacauuuccggauacaauuuuagccucggcgcugccgugaaggcgggggccugcaugcuggauggaggcaacaugcuugaaacaaucaaagucucuccucaaaccauggacgggauucugaaguccauccucaaaguuaagaaagcucugggaauguucauuagcgauacgcccggcgagcgcaacccuuaugaaaauauccuguacaagauuugucucucuggcgacggguggcccuauaucgccagcagaacauccaucaccggacgggcuugggagaacacagugguggaucuggagucugacggcaagccucagaaagccgggagcaauaacuccaauaagagccuucagucugccggauuuaccgcuggccugaccuacucccagcucaugacacugaaagaugcgaugcugcaacuugacccgaacgccaagacguggauggauauugaagggagacccgaggacccugucgaaguggcucucuaccagcccagcucuggaugcuauauccacuucuuucgcgagccuaccgaccugaaacaguucaagcaggaugccaaguacucccauggcauugacguuacagaucuguuugccgcucaacccggccucaccagcgccgugaucgacgcgcugccgcggaauauggucauuacaugucagggguccgaugacaucagaaaacuucuggaaucucagggacgcaaggauaucaaacucauugacaucgcucugagcaagaccgauucccggaaauaugagaacgccgugugggaccaguacaaggaucugugccacaugcauacgggcguuguggucgagaagaaaaagagagggggaaaagaagagauuacaccucacugugcccuuauggacugcaucauguucgaugcugccgugucuggcgggcucaauaccagcguccugcgcgcugugcugccccgggacaugguuuuuagaaccuccacaccucgcgugguccucugaggacuaguaauaaggaaacuguaugaaugucugugggcaggaagugaagagauccuucuguaaagguuuuuggaauuaugucugcugaauaauaaacuuuuuugaaauaauaaaucugguagaaaaaugagaucucaaaggcucuuuucagagccaccaaaaaaaaaaaaaaaaaaaaaaaaaaaaaaaaaaaaaaaaaaaaaaaaaaaaaaaaaaaaaaaaaaaaaaaaaaaaaaaaaaaaaaaaaaaaaaaaaaaaa

SEQ ID NO: 21639 - RNA, 2097 nt, Artificial Sequence
  mRNA product Design b-4 (hSL-A100) comprising derived and/or modified sequence from LASV(Mad39;Clade IV)__ANH09723__SP-IgE_NP(2-569) (opt5)
aggagagucccgcagucggcguccagcggcucugcuuguucgugugugugucguugcaggccuuauucaagcuuaccauggacuggaccuggauccuguuccucguggccgcugccacaagaguccacagcagcgccuccaaggagaucaaaucuuuccuguggacccagagccucagacgggaacuguccggcuacugcucuaacauuaagcugcaaguggucaaagacgcucaggcccugcuccacgggcuggauuuuagcgagguuuccaaugugcagcgccuuaugagaaagcagcggcgcgacgauaacgaccugaaaagacuccgggaucugaaucaagcggugaacaaucuggucgaacucaagucuacacagcaaaagagcgugcugcgcguuggaacgcuuaccuccgacgaucugcucacacuggcugccgaccuugagaaacuuaagagcaaagugaccagaacagaacggccccucaccgccggcgucuauauggggaaccugucuucccagcagcuggaucagcgcagagcucuccugaauaugaucggaaugagcggcgggaaccagggagcccggacaggccgcgacggcgugguuagagugugggaugucaagaaugcugagcuucugaacaaucaguucgggaccaugccuucucucacgcuggccugucuuaccaaacaaggacagguggaccugaacgaugugguccaggcgcucacagaccugggccugauuuacaccgccaaguauccgaauacauccgaccucgaucggcugacccaaagccaucccauccuuaacaugauugacacgaauaagucuucccugaacaucagcggguacaacuuuucccucggagcugccguuaaagcuggcgccugcaugcuggaugggggaaauaugcuugagacaaucaaggugucuccucagaccauggacggcauucugaaaagcauccucaaggugaaaaagucccugggcauguucauuagcgauacacccggggaacgcaacccuuaugagaauauccuguacaaaauuugucucucuggagacggcuggcccuauaucgcguccagaaccagcauuaccgggcgggccugggaaaacacagucguggaucuggagucuggaggcaagccucagaaggcugggagcaauaacuccaauaaaucucuucagagcgccggauuugcugccggccugacguacucccaacucaugacccugaaggacgccaugcugcagcuugauccgaacgcuaaaacauggauggacaucgagggcagacccgaagauccuguugagaucgcgcucuaccagcccauuagcgggugcuauauccacuucuuucgcgaaccuaccgaccugaagcaguucaaacaagacgccaaguacucucauggaauugaugugacagaccuguuugcugcccagcccggccucaccuccgccgucaucgaggcucugccgcggaauauggugauuacgugucaggggagcgaugacaucagaaaacuuuucgaaucucagggacgcaaggauaucaagcugauugacaucgcccucuccaaaacagauagccggaaguaugagaacgcgguuugggaccaauacaaagaucugugccacaugcauaccggcguggucguggagaagaagaaaaagggcgggaaagaagagauuaccccucacugugcucugauggacugcaucauguuugaugccgccgucuccggaggccuuaauacacucgugcugagagcuguucugccccgcgacaugguguuccggaccucuacaccuaaggucgugcucugaggacuaguaauaaggaaacuguaugaaugucugugggcaggaagugaagagauccuucuguaaagguuuuuggaauuaugucugcugaauaauaaacuuuuuugaaauaauaaaucugguagaaaaaugagaucucaaaggcucuuuucagagccaccaaaaaaaaaaaaaaaaaaaaaaaaaaaaaaaaaaaaaaaaaaaaaaaaaaaaaaaaaaaaaaaaaaaaaaaaaaaaaaaaaaaaaaaaaaaaaaaaaaaaa

SEQ ID NO: 21640 - RNA, 2097 nt, Artificial Sequence
  mRNA product Design b-4 (hSL-A100) comprising derived and/or modified sequence from LASV(Z0947-SLE-2011;Clade IV)__AIT17841__SP-IgE_NP(2-569) (opt5)
aggagagucccgcagucggcguccagcggcucugcuuguucgugugugugucguugcaggccuuauucaagcuuaccauggacuggaccuggauccuguuccucguggccgcugccacaagaguccacagcagcgccuccaaggagaucaaaucuuuccuguggacccagagccucagacgggaacuguccggcuacugcucuaacauuaagcugcaaguggucaaagacgcucaggcccugcuccacgggcuggauuuuagcgagguuuccaaugugcagcgccuuaugagaaaggaacggcgcgacgauaacgaccugaaaagacuccgggaucugaaucaggcggugaacaaucuggucgagcucaagucuacacaacaaaagagcauccugcgcgugggaacgcuuaccuccgacgaucugcucauucuggcugccgaccuugaaaaacuuaagagcaaaguuacaagaaccgagcggccccucucugccggcguguauauggggaaccuguccagccagcagcuggaucagcgcagagcucuccugaauaugaucggaaugucuggcuccaaccagggggcccggacaggacgcgacggcgucgugagaguuugggaugugaagaaugcugagcuucugaacaaucaguucggcaccaugccuagccucacacuggccugucuuaccaaacaggggcaagucgaccugaacgaugcggugcaggcccucacggaccugggacugauuuacaccgcuaaguauccgaauacaucugaccucgaucggcugacccagucccaucccauccuuaacaugaucgacacaaagaaaagcucccugaauauuucuggcuacaacuuuagccucggggccgcugugaaggccggagcgugcaugcuggauggcgggaacaugcuugaaaccaucaaagucuccccucaaacgauggacggcauucucaagagcauccugaaaguuaagaaagcccugggaauguucauuucugaugcucccggcgagcgcaauccuuaugaaaacauccuguacaagauuugucucuccggggacggauggcccuauaucgccagcagaacaucuaucaccggccgggcuugggagaauacagugguggaucuggagagcgacgggaagccucagaaagccggauccaacggcucuaauaagagccuucaguccgccggguuuaccgcuggacugaccuacagccagcucaugacacugaaagaugcgaugcugcaacuugacccgaacgccaagacguggauggauauugaaggcagacccgaggacccugucgaaaucgcucucuaccagcccucuuccggcugcuauauucacuucuuucgcgagccuaccgaccugaaacaguucaagcaggaugccaaguacagccaugggaucgacgugacagaucuguuugccgcucaacccggacucaccucugccguuauugacgcgcugccgcggaauauggugaucacaugucagggcuccgaugacaucagaaaacuuuucgaaagccaggggcgcaaggauauuaaacugaucgacauugcucucuccaagaccgauucucggaaauaugagaacgccgucugggaccaguacaaggaucugugccacaugcauacgggaaucgugguugagaagaaaaagagaggcgggaaagaagagauuacaccucacugugcccugauggacugcaucauguuugaugcugccgugagcggcggacuuaauaccuccguccuccgcgcugugcugccccgggacauggucuucagaaccucuacaccucgcgugguucugugaggacuaguaauaaggaaacuguaugaaugucugugggcaggaagugaagagauccuucuguaaagguuuuuggaauuaugucugcugaauaauaaacuuuuuugaaauaauaaaucugguagaaaaaugagaucucaaaggcucuuuucagagccaccaaaaaaaaaaaaaaaaaaaaaaaaaaaaaaaaaaaaaaaaaaaaaaaaaaaaaaaaaaaaaaaaaaaaaaaaaaaaaaaaaaaaaaaaaaaaaaaaaaaaa

SEQ ID NO: 21641 - RNA, 2073 nt, Artificial Sequence
  mRNA product Design b-4 (A100) comprising derived and/or modified sequence from LASV(Josiah;Clade IV)__NP_694869__SP-IgE_NP(2-569) (opt1)
aggagagucccgcagucggcguccagcggcucugcuuguucgugugugugucguugcaggccuuauucaagcuuaccauggacuggaccuggauccuguuccucguggccgccgcgacccgcguccacagcagcgccuccaaggagaucaagagcuuccuguggacccagucccuccgccgggagcugagcggcuacugcuccaacaucaagcuccagguggucaaggacgcccaggcgcugcugcacgggcuggacuucagcgagguguccaacgugcagcgccucaugcggaaggagcgccgggacgacaacgaccugaagcgccugcgggaccucaaccaggccgucaacaaccugguggagcucaagagcacccagcagaaguccauccugcgcgugggcacccugaccagcgacgaccugcucauccuggccgccgaccuggagaagcucaaguccaaggucauccggaccgagcgcccccugagcgccgggguguacaugggcaaccuguccagccagcagcucgaccagcggcgcgcgcugcugaacaugaucgggauguccggcggcaaccagggggcccgggccggccgcgacggggugguccgggugugggacgugaagaacgccgagcuccugaacaaccaguucggcaccaugccgagccugacgcucgcgugccugaccaagcaggggcaggucgaccugaacgacgccgugcaggcccucaccgaccugggccugaucuacaccgccaaguaccccaacacguccgaccucgaccgccugacccagagccaccccauccugaacaugaucgacaccaagaaguccagccucaacaucagcggcuacaacuucucccugggggccgcggugaaggccggcgccugcaugcuggacgggggcaacaugcucgagaccaucaaggucagcccccagacgauggacggcauccugaaguccauccugaaggugaagaaggcccucgggauguucaucagcgacaccccgggcgagcggaaccccuacgagaacauccuguacaagaucugccuguccggggacggcuggcccuacaucgccagccgcaccuccaucaccgggcgggcgugggagaacacgguggucgaccucgagagcgacggcaagccccagaaggccgacuccaacaacagcuccaagagccugcaguccgccggcuucaccgccgggcugaccuacagccagcucaugacccugaaggacgccaugcugcagcuggacccgaacgcgaagacguggauggacaucgagggccgccccgaggaccccguggagaucgcccucuaccagcccuccagcgggugcuacauccacuucuuccgggagccgaccgaccugaagcaguucaagcaggacgccaaguacucccacggcaucgacgugaccgaccuguucgccacccagcccgggcucacgagcgccgucaucgacgcgcugccccgcaacauggugaucacgugccagggcuccgacgacauccgcaagcugcucgagagccagggccggaaggacaucaagcugaucgacaucgcccugagcaagaccgacucccgcaaguacgagaacgccgugugggaccaguacaaggaccucugccacaugcacaccggggucguggucgagaagaagaagcggggcgggaaggaggagaucaccccgcacugcgcccugauggacugcaucauguucgacgcggccgugagcggcgggcugaacaccuccgugcuccgcgccguccugccccgggacaugguguuccgcaccagcacgccccgggugguccugugaggacuaguaauaaggaaacuguaugaaugucugugggcaggaagugaagagauccuucuguaaagguuuuuggaauuaugucugcugaauaauaaacuuuuuugaaauaauaaaucugguagaaaaaugagaucuaaaaaaaaaaaaaaaaaaaaaaaaaaaaaaaaaaaaaaaaaaaaaaaaaaaaaaaaaaaaaaaaaaaaaaaaaaaaaaaaaaaaaaaaaaaaaaaaaaaa

SEQ ID NO: 21642 - RNA, 2073 nt, Artificial Sequence
  mRNA product Design b-4 (A100) comprising derived and/or modified sequence from LASV(LP;Clade I)__AAF86702__SP-IgE_NP(2-569) (opt1)
aggagagucccgcagucggcguccagcggcucugcuuguucgugugugugucguugcaggccuuauucaagcuuaccauggacuggaccuggauccuguuccucguggccgccgcgacccgcguccacagcagcaacuccaaggagaucaagagcuuccuguggacccagucccuccgccgggagcugagcggcuacugcuccaacaucaagcuccagguggucaaggacgcccaggcccugcugcacgggcuggacuucagcgagguguccaacgugcagcgccucaugcggaagcagaagcgcgacgacgcggaccugaagcggcugcgcgaccucaaccaggccgucaacaaccugguggagcucaagagcacccagcagaagaacgugcugcgggucggcacgcuguccagcgacgaccugaucacccucgccgccgaccuggagaagcugaaguccaaggugauccgcaccgagcggccccucagcuccgggguguacaugggcaaccugagcucccagcagcuggaccagcgccgggcccuccugagcaugaucgggauguccggcggcccgcaggggaaccgcaccggcggggacggcgucgugcgggugugggacgucaagaacgcggagcugcucaacaaccaguucgggacgaugcccagccugacccuggccugccucaccaagcagggccagguggaccugaacgacgccgugcaggcccugaccgaccucggccugaucuacacggcgaaguaccccaacuccagcgaccuggacaugcucacccagagccaccccauccuggggauggucgacaccaagaaguccagccugaacaucuccggcuacaacuucagccucggggccgccgugaaggccggcgccugcaugcuggacggcgggaacaugcuggagaccaucaagguguccccgcagacgauggacggcauccucaagagcauccugaaggucaagcgcucccuggggauguucaucagcgacacccccggcgagcggaaccccuacgagaacauccucuacaagaucugccuguccggggagggcuggcccuacaucgcgagccgcaccuccaucaccggccgggccugggagaacacgcugguggaccucgagagcgacaacaagccgcccaagcugaacuccgccgggagcaacaagucccugcaggccgccggccucaacgcggggcugaccuacagccagcugaugacccugaaggacugcaugcuccagcuggaccccuccagcaagaccuggaucgacaucgagggccgccccgaggacccgguggagaucgcccuguuccagcccuccagcgggugcuacauccacuucuuccgggagcccacggaccucaagcaguucaagcaggacgccaaguacagccacggcaucgacgucaccgaccuguucuccacccagcccggccugaccagcgccgugaucgaggcccucccgcgcaacauggugcugacgugccagggguccgacgacaucaagaagcugcucgagagccagggccggcgcgacaucaagcugaucgacaucucccugagcaaggcggacucccgcaaguucgagaacgccgucugggaccaguacaaggaccucugccacaugcacaccgggguggucguggagaagaagaagcggggcgggaaggaggagaucacgccccacugcgcccugcuggacugcaucauguucgacgccgccaccaccggcagccucaacaucaccacccugcgcgcggugcugccccgggacauggucuuccgcaccuccacgcccaagguggugcucugaggacuaguaauaaggaaacuguaugaaugucugugggcaggaagugaagagauccuucuguaaagguuuuuggaauuaugucugcugaauaauaaacuuuuuugaaauaauaaaucugguagaaaaaugagaucuaaaaaaaaaaaaaaaaaaaaaaaaaaaaaaaaaaaaaaaaaaaaaaaaaaaaaaaaaaaaaaaaaaaaaaaaaaaaaaaaaaaaaaaaaaaaaaaaaaaa

SEQ ID NO: 21643 - RNA, 2073 nt, Artificial Sequence
  mRNA product Design b-4 (A100) comprising derived and/or modified sequence from LASV(803213;Clade II)__AAF86704__SP-IgE_NP(2-569) (opt1)
aggagagucccgcagucggcguccagcggcucugcuuguucgugugugugucguugcaggccuuauucaagcuuaccauggacuggaccuggauccuguuccucguggccgccgcgacccgcguccacagcagcgccuccaaggaggugaaguccuuccuguggacccagagccuccgccgggagcugagcggcuacugcuccaacaucaagcugcaggucgugaaggacgcccaggcgcuccugcacgggcuggacuucagcgaggugaacaacguccagcgccucaugcggaagcagaagcgcgacgacggcgaccugaagcggcugcgcgaccucaaccaggccgugaacaaccugguggagcugaaguccacccagcagaaguccauccuccgggucgggacgcugaccagcgacgaccugcucacccuggccgccgaccuggagaagcucaagagcaaggugauccgcaccgagcggccccuguccagcggcguguacauggggaaccuguccacgcagcagcucgagcagcgccgggcccugcugaacaugaucggcauggucggcggggcgcagggcacccagccggggcgcgacggcguggugcgggucugggacgugaagaaccccgaccuccugaacaaccaguucgggaccaugcccagccugacccucgccugccugacgaagcagggccagguggaccugaacgacgccguccucgcccugaccgaccugggccucaucuacaccgcgaaguaccccaacuccagcgaccuggaccgccugucccagagccacccgauccucaacaugguggacaccaagaaguccagccugaacaucagcggguacaacuucucccugggcgccgccgugaaggccggggccugcaugcucgacggcggcaacaugcuggagacgaucaaggucacgccccagaccauggacgggauccucaagagcauccugaaggugaagcggucccugggcauguucgugagcgacacccccggggagcgcaaccccuacgagaacauccuguacaagaucugccucuccggcgacggguggccguacaucgcgagccggaccuccaucgucggccgcgccugggagaacaccaccguggaccuggagagcgacggcaagccccagaagguggggaccgccggcuccaacaagagccugcaguccgccggguuccccacgggccucaccuacagccagcugaugacccugaaggacuccaugaugcagcuggaccccagcgccaagaccuggaucgacaucgaggggcggccggaggaccccgucgagaucgcgcucuaccagcccauguccggcugcuacauccacuucuuccgcgagcccacggaccugaagcaguucaagcaggacgccaaguacagccacggcaucgacguggccgaccuguucccggcccagcccgggcucaccuccgccgucaucgaggcgcugccccggaacauggugcugaccugccagggcagcgacgacaucaagaagcuccuggacucccaggggcgccgcgacaucaagcugaucgacaucagccucagcaagguggacucccggaaguucgagaacgccgucugggaccagugcaaggaccugugccacaugcacaccggcgugguggucgagaagaagaagcgcgggggcaaggaggagaucacgccccacugcgcccugauggacugcaucauguucgacgccgccgugagcggcgggcucaacaucccggugcugcgggcgguccugccccgcgacaugguguuccggaccuccagccccaaggugguccucugaggacuaguaauaaggaaacuguaugaaugucugugggcaggaagugaagagauccuucuguaaagguuuuuggaauuaugucugcugaauaauaaacuuuuuugaaauaauaaaucugguagaaaaaugagaucuaaaaaaaaaaaaaaaaaaaaaaaaaaaaaaaaaaaaaaaaaaaaaaaaaaaaaaaaaaaaaaaaaaaaaaaaaaaaaaaaaaaaaaaaaaaaaaaaaaaa

SEQ ID NO: 21644 - RNA, 2076 nt, Artificial Sequence
  mRNA product Design b-4 (A100) comprising derived and/or modified sequence from LASV(GA391;Clade III)__CAA36646__SP-IgE_NP(2-570) (opt1)
aggagagucccgcagucggcguccagcggcucugcuuguucgugugugugucguugcaggccuuauucaagcuuaccauggacuggaccuggauccuguuccucguggccgccgcgacccgcguccacagcagcgccuccaaggaggugcgcagcuuccuguggacccagucccuccggcgcgagcugagcggcuacugcuccaacaucaagcugcaggucgugaaggacgcccaggcgcuccugcacgggcuggacuucagcgagguguccaacguccagcggcucaugcgcaagcagaagcgggacgacggcgaccugaagcgccugcgggaccucaaccaggccgugaacaaccugguggagcucaagagcacccagcagaaguccguccugcgcguggggacccugagcuccgacgaccugcucauccuggccgccgaccuggagaagcucaagagcaaggugacccggaccgagcgcccccuguccagcggcgucuacauggggaaccuguccagccagcagcucgaccagcggcgcgcccugcugaacaugaucggcaugaccggcguguccgggggcgggaagggcgcgagcgacgggaucgugcgggucugggacgugaagaacgccgagcuccugaacaaccaguucggcacgaugccgucccugacccucgccugccugaccaagcagggccagguggaccugaacgacgccguccaggcgcucaccgaccuggggcugaucuacacggccaaguaccccaacagcagcgaccucgaccgccugucccagagccaccccauccugaacaugaucgacaccaagaaguccagccucaacaucuccggcuacaacuucagccugggggccgccgugaaggccggcgcgugcaugcuggacggcgggaacaugcucgagaccaucaaggugagcccccagaccauggacggcauccucaaguccauccugaaggucaagaagucccuggggauguucgugagcgacacgccgggcgagcggaaccccuacgagaacauccuguacaagaucugccuguccggggacggcuggcccuacaucgccagccgcaccuccaucgugggccgggccugggagaacaccgucguggaccucgagcaggacaacaagccccagaagaucgggaacggcgggagcaacaagucccugcagagcgccggcuucgccgcggggcugaccuacucccagcucaugacgcugaaggacuucaagugcuucaaccugaucccgaacgccaagaccuggauggacaucgagggccgccccgaggaccccguggagaucgcccuguaccagcccagcuccggcugcuacguccacuucuuccgggagccgaccgaccucaagcaguucaagcaggacgccaaguacagccacgggaucgacgugaccgaccuguucgccgcgcagcccggccugacgagcgccgucaucgaggcccucccccgcaacauggugaucacgugccagggguccgaggacauccggaagcugcuggagagccagggccgccgcgacaucaagcucaucgacaucacccuguccaaggccgacagccggaaguucgagaacgccgugugggaccaguucaaggaccugugccacaugcacaccggggucgugguggagaagaagaagcgcggcggcaaggaggagaucacgccccacugcgcgcucauggacugcaucauguucgacgccgccgucuccgggggccuggacgccaaggugcugcgggugguccucccgcgcgacaugguguuccggaccagcacccccaaggugguccugugaggacuaguaauaaggaaacuguaugaaugucugugggcaggaagugaagagauccuucuguaaagguuuuuggaauuaugucugcugaauaauaaacuuuuuugaaauaauaaaucugguagaaaaaugagaucuaaaaaaaaaaaaaaaaaaaaaaaaaaaaaaaaaaaaaaaaaaaaaaaaaaaaaaaaaaaaaaaaaaaaaaaaaaaaaaaaaaaaaaaaaaaaaaaaaaaa

SEQ ID NO: 21645 - RNA, 2073 nt, Artificial Sequence
  mRNA product Design b-4 (A100) comprising derived and/or modified sequence from LASV(AV;Clade V)__CCA30315__SP-IgE_NP(2-569) (opt1)
aggagagucccgcagucggcguccagcggcucugcuuguucgugugugugucguugcaggccuuauucaagcuuaccauggacuggaccuggauccuguuccucguggccgccgcgacccgcguccacagcagcgccuccaaggaggugaaguccuuccuguggacccagagccuccgccgggagcugagcggcuacugcuccaacaucaagcugcaggucgugaaggacgcccaggcgcuccugcacgggcuggacuucagcgagguguccaacguccagcgccucaugcggaagcagcgccgggacgacagcgaccugaagcgccugcgggaccucaaccaggccgugaacaaccugguggagcugaaguccacccagcagaaguccguccuccgcgugggcacgcugagcagcgacgaccugcucacccuggccgccgaccuggagaagcucaaguccaaggugacccggaccgagcgcccccugagcuccggggucuacaugggcaaccugagcucccagcagcucgaccagcggcgcgcccugcugaaccucaucgggaugacgaacggcagccagggcucccaggcggggcgggacggcguggugcgcgucugggacgugaagaacgccgagcugcugaacaaccaguucgggaccaugccgagccucacccuggccugccugaccaagcagggccagguggaccucaacgacgucgugcaggcccugacggaccuggggcucaucuacaccgcgaaguaccccaacaccagcgaccuggaccggcugacccagucccaccccauccucaacaugaucgacacgaagaaguccagccugaacaucagcggcuacaacuucucccugggcgccgccgugaaggccggggccugcaugcucgacggcgggaacaugcuggagaccaucaaggucagcccccaguccauggacggcauccucaagagcauccugaaggugaagcgcgcgcugggcauguucguguccgacaccccgggggagcggaaccccuacgagaacauccuguacaagaucugccucagcggcgacggguggcccuacaucgccucccgcaccagcaucgucggccgggccugggagaacacggugguggaccuggagaccgacgggaagccccagaagaucggcuccggcaacagcaacaagucccugcagagcgccggguucuccgccggccucaccuacagccagcugaugacccugaaggacgcgaugcugcagcucgacccgaacgccaagacguggauggacaucgaggggcgccccgaggaccccgucgagguggcccuguaccagcccaucuccggcugcuacauccacuucuuccgggagccgaccgaccugaagcaguucaagcaggacgccaaguacagccacgggaucgacaucgccgaccucuucgcggcccagcccggccugaccagcgccgucaucgaggcccugccccgcaacauggugaucacgugccagggcuccgaggacaucaagaagcuccuggagagccaggggcgcaaggacaucaagcugaucgacaucgcccucuccaagaucgacagccggaaguucgagaacgcggugugggaccaguacaaggaccugugccacaugcacaccggcgucgugguggagaagaagaagcgcgggggcaaggaggagaucaccccgcacugcgcccugauggacugcaucauguucgacgccgccgucuccgggggccucaacacccuggugcugcgggcggugcucccccgcgacauggucuuccggaccagcacgccccgcguggugcugugaggacuaguaauaaggaaacuguaugaaugucugugggcaggaagugaagagauccuucuguaaagguuuuuggaauuaugucugcugaauaauaaacuuuuuugaaauaauaaaucugguagaaaaaugagaucuaaaaaaaaaaaaaaaaaaaaaaaaaaaaaaaaaaaaaaaaaaaaaaaaaaaaaaaaaaaaaaaaaaaaaaaaaaaaaaaaaaaaaaaaaaaaaaaaaaaa

SEQ ID NO: 21646 - RNA, 2073 nt, Artificial Sequence
  mRNA product Design b-4 (A100) comprising derived and/or modified sequence from LASV(Togo/2016/7082;Clade VI)__AMR44578__SP-IgE_NP(2-569) (opt1)
aggagagucccgcagucggcguccagcggcucugcuuguucgugugugugucguugcaggccuuauucaagcuuaccauggacuggaccuggauccuguuccucguggccgccgcgacccgcguccacagcagcaacuccaaggaggugaaguccuuccuguggacccagagccuccgccgggagcugagcggcuacugcuccaacaucaagcugcaggucgugaaggacgcccaggcccuccugcacgggcuggacuucagcgagguguccaacguccagcgccucaugcggaagcagaagcgcgacgacggcgaccugaagcggcugcgcgaccucaaccaggcggugaacaaccugguggagcucaagagcguccagcagaaguccauccugcggguggggacccugaccagcgacgaccugcucacccuggccgccgaccuggagaagcucaaguccaaggugacccgcaccgagcggccccugagcuccggcgucuacauggggaaccugagcucccagcagcucgaccagcgccgggcccugcugagcaugaucggcauguccggcgggaaccagaacagccagccgaagggcgacgggguggugcgcgucugggacgugaagaacgccgaccuccugaacaaccaguucggcacgaugcccucccugacccucgcgugccugaccaagcagggccagguggaccugaacgacgccguccaggcccucaccgaccuggggcugaucuacacggccaaguaccccaacagcagcgaccucgaccggcugucccagagccaccccauccugaacaugaucgacaccaagaaguccagccucaacaucuccggcuacaacuucagccugggggcggccaucaagaccggcgccugcaugcuggacgggggcaacaugcucgagaccaucaaggugacgccgcagaccauggacggcauccugaaguccauccugaaggugaagcgcagccucgggauguucaucuccgacacccccggcgagcggaaccccuacgagaacauccuguacaagaucugccugagcggggacggcuggcccuacaucgccucccgcaccgccaucaucgggcgggcgugggagaacacggucguggaccucgagagcgacuccaagccgcagaagaucggcagcaacggcuccaacaagagccugcaguccgccggguucgcccccggccugaccuacagccagcucaugacccugaaggacuccaugcugcagcuggaccccaacgccaagaccuggaucgacaucgaggggcgccccgaggacccgguggaggucgcccucuuccagcccaucagcggcugcuacauccacuucuuccgggagcccacggaccugaagcaguucaagcaggacgcgaaguacagccacgggaucgacgugaccgaccuguucgccgcccagcccggccucaccuccgccgugaucgaggcccugccgcgcaacaugguccugaccugccagggcagcgacgacaucaagaagcuccuggacucccaggggcggcgcgacaucaagcugaucgacgugagccucaacaagaucgacucccgcaaguucgagaacgcggucugggaccaguacaaggaccugugccacaugcacacgggcgugguggucgagaagaagaagaagggcgggaaggaggagaucacgccccacugcgcccugcucgacugcaucauguucgacgccgccgugagcgggggccugaacgccaccgugcugcgggcgguccucccccgcgacaugguguuccggaccuccagccccaaggugguccugugaggacuaguaauaaggaaacuguaugaaugucugugggcaggaagugaagagauccuucuguaaagguuuuuggaauuaugucugcugaauaauaaacuuuuuugaaauaauaaaucugguagaaaaaugagaucuaaaaaaaaaaaaaaaaaaaaaaaaaaaaaaaaaaaaaaaaaaaaaaaaaaaaaaaaaaaaaaaaaaaaaaaaaaaaaaaaaaaaaaaaaaaaaaaaaaaa

SEQ ID NO: 21647 - RNA, 2073 nt, Artificial Sequence
  mRNA product Design b-4 (A100) comprising derived and/or modified sequence from LASV(KAK-428;Clade n.d. (VII))__ANH09741__SP-IgE_NP(2-569) (opt1)
aggagagucccgcagucggcguccagcggcucugcuuguucgugugugugucguugcaggccuuauucaagcuuaccauggacuggaccuggauccuguuccucguggccgccgcgacccgcguccacagcagcaacuccaaggaggugaaguccuuccuguggacccagagccuccgccgggagcugagcggcuacugcaccaacaucaagcugcaggucgugaaggacgcccaggcccuccugcacgggcuggacuucuccgaggugagcaacguccagcgccucaugcggaagcagaagcgcgacgacaacgaccugaagcggcugcgcgaccucaaccaggcggugaacaaccugguggagcugaaguccguccagcagaaguccgugcucaaggugggcacgcugaacagcgacgaccugcucacccuggccgccgaccuggagaagcucaagagcaaggucgugcggaccgagcgcccccuguccagcgggguguacaugggcaaccuguccagccagcagcucgaccagcggcgcgcccugcugaacaugaucgggauggccggcggcucccaggggaaccagccgagccgggacggcgucgugcgcgugugggacgucaagaacgcggaccuccugaacaaccaguucgggaccaugcccucccugacgcucgccugccugaccaagcagggccagguggaccugaacgacgugguccucgcccugaccgaccuggggcucaucuacaccgccaaguaccccaacagcuccgaccuggaccggcugagccagaaccaccccgugcucaacaugaucgacgugaacaagagcucccugaacaucagcggcuacaacuucucccugggcgcggccgucaaggccggggccugcaugcucgacggcgggaacaugcuggagacgaucaagaucagcccgcagaccguggacggcauccugaaguccauccucaaggugaagcgcgcccugggcauguucgucagcgacacccccggggagcggaaccccuacgagaacauccuguacaaggugugccucuccggcaacggguggcccuacaucgcgagccgcaccuccaucgucggccgggccugggagaacacggugguggaccuggagagcaacaagaaccagccgaaggucgggaacaacggcuccaacaagaugcugcagagcuccggcuucgccaccgggcucaccuacagccagcugaugacccugcgcgacuccaugcugcagcucgaccccacggccaagaccuggaucgacaucgagggccggcccgaggaccccguggagcuggcccuguuccagccgagcuccgggugcuacauccacuucuuccgcgagcccaccgaccucaagcaguucaagcaggacgcgaaguacagccacggcaucgacgugaacgaccuguucuccgcccagcccgggcugaccagcgccguccucgaggcccugccccggaacauggugcugacgugccagggcagcgacgacauccgcaagcuccuggacucccaggaccgcaaggacaucaagcugaucgacaucagccucuccaaggccgacgcgcggaaguucgagaacgacgugugggaccaguucaaggaccugugccacaugcacaccggcaucgucguggagaagaagaagaagggcgggaagcaggagaugaccccgcacugcgcccugcucgacugcaucauguucgacgccgccgugagcgggggccugaacguccccacccugcgcgccgugcuccccacggacaugguguuccggaccaucaccaccaaggucgugcugugaggacuaguaauaaggaaacuguaugaaugucugugggcaggaagugaagagauccuucuguaaagguuuuuggaauuaugucugcugaauaauaaacuuuuuugaaauaauaaaucugguagaaaaaugagaucuaaaaaaaaaaaaaaaaaaaaaaaaaaaaaaaaaaaaaaaaaaaaaaaaaaaaaaaaaaaaaaaaaaaaaaaaaaaaaaaaaaaaaaaaaaaaaaaaaaaa

SEQ ID NO: 21648 - RNA, 2073 nt, Artificial Sequence; identical to SEQ ID NO: 21642
  mRNA product Design b-4 (A100) comprising derived and/or modified sequence from LASV(Pinneo-NIG-1969;Clade I)__AIT17837__SP-IgE_NP(2-569) (opt1)

SEQ ID NO: 21649 - RNA, 2073 nt, Artificial Sequence
  mRNA product Design b-4 (A100) comprising derived and/or modified sequence from LASV(ISTH0009-NIG-2011;Clade II)__AIT17405__SP-IgE_NP(2-569) (opt1)
aggagagucccgcagucggcguccagcggcucugcuuguucgugugugugucguugcaggccuuauucaagcuuaccauggacuggaccuggauccuguuccucguggccgccgcgacccgcguccacagcagcguguccaaggaggucaagagcuuccuguggacccagucccuccgccgggagcugagcggcuacugcuccaacaucaagcuccagguggugaaggacgcccaggcccugcugcacgggcuggacuucagcgaggucuccaacgugcagcgccucaugcggaagcagaagcgcgacgacagcgaccugaagcggcugcgcgaccucaaccaggcggugaacaaccuggucgagcugaaguccacccagcagaaguccauccuccgggugggcacccugaccagcgacgaccugcucacccuggccgccgaccuggagaagcucaagagcaaggugauccgcaccgagcggccccuguccagcggggucuacaugggcaaccuguccacgcagcagcucgagcagcgccgggcccugcugaacaugaucgggauggugggcggcgcccaggggacccagccgggccgcgacggggugguccgggugugggacgugaagaaccccgaccuccugaacaaccaguucggcaccaugcccagccugacccucgcgugccugacgaagcaggggcaggucgaccugaacgacgccgugcucgcccugaccgaccugggccucaucuacaccgccaaguaccccaacuccagcgaccuggaccgccugucccagagccacccgauccucaacaugguggacaucaagaaguccagccugaacaucagcggcuacaacuucucccugggggcggccgucaaggccggcgccugcaugcucgacgggggcaacaugcuggagaccaucaaggugacgccccagaccauggacggcauccucaagagcauccugaaggugaagcggucccuggggauguucgucagcgacacccccggcgagcgcaaccccuacgagaacauccuguacaagaucugccucuccggggacggcuggccguacaucgccagccggaccuccaucguggggcgcgcgugggagaacacgaccguggaccuggagagcgacggcaagccccagaaggucggcuccgccgggagcaacaagucccugcagagcgccggcuuccccaccgggcucaccuacucccagcugaugacgcugaaggacagcaugaugcagcuggaccccuccgccaagaccuggaucgacaucgagggccggccggaggaccccguggagaucgcccucuaccagcccaugagcgggugcuacauccacuucuuccgcgagcccaccgaccugaagcaguucaagcaggacgcgaaguacucccacggcaucgacgucgccgaccuguucccggcccagcccggccucaccagcgccgugaucgaggcccugccccggaacauggugcugacgugccaggggagcgacgacaucaagcgccuccuggacucccagggccgccgggacaucaagcugaucgacaucgcgcucagcaaggccgacucccgccgguucgagaacgccgucugggaccagugcaaggaccugugccacaugcacaccggggugguggucgagaagaagaagcgcggcgggaaggaggagaucacgccccacugcgcccugauggacugcaucauguacgacgccgcggugagcggcggccucaacaucccggugcugcgggccguccugccccgcgacaugguguuccggaccuccagccccaaggugguccucugaggacuaguaauaaggaaacuguaugaaugucugugggcaggaagugaagagauccuucuguaaagguuuuuggaauuaugucugcugaauaauaaacuuuuuugaaauaauaaaucugguagaaaaaugagaucuaaaaaaaaaaaaaaaaaaaaaaaaaaaaaaaaaaaaaaaaaaaaaaaaaaaaaaaaaaaaaaaaaaaaaaaaaaaaaaaaaaaaaaaaaaaaaaaaaaaa

SEQ ID NO: 21650 - RNA, 2073 nt, Artificial Sequence
  mRNA product Design b-4 (A100) comprising derived and/or modified sequence from LASV(ISTH2010-NIG-2012;Clade II)__AIT17483__SP-IgE_NP(2-569) (opt1)
aggagagucccgcagucggcguccagcggcucugcuuguucgugugugugucguugcaggccuuauucaagcuuaccauggacuggaccuggauccuguuccucguggccgccgcgacccgcguccacagcagcgccuccaaggaggugaaguccuuccuguggacccagagccuccgccgggagcugagcggcuacugcuccaacaucaagcugcaggucgugaaggacgcccaggcgcuccugcacgggcuggacuucagcgagguguccaacguccagcgccucaugcggaagcagaagcgcgacgacagcgaccugaagcggcugcgcgaccucaaccaggccgugaacaaccugguggagcugaaguccacccagcagaaguccauccuccgggucggcacgcugaccagcgacgaccugcucacccuggccgccgaccuggagaagcucaagagcaaggugauccgcaccgagcggccccuguccagcgggguguacaugggcaaccuguccacgcagcagcucgagcagcgccgggcccugcugaaccucaucgggauggucggcggcgcgcaggggacccagccgggccgcgacgggguggugcgggucugggacgugaagaaccccgaccugcugaacaaccaguucggcaccaugcccagccucacccuggccugccugacgaagcagggccagguggaccucaacgacgccguccuggcccugaccgaccucgggcugaucuacaccgcgaaguaccccaacuccagcgaccuggaccgccucucccagagccacccgauccugaacaugguggacaccaagaaguccagccugaacaucagcggcuucaacuucucccucggggccgccgugaaggccggcgccugcaugcuggacgggggcaacaugcuggagacgaucaaggucacgccccagaccauggacggcauccucaagagcauccugaaggugaagaagucccuggggauguucgugagcgacacccccggcgagcggaaccccuacgagaacauccucuacaagaucugccuguccggggacggcuggccguacaucgcgagccgcaccuccaucgucgggcgggccugggagaacaccaccguggaccuggagagcgacggcaagccccacaaggugggcaccgccggguccaacaagagccuccaguccgccggcuuccccacggggcugaccuacagccagcugaugacccugaaggacuccaugaugcagcucgaccccagcgccaagaccuggaucgacaucgagggccgcccggaggaccccgucgagaucgcgcuguaccagcccauguccgggugcuacauccacuucuuccgggagcccacggaccugaagcaguucaagcaggacgccaaguacagccacggcaucgacguggccgaccucuucccggcccagcccggccugaccuccgccgucaucgaggcgcugccccgcaacauggugcugaccugccaggggagcgacgacaucaagcggcuccuggacagccagggccgccgcgacaucaagcucaucgacaucgcccuguccaaggccgacagccggcgcuucgagaacgccgugugggaccagugcaaggaccugugccacaugcacaccggggucgugguggagaagaagaagcggggcgggaaggaggagaucacgccccacugcgcccucauggacugcaucauguacgacgcggccgucuccggcggccugaacaucccggugcugcgcgccgugcucccccgggacauggucuuccgcaccagcucccccaagguggugcugugaggacuaguaauaaggaaacuguaugaaugucugugggcaggaagugaagagauccuucuguaaagguuuuuggaauuaugucugcugaauaauaaacuuuuuugaaauaauaaaucugguagaaaaaugagaucuaaaaaaaaaaaaaaaaaaaaaaaaaaaaaaaaaaaaaaaaaaaaaaaaaaaaaaaaaaaaaaaaaaaaaaaaaaaaaaaaaaaaaaaaaaaaaaaaaaaa

SEQ ID NO: 21651 - RNA, 2073 nt, Artificial Sequence
  mRNA product Design b-4 (A100) comprising derived and/or modified sequence from LASV(Lassa virus/H.sapiens-wt/NGA/2015/ISTH_0543;Clade II)__AVO03640__SP-IgE_NP(2-569) (opt1)
aggagagucccgcagucggcguccagcggcucugcuuguucgugugugugucguugcaggccuuauucaagcuuaccauggacuggaccuggauccuguuccucguggccgccgcgacccgcguccacagcagcgccuccaaggaggugaaguccuuccuguggacccagagccuccgccgggagcugagcggcuacugcuccaacaucaagcugcaggucgugaaggacgcccaggcgcuccugcacgggcuggacuucagcgagguguccaacguccagcgccucaugcggaagcagaagcgcgacgacagcgaccugaagcggcugcgcgaccucaaccaggccgugaacaaccugguggagcugaaguccacccagcagaaguccauccuccgggucggcacgcugaccagcgacgaccugcucacccuggccgccgaccuggagaagcucaagagcaaggugauccgcaccgagcggccccuguccagcgggguguacaugggcaaccuguccacgcagcagcucgagcagcgccgggcccugcugaacaugaucgggauggucggcggcgcgcaggggacccagccgggccgcgacgggguggugcgggucugggacgugaagaaccccgaccuccugaacaaccaguucggcaccaugcccagccugacccucgccugccugacgaagcagggccagguggaccugaacgacgccguccucgcccugaccgaccuggggcucaucuacaccgcgaaguaccccaacuccagcgaccuggaccgccugucccagagccacccgauccucaacaugguggacaccaagaaguccagccugaacaucagcggcuacaacuucucccugggggccgccgugaaggccggcgccugcaugcucgacgggggcaacaugcuggagacgaucaaggucacgccccagaccauggacggcauccucaagagcauccugaaggugaagaagucccuggggauguucgugagcgacacccccggcgagcggaaccccuacgagaacauccuguacaagaucugccucuccggggacggcuggccguacaucgcgagccgcaccuccaucgucgggcgggccugggagaacaccaccguggaccuggagagcgacggcaagccccagaaggugggcuccgccgggagcaacaagucccugcagagcgccggcuuccccaccgggcucacguacucccagcugaugacccugaaggacagcaugaugcagcuggaccccuccgccaagaccuggaucgacaucgagggccgcccggaggaccccgucgagaucgcgcucuaccagcccaugagcgggugcuacauccacuucuuccgggagcccaccgaccugaagcaguucaagcaggacgccaaguacucccacggcaucgacguggccgaccuguucccggcccagcccggccucacgagcgccgucaucgaggcgcugccccgcaacauggugcugaccugccaggggagcgacgacaucaagcggcuccuggacucccagggccgcaaggacaucaagcugaucgacaucgcccucagcaaggccgacucccgccgguucgagaacgccgugugggaccagugcaaggaccugugccacaugcacaccggggucgugguggagaagaagaagcgcggcgggaaggaggagaucacgccccacugcgcccugauggacugcaucauguacgacgcggccgucagcggcggccucaacaucccggugcugcgggccgugcugccccgcgacauggucuuccggaccuccagccccaagguggugcucugaggacuaguaauaaggaaacuguaugaaugucugugggcaggaagugaagagauccuucuguaaagguuuuuggaauuaugucugcugaauaauaaacuuuuuugaaauaauaaaucugguagaaaaaugagaucuaaaaaaaaaaaaaaaaaaaaaaaaaaaaaaaaaaaaaaaaaaaaaaaaaaaaaaaaaaaaaaaaaaaaaaaaaaaaaaaaaaaaaaaaaaaaaaaaaaaa

SEQ ID NO: 21652 - RNA, 2073 nt, Artificial Sequence
  mRNA product Design b-4 (A100) comprising derived and/or modified sequence from LASV(Lassa virus/H.sapiens-wt/NGA/2016/ISTH_0009;Clade II)__AVO03572__SP-IgE_NP(2-569) (opt1)
aggagagucccgcagucggcguccagcggcucugcuuguucgugugugugucguugcaggccuuauucaagcuuaccauggacuggaccuggauccuguuccucguggccgccgcgacccgcguccacagcagcgccuccaaggaggugaaguccuuccuguggacccagagccuccgccgggagcugagcggcuacugcuccaacaucaagcugcaggucgugaaggacgcccaggcgcuccugcacgggcuggacuucagcgagguguccaacguccagcgccucaugcggaagcagaagcgcgacgacagcgaccugaagcggcugcgcgaccucaaccaggccgugaacaaccugguggagcugaaguccacccagcagaaguccauccuccgggucggcacgcugaccagcgacgaccugcucacccuggccgccgaccuggagaagcucaagagcaaggugauccgcaccgagcggccccuguccagcgggguguacaugggcaaccuguccacgcagcagcucgagcagcgccgggcccugcugaacaugaucgggauggucggcggcgcgcaggggacccagccgggccgcgacgggguggugcgggucugggacgugaagaaccccgaccuccugaacaaccaguucggcaccaugcccagccugacccucgccugccugacgaagcagggccagguggaccugaacgacgccguccucgcccugaccgaccuggggcucaucuacaccgcgaaguaccccaacuccagcgaccuggaccgccugucccagagccacccgauccucaacaugguggacaccaagaaguccagccugaacaucagcggcuacaacuucucccugggggccgccgugaaggccggcgccugcaugcucgacgggggcaacaugcuggagacgaucaaggucacgccccagaccauggacggcauccucaagagcauccugaaggugaagaagucccuggggauguucgugagcgacacccccggcgagcggaaccccuacgagaacauccuguacaagaucugccucuccggggacggcuggccguacaucgcgagccgcaccuccaucgucgggcgggccugggagaacaccaccguggaccuggagagcgacggcaagccccagaaggugggcuccgccgggagcaacaagucccugcagagcgccggcuuccccaccgggcucacguacucccagcugaugacccugaaggacagcaugaugcagcuggaccccuccgccaagaccuggaucgacaucgagggccgcccggaggaccccgucgagaucgcgcucuaccagcccaugagcgggugcuacauccacuucuuccgggagcccaccgaccugaagcaguucaagcaggacgccaaguacucccacggcaucgacguggccgaccuguucccggcccagcccggccucacgagcgccgucaucgaggcgcugccccgcaacauggugcugaccugccaggggagcgacgacaucaagcggcuccuggacucccagggccgccgcgacaucaagcugaucgacaucgcccucagcaaggccgacucccggcgcuucgagaacgccgugugggaccagugcaaggaccugugccacaugcacaccggggucgugguggagaagaagaagcggggcgggaaggaggagaucacgccccacugcgcccugauggacugcaucauguacgacgcggccgucagcggcggccucaacaucccggugcugcgcgccgugcugccccgggacauggucuuccgcaccuccagccccaagguggugcucugaggacuaguaauaaggaaacuguaugaaugucugugggcaggaagugaagagauccuucuguaaagguuuuuggaauuaugucugcugaauaauaaacuuuuuugaaauaauaaaucugguagaaaaaugagaucuaaaaaaaaaaaaaaaaaaaaaaaaaaaaaaaaaaaaaaaaaaaaaaaaaaaaaaaaaaaaaaaaaaaaaaaaaaaaaaaaaaaaaaaaaaaaaaaaaaaa

SEQ ID NO: 21653 - RNA, 2073 nt, Artificial Sequence
  mRNA product Design b-4 (A100) comprising derived and/or modified sequence from LASV(Lassa virus/H.sapiens-wt/NGA/2016/ISTH_0017;Clade II)__AVO03568__SP-IgE_NP(2-569) (opt1)
aggagagucccgcagucggcguccagcggcucugcuuguucgugugugugucguugcaggccuuauucaagcuuaccauggacuggaccuggauccuguuccucguggccgccgcgacccgcguccacagcagcgccuccaaggaggugaaguccuuccuguggacccagagccuccgccgggagcugagcggcuacugcuccagcaucaagcugcaggucgugaaggacgcccaggcgcuccugcacgggcuggacuucuccgaggugagcaacguccagcgccucaugcggaagcagaagcgcgacgacuccgaccugaagcggcugcgcgaccucaaccaggccgugaacaaccugguggagcucaagagcacccagcagaaguccauccugcgggucggcacgcugaccagcgacgaccugcucacccuggccgccgaccuggagaagcucaaguccaaggugauccgcaccgagcggccccugagcuccgggguguacaugggcaaccugagcacgcagcagcucgagcagcgccgggcccugcugaacaugaucgggauggcgggcggcgcccaggggacccagccgggccgcgacggggucgugcgggugugggacgucaagaaccccgaccuccugaacaaccaguucggcaccaugcccucccugacccucgccugccugacgaagcagggccagguggaccugaacgacgccgugcucgcgcugaccgaccuggggcucaucuacaccgccaaguaccccaacagcuccgaccuggaccgccugagccagagccacccgauccucaacauggucgacaccaagaaguccagccugaacaucuccggcuacaacuucagccugggggccgccgugaaggccggcgcgugcaugcucgacgggggcaacaugcuggagacgaucaaggugacgccccagaccauggacggcauccugaaguccauccucaaggucaagcggagccuggggauguucguguccgacgcccccggcgagcgcaaccccuacgagaacauccuguacaagaucugccucagcggggacggcuggccguacaucgccucccggaccagcaucguggggcgcgccugggagaacaccaccgucgaccuggaguccgacggcaagccccagaaggugggcgccaccgggagcaacaagucccugcagagcgcgggcuuccccaccgggcucacguacucccagcugaugacccugaaggacagcaugaugcagcuggaccccuccgccaagaccuggaucgacaucgagggccggccggaggaccccguggaggucgcccucuaccagcccgugagcgggugcuacauccacuucuuccgcgagcccaccgaccugaagcaguucaagcaggacgccaaguacucccacggcaucgacgucgccgaccuguucccggcgcagcccggccucacgagcgccgugaucgaggcccugccccggaacauggugcugaccugccaggggagcgacgacaucaagaagcuccuggacucccagggccgcaaggacaucaagcugaucgacaucgcccucagcaaggccgacucccgccgguucgagaacgcggucugggaccagugcaaggaccugugccacaugcacaccggggugguggucgagaagaagaagcgcggcgggaaggaggagaucacgccccacugcgcccugauggacugcaucauguacgacgccgccgugagcggcggccucaacaucccggugcugcgggcgguccugccccgcgacaugguguuccggaccuccagccccaaggugguccucugaggacuaguaauaaggaaacuguaugaaugucugugggcaggaagugaagagauccuucuguaaagguuuuuggaauuaugucugcugaauaauaaacuuuuuugaaauaauaaaucugguagaaaaaugagaucuaaaaaaaaaaaaaaaaaaaaaaaaaaaaaaaaaaaaaaaaaaaaaaaaaaaaaaaaaaaaaaaaaaaaaaaaaaaaaaaaaaaaaaaaaaaaaaaaaaaa

SEQ ID NO: 21654 - RNA, 2073 nt, Artificial Sequence
  mRNA product Design b-4 (A100) comprising derived and/or modified sequence from LASV(Lassa virus/H.sapiens-wt/NGA/2018/ISTH_0959;Clade II)__AVV65100__SP-IgE_NP(2-569) (opt1)
aggagagucccgcagucggcguccagcggcucugcuuguucgugugugugucguugcaggccuuauucaagcuuaccauggacuggaccuggauccuguuccucguggccgccgcgacccgcguccacagcagcgccuccaaggaggugaaguccuuccuguggacccagagccuccgccgggagcugagcggcuacugcuccaacaucaagcugcaggucgugaaggacgcccaggcgcuccugcacgggcuggacuucagcgagguguccaacguccagcgccucaugcggaagcagaagcgcgacgacagcgaccugaagcggcugcgcgaccucaaccaggccgugaacaaccugguggagcugaaguccacccagcagaaguccauccuccgggucggcacccugaccagcgacgaccugcucacccuggccgccgaccuggagaagcucaagagcaaggugauccgcaccgagcggccccuguccagcgggguguacaugggcaaccuguccacgcagcagcucgagcagcgccgggcccugcugaaccucaucgggauggucggcggcgcgcaggggacccagccgggccgcgacgggguggugcgggucugggacgugaagaaccccgaccugcugaacaaccaguucggcaccaugcccagccucacccuggccugccugacgaagcagggccagguggaccucaacgacgucgugcuggcccugaccgaccucgggcugaucuacaccgccaaguaccccaacuccagcgaccuggaccgccucucccagagccacccgauccugaacaugguggacaccaagaaguccagccugaacaucagcggcuucaacuucucccucggggcggccgucaaggccggcgccugcaugcuggacgggggcaacaugcuggagacgaucaaggugacgccccagaccauggacggcauccucaagagcauccugaaggugaagaagucccuggggauguucgucagcgacacccccggcgagcggaaccccuacgagaacauccucuacaagaucugccuguccggggacggcuggccguacaucgccagccgcaccuccaucguggggcgggcgugggagaacaccaccguggaccuggagagcgacggcaagccccacaaggucggcaccgccggguccaacaagagccuccaguccgccggcuuccccacggggcugaccuacagccagcugaugacccugaaggacuccaugaugcagcucgaccccagcgccaagaccuggaucgacaucgagggccgcccggaggaccccguggagaucgcccuguaccagcccauguccgggugcuacauccacuucuuccgggagcccacggaccugaagcaguucaagcaggacgcgaaguacagccacggcaucgacgucgccgaccucuucccggcccagcccggccugaccuccgccgugaucgaggcccugccccgcaacauggugcugaccugccaggggagcgacgacaucaagcggcuccuggacagccagggccgcaaggacaucaagcucaucgacaucgcgcuguccaagaccgacagccgccgguucgagaacgccgucugggaccagugcaaggaccugugccacaugcacacgggggugguggucgagaagaagaagcgcggcgggaaggaggagaucacgccccacugcgcccucauggacugcaucauguacgacgccgccguguccggcggccugaacaucccggugcugcgggcgguccucccccgcgacaugguguuccggaccagcucccccaaggugguccugugaggacuaguaauaaggaaacuguaugaaugucugugggcaggaagugaagagauccuucuguaaagguuuuuggaauuaugucugcugaauaauaaacuuuuuugaaauaauaaaucugguagaaaaaugagaucuaaaaaaaaaaaaaaaaaaaaaaaaaaaaaaaaaaaaaaaaaaaaaaaaaaaaaaaaaaaaaaaaaaaaaaaaaaaaaaaaaaaaaaaaaaaaaaaaaaaa

SEQ ID NO: 21655 - RNA, 2073 nt, Artificial Sequence
  mRNA product Design b-4 (A100) comprising derived and/or modified sequence from LASV(LASV003-NIG-2008;Clade II)__AIT17581__SP-IgE_NP(2-569) (opt1)
aggagagucccgcagucggcguccagcggcucugcuuguucgugugugugucguugcaggccuuauucaagcuuaccauggacuggaccuggauccuguuccucguggccgccgcgacccgcguccacagcagcgccuccaaggaggugaaguccuuccuguggacccagagccuccgccgggagcugagcggcuacugcuccagcaucaagcugcaggucgugaaggacgcccaggcgcuccugcacgggcuggacuucuccgaggugagcaacguccagcgccucaugcggaagcagaagcgcgacgacuccgaccugaagcggcugcgcgaccucaaccaggccgugaacaaccugguggagcucaagagcacccagcagaaguccguccugcgggugggcacccugaccagcgacgaccugcucacccuggccgccgaccuggagaagcucaaguccaaggugauccgcaccgagcggccccugagcuccggggucuacaugggcaaccugagcgcccagcagcucgagcagcgccggacgcugcugaacaugaucgggauggugggcggcgcgcaggggacccagccgggccgcgacggggugguccgggugugggacgugaagaaccccgaccuccugaacaaccaguucggcaccaugcccucccugacccucgccugccugacgaagcaggggcaggucgaccugaacgacguggugcucgcccugaccgaccugggccucaucuacaccgccaaguaccccaacagcuccgaccuggaccgccugagccagagccacccgauccucuccauggucgacaccaagaaguccagccugaacaucagcggcuacaacuucucccugggggcggccgugaaggccggcgccugcaugcucgacgggggcaacaugcuggagacgaucaaggugacgccccagaccauggacggcauccucaagagcauccugaaggucaagaagucccuggggauguucgugagcgacacccccggcgagcggaaccccuacgagaacauccuguacaagaucugccucuccggggacggcuggccguacaucgccagccgcaccuccaucguggggcgggcgugggagaacaccaccgucgaccuggagagcgacggcaagccccagaaggugggcaccgccggguccaacaagagccugcaguccgccggcuuccccacggggcucaccuacagccagcugaugacccugaaggacuccaugaugcagcuggaccccagcgccaagaccuggaucgacaucgagggccgcccggaggaccccgucgagaucgcccucuaccagcccauguccgggugcuacauccacuucuuccgggagcccacggaccugaagcaguucaagcaggacgcgaaguacagccacggcaucgacgugaccgaccuguucccggcccagcccggccucaccagcgccgugaucgaggcccugccccgcaacaugguccugaccugccagggguccgacgacaucaagcggcuccuggacagccagggccgccgcgacaucaagcugaucgacaucgcccucuccaaggcggacagccggcgcuucgagaacgccgugugggaccagugcaaggaccugugccacaugcacacggggguggucguggagaagaagaagcggggcgggaaggaggagaucacgccccacugcgcccugauggacugcaucauguacgacgccgccguguccggcggccucaacaucccgguccugcgcgcggugcugccccgggacaugguguuccgcaccagcucccccaaggucgugcucugaggacuaguaauaaggaaacuguaugaaugucugugggcaggaagugaagagauccuucuguaaagguuuuuggaauuaugucugcugaauaauaaacuuuuuugaaauaauaaaucugguagaaaaaugagaucuaaaaaaaaaaaaaaaaaaaaaaaaaaaaaaaaaaaaaaaaaaaaaaaaaaaaaaaaaaaaaaaaaaaaaaaaaaaaaaaaaaaaaaaaaaaaaaaaaaaa

SEQ ID NO: 21656 - RNA, 2073 nt, Artificial Sequence
  mRNA product Design b-4 (A100) comprising derived and/or modified sequence from LASV(LASV035-NIG-2009;Clade II)__AIT17589__SP-IgE_NP(2-569) (opt1)
aggagagucccgcagucggcguccagcggcucugcuuguucgugugugugucguugcaggccuuauucaagcuuaccauggacuggaccuggauccuguuccucguggccgccgcgacccgcguccacagcagcgccuccaaggaggugaaguccuuccuguggacccagagccuccgccgggagcugagcggcuacugcuccagcaucaagcugcaggucgugaaggacgcccaggcgcuccugcacgggcuggacuucuccgaggugagcaacguccagcgccucaugcggaagcagaagcgcgacgacuccgaccugaagcggcugcgcgaccucaaccaggccgugaacaaccugguggagcucaagagcacccagcagaaguccauccugcgggucggcacgcugaccagcgacgaccugcucacccuggccgccgaccuggagaagcucaaguccaaggugauccgcaccgagcggccccugagcuccgggguguacaugggcaaccugagcgcccagcagcucgagcagcgccgggcgcugcugaacaugaucgggauggucggcggcgcccaggggacgcagccgggccgcgacgggguggugcgggucugggacgugaagaaccccgaccuccugaacaaccaguucggcaccaugcccucccugacccucgccugccugaccaagcagggccagguggaccugaacgacgccguccucgcgcugacggaccuggggcucaucuacaccgccaaguaccccaacagcuccgaccuggaccgccugagccagagccacccgauccucaacaugguggacaccaagaaguccagccugaacaucuccggcuacaacuucagccugggggccgccgugaaggccggcgcgugcaugcucgacgggggcaacaugcuggagaccaucaaggucacgccccagaccauggacggcauccugaaguccauccucaaggugaagcggagccuggggauguucguguccgacacccccggcgagcgcaaccccuacgagaacauccuguacaagaucugccucagcggggacggcuggccguacaucgccucccggaccagcaucgucgggcgcgccugggagaacacgaccguggaccuggaguccgacggcaagccccagaaggugggcaccaccgggagcaacaagucccugcagagcgccggcuuccccacggggcucaccuacucccagcugaugacccugaaggacagcaugaugcagcuggaccccuccgccaagaccuggaucgacaucgagggccggccggaggaccccgucgagaucgcgcucuaccagcccaugagcgggugcuacauccacuucuuccgcgagcccacggaccugaagcaguucaagcaggacgccaaguacucccacggcaucgacguggccgaccuguucccggcccagcccggccucaccagcgccgucaucgaggcgcugccccggaacauggugcugaccugccaggggagcgacgacaucaagaagcuccuggacucccagggccgccgcgacaucaagcugaucgacaucgcccucagcaaggccgacucccggaaguucgagaacgccgugugggaccagugcaaggaccugugccacaugcacaccggggucgugguggagaagaagaagcgcggcgggaaggaggagaucacgccccacugcgcccugauggacugcaucauguacgacgcggccgucagcggcggccucaacaucccggugcugcgggccgugcugccccgcgacauggucuuccggaccuccagccccaagguggugcucugaggacuaguaauaaggaaacuguaugaaugucugugggcaggaagugaagagauccuucuguaaagguuuuuggaauuaugucugcugaauaauaaacuuuuuugaaauaauaaaucugguagaaaaaugagaucuaaaaaaaaaaaaaaaaaaaaaaaaaaaaaaaaaaaaaaaaaaaaaaaaaaaaaaaaaaaaaaaaaaaaaaaaaaaaaaaaaaaaaaaaaaaaaaaaaaaa

SEQ ID NO: 21657 - RNA, 2073 nt, Artificial Sequence
  mRNA product Design b-4 (A100) comprising derived and/or modified sequence from LASV(LASV1000-NIG-2009;Clade II)__AIT17783__SP-IgE_NP(2-569) (opt1)
aggagagucccgcagucggcguccagcggcucugcuuguucgugugugugucguugcaggccuuauucaagcuuaccauggacuggaccuggauccuguuccucguggccgccgcgacccgcguccacagcagcgccuccaaggaggugaaguccuuccuguggacccagagccuccgccgggagcugagcggcuacugcuccaacaucaagcugcaggucgugaaggacgcccaggcgcuccugcacgggcuggacuucagcgagguguccaacguccagcgccucaugcggaagcagaagcgcgacgacagcgaccugaagcggcugcgcgaccucaaccaggccgugaacaaccugguggagcugaaguccacccagcagaaguccauccuccgggucggcacgcugaccagcgacgaccugcucacccuggccgccgaccuggagaagcucaagagcaaggugauccgcaccgagcggccccuguccagcgggguguacaugggcaaccuguccacgcagcagcucgagcagcgccgggcccugcugaacaugaucgggauggucggcggcgcgcaggggacccagccgggccgcgacgggguggugcgggucugggacgugaagaaccccgaccuccugaacaaccaguucggcaccaugcccagccugacccucgccugccugacgaagcagggccagguggaccugaacgacgucgugcucgcccugaccgaccuggggcucaucuacaccgccaaguaccccaacuccagcgaccuggaccgccugucccagagccacccgauccucaacaugguggacaccaagaaguccagccugaacaucagcggcuacaacuucucccugggggcggccgucaaggccggcgccugcaugcucgacgggggcaacaugcuggagacgaucaaggugacgccccagaccauggacggcauccucaagagcauccugaaggugaagaagucccuggggauguucgucagcgacacccccggcgagcggaaccccuacgagaacauccuguacaagaucugccucuccggggacggcuggccguacaucgccagccgcaccuccaucguggggcgggcgugggagaacaccaccguggaccuggagagcgacggcaagccccagaaggucggcaccgccggguccaacaagagccugcaguccgccggcuuccccacggggcucaccuacagccagcugaugacccugaaggacuccaugaugcagcuggaccccagcgccaagaccuggaucgacaucgagggccgcccggaggaccccguggagaucgcccucuaccagcccgucuccgggugcuacauccacuucuuccgggagcccacggaccugaagcaguucaagcaggacgcgaaguacagccacggcaucgacguggccgaccuguucccggcccagcccggccucaccuccgccgugaucgaggcccugccccgcaacaugguccugaccugccaggggagcgacgacaucaagcggcuccuggacagccagggccgccgcgacaucaagcugaucgacaucgcgcucuccaaggccgacagccggcgcuucgagaacgccgugugggaccagugcaaggaccugugccacaugcacaccgggguggucguggagaagaagaagcggggcgggaaggaggagaucacgccccacugcgcccugauggacugcaucauguacgacgccgcgguguccggcggccucaacaucccgguccugcgcgccgugcugccccgggacaugguguuccgcaccagcucccccaaggucgugcucugaggacuaguaauaaggaaacuguaugaaugucugugggcaggaagugaagagauccuucuguaaagguuuuuggaauuaugucugcugaauaauaaacuuuuuugaaauaauaaaucugguagaaaaaugagaucuaaaaaaaaaaaaaaaaaaaaaaaaaaaaaaaaaaaaaaaaaaaaaaaaaaaaaaaaaaaaaaaaaaaaaaaaaaaaaaaaaaaaaaaaaaaaaaaaaaaa

SEQ ID NO: 21658 - RNA, 2073 nt, Artificial Sequence
  mRNA product Design b-4 (A100) comprising derived and/or modified sequence from LASV(LASV221-NIG-2010;Clade II)__AIT17625__SP-IgE_NP(2-569) (opt1)
aggagagucccgcagucggcguccagcggcucugcuuguucgugugugugucguugcaggccuuauucaagcuuaccauggacuggaccuggauccuguuccucguggccgccgcgacccgcguccacagcagcgccuccaaggaggugaaguccuuccuguggacccagagccuccgccgggagcugagcggcuacugcuccagcaucaagcugcaggucgugaaggacgcccaggcgcuccugcacgggcuggacuucuccgaggugagcaacguccagcgccucaugcggaagcagcgccgggacgacuccgaccugaagcgccugcgggaccucaaccaggccgugaacaaccugguggagcucaagagcacccagcagaaguccauccugcgcgucggcacgcugaccagcgacgaccugcucacccuggccgccgaccuggagaagcucaaguccaaggugauccggaccgagcgcccccugagcuccgggguguacaugggcaaccugagcacgcagcagcucgagcagcggcgcgcccugcugaacaugaucgggauggucggcggcgcgcaggggacccagccgggccgggacgggguggugcgcgucugggacgugaagaaccccgaccuccugaacaaccaguucggcaccaugcccucccugacccucgccugccugacgaagcagggccagguggaccugaacgacgccguccucgcccugaccgaccuggggcucaucuacaccgcgaaguaccccaacagcuccgaccuggaccggcugagccagagccacccgauccucaacaugguggacaccaagaaguccagccugaacaucuccggcuacaacuucagccugggggccgccgugaaggccggcgccugcaugcucgacgggggcaacaugcuggagacgaucaaggucacgccccagaccguggacggcauccugaaguccauccucaaggugaagcgcagccuggggauguucgucuccgacacccccggcgagcggaaccccuacgagaacauccuguacaagaucugccucagcggggacggcuggccguacaucgcgucccgcaccagcaucguggggcgggccugggagaacaccaccguggaccuggaguccgacggcaagccccagaaggucggcaccgccgggagcaacaagucccugcagagcgccggcuuccccacggggcucaccuacucccagcugaugacccugaaggacagcaugaugcagcuggaccccuccgccaagaccuggaucgacaucgagggccgcccggaggaccccguggagaucgcgcucuaccagcccaugagcgggugcuacauccacuucuuccgggagcccacggaccugaagcaguucaagcaggacgccaaguacucccacggcaucgacgucgccgaccuguucccggcccagcccggccucaccagcgccgugaucgaggcgcugccccgcaacauggugcugaccugccaggggagcgacgacaucaagcgccuccuggacucccagggccggcgcgacaucaagcugaucgacaucgcccucagcaaggccgacucccggaaguucgagaacgccgucugggaccagugcaaggaccugugccacaugcacaccggggugguggucgagaagaagaagcgcggcgggaaggaggagaucacgccccacugcgcccugauggacugcaucauguacgacgcggccgugagcggcggccucaacaucccggugcugcgggccguccugccccgcgacaugguguuccggaccuccagccccaaggugguccucugaggacuaguaauaaggaaacuguaugaaugucugugggcaggaagugaagagauccuucuguaaagguuuuuggaauuaugucugcugaauaauaaacuuuuuugaaauaauaaaucugguagaaaaaugagaucuaaaaaaaaaaaaaaaaaaaaaaaaaaaaaaaaaaaaaaaaaaaaaaaaaaaaaaaaaaaaaaaaaaaaaaaaaaaaaaaaaaaaaaaaaaaaaaaaaaaa

SEQ ID NO: 21659 - RNA, 2073 nt, Artificial Sequence
  mRNA product Design b-4 (A100) comprising derived and/or modified sequence from LASV(LASV237-NIG-2010;Clade II)__AIT17639__SP-IgE_NP(2-569) (opt1)
aggagagucccgcagucggcguccagcggcucugcuuguucgugugugugucguugcaggccuuauucaagcuuaccauggacuggaccuggauccuguuccucguggccgccgcgacccgcguccacagcagcgccuccaaggaggugaaguccuuccuguggacccagagccuccgccgggagcugagcggcuacugcuccaacaucaagcugcaggucgugaaggacgcccaggcgcuccugcacgggcuggacuucagcgagguguccaacguccagcgccucaugcggaagcagaagcgcgacgacagcgaccugaagcggcugcgcgaccucaaccaggccgugaacaaccugguggagcugaaguccacccagcagaaguccauccuccgggucggcacccugaccagcgacgaccugcucacccuggccgccgaccuggagaagcucaagagcaaggugauccgcaccgagcggccccuguccagcgggguguacaugggcaaccuguccacgcagcagcucgagcagcgccgggcccugcugaacaugaucgggauggucggcggcgcgcaggggacccagccgggccgcgacgggguggugcgggucugggacgugaagaaccccgaccuccugaacaaccaguucggcaccaugcccagccugacccucgccugccugacgaagcagggccagguggaccugaacgacgccguccucgcccugaccgaccuggggcucaucuacaccgcgaaguaccccaacuccagcgaccuggaccgccugucccagagccacccgauccucaacaugguggacaucaagaaguccagccugaacaucagcggcuacaacuucucccugggggccgccgugaaggccggcgccugcaugcucgacgggggcaacaugcuggagaccaucaaggucacgccccagaccauggacggcauccucaagagcauccugaaggugaagcggucccuggggauguucgugagcgacacccccggcgagcgcaaccccuacgagaacauccuguacaagaucugccucuccggggacggcuggccguacaucgcgagccggaccuccaucgucgggcgcgccugggagaacacgaccguggaccuggagagcgacggcaagccccagaaggugggcuccgccgggagcaacaagucccugcagagcgccggcuuccccaccgggcucaccuacucccagcugaugacgcugaaggacagcaugaugcagcuggaccccuccgccaagaccuggaucgacaucgagggccggccggaggaccccgucgagaucgcgcucuaccagcccaugagcgggugcuacauccacuucuuccgcgagcccaccgaccugaagcaguucaagcaggacgccaaguacucccacggcaucgacguggccgaccuguucccggcccagcccggccucaccagcgccgucaucgaggcgcugccccggaacauggugcugacgugccaggggagcgacgacaucaagcgccuccuggacucccagggccgccgggacaucaagcugaucgacaucgcccucagcaaggccgacucccgccgguucgagaacgccgugugggaccagugcaaggaccugugccacaugcacaccggggucgugguggagaagaagaagcgcggcgggaaggaggagaucacgccccacugcgcccugauggacugcaucauguacgacgcggccgucagcggcggccucaacaucccggugcugcgggccgugcugccccgcgacauggucuuccggaccuccagccccaagguggugcucugaggacuaguaauaaggaaacuguaugaaugucugugggcaggaagugaagagauccuucuguaaagguuuuuggaauuaugucugcugaauaauaaacuuuuuugaaauaauaaaucugguagaaaaaugagaucuaaaaaaaaaaaaaaaaaaaaaaaaaaaaaaaaaaaaaaaaaaaaaaaaaaaaaaaaaaaaaaaaaaaaaaaaaaaaaaaaaaaaaaaaaaaaaaaaaaaa

SEQ ID NO: 21660 - RNA, 2073 nt, Artificial Sequence
  mRNA product Design b-4 (A100) comprising derived and/or modified sequence from LASV(LASV253-NIG-2011;Clade II)__AIT17671__SP-IgE_NP(2-569) (opt1)
aggagagucccgcagucggcguccagcggcucugcuuguucgugugugugucguugcaggccuuauucaagcuuaccauggacuggaccuggauccuguuccucguggccgccgcgacccgcguccacagcagcgccuccaaggaggugaaguccuuccuguggacccagagccuccgccgggagcugagcggcuacugcuccagcaucaagcugcaggucgugaaggacgcccaggcgcuccugcacgggcuggacuucuccgaggugagcaacguccagcgccucaugcggaagcagaagcgcgacgacuccgaccugaagcggcugcgcgaccucaaccaggccgugaacaaccugguggagcucaagagcacccagcagaaguccguccugcgggugggcacccugaccagcgacgaccugcucacccuggccgccgaccuggagaagcucaaguccaaggugauccgcaccgagcggccccugagcuccggggucuacaugggcaaccugagcacgcagcagcucgagcagcgccgggcccugcugaacaugaucgggauggugggcggcgcgcaggggacccagccgggccgcgacggggugguccgggugugggacgugaagaaccccgaccuccugaacaaccaguucggcaccaugcccucccugacccucgccugccugacgaagcaggggcaggucgaccugaacgacguggugcucgcccugaccgaccugggccucaucuacaccgccaaguaccccaacagcuccgaccuggaccgccugagccagagccacccgauccucaacauggucgacaccaagaaguccagccugaacaucuccggcuacaacuucagccugggggcggccgugaaggccggcgccugcaugcucgacgggggcaacaugcuggagacgaucaaggugacgccccagaccauggacggcauccugaaguccauccucaaggucaagaagucccuggggauguucgugagcgacacccccggcgagcggaaccccuacgagaacauccuguacaagaucugccucagcggggacggcuggccguacaucgccucccgcaccagcaucguggggcgggcgugggagaacaccaccgucgaccuggaguccgacggcaagccccagaaggugggcaccgccgggagcaacaagucccugcagagcgccggcuuccccacggggcucaccuacucccagcugaugacccugaaggacagcaugaugcagcuggaccccuccgccaagaccuggaucgacaucgagggccgcccggaggaccccgucgagaucgcccucuaccagcccaugagcgggugcuacauccacuucuuccgggagcccacggaccugaagcaguucaagcaggacgcgaaguacucccacggcaucgacgugaccgaccuguucccggcccagcccggccucaccagcgccgugaucgaggcccugccccgcaacaugguccugaccugccaggggagcgacgacaucaagcggcuccuggacucccagggccgccgcgacaucaagcugaucgacaucgcccucagcaaggcggacucccggcgcuucgagaacgccgugugggaccagugcaaggaccugugccacaugcacacggggguggucguggagaagaagaagcggggcgggaaggaggagaucacgccccacugcgcccugauggacugcaucauguacgacgccgccgugagcggcggccucaacaucccgguccugcgcgcggugcugccccgggacaugguguuccgcaccuccagccccaaggucgugcucugaggacuaguaauaaggaaacuguaugaaugucugugggcaggaagugaagagauccuucuguaaagguuuuuggaauuaugucugcugaauaauaaacuuuuuugaaauaauaaaucugguagaaaaaugagaucuaaaaaaaaaaaaaaaaaaaaaaaaaaaaaaaaaaaaaaaaaaaaaaaaaaaaaaaaaaaaaaaaaaaaaaaaaaaaaaaaaaaaaaaaaaaaaaaaaaaa

SEQ ID NO: 21661 - RNA, 2073 nt, Artificial Sequence
  mRNA product Design b-4 (A100) comprising derived and/or modified sequence from LASV(LASV254-NIG-2011;Clade II)__AIT17675__SP-IgE_NP(2-569) (opt1)
aggagagucccgcagucggcguccagcggcucugcuuguucgugugugugucguugcaggccuuauucaagcuuaccauggacuggaccuggauccuguuccucguggccgccgcgacccgcguccacagcagcgccuccaaggaggugaaguccuuccuguggacccagagccuccgccgggagcugagcggcuacugcuccagcaucaagcugcaggucgugaaggacgcccaggcgcuccugcacgggcuggacuucuccgaggugagcaacguccagcgccucaugcggaagcagaagcgcgacgacuccgaccugaagcggcugcgcgaccucaaccaggccgugaacaaccugguggagcucaagagcacccagcagaaguccguccugcgggugggcacgcugaccagcgacgaccugcucacccuggccgccgaccuggagaagcucaaguccaaggugauccgcaccgagcggccccugagcuccggggucuacaugggcaaccugagcacgcagcagcucgagcagcgccgggcccugcugaacaugaucgggauggugggcggcgcgcaggggacccagccgggccgcgacggggugguccgggugugggacgugaagaaccccgaccuccugaacaaccaguucggcaccaugcccucccugacccucgccugccugacgaagcaggggcaggucgaccugaacgacgccgugcucgcccugaccgaccugggccucaucuacaccgcgaaguaccccaacagcuccgaccuggaccgccugagccagagccacccgauccucaacaugguggacaccaagaaguccagccugaacaucuccggcuacaacuucagccugggggccgccgucaaggccggcgccugcaugcucgacgggggcaacaugcuggagacgaucaaggugacgccccagaccauggacggcauccugaaguccauccucaaggugaagaagucccuggggauguucgucagcgacacccccggcgagcggaaccccuacgagaacauccuguacaagaucugccucagcggggacggcuggccguacaucgcgucccgcaccagcaucguggggcgggccugggagaacaccaucguggaccuggaguccgacggcaagccccagaaggucggcaccgccgggagcaacaagucccugcagagcgccggcuuccccaccgggcucacguacucccagcugaugacccugaaggacagcaugaugcagcuggaccccuccgccaagaccuggaucgacaucgagggccgcccggaggaccccguggagaucgcgcucuaccagcccaugagcgggugcuacauccacuucuuccgggagcccaccgaccugaagcaguucaagcaggacgccaaguacucccacggcaucgacgucgccgaccuguucccggcccagcccggccucacgagcgccgugaucgaggcgcugccccgcaacauggugcugaccugccaggggagcgacgacaucaagcggcuccuggacucccagggccgccgcgacaucaagcugaucgacaucgcccucagcaaggccgacucccggcgcuucgagaacgccgucugggaccagugcaaggaccugugccacaugcacaccggggugguggucgagaagaagaagcggggcgggaaggaggagaucacgccccacugcgcccugauggacugcaucauguacgacgcggccgugagcggcggccucaacaucccggugcugcgcgccguccugccccgggacaugguguuccgcaccuccagccccaaggugguccucugaggacuaguaauaaggaaacuguaugaaugucugugggcaggaagugaagagauccuucuguaaagguuuuuggaauuaugucugcugaauaauaaacuuuuuugaaauaauaaaucugguagaaaaaugagaucuaaaaaaaaaaaaaaaaaaaaaaaaaaaaaaaaaaaaaaaaaaaaaaaaaaaaaaaaaaaaaaaaaaaaaaaaaaaaaaaaaaaaaaaaaaaaaaaaaaaa

SEQ ID NO: 21662 - RNA, 2073 nt, Artificial Sequence
  mRNA product Design b-4 (A100) comprising derived and/or modified sequence from LASV(Nig08-04;Clade II)__ADU56611__SP-IgE_NP(2-569) (opt1)
aggagagucccgcagucggcguccagcggcucugcuuguucgugugugugucguugcaggccuuauucaagcuuaccauggacuggaccuggauccuguuccucguggccgccgcgacccgcguccacagcagcgccuccaaggaggugaaguccuuccuguggacccagagccuccgccgggagcugagcggcuacugcuccaacaucaagcugcaggucgugaaggacgcccaggcgcuccugcacgggcuggacuucagcgagguguccaacguccagcgccucaugcggaagcagaagcgcgacgacggcgaccugaagcggcugcgcgaccucaaccaggccgugaacaaccugguggagcucaagagcacccagcagaaguccguccugcggguggggacccugaccagcgacgaccugcucacccuggccgccgaccuggagaagcucaaguccaaggugauccgcaccgagcggccccugagcuccggcgucuacauggggaaccugagcacgcagcagcucgagcagcgcaaggcccugcuguccaugaucggcauggugggcggggcgcagggcacccagccggggcgggacggcgugguccgcgugugggacgugaagaaccccgaccuccugaacaaccaguucgggaccaugcccagccugacccucgccugccugacgaagcagggccaggucgaccugaacgacgccgugcucgcccugaccgaccugggccucaucuacaccgcgaaguaccccaacuccagcgaccuggaccggcugucccagagccacccgauccucaacaugguggacaccaagaaguccagccugaacaucagcggguacaacuucucccugggcgccgccgucaaggccggggccugcaugcucgacggcggcaacaugcuggagacgaucaaggugacgccccagaccauggacgggauccucaagagcauccugaaggugaagcgcucccugggcauguucgucagcgacacccccggggagcggaaccccuacgagaacauccuguacaagaucugccucuccggcgacggguggccguacaucgcgagccgcaccuccaucgugggccgggccugggagaacaccaccguggaccuggagagcgacggcaagccccagaaggucgggaccgccggcuccaacaagagccugcaguccgccggguuccccacgggccucaccuacagccagcugaugacccugaaggacuccaugaugcagcuggaccccagcgccaagaccuggaucgacaucgaggggcgcccggaggaccccguggagaucgcgcucuaccagcccauguccggcugcuacauccacuucuuccgggagcccacggaccugaagcaguucaagcaggacgccaaguacagccacggcaucgacgucaccgaccuguucuccgcccagccggggcucaccagcgccgugaucgaggcccugccccgcaacauggugcugaccugccagggcagcgacgacaucaagaagcuccuggacucccaggggcggcgcgacaucaagcugaucgacaucagccucaacaaggcggacucccgccgguucgagaacgccgucugggaccagugcaaggaccugugccacaugcacacgggcgugguggucgagaagaagaagcgcgggggcaaggaggagaucacgccccacugcgcccugauggacugcaucauguucgacgccgccgugagcggcgggcucaacauccccauccugcgggcggugcugccgcgcgacauggucuuccggaccuccagccccaagguggugcucugaggacuaguaauaaggaaacuguaugaaugucugugggcaggaagugaagagauccuucuguaaagguuuuuggaauuaugucugcugaauaauaaacuuuuuugaaauaauaaaucugguagaaaaaugagaucuaaaaaaaaaaaaaaaaaaaaaaaaaaaaaaaaaaaaaaaaaaaaaaaaaaaaaaaaaaaaaaaaaaaaaaaaaaaaaaaaaaaaaaaaaaaaaaaaaaaa

SEQ ID NO: 21663 - RNA, 2076 nt, Artificial Sequence
  mRNA product Design b-4 (A100) comprising derived and/or modified sequence from LASV(GA391;Clade III)__AAA46284__SP-IgE_NP(2-570) (opt1)
aggagagucccgcagucggcguccagcggcucugcuuguucgugugugugucguugcaggccuuauucaagcuuaccauggacuggaccuggauccuguuccucguggccgccgcgacccgcguccacagcagcgccuccaaggaggugcgcagcugccuguggacccagucccuccggcgcgagcugagcggcuacugcuccaacaucaagcugcaggucgugaaggacgcccaggcgcuccugcacgggcuggacuucagcgagguguccaacguccagcggcucaugcgcaagcagaagcgggacgacggcgaccugaagcgccugcgggaccucaaccaggccgugaacaaccugguggagcugaaguccacccagcagaaguccguccuccgcguggggacgcugagcuccgacgaccugcucauccuggccgccgaccuggagaagcucaagagcaaggugacccggaccgagcgcccccuguccagcggcgucuacauggggaaccuguccagccagcagcucgaccagcggcgcgcccugcugaacaugaucggcaugaccggcguguccgggggcgggaagggcgcgagcaacgggaucgugcgggucugggacgugaagaacgccgagcuccugaacaaccaguucggcacgaugccgucccugacccucgccugccugaccaagcagggccagguggaccugaacgacgccguccaggcgcucaccgaccuggggcugaucuacacggccaaguaccccaacagcagcgaccucgaccgccugucccagagccaccccauccugaacaugaucgacaccaagaaguccagccucaacaucuccggcuacaacuucagccugggggccgccgugaaggccggcgcgugcaugcuggacggcgggaacaugcucgagaccaucaaggugagcccccagaccauggacggcauccucaagagcauccugaaggucaagaagucccuggggauguucgugagcgacacgccgggcgagcggaaccccuacgagaacauccuguacaagaucugccuguccggggacggcuggagcuacaucgccucccgcaccagcaucgugggccgggccugggagaacaccgucguggaccucgagcaggacaacaagccccagaagaucgggaacggcggguccaacaagagccugcaguccgccggcuucgccgcggggcugaucuacagccagcucaugacccugaaggacuucaagugcuucaaccugauccccaacgccaagacguggauggacaucgagggccgcccggaggaccccguggagaucgcccuguaccagcccuccagcggcugcuacguccacuucuuccgggagcccaccgaccucaagcaguucaagcaggacgccaaguacagccacgggcgcgacgugaccgaccuguucgccgcgcagccgggccugaccuccgccgucaucgaggcccucccccggaacauggugaucacgugccaggggagcgaggacauccgcaagcugcuggagucccagggccgccgggacaucaagcucaucgacaucacccugagcaaggccgacucccgcaaguucgagaacgccgugugggaccaguucaaggaccugugccacaugcacaccggggucgugguggagaagaagaagcggggcggcaaggaggagaucacgccccacugcgcgcucauggacugcaucauguucgacgccgccgucagcgggggccuggacgccaaggugcugcgcgugguccucccccgggacaugguguuccgcaccuccaccccgaaggugguccugugaggacuaguaauaaggaaacuguaugaaugucugugggcaggaagugaagagauccuucuguaaagguuuuuggaauuaugucugcugaauaauaaacuuuuuugaaauaauaaaucugguagaaaaaugagaucuaaaaaaaaaaaaaaaaaaaaaaaaaaaaaaaaaaaaaaaaaaaaaaaaaaaaaaaaaaaaaaaaaaaaaaaaaaaaaaaaaaaaaaaaaaaaaaaaaaaa

SEQ ID NO: 21664 - RNA, 2073 nt, Artificial Sequence
  mRNA product Design b-4 (A100) comprising derived and/or modified sequence from LASV(Nig08-A19;Clade III)__ADU56619__SP-IgE_NP(2-569) (opt1)
aggagagucccgcagucggcguccagcggcucugcuuguucgugugugugucguugcaggccuuauucaagcuuaccauggacuggaccuggauccuguuccucguggccgccgcgacccgcguccacagcagcgccuccaaggaggugaaguccuuccuguggacccagucccuccgccgggagcugagcggcuacugcuccaacaucaagcugcaggucgugaaggacgcccaggcgcuccugcacgggcuggacuucagcgagguguccaacguccagcgccucaugcggaagcagaagcgcgacgacggcgaccugaagcggcugcgcgaccucaaccaggccgugaacaaccugguggagcucaagagcacccagcagaaguccguccugcggguggggacccugagcuccgacgaccugcucgugcuggccgccgaccuggagaagcucaagagcaaggucgugcgcaccgagcggccccuguccagcggcaucuacauggggaaccuguccagccagcagcucgaccagcgcaaggcccugcugaacaugaucggcaugaccggcgggaacggcgggcggaacaccacguccgacggcaucgugcgcgucugggacgugaagaacgcggagcuccugaacaaccaguucgggaccaugccgagccugacccucgccugccugaccaagcagggccagguggaccugaacgacgccguccaggcccucacggaccugggccugaucuacaccgcgaaguaccccaacuccagcgaccucgaccggcuggcccagagccaccccauccugaacaugaucgacaccaagaaguccagccucaacaucuccggguacaacuucagccugggcgccgccgugaaggccggggcgugcaugcuggacggcggcaacaugcucgagaccaucaaggugagcccccagacgauggacgggauccucaagagcauccugaaggucaagcgcucccugggcauguucaucagcgacaccccgggggagcggaaccccuacgagaacauccuguacaagaucugccuguccggcgacggguggcccuacaucgccagccgcaccuccaucgugggccgggccugggagaacaccguggucgaccucgagagcgacaacaagccccagaagacgggcaacgggggcuccaacaagagccugcaguccgccggguucgccgcgggccugaccuacagccagcucaugacccugaaggacuccaugcugcagcuggacccgaacgccaagaccuggauggacaucgaggggcgccccgaggaccccguggagaucgcccucuaccagcccagcuccggcugcuacauccacuucuuccgggagccgacggaccugaagcaguucaagcaggacgccaaguacagccacggcaucgacgugaccgaccuguucgccgcgcagcccgggcucaccagcgccgucaucgaggcccugccccgcaacauggugaucacgugccagggcuccgaggacauccggaagcugcucgagagccaggggcgccgcgacaucaagcugaucgacaucucccugagcaaggucgacucccggaaguucgagaacgccgugugggaccaguucaaggaccucugccacaugcacaccggcaucguggucgagaagaagaagcgcgggggcaaggaggagaucacgccccacugcgcccugauggacugcaucauguucgacgcggccgugagcggcgggguggacgccaagguccugcgggccgugcucccgcgcgacaugguguuccggaccuccacccccaaggucgugcugugaggacuaguaauaaggaaacuguaugaaugucugugggcaggaagugaagagauccuucuguaaagguuuuuggaauuaugucugcugaauaauaaacuuuuuugaaauaauaaaucugguagaaaaaugagaucuaaaaaaaaaaaaaaaaaaaaaaaaaaaaaaaaaaaaaaaaaaaaaaaaaaaaaaaaaaaaaaaaaaaaaaaaaaaaaaaaaaaaaaaaaaaaaaaaaaaa

SEQ ID NO: 21665 - RNA, 2073 nt, Artificial Sequence
  mRNA product Design b-4 (A100) comprising derived and/or modified sequence from LASV(G1180-SLE-2010;Clade IV)__AIT17169__SP-IgE_NP(2-569) (opt1)
aggagagucccgcagucggcguccagcggcucugcuuguucgugugugugucguugcaggccuuauucaagcuuaccauggacuggaccuggauccuguuccucguggccgccgcgacccgcguccacagcagcgccuccaaggagaucaagagcuuccuguggacccagucccuccgccgggagcugagcggcuacugcuccaacaucaagcuccagguggucaaggacgcccaggcgcugcugcacgggcuggacuucagcgagguguccaacgugcagcgccucaugcggaaggagcgccgggacgacaacgaccugaagcgccugcgggaccucaaccaggccgucaacaaccugguggagcucaagagcacccagcagaaguccauccugcgcgugggcacccugaccagcgacgaccugcucauccuggccgccgaccuggagaagcucaaguccaaggucauccggaccgagcgcccccugagcgccgggguguacaugggcaaccuguccagccagcagcucgaccagcggcgcgcgcugcuguccaugaucgggaugagcuccggcaaccagcgggcccaggccggccgcgacggggugguccgggugugggacgugaagaacgucgagcuccugaacaaccaguucggcaccaugccgagccugacgcucgccugccugaccaagcagggccagguggaccugaacgacgcggugcaggcccucaccgaccuggggcugaucuacaccgccaaguaccccaacacguccgaccucgaccgccugacccagagccaccccauccugaacaugaucgacaccaagaaguccagccucaacaucagcggguacaacuucucccugggcgccgccgucaaggcgggcgccugcaugcuggacgggggcaacaugcucgagaccaucaaggugagcccccagacgauggacgggauccugaaguccauccugaaggugaagaaggcccucggcauguucaucagcgacaccccgggcgagcggaaccccuacgagaacauccuguacaagaucugccuguccggggacggcuggcccuacaucgccagccgcaccuccaucaccgggcgggccugggagaacacggucguggaccucgagagcgacggcaagccccagaaggcgggguccaacaacagcaacaagucccugcagagcgugggcuucaccgccggccugaccuacucccagcucaugacccugaaggacgccaugcugcagcuggacccgaacgccaagacguggauggacaucgaggggcgccccgaggaccccgucgagaucgcccucuaccagcccagcuccggcugcuacauccacuucuuccgggagccgaccgaccugaagcaguucaagcaggacgcgaaguacagccacgggaucgacgugaccgaccuguucgccgcccagcccggccucaccuccgccgugaucgacgcccugccccgcaacauggucaucacgugccaggggagcgacgacauccgcaagcugcucgagagccagggccggaaggacaucaagcugaucgacaucgcgcuguccaagaccgacagccgcaaguacgagaacgccgugugggaccaguacaaggaccucugccacaugcacaccggcgucgugguggagaagaagaagcgcgggggcaaggaggagaucacgccccacugcgcccugauggacugcaucauguucgacgccgcggucuccgggggccugaacaccagcgugcuccgggccgugcugccgcgggacauggucuuccgcaccuccacgccccggguggugcugugaggacuaguaauaaggaaacuguaugaaugucugugggcaggaagugaagagauccuucuguaaagguuuuuggaauuaugucugcugaauaauaaacuuuuuugaaauaauaaaucugguagaaaaaugagaucuaaaaaaaaaaaaaaaaaaaaaaaaaaaaaaaaaaaaaaaaaaaaaaaaaaaaaaaaaaaaaaaaaaaaaaaaaaaaaaaaaaaaaaaaaaaaaaaaaaaa

SEQ ID NO: 21666 - RNA, 2073 nt, Artificial Sequence
  mRNA product Design b-4 (A100) comprising derived and/or modified sequence from LASV(G1442-SLE-2011;Clade IV)__AIT17181__SP-IgE_NP(2-569) (opt1)
aggagagucccgcagucggcguccagcggcucugcuuguucgugugugugucguugcaggccuuauucaagcuuaccauggacuggaccuggauccuguuccucguggccgccgcgacccgcguccacagcagcgccuccaaggaggugaaguccuuccuguggacccagagccuccgccgggagcugagcggcuacugcuccaacaucaagcugcaggucgugaaggacgcccaggcgcuccugcacgggcuggacuucagcgagguguccaacguccagcgccucaugcggaagcagcgccgggacgacaacgaccugaagcgccugcgggaccucaaccaggccgugaacaaccugguggagcucaagagcacccagcagaaguccguccugcgcgugggcacccugaccagcgacgaccugcucgugcuggccgccgaccuggagaagcucaaguccaaggucauccggaccgagcgcccccugagcgccgggguguacaugggcaaccuguccagccagcagcucgaccagcggcgcgcgcugcugaacaugaucgggauguccggcggcauccaggggacccggacgggccgcgacggggugguccgggugugggacgugaagaacgccgaccuccugaacaaccaguucggcaccaugccgagccugacccucgccugccugaccaagcaggggcaggucgaccugaacgacguggugcaggcccucacggaccugggccugaucuacaccgcgaaguaccccaacgccuccgaccucgaccgccugacccagagccaccccauccugaacaugaucgacaccaagaaguccagccucaacaucagcggcuacaacuucucccugggggccgccgucaaggccggcgcgugcaugcuggacgggggcaacaugcucgagacgaucaaggugagcccccagaccauggacggcauccugaaguccauccugaaggugaagaagacccucgggauguucaucagcgacaccccgggcgagcggaaccccuacgagaacauccuguacaagaucugccuguccggggacggcuggcccuacaucgccagccgcacguccaucaccgggcgggccugggagaacaccgucguggaccucgagagcgacggcaagccccagaaggccggcuccaacaacagcaacaagucccugcagagcgccggguucgcggccggccugaccuacucccagcucaugacgcugaaggacgccaugcugcagcuggacccgaacgccaagaccuggauggacaucgaggggcgccccgaggaccccguggagaucgcccucuaccagcccagcuccggcugcuacauccacuucuuccgggagccgaccgaccugaagcaguucaagcaggacgcgaaguacagccacgggaucgacgucaccgaccuguucgccgcccagcccggccucacguccgccgugaucgaggcccugccccgcaacauggucaucacgugccagggcagcgacgacaucaagaagcugcucgagucccaggggcgcaaggacaucaagcugaucgacaucgcgcugagcaagaccgacagccggaaguacgagaacgccgugugggaccaguacaaggaccucugccacaugcacaccggcguggucguggagaagaagaagcgcgggggcaaggaggagaucaccccgcacugcgcccugauggacugcaucauguucgacgccgcgguguccgggggccugaacacccucguccugcgggccgugcugccccgcgacaugguguuccggaccagcacgccccgcgucgugcucugaggacuaguaauaaggaaacuguaugaaugucugugggcaggaagugaagagauccuucuguaaagguuuuuggaauuaugucugcugaauaauaaacuuuuuugaaauaauaaaucugguagaaaaaugagaucuaaaaaaaaaaaaaaaaaaaaaaaaaaaaaaaaaaaaaaaaaaaaaaaaaaaaaaaaaaaaaaaaaaaaaaaaaaaaaaaaaaaaaaaaaaaaaaaaaaaa

SEQ ID NO: 21667 - RNA, 2073 nt, Artificial Sequence
  mRNA product Design b-4 (A100) comprising derived and/or modified sequence from LASV(G3010-SLE-2013;Clade IV)__AIT17345__SP-IgE_NP(2-569) (opt1)
aggagagucccgcagucggcguccagcggcucugcuuguucgugugugugucguugcaggccuuauucaagcuuaccauggacuggaccuggauccuguuccucguggccgccgcgacccgcguccacagcagcgccuccaaggagaucaagagcuuccuguggacccagucccuccgccgggagcugagcggcuacugcuccaacaucaagcuccagguggucaaggacgcccaggcgcugcugcacgggcuggacuucagcgagguguccaacgugcagcgccucaugcggaaggagcgccgggacgacaacgaccugaagcgccugcgggaccucaaccaggccgucaacaaccugguggagcucaagagcacccagcagaaguccauccugcgcgugggcacccugaccagcgacgaccugcucauccuggccgccgaccuggagaagcucaaguccaaggucacccggaccgagcgcccccugagcgccgggguguacaugggcaaccuguccagccagcagcucgaccagcggcgcgcgcugcuguccaugaucgggaugagcuccggcgugcagggcgcccgggccgggcgcgacggcgucgugcgggugugggacgucaagaacgccgagcuccugaacaaccaguucgggacgaugccgagccugacccucgcgugccugaccaagcagggccagguggaccugaacgacgugguccaggcccucaccgaccuggggcugaucuacacggccaaguaccccaacaccuccgaccucgaccgccugacccagagccaccccauccugaacaugaucgacaccaagaaguccagccucaacaucagcggcuacaacuucucccugggcgccgccgugaaggcgggggccugcaugcuggacggcgggaacaugcucgagacgaucaaggugagcccccagaccauggacggcauccugaaguccauccugaaggucaagaaggcccucggcauguucaucagcgagaccccgggggagcggaaccccuacgagaacauccuguacaagaucugccuguccggcgacggguggcccuacaucgccagccgcaccuccaucacgggccgggccugggagaacaccgugguggaccucgagagcgacgggaagccccagaaggcgggcuccaacaacagcaacaagucccugcagagcgccggcuucaccgccgggcugaccuacucccagcucaugacgcugaaggacgccaugcugcagcuggacccgaacgccaagaccuggauggacaucgagggccgccccgaggaccccgucgagguggcgcucuaccagcccagcuccgggugcuacauccacuucuuccgggagccgaccgaccugaagcaguucaagcaggacgccaaguacagccacggcaucgacgugaccgaccuguucgccgcccagcccgggcucacguccgccgucaucgacgcgcugccccgcaacauggugaucacgugccagggcagcgacgacaucaagaagcugcucgagagccagggccgcaaggacaucaagcugaucgacaucgcccuguccaagaccgacagccggaaguacgagaacgccgucugggaccaguacaaggaccucugccacaugcacaccggggugguggucgagaagaagaagcgcggcgggaaggaggagaucaccccgcacugcgcccugauggacugcaucauguucgacgcggccguguccggcgggcugaacaccagcgugcuccgggccguccugccccgcgacaugguguuccggaccuccacgccccgcgugguccugugaggacuaguaauaaggaaacuguaugaaugucugugggcaggaagugaagagauccuucuguaaagguuuuuggaauuaugucugcugaauaauaaacuuuuuugaaauaauaaaucugguagaaaaaugagaucuaaaaaaaaaaaaaaaaaaaaaaaaaaaaaaaaaaaaaaaaaaaaaaaaaaaaaaaaaaaaaaaaaaaaaaaaaaaaaaaaaaaaaaaaaaaaaaaaaaaa

SEQ ID NO: 21668 - RNA, 2073 nt, Artificial Sequence
  mRNA product Design b-4 (A100) comprising derived and/or modified sequence from LASV(G502-SLE-2009;Clade IV)__AIT17127__SP-IgE_NP(2-569) (opt1)
aggagagucccgcagucggcguccagcggcucugcuuguucgugugugugucguugcaggccuuauucaagcuuaccauggacuggaccuggauccuguuccucguggccgccgcgacccgcguccacagcagcgccuccaaggagaucaagagcuuccuguggacccagucccuccgccgggagcugagcggcuacugcuccaacaucaagcuccagguggucaaggacgcccaggcgcugcugcacgggcuggacuucagcgagguguccaacgugcagcgccucaugcggaaggagcgccgggacgacaacgaccugaagcgccugcgggaccucaaccaggccgucaacaaccugguggagcucaagagcacccagcagaaguccauccugcgcgugggcacccugaccagcgacgaccugcucauccuggccgccgaccuggagaagcucaaguccaaggucauccggaccgagcgcccccugagcgccgggguguacaugggcaaccuguccagccagcagcucgaccagcggcgcgcgcugcuguccaugaucgggaugagcggcggcaaccagggggugcgggccggcaaggacggggucgugcgcgugugggacgucaagaacgccgagcuccugaacaaccaguucggcaccaugccgucccugacgcucgccugccugaccaagcagggccagguggaccugaacgacgcggugcaggcccucaccgaccuggggcugaucuacaccgccaaguaccccaacacgagcgaccucgaccggcugacccagucccaccccauccugaacaugaucgacaccaagaaguccagccucaacaucuccggcuacaacuucagccugggggccgccgucaaggcgggcgccugcaugcuggacgggggcaacaugcucgagaccaucaaggugagcccccagacgauggacggcauccucaagagcauccugaaggugaagaaggcccuggggauguucaucuccgacaccccgggcgagcgcaaccccuacgagaacauccuguacaagaucugccugagcggggacggcuggcccuacaucgccucccggaccagcaucaccgggcgcgccugggagaacacggucguggaccucgaguccgacggcaagccccagaaggcgggcagcaacaacuccaacaagagccugcaguccgccggguucaccgccggccugaccuacagccagcucaugacccugaaggacgccaugcugcagcuggacccgaacacgaagaccuggauggacaucgaggggcggcccgaggaccccguggagaucgcccucuaccagcccuccagcggcugcuacauccacuucuuccgcgagccgaccgaccugaagcaguucaagcaggacgcgaaguacucccacgggaucgacgucaccgaccuguucgccgcccagcccggccucacgagcgccgugaucgacgcccugccccggaacauggugaucacgugccagggcuccgacgacauccgcaagcugcucgagagccaggggcgcaaggacaucaagcugaucgacaucgcgcugaacaagaccgacagccggaaguacgagaacgccgucugggaccaguacaaggaccucugccacaugcacaccggcguggucguggagaagaagaagcgcgggggcaaggaggagaucaccccgcacugcgcccugauggacugcaucauguucgacgccgcgguguccgggggccugaacaccagcguccuccgggccgugcugccccgcgacaugguguuccggaccuccacgccccgcgucgugcugugaggacuaguaauaaggaaacuguaugaaugucugugggcaggaagugaagagauccuucuguaaagguuuuuggaauuaugucugcugaauaauaaacuuuuuugaaauaauaaaucugguagaaaaaugagaucuaaaaaaaaaaaaaaaaaaaaaaaaaaaaaaaaaaaaaaaaaaaaaaaaaaaaaaaaaaaaaaaaaaaaaaaaaaaaaaaaaaaaaaaaaaaaaaaaaaaa

SEQ ID NO: 21669 - RNA, 2073 nt, Artificial Sequence
  mRNA product Design b-4 (A100) comprising derived and/or modified sequence from LASV(G733-SLE-2010;Clade IV)__AIT17155__SP-IgE_NP(2-569) (opt1)
aggagagucccgcagucggcguccagcggcucugcuuguucgugugugugucguugcaggccuuauucaagcuuaccauggacuggaccuggauccuguuccucguggccgccgcgacccgcguccacagcagcgccuccaaggagaucaagagcuuccuguggacccagucccuccgccgggagcugagcggcuacugcuccaacaucaagcuccagguggucaaggacgcccaggcgcugcugcacgggcuggacuucagcgagguguccaacgugcagcgccucaugcggaaggagcgccgggacgacaacgaccugaagcgccugcgggaccucaaccaggccgucaacaaccugguggagcucaagagcacccagcagaaguccgugcugcgcgucggcacccugaccagcgacgagcugcucgugcuggccgccgaccuggagaagcucaaguccaaggugauccggaccgagcgcccccugagcgccggggucuacaugggcaaccuguccagccagcagcucgaccagcggcgcgcgcugcuguccaugaucgggaugagcggcggcaaccagggggcccggaccggccgcgacgggguggugcgggucugggacgugaagaacgccgagcuccugaacaaccaguucggcaccaugccgucccugacccucgccugccugaccaagcagggccagguggaccugaacgacgcgguccaggcccucaccgaccuggggcugaucuacacggccaaguaccccaacaccagcgaccucgaccgccugacccagucccaccccauccugaacaugaucgacaccaagaaguccagccucaacaucuccggcuacaacuucagccugggggccgccgugaaggcgggcgccugcaugcuggacgggggcaacaugcucgagacgaucaaggugagcccccagaccauggacggcauccucaagagcauccugaaggucaagaaggcccuggggauguucaucuccgacaccccgggcgagcggaaccccuacgagaacauccuguacaagaucugccugagcggggacggcuggcccuacaucgccucccgcaccagcaucacggggcgggccugggagaacaccgugguggaccucgaguccgacggcaagccccagaaggcgggcagcaacaacuccaacaagagccugcaguccgccggguucaccgccggccugaccuacagccagcucaugacgcugaaggacgccaugcugcagcuggacccgaacgccaagaccuggauggacaucgaggggcgccccgaggaccccgucgagaucgcgcucuaccagcccuccagcggcugcuacauccacuucuuccgggagccgaccgaccugaagcaguucaagcaggacgccaaguacucccacgggaucgacgugaccgaccuguucgccgcccagcccggccucacgagcgccgugaucgacgcgcugccccgcaacauggucaucacgugccagggcuccgacgacauccgcaagcugcucgagagccaggggcggaaggacaucaagcugaucgacaucgcccugagcaagaucgacucccgcaaguacgagaacgccgugugggaccaguacaaggaccucugccacaugcacaccggcgucgugguggagaagaagaagcgcgggggcaaggaggagaucacgccccacugcgcccugauggacugcaucauguucgacgcggccgucagcgggggccugaacucccucgugcugcgggccgugcugccgcgggacauggucuuccgcaccagcacgccccggguggugcucugaggacuaguaauaaggaaacuguaugaaugucugugggcaggaagugaagagauccuucuguaaagguuuuuggaauuaugucugcugaauaauaaacuuuuuugaaauaauaaaucugguagaaaaaugagaucuaaaaaaaaaaaaaaaaaaaaaaaaaaaaaaaaaaaaaaaaaaaaaaaaaaaaaaaaaaaaaaaaaaaaaaaaaaaaaaaaaaaaaaaaaaaaaaaaaaaa

SEQ ID NO: 21670 - RNA, 2073 nt, Artificial Sequence
  mRNA product Design b-4 (A100) comprising derived and/or modified sequence from MOPV/LASV reassortant(IGS-1;Clade IV)__AFY05578__SP-IgE_NP(2-569) (opt1)
aggagagucccgcagucggcguccagcggcucugcuuguucgugugugugucguugcaggccuuauucaagcuuaccauggacuggaccuggauccuguuccucguggccgccgcgacccgcguccacagcagcgccuccaaggagaucaagagcuuccuguggacccagucccuccgccgggagcugagcggcuacugcuccaacaucaagcuccagguggucaaggacgcccaggcgcugcugcacgggcuggacuucagcgagguguccaacgugcagcgccucaugcggaaggagcgccgggacgacaacgaccugaagcgccugcgggaccucaaccaggccgucaacaaccugguggagcucaagagcacccagcagaaguccauccugcgcgugggcacccugaccagcgacgaccugcucauccuggccgccgaccuggagaagcuccgguccaaggucauccgcaccgagcggccccugagcgccgggguguacaugggcaaccuguccagccagcagcucgaccagcgccgggcgcugcugaacaugaucgggauguccggcggcaaccagggggcccgcgccggccgggacggggugguccgcgugugggacgugaagaacgccgagcuccugagcaaccaguucggcaccaugccgucccugacgcucgcgugccugaccaagcaggggcaggucgaccugaacgacgccgugcaggcccucaccgaccugggccugaucuacaccgccaaguaccccaacacgagcgaccucgaccggcugacccagucccaccccauccugaacaugaucgacaccaagaaguccagccucaacaucuccggcuacaacuucagccugggggccgcggugaaggccggcgccugcaugcuggacgggggcaacaugcucgagaccaucaaggucagcccccagacgauggacggcauccucaagagcauccugaaggugaagaaggcccuggggauguucaucuccgacaccccgggcgagcgcaaccccuacgagaacauccuguacaagaucugccugagcggggacggcuggcccuacaucgccucccggaccagcaucaccgggcgcgcgugggagaacacgguggucgaccucgaguccgacggcaagccccagaaggccgacagcaacaacuccagcaagucccugcagagcgccggcuucaccgccgggcugaccuacucccagcucaugacccugaaggacgccaugcugcagcuggacccgaacgcgaagacguggauggacaucgagggccggcccgaggaccccguggagaucgcccucuaccagcccagcuccgggugcuacauccacuucuuccgcgagccgaccgaccugaagcaguucaagcaggacgccaaguacagccacggcaucgacgugaccgaccuguucgccacccagcccgggcucacguccgccgucaucgacgcgcugccccgcaacauggugaucacgugccagggcagcgacgacauccggaagcugcucgagagccagggccgcaaggacaucaagcugaucgacaucgaccuguccaagaccgacagccggaaguacgagaacgccgugugggaccaguacaaggaccucugccacaugcacaccggggucguggucgagaagaagaagcgcggcgggaaggaggagaucaccccgcacugcgcccugauggacugcaucauguucgacgccgcgguguccggcgggcugaacaccagcgugcuccgggccguccugccccgcgacaugguguuccggaccuccacgccccgcgugguccugugaggacuaguaauaaggaaacuguaugaaugucugugggcaggaagugaagagauccuucuguaaagguuuuuggaauuaugucugcugaauaauaaacuuuuuugaaauaauaaaucugguagaaaaaugagaucuaaaaaaaaaaaaaaaaaaaaaaaaaaaaaaaaaaaaaaaaaaaaaaaaaaaaaaaaaaaaaaaaaaaaaaaaaaaaaaaaaaaaaaaaaaaaaaaaaaaa

SEQ ID NO: 21671 - RNA, 2073 nt, Artificial Sequence
  mRNA product Design b-4 (A100) comprising derived and/or modified sequence from LASV(LM765-SLE-2012;Clade IV)__AIT17815__SP-IgE_NP(2-569) (opt1)
aggagagucccgcagucggcguccagcggcucugcuuguucgugugugugucguugcaggccuuauucaagcuuaccauggacuggaccuggauccuguuccucguggccgccgcgacccgcguccacagcagcgccuccaaggagaucaagagcuuccuguggacccagucccuccgccgggagcugagcggcuacugcuccaacaucaagcuccagguggucaaggacgcccaggcgcugcugcacgggcuggacuucagcgagguguccaacgugcagcgccucaugcggaaggagcgccgggacgacaacgaccugaagcgccugcgggaccucaaccaggccgucaacaaccugguggagcucaagagcacccagcagaaguccauccugcgcgugggcacccugaccagcgacgaccugcucauccuggccgccgaccuggagaagcucaaguccaaggucacccggaccgagcgcccccugagcgccgggguguacaugggcaaccuguccagccagcagcucgaccagcggcgcgcgcugcuggacaugaucgggauguccggcagcaaccagggcgcccgggccgggcgcgacggcgugguccgggugugggacgugaagaacgccgagcuccugaacaaccaguucgggacgaugccgucccugacccucgcgugccugaccaagcagggccaggucgaccugaacgacgccgugcaggcccucaccgaccuggggcugaucuacacggccaaguaccccaacaccagcgaccucgaccgccugacccagucccaccccauccugaacaugaucgacaccaagaaguccagccucaacaucuccggcuacaacuucagccugggcgccgcggugaaggccggggccugcaugcuggacggcgggaacaugcucgagacgaucaaggucagcccccagaccauggacggcauccucaagagcauccugaaggugaagaaggcccugggcauguucaucuccgacgccccgggggagcggaaccccuacgagaacauccuguacaagaucugccugagcggcgacggguggcccuacaucgcgucccgcaccagcaucaccggccgggccugggagaacacgguggucgaccucgaguccgacgggaagccccagaaggccggcagcaacggcuccaacaagagccugcaguccgccggguucaccgccggccugaccuacagccagcucaugacccugaaggacgcgaugcugcagcuggacccgaacgccaagacguggauggacaucgaggggcgccccgaggaccccguggagaucgcccucuaccagcccuccagcggcugcuacauccacuucuuccgggagccgaccgaccugaagcaguucaagcaggacgccaaguacucccacgggaucgacgugaccgaccuguucgccgcgcagcccggccucaccagcgccgucaucgacgcccugccccgcaacauggugaucacgugccagggcuccgacgacauccgcaagcuguucgagagccaggggcggaaggacaucaagcucaucgacaucgcccugagcaagaccgacucccgcaaguacgagaacgcggugugggaccaguacaaggaccugugccacaugcacaccggcaucgucguggagaagaagaagcgcgggggcaaggaggagaucacgccccacugcgcccucauggacugcaucauguucgacgccgccgucagcgggggccugaacaccuccgugcugcgggccgugcucccgcgggacauggucuuccgcaccagcacgccccggguggugcugugaggacuaguaauaaggaaacuguaugaaugucugugggcaggaagugaagagauccuucuguaaagguuuuuggaauuaugucugcugaauaauaaacuuuuuugaaauaauaaaucugguagaaaaaugagaucuaaaaaaaaaaaaaaaaaaaaaaaaaaaaaaaaaaaaaaaaaaaaaaaaaaaaaaaaaaaaaaaaaaaaaaaaaaaaaaaaaaaaaaaaaaaaaaaaaaaa

SEQ ID NO: 21672 - RNA, 2073 nt, Artificial Sequence
  mRNA product Design b-4 (A100) comprising derived and/or modified sequence from LASV(LM776-SLE-2012;Clade IV)__AIT17825__SP-IgE_NP(2-569) (opt1)
aggagagucccgcagucggcguccagcggcucugcuuguucgugugugugucguugcaggccuuauucaagcuuaccauggacuggaccuggauccuguuccucguggccgccgcgacccgcguccacagcagcgccuccaaggagaucaagagcuuccuguggacccagucccuccgccgggagcugagcuccuacugcagcaacaucaagcuccagguggucaaggacgcccaggcgcugcugcacggccuggacuucuccgaggugagcaacgugcagcgccucaugcggaaggagcgccgggacgacaacgaccugaagcgccugcgggaccucaaccaggccgucaacaaccugguggagcugaaguccacccagcagaaguccauccuccgcguggggacccugaccuccgacgaccugcucauccuggccgccgaccuggagaagcucaagagcaaggucacccggaccgagcgcccccuguccgccggcguguacauggggaaccugagcucccagcagcucgaccagcggcgcgcgcugcugagcaugaucggcauguccgggagcaaccagggcgcccgggccggccgcgacggggugguccgggugugggacgugaagaacgccgagcuccugaacaaccaguucggcacgaugccgucccugacccucgcgugccugaccaagcaggggcaggucgaccugaacgacgccgugcaggcccucaccgaccugggccugaucuacacggccaaguaccccaacaccagcgaccucgaccgccugacccagagccaccccauccugaacaugaucgacaccaagaaguccagccucaacaucuccggguacaacuucagccugggcgccgcggugaaggccggcgccugcaugcuggacgggggcaacaugcucgagacgaucaaggucagcccccagaccauggacgggauccucaagagcauccugaaggugaagaaggcccugggcauguucaucuccgacaccccgggcgagcggaaccccuacgagaacauccuguacaagaucugccugagcggggacggcuggcccuacaucgccucccgcaccagcaucacggggcgggcgugggagaacaccguggucgaccucgaguccgacggcaagccccagaaggccgggagcaacaacuccaacaagagccugcaguccgccggcuucaccgccggccugaccuacagccagcucaugacgcugaaggacgccaugcugcagcuggacccgaacgcgaagaccuggauggacaucgaggggcgccccgaggaccccguggagguggcccucuaccagcccuccagcggcugcuacauccacuucuuccgggagccgaccgaccugaagcaguucaagcaggacgccaaguacucccacgggaucgacgucaccgaccuguucgccgcccagcccggccucacgagcgcggugaucgacgcccugccccgcaacauggugaucacgugccaggggagcgacgacauccgcaagcugcucgagucccagggccggaaggacaucaagcugaucgacaucgcccugagcaagaccgacucccgcaaguacgagaacgccgucugggaccaguacaaggaccucugccacaugcacaccggcguggucguggagaagaagaagcgcgggggcaaggaggagaucaccccgcacugcgcgcugauggacugcaucauguucgacgccgccgugagcgggggccugaacaccuccguccuccgggccgugcugccccgggacaugguguuccgcaccagcacgccccgggucgugcugugaggacuaguaauaaggaaacuguaugaaugucugugggcaggaagugaagagauccuucuguaaagguuuuuggaauuaugucugcugaauaauaaacuuuuuugaaauaauaaaucugguagaaaaaugagaucuaaaaaaaaaaaaaaaaaaaaaaaaaaaaaaaaaaaaaaaaaaaaaaaaaaaaaaaaaaaaaaaaaaaaaaaaaaaaaaaaaaaaaaaaaaaaaaaaaaaa

SEQ ID NO: 21673 - RNA, 2073 nt, Artificial Sequence
  mRNA product Design b-4 (A100) comprising derived and/or modified sequence from LASV(Mad39;Clade IV)__ANH09723__SP-IgE_NP(2-569) (opt1)
aggagagucccgcagucggcguccagcggcucugcuuguucgugugugugucguugcaggccuuauucaagcuuaccauggacuggaccuggauccuguuccucguggccgccgcgacccgcguccacagcagcgccuccaaggagaucaagagcuuccuguggacccagucccuccgccgggagcugagcggcuacugcuccaacaucaagcuccagguggucaaggacgcccaggcgcugcugcacgggcuggacuucagcgagguguccaacgugcagcgccucaugcggaagcagcgccgggacgacaacgaccugaagcgccugcgggaccucaaccaggccgucaacaaccugguggagcugaaguccacccagcagaaguccgugcuccgcgucggcacgcugaccagcgacgaccugcucacccuggccgccgaccuggagaagcucaaguccaaggugacccggacggagcgcccccugaccgccgggguguacaugggcaaccugagcucccagcagcucgaccagcggcgcgcgcugcugaacaugaucgggaugagcggcggcaaccagggggcccggaccggccgcgacggggucgugcgggugugggacgucaagaacgccgagcuccugaacaaccaguucggcaccaugccgucccugacgcucgccugccugaccaagcagggccagguggaccugaacgacgugguccaggcgcucaccgaccuggggcugaucuacaccgccaaguaccccaacacgagcgaccucgaccgccugacccagucccaccccauccugaacaugaucgacaccaacaagagcucccucaacaucagcggcuacaacuucagccugggggccgccgugaaggccggcgcgugcaugcuggacgggggcaacaugcucgagaccaucaaggugagcccccagacgauggacggcauccucaagagcauccugaaggucaagaagucccuggggauguucaucagcgacaccccgggcgagcggaaccccuacgagaacauccuguacaagaucugccuguccggggacggcuggcccuacaucgccagccgcaccuccaucaccgggcgggccugggagaacacggugguggaccucgagagcggcggcaagccccagaaggccggguccaacaacagcaacaagucccugcagagcgccggcuucgcggccgggcugaccuacucccagcucaugacccugaaggacgccaugcugcagcuggacccgaacgccaagaccuggauggacaucgagggccgccccgaggaccccgucgagaucgcccucuaccagcccaucagcgggugcuacauccacuucuuccgggagccgacggaccugaagcaguucaagcaggacgcgaaguacucccacggcaucgacgugaccgaccuguucgccgcccagcccggccucaccagcgccgugaucgaggcccugccccgcaacauggucaucacgugccagggguccgacgacauccgcaagcuguucgagagccagggccggaaggacaucaagcucaucgacaucgcgcuguccaagaccgacagccgcaaguacgagaacgccgugugggaccaguacaaggaccugugccacaugcacaccggggucgugguggagaagaagaagaagggcgggaaggaggagaucacgccccacugcgcccucauggacugcaucauguucgacgccgcggucagcggcggccugaacacccuggugcuccgggccgugcugccgcgcgacauggucuuccggaccuccacccccaagguggugcugugaggacuaguaauaaggaaacuguaugaaugucugugggcaggaagugaagagauccuucuguaaagguuuuuggaauuaugucugcugaauaauaaacuuuuuugaaauaauaaaucugguagaaaaaugagaucuaaaaaaaaaaaaaaaaaaaaaaaaaaaaaaaaaaaaaaaaaaaaaaaaaaaaaaaaaaaaaaaaaaaaaaaaaaaaaaaaaaaaaaaaaaaaaaaaaaaa

SEQ ID NO: 21674 - RNA, 2073 nt, Artificial Sequence
  mRNA product Design b-4 (A100) comprising derived and/or modified sequence from LASV(Z0947-SLE-2011;Clade IV)__AIT17841__SP-IgE_NP(2-569) (opt1)
aggagagucccgcagucggcguccagcggcucugcuuguucgugugugugucguugcaggccuuauucaagcuuaccauggacuggaccuggauccuguuccucguggccgccgcgacccgcguccacagcagcgccuccaaggagaucaagagcuuccuguggacccagucccuccgccgggagcugagcggcuacugcuccaacaucaagcuccagguggucaaggacgcccaggcgcugcugcacgggcuggacuucagcgagguguccaacgugcagcgccucaugcggaaggagcgccgggacgacaacgaccugaagcgccugcgggaccucaaccaggccgucaacaaccugguggagcucaagagcacccagcagaaguccauccugcgcgugggcacccugaccagcgacgaccugcucauccuggccgccgaccuggagaagcucaaguccaaggucacccggaccgagcgcccccugagcgccgggguguacaugggcaaccuguccagccagcagcucgaccagcggcgcgcgcugcugaacaugaucgggauguccggcagcaaccagggcgcccggacggggcgcgacggcgugguccgggugugggacgugaagaacgccgagcuccugaacaaccaguucgggaccaugccgucccugacccucgccugccugaccaagcagggccaggucgaccugaacgacgcggugcaggcccucacggaccuggggcugaucuacaccgccaaguaccccaacaccagcgaccucgaccgccugacccagucccaccccauccugaacaugaucgacacgaagaaguccagccucaacaucuccggcuacaacuucagccugggcgccgccgugaaggcgggggccugcaugcuggacggcgggaacaugcucgagaccaucaaggucagcccccagaccauggacggcauccucaagagcauccugaaggugaagaaggcccugggcauguucaucuccgacgccccgggggagcggaaccccuacgagaacauccuguacaagaucugccugagcggcgacggguggcccuacaucgccucccgcaccagcaucacgggccgggcgugggagaacaccguggucgaccucgaguccgacgggaagccccagaaggccggcagcaacggcuccaacaagagccugcaguccgccggguucaccgccggccugaccuacagccagcucaugacgcugaaggacgccaugcugcagcuggacccgaacgcgaagaccuggauggacaucgaggggcgccccgaggaccccguggagaucgcccucuaccagcccuccagcggcugcuacauccacuucuuccgggagccgaccgaccugaagcaguucaagcaggacgccaaguacucccacgggaucgacgugaccgaccuguucgccgcccagcccggccucacgagcgcggucaucgacgcccugccccgcaacauggugaucacgugccagggcuccgacgacauccgcaagcuguucgagagccaggggcggaaggacaucaagcucaucgacaucgcccugagcaagaccgacucccgcaaguacgagaacgccgugugggaccaguacaaggaccugugccacaugcacaccggcaucgucguggagaagaagaagcgcgggggcaaggaggagaucaccccgcacugcgcgcucauggacugcaucauguucgacgccgccgucagcgggggccugaacaccuccgugcugcgggccgugcucccccgggacauggucuuccgcaccagcacgccccggguggugcugugaggacuaguaauaaggaaacuguaugaaugucugugggcaggaagugaagagauccuucuguaaagguuuuuggaauuaugucugcugaauaauaaacuuuuuugaaauaauaaaucugguagaaaaaugagaucuaaaaaaaaaaaaaaaaaaaaaaaaaaaaaaaaaaaaaaaaaaaaaaaaaaaaaaaaaaaaaaaaaaaaaaaaaaaaaaaaaaaaaaaaaaaaaaaaaaaa

SEQ ID NO: 21675 - RNA, 2073 nt, Artificial Sequence
  mRNA product Design b-4 (A100) comprising derived and/or modified sequence from LASV(Josiah;Clade IV)__NP_694869__SP-IgE_NP(2-569) (opt4)
aggagagucccgcagucggcguccagcggcucugcuuguucgugugugugucguugcaggccuuauucaagcuuaccauggacuggaccuggauccuguuccugguggccgccgccaccagagugcacagcagcgccagcaaggagaucaagagcuuccuguggacccagagccugagaagagagcugagcggcuacugcagcaacaucaagcugcagguggugaaggacgcccaggcccugcugcacggccuggacuucagcgaggugagcaacgugcagagacugaugagaaaggagagaagagacgacaacgaccugaagagacugagagaccugaaccaggccgugaacaaccugguggagcugaagagcacccagcagaagagcauccugagagugggcacccugaccagcgacgaccugcugauccuggccgccgaccuggagaagcugaagagcaaggugaucagaaccgagagaccccugagcgccggcguguacaugggcaaccugagcagccagcagcuggaccagagaagagcccugcugaacaugaucggcaugagcggcggcaaccagggcgccagagccggcagagacggcguggugagagugugggacgugaagaacgccgagcugcugaacaaccaguucggcaccaugcccagccugacccuggccugccugaccaagcagggccagguggaccugaacgacgccgugcaggcccugaccgaccugggccugaucuacaccgccaaguaccccaacaccagcgaccuggacagacugacccagagccaccccauccugaacaugaucgacaccaagaagagcagccugaacaucagcggcuacaacuucagccugggcgccgccgugaaggccggcgccugcaugcuggacggcggcaacaugcuggagaccaucaaggugagcccccagaccauggacggcauccugaagagcauccugaaggugaagaaggcccugggcauguucaucagcgacacccccggcgagagaaaccccuacgagaacauccuguacaagaucugccugagcggcgacggcuggcccuacaucgccagcagaaccagcaucaccggcagagccugggagaacaccgugguggaccuggagagcgacggcaagccccagaaggccgacagcaacaacagcagcaagagccugcagagcgccggcuucaccgccggccugaccuacagccagcugaugacccugaaggacgccaugcugcagcuggaccccaacgccaagaccuggauggacaucgagggcagacccgaggaccccguggagaucgcccuguaccagcccagcagcggcugcuacauccacuucuucagagagcccaccgaccugaagcaguucaagcaggacgccaaguacagccacggcaucgacgugaccgaccuguucgccacccagcccggccugaccagcgccgugaucgacgcccugcccagaaacauggugaucaccugccagggcagcgacgacaucagaaagcugcuggagagccagggcagaaaggacaucaagcugaucgacaucgcccugagcaagaccgacagcagaaaguacgagaacgccgugugggaccaguacaaggaccugugccacaugcacaccggcguggugguggagaagaagaagagaggcggcaaggaggagaucaccccccacugcgcccugauggacugcaucauguucgacgccgccgugagcggcggccugaacaccagcgugcugagagccgugcugcccagagacaugguguucagaaccagcacccccagaguggugcugugaggacuaguaauaaggaaacuguaugaaugucugugggcaggaagugaagagauccuucuguaaagguuuuuggaauuaugucugcugaauaauaaacuuuuuugaaauaauaaaucugguagaaaaaugagaucuaaaaaaaaaaaaaaaaaaaaaaaaaaaaaaaaaaaaaaaaaaaaaaaaaaaaaaaaaaaaaaaaaaaaaaaaaaaaaaaaaaaaaaaaaaaaaaaaaaaa

SEQ ID NO: 21676 - RNA, 2073 nt, Artificial Sequence
  mRNA product Design b-4 (A100) comprising derived and/or modified sequence from LASV(LP;Clade I)__AAF86702__SP-IgE_NP(2-569) (opt4)
aggagagucccgcagucggcguccagcggcucugcuuguucgugugugugucguugcaggccuuauucaagcuuaccauggacuggaccuggauccuguuccugguggccgccgccaccagagugcacagcagcaacagcaaggagaucaagagcuuccuguggacccagagccugagaagagagcugagcggcuacugcagcaacaucaagcugcagguggugaaggacgcccaggcccugcugcacggccuggacuucagcgaggugagcaacgugcagagacugaugagaaagcagaagagagacgacgccgaccugaagagacugagagaccugaaccaggccgugaacaaccugguggagcugaagagcacccagcagaagaacgugcugagagugggcacccugagcagcgacgaccugaucacccuggccgccgaccuggagaagcugaagagcaaggugaucagaaccgagagaccccugagcagcggcguguacaugggcaaccugagcagccagcagcuggaccagagaagagcccugcugagcaugaucggcaugagcggcggcccccagggcaacagaaccggcggcgacggcguggugagagugugggacgugaagaacgccgagcugcugaacaaccaguucggcaccaugcccagccugacccuggccugccugaccaagcagggccagguggaccugaacgacgccgugcaggcccugaccgaccugggccugaucuacaccgccaaguaccccaacagcagcgaccuggacaugcugacccagagccaccccauccugggcaugguggacaccaagaagagcagccugaacaucagcggcuacaacuucagccugggcgccgccgugaaggccggcgccugcaugcuggacggcggcaacaugcuggagaccaucaaggugagcccccagaccauggacggcauccugaagagcauccugaaggugaagagaagccugggcauguucaucagcgacacccccggcgagagaaaccccuacgagaacauccuguacaagaucugccugagcggcgagggcuggcccuacaucgccagcagaaccagcaucaccggcagagccugggagaacacccugguggaccuggagagcgacaacaagccccccaagcugaacagcgccggcagcaacaagagccugcaggccgccggccugaacgccggccugaccuacagccagcugaugacccugaaggacugcaugcugcagcuggaccccagcagcaagaccuggaucgacaucgagggcagacccgaggaccccguggagaucgcccuguuccagcccagcagcggcugcuacauccacuucuucagagagcccaccgaccugaagcaguucaagcaggacgccaaguacagccacggcaucgacgugaccgaccuguucagcacccagcccggccugaccagcgccgugaucgaggcccugcccagaaacauggugcugaccugccagggcagcgacgacaucaagaagcugcuggagagccagggcagaagagacaucaagcugaucgacaucagccugagcaaggccgacagcagaaaguucgagaacgccgugugggaccaguacaaggaccugugccacaugcacaccggcguggugguggagaagaagaagagaggcggcaaggaggagaucaccccccacugcgcccugcuggacugcaucauguucgacgccgccaccaccggcagccugaacaucaccacccugagagccgugcugcccagagacaugguguucagaaccagcacccccaagguggugcugugaggacuaguaauaaggaaacuguaugaaugucugugggcaggaagugaagagauccuucuguaaagguuuuuggaauuaugucugcugaauaauaaacuuuuuugaaauaauaaaucugguagaaaaaugagaucuaaaaaaaaaaaaaaaaaaaaaaaaaaaaaaaaaaaaaaaaaaaaaaaaaaaaaaaaaaaaaaaaaaaaaaaaaaaaaaaaaaaaaaaaaaaaaaaaaaaa

SEQ ID NO: 21677 - RNA, 2073 nt, Artificial Sequence
  mRNA product Design b-4 (A100) comprising derived and/or modified sequence from LASV(803213;Clade II)__AAF86704__SP-IgE_NP(2-569) (opt4)
aggagagucccgcagucggcguccagcggcucugcuuguucgugugugugucguugcaggccuuauucaagcuuaccauggacuggaccuggauccuguuccugguggccgccgccaccagagugcacagcagcgccagcaaggaggugaagagcuuccuguggacccagagccugagaagagagcugagcggcuacugcagcaacaucaagcugcagguggugaaggacgcccaggcccugcugcacggccuggacuucagcgaggugaacaacgugcagagacugaugagaaagcagaagagagacgacggcgaccugaagagacugagagaccugaaccaggccgugaacaaccugguggagcugaagagcacccagcagaagagcauccugagagugggcacccugaccagcgacgaccugcugacccuggccgccgaccuggagaagcugaagagcaaggugaucagaaccgagagaccccugagcagcggcguguacaugggcaaccugagcacccagcagcuggagcagagaagagcccugcugaacaugaucggcauggugggcggcgcccagggcacccagcccggcagagacggcguggugagagugugggacgugaagaaccccgaccugcugaacaaccaguucggcaccaugcccagccugacccuggccugccugaccaagcagggccagguggaccugaacgacgccgugcuggcccugaccgaccugggccugaucuacaccgccaaguaccccaacagcagcgaccuggacagacugagccagagccaccccauccugaacaugguggacaccaagaagagcagccugaacaucagcggcuacaacuucagccugggcgccgccgugaaggccggcgccugcaugcuggacggcggcaacaugcuggagaccaucaaggugaccccccagaccauggacggcauccugaagagcauccugaaggugaagagaagccugggcauguucgugagcgacacccccggcgagagaaaccccuacgagaacauccuguacaagaucugccugagcggcgacggcuggcccuacaucgccagcagaaccagcaucgugggcagagccugggagaacaccaccguggaccuggagagcgacggcaagccccagaaggugggcaccgccggcagcaacaagagccugcagagcgccggcuuccccaccggccugaccuacagccagcugaugacccugaaggacagcaugaugcagcuggaccccagcgccaagaccuggaucgacaucgagggcagacccgaggaccccguggagaucgcccuguaccagcccaugagcggcugcuacauccacuucuucagagagcccaccgaccugaagcaguucaagcaggacgccaaguacagccacggcaucgacguggccgaccuguuccccgcccagcccggccugaccagcgccgugaucgaggcccugcccagaaacauggugcugaccugccagggcagcgacgacaucaagaagcugcuggacagccagggcagaagagacaucaagcugaucgacaucagccugagcaagguggacagcagaaaguucgagaacgccgugugggaccagugcaaggaccugugccacaugcacaccggcguggugguggagaagaagaagagaggcggcaaggaggagaucaccccccacugcgcccugauggacugcaucauguucgacgccgccgugagcggcggccugaacauccccgugcugagagccgugcugcccagagacaugguguucagaaccagcagccccaagguggugcugugaggacuaguaauaaggaaacuguaugaaugucugugggcaggaagugaagagauccuucuguaaagguuuuuggaauuaugucugcugaauaauaaacuuuuuugaaauaauaaaucugguagaaaaaugagaucuaaaaaaaaaaaaaaaaaaaaaaaaaaaaaaaaaaaaaaaaaaaaaaaaaaaaaaaaaaaaaaaaaaaaaaaaaaaaaaaaaaaaaaaaaaaaaaaaaaaa

SEQ ID NO: 21678 - RNA, 2076 nt, Artificial Sequence
  mRNA product Design b-4 (A100) comprising derived and/or modified sequence from LASV(GA391;Clade III)__CAA36646__SP-IgE_NP(2-570) (opt4)
aggagagucccgcagucggcguccagcggcucugcuuguucgugugugugucguugcaggccuuauucaagcuuaccauggacuggaccuggauccuguuccugguggccgccgccaccagagugcacagcagcgccagcaaggaggugagaagcuuccuguggacccagagccugagaagagagcugagcggcuacugcagcaacaucaagcugcagguggugaaggacgcccaggcccugcugcacggccuggacuucagcgaggugagcaacgugcagagacugaugagaaagcagaagagagacgacggcgaccugaagagacugagagaccugaaccaggccgugaacaaccugguggagcugaagagcacccagcagaagagcgugcugagagugggcacccugagcagcgacgaccugcugauccuggccgccgaccuggagaagcugaagagcaaggugaccagaaccgagagaccccugagcagcggcguguacaugggcaaccugagcagccagcagcuggaccagagaagagcccugcugaacaugaucggcaugaccggcgugagcggcggcggcaagggcgccagcgacggcaucgugagagugugggacgugaagaacgccgagcugcugaacaaccaguucggcaccaugcccagccugacccuggccugccugaccaagcagggccagguggaccugaacgacgccgugcaggcccugaccgaccugggccugaucuacaccgccaaguaccccaacagcagcgaccuggacagacugagccagagccaccccauccugaacaugaucgacaccaagaagagcagccugaacaucagcggcuacaacuucagccugggcgccgccgugaaggccggcgccugcaugcuggacggcggcaacaugcuggagaccaucaaggugagcccccagaccauggacggcauccugaagagcauccugaaggugaagaagagccugggcauguucgugagcgacacccccggcgagagaaaccccuacgagaacauccuguacaagaucugccugagcggcgacggcuggcccuacaucgccagcagaaccagcaucgugggcagagccugggagaacaccgugguggaccuggagcaggacaacaagccccagaagaucggcaacggcggcagcaacaagagccugcagagcgccggcuucgccgccggccugaccuacagccagcugaugacccugaaggacuucaagugcuucaaccugauccccaacgccaagaccuggauggacaucgagggcagacccgaggaccccguggagaucgcccuguaccagcccagcagcggcugcuacgugcacuucuucagagagcccaccgaccugaagcaguucaagcaggacgccaaguacagccacggcaucgacgugaccgaccuguucgccgcccagcccggccugaccagcgccgugaucgaggcccugcccagaaacauggugaucaccugccagggcagcgaggacaucagaaagcugcuggagagccagggcagaagagacaucaagcugaucgacaucacccugagcaaggccgacagcagaaaguucgagaacgccgugugggaccaguucaaggaccugugccacaugcacaccggcguggugguggagaagaagaagagaggcggcaaggaggagaucaccccccacugcgcccugauggacugcaucauguucgacgccgccgugagcggcggccuggacgccaaggugcugagaguggugcugcccagagacaugguguucagaaccagcacccccaagguggugcugugaggacuaguaauaaggaaacuguaugaaugucugugggcaggaagugaagagauccuucuguaaagguuuuuggaauuaugucugcugaauaauaaacuuuuuugaaauaauaaaucugguagaaaaaugagaucuaaaaaaaaaaaaaaaaaaaaaaaaaaaaaaaaaaaaaaaaaaaaaaaaaaaaaaaaaaaaaaaaaaaaaaaaaaaaaaaaaaaaaaaaaaaaaaaaaaaa

SEQ ID NO: 21679 - RNA, 2073 nt, Artificial Sequence
  mRNA product Design b-4 (A100) comprising derived and/or modified sequence from LASV(AV;Clade V)__CCA30315__SP-IgE_NP(2-569) (opt4)
aggagagucccgcagucggcguccagcggcucugcuuguucgugugugugucguugcaggccuuauucaagcuuaccauggacuggaccuggauccuguuccugguggccgccgccaccagagugcacagcagcgccagcaaggaggugaagagcuuccuguggacccagagccugagaagagagcugagcggcuacugcagcaacaucaagcugcagguggugaaggacgcccaggcccugcugcacggccuggacuucagcgaggugagcaacgugcagagacugaugagaaagcagagaagagacgacagcgaccugaagagacugagagaccugaaccaggccgugaacaaccugguggagcugaagagcacccagcagaagagcgugcugagagugggcacccugagcagcgacgaccugcugacccuggccgccgaccuggagaagcugaagagcaaggugaccagaaccgagagaccccugagcagcggcguguacaugggcaaccugagcagccagcagcuggaccagagaagagcccugcugaaccugaucggcaugaccaacggcagccagggcagccaggccggcagagacggcguggugagagugugggacgugaagaacgccgagcugcugaacaaccaguucggcaccaugcccagccugacccuggccugccugaccaagcagggccagguggaccugaacgacguggugcaggcccugaccgaccugggccugaucuacaccgccaaguaccccaacaccagcgaccuggacagacugacccagagccaccccauccugaacaugaucgacaccaagaagagcagccugaacaucagcggcuacaacuucagccugggcgccgccgugaaggccggcgccugcaugcuggacggcggcaacaugcuggagaccaucaaggugagcccccagagcauggacggcauccugaagagcauccugaaggugaagagagcccugggcauguucgugagcgacacccccggcgagagaaaccccuacgagaacauccuguacaagaucugccugagcggcgacggcuggcccuacaucgccagcagaaccagcaucgugggcagagccugggagaacaccgugguggaccuggagaccgacggcaagccccagaagaucggcagcggcaacagcaacaagagccugcagagcgccggcuucagcgccggccugaccuacagccagcugaugacccugaaggacgccaugcugcagcuggaccccaacgccaagaccuggauggacaucgagggcagacccgaggaccccguggagguggcccuguaccagcccaucagcggcugcuacauccacuucuucagagagcccaccgaccugaagcaguucaagcaggacgccaaguacagccacggcaucgacaucgccgaccuguucgccgcccagcccggccugaccagcgccgugaucgaggcccugcccagaaacauggugaucaccugccagggcagcgaggacaucaagaagcugcuggagagccagggcagaaaggacaucaagcugaucgacaucgcccugagcaagaucgacagcagaaaguucgagaacgccgugugggaccaguacaaggaccugugccacaugcacaccggcguggugguggagaagaagaagagaggcggcaaggaggagaucaccccccacugcgcccugauggacugcaucauguucgacgccgccgugagcggcggccugaacacccuggugcugagagccgugcugcccagagacaugguguucagaaccagcacccccagaguggugcugugaggacuaguaauaaggaaacuguaugaaugucugugggcaggaagugaagagauccuucuguaaagguuuuuggaauuaugucugcugaauaauaaacuuuuuugaaauaauaaaucugguagaaaaaugagaucuaaaaaaaaaaaaaaaaaaaaaaaaaaaaaaaaaaaaaaaaaaaaaaaaaaaaaaaaaaaaaaaaaaaaaaaaaaaaaaaaaaaaaaaaaaaaaaaaaaaa

SEQ ID NO: 21680 - RNA, 2073 nt, Artificial Sequence
  mRNA product Design b-4 (A100) comprising derived and/or modified sequence from LASV(Togo/2016/7082;Clade VI)__AMR44578__SP-IgE_NP(2-569) (opt4)
aggagagucccgcagucggcguccagcggcucugcuuguucgugugugugucguugcaggccuuauucaagcuuaccauggacuggaccuggauccuguuccugguggccgccgccaccagagugcacagcagcaacagcaaggaggugaagagcuuccuguggacccagagccugagaagagagcugagcggcuacugcagcaacaucaagcugcagguggugaaggacgcccaggcccugcugcacggccuggacuucagcgaggugagcaacgugcagagacugaugagaaagcagaagagagacgacggcgaccugaagagacugagagaccugaaccaggccgugaacaaccugguggagcugaagagcgugcagcagaagagcauccugagagugggcacccugaccagcgacgaccugcugacccuggccgccgaccuggagaagcugaagagcaaggugaccagaaccgagagaccccugagcagcggcguguacaugggcaaccugagcagccagcagcuggaccagagaagagcccugcugagcaugaucggcaugagcggcggcaaccagaacagccagcccaagggcgacggcguggugagagugugggacgugaagaacgccgaccugcugaacaaccaguucggcaccaugcccagccugacccuggccugccugaccaagcagggccagguggaccugaacgacgccgugcaggcccugaccgaccugggccugaucuacaccgccaaguaccccaacagcagcgaccuggacagacugagccagagccaccccauccugaacaugaucgacaccaagaagagcagccugaacaucagcggcuacaacuucagccugggcgccgccaucaagaccggcgccugcaugcuggacggcggcaacaugcuggagaccaucaaggugaccccccagaccauggacggcauccugaagagcauccugaaggugaagagaagccugggcauguucaucagcgacacccccggcgagagaaaccccuacgagaacauccuguacaagaucugccugagcggcgacggcuggcccuacaucgccagcagaaccgccaucaucggcagagccugggagaacaccgugguggaccuggagagcgacagcaagccccagaagaucggcagcaacggcagcaacaagagccugcagagcgccggcuucgcccccggccugaccuacagccagcugaugacccugaaggacagcaugcugcagcuggaccccaacgccaagaccuggaucgacaucgagggcagacccgaggaccccguggagguggcccuguuccagcccaucagcggcugcuacauccacuucuucagagagcccaccgaccugaagcaguucaagcaggacgccaaguacagccacggcaucgacgugaccgaccuguucgccgcccagcccggccugaccagcgccgugaucgaggcccugcccagaaacauggugcugaccugccagggcagcgacgacaucaagaagcugcuggacagccagggcagaagagacaucaagcugaucgacgugagccugaacaagaucgacagcagaaaguucgagaacgccgugugggaccaguacaaggaccugugccacaugcacaccggcguggugguggagaagaagaagaagggcggcaaggaggagaucaccccccacugcgcccugcuggacugcaucauguucgacgccgccgugagcggcggccugaacgccaccgugcugagagccgugcugcccagagacaugguguucagaaccagcagccccaagguggugcugugaggacuaguaauaaggaaacuguaugaaugucugugggcaggaagugaagagauccuucuguaaagguuuuuggaauuaugucugcugaauaauaaacuuuuuugaaauaauaaaucugguagaaaaaugagaucuaaaaaaaaaaaaaaaaaaaaaaaaaaaaaaaaaaaaaaaaaaaaaaaaaaaaaaaaaaaaaaaaaaaaaaaaaaaaaaaaaaaaaaaaaaaaaaaaaaaa

SEQ ID NO: 21681 - RNA, 2073 nt, Artificial Sequence
  mRNA product Design b-4 (A100) comprising derived and/or modified sequence from LASV(KAK-428;Clade n.d. (VII))__ANH09741__SP-IgE_NP(2-569) (opt4)
aggagagucccgcagucggcguccagcggcucugcuuguucgugugugugucguugcaggccuuauucaagcuuaccauggacuggaccuggauccuguuccugguggccgccgccaccagagugcacagcagcaacagcaaggaggugaagagcuuccuguggacccagagccugagaagagagcugagcggcuacugcaccaacaucaagcugcagguggugaaggacgcccaggcccugcugcacggccuggacuucagcgaggugagcaacgugcagagacugaugagaaagcagaagagagacgacaacgaccugaagagacugagagaccugaaccaggccgugaacaaccugguggagcugaagagcgugcagcagaagagcgugcugaaggugggcacccugaacagcgacgaccugcugacccuggccgccgaccuggagaagcugaagagcaagguggugagaaccgagagaccccugagcagcggcguguacaugggcaaccugagcagccagcagcuggaccagagaagagcccugcugaacaugaucggcauggccggcggcagccagggcaaccagcccagcagagacggcguggugagagugugggacgugaagaacgccgaccugcugaacaaccaguucggcaccaugcccagccugacccuggccugccugaccaagcagggccagguggaccugaacgacguggugcuggcccugaccgaccugggccugaucuacaccgccaaguaccccaacagcagcgaccuggacagacugagccagaaccaccccgugcugaacaugaucgacgugaacaagagcagccugaacaucagcggcuacaacuucagccugggcgccgccgugaaggccggcgccugcaugcuggacggcggcaacaugcuggagaccaucaagaucagcccccagaccguggacggcauccugaagagcauccugaaggugaagagagcccugggcauguucgugagcgacacccccggcgagagaaaccccuacgagaacauccuguacaaggugugccugagcggcaacggcuggcccuacaucgccagcagaaccagcaucgugggcagagccugggagaacaccgugguggaccuggagagcaacaagaaccagcccaaggugggcaacaacggcagcaacaagaugcugcagagcagcggcuucgccaccggccugaccuacagccagcugaugacccugagagacagcaugcugcagcuggaccccaccgccaagaccuggaucgacaucgagggcagacccgaggaccccguggagcuggcccuguuccagcccagcagcggcugcuacauccacuucuucagagagcccaccgaccugaagcaguucaagcaggacgccaaguacagccacggcaucgacgugaacgaccuguucagcgcccagcccggccugaccagcgccgugcuggaggcccugcccagaaacauggugcugaccugccagggcagcgacgacaucagaaagcugcuggacagccaggacagaaaggacaucaagcugaucgacaucagccugagcaaggccgacgccagaaaguucgagaacgacgugugggaccaguucaaggaccugugccacaugcacaccggcaucgugguggagaagaagaagaagggcggcaagcaggagaugaccccccacugcgcccugcuggacugcaucauguucgacgccgccgugagcggcggccugaacgugcccacccugagagccgugcugcccaccgacaugguguucagaaccaucaccaccaagguggugcugugaggacuaguaauaaggaaacuguaugaaugucugugggcaggaagugaagagauccuucuguaaagguuuuuggaauuaugucugcugaauaauaaacuuuuuugaaauaauaaaucugguagaaaaaugagaucuaaaaaaaaaaaaaaaaaaaaaaaaaaaaaaaaaaaaaaaaaaaaaaaaaaaaaaaaaaaaaaaaaaaaaaaaaaaaaaaaaaaaaaaaaaaaaaaaaaaa

SEQ ID NO: 21682 - RNA, 2073 nt, Artificial Sequence; identical to SEQ ID NO: 21676
  mRNA product Design b-4 (A100) comprising derived and/or modified sequence from LASV(Pinneo-NIG-1969;Clade I)__AIT17837__SP-IgE_NP(2-569) (opt4)

SEQ ID NO: 21683 - RNA, 2073 nt, Artificial Sequence
  mRNA product Design b-4 (A100) comprising derived and/or modified sequence from LASV(ISTH0009-NIG-2011;Clade II)__AIT17405__SP-IgE_NP(2-569) (opt4)
aggagagucccgcagucggcguccagcggcucugcuuguucgugugugugucguugcaggccuuauucaagcuuaccauggacuggaccuggauccuguuccugguggccgccgccaccagagugcacagcagcgugagcaaggaggugaagagcuuccuguggacccagagccugagaagagagcugagcggcuacugcagcaacaucaagcugcagguggugaaggacgcccaggcccugcugcacggccuggacuucagcgaggugagcaacgugcagagacugaugagaaagcagaagagagacgacagcgaccugaagagacugagagaccugaaccaggccgugaacaaccugguggagcugaagagcacccagcagaagagcauccugagagugggcacccugaccagcgacgaccugcugacccuggccgccgaccuggagaagcugaagagcaaggugaucagaaccgagagaccccugagcagcggcguguacaugggcaaccugagcacccagcagcuggagcagagaagagcccugcugaacaugaucggcauggugggcggcgcccagggcacccagcccggcagagacggcguggugagagugugggacgugaagaaccccgaccugcugaacaaccaguucggcaccaugcccagccugacccuggccugccugaccaagcagggccagguggaccugaacgacgccgugcuggcccugaccgaccugggccugaucuacaccgccaaguaccccaacagcagcgaccuggacagacugagccagagccaccccauccugaacaugguggacaucaagaagagcagccugaacaucagcggcuacaacuucagccugggcgccgccgugaaggccggcgccugcaugcuggacggcggcaacaugcuggagaccaucaaggugaccccccagaccauggacggcauccugaagagcauccugaaggugaagagaagccugggcauguucgugagcgacacccccggcgagagaaaccccuacgagaacauccuguacaagaucugccugagcggcgacggcuggcccuacaucgccagcagaaccagcaucgugggcagagccugggagaacaccaccguggaccuggagagcgacggcaagccccagaaggugggcagcgccggcagcaacaagagccugcagagcgccggcuuccccaccggccugaccuacagccagcugaugacccugaaggacagcaugaugcagcuggaccccagcgccaagaccuggaucgacaucgagggcagacccgaggaccccguggagaucgcccuguaccagcccaugagcggcugcuacauccacuucuucagagagcccaccgaccugaagcaguucaagcaggacgccaaguacagccacggcaucgacguggccgaccuguuccccgcccagcccggccugaccagcgccgugaucgaggcccugcccagaaacauggugcugaccugccagggcagcgacgacaucaagagacugcuggacagccagggcagaagagacaucaagcugaucgacaucgcccugagcaaggccgacagcagaagauucgagaacgccgugugggaccagugcaaggaccugugccacaugcacaccggcguggugguggagaagaagaagagaggcggcaaggaggagaucaccccccacugcgcccugauggacugcaucauguacgacgccgccgugagcggcggccugaacauccccgugcugagagccgugcugcccagagacaugguguucagaaccagcagccccaagguggugcugugaggacuaguaauaaggaaacuguaugaaugucugugggcaggaagugaagagauccuucuguaaagguuuuuggaauuaugucugcugaauaauaaacuuuuuugaaauaauaaaucugguagaaaaaugagaucuaaaaaaaaaaaaaaaaaaaaaaaaaaaaaaaaaaaaaaaaaaaaaaaaaaaaaaaaaaaaaaaaaaaaaaaaaaaaaaaaaaaaaaaaaaaaaaaaaaaa

SEQ ID NO: 21684 - RNA, 2073 nt, Artificial Sequence
  mRNA product Design b-4 (A100) comprising derived and/or modified sequence from LASV(ISTH2010-NIG-2012;Clade II)__AIT17483__SP-IgE_NP(2-569) (opt4)
aggagagucccgcagucggcguccagcggcucugcuuguucgugugugugucguugcaggccuuauucaagcuuaccauggacuggaccuggauccuguuccugguggccgccgccaccagagugcacagcagcgccagcaaggaggugaagagcuuccuguggacccagagccugagaagagagcugagcggcuacugcagcaacaucaagcugcagguggugaaggacgcccaggcccugcugcacggccuggacuucagcgaggugagcaacgugcagagacugaugagaaagcagaagagagacgacagcgaccugaagagacugagagaccugaaccaggccgugaacaaccugguggagcugaagagcacccagcagaagagcauccugagagugggcacccugaccagcgacgaccugcugacccuggccgccgaccuggagaagcugaagagcaaggugaucagaaccgagagaccccugagcagcggcguguacaugggcaaccugagcacccagcagcuggagcagagaagagcccugcugaaccugaucggcauggugggcggcgcccagggcacccagcccggcagagacggcguggugagagugugggacgugaagaaccccgaccugcugaacaaccaguucggcaccaugcccagccugacccuggccugccugaccaagcagggccagguggaccugaacgacgccgugcuggcccugaccgaccugggccugaucuacaccgccaaguaccccaacagcagcgaccuggacagacugagccagagccaccccauccugaacaugguggacaccaagaagagcagccugaacaucagcggcuucaacuucagccugggcgccgccgugaaggccggcgccugcaugcuggacggcggcaacaugcuggagaccaucaaggugaccccccagaccauggacggcauccugaagagcauccugaaggugaagaagagccugggcauguucgugagcgacacccccggcgagagaaaccccuacgagaacauccuguacaagaucugccugagcggcgacggcuggcccuacaucgccagcagaaccagcaucgugggcagagccugggagaacaccaccguggaccuggagagcgacggcaagccccacaaggugggcaccgccggcagcaacaagagccugcagagcgccggcuuccccaccggccugaccuacagccagcugaugacccugaaggacagcaugaugcagcuggaccccagcgccaagaccuggaucgacaucgagggcagacccgaggaccccguggagaucgcccuguaccagcccaugagcggcugcuacauccacuucuucagagagcccaccgaccugaagcaguucaagcaggacgccaaguacagccacggcaucgacguggccgaccuguuccccgcccagcccggccugaccagcgccgugaucgaggcccugcccagaaacauggugcugaccugccagggcagcgacgacaucaagagacugcuggacagccagggcagaagagacaucaagcugaucgacaucgcccugagcaaggccgacagcagaagauucgagaacgccgugugggaccagugcaaggaccugugccacaugcacaccggcguggugguggagaagaagaagagaggcggcaaggaggagaucaccccccacugcgcccugauggacugcaucauguacgacgccgccgugagcggcggccugaacauccccgugcugagagccgugcugcccagagacaugguguucagaaccagcagccccaagguggugcugugaggacuaguaauaaggaaacuguaugaaugucugugggcaggaagugaagagauccuucuguaaagguuuuuggaauuaugucugcugaauaauaaacuuuuuugaaauaauaaaucugguagaaaaaugagaucuaaaaaaaaaaaaaaaaaaaaaaaaaaaaaaaaaaaaaaaaaaaaaaaaaaaaaaaaaaaaaaaaaaaaaaaaaaaaaaaaaaaaaaaaaaaaaaaaaaaa

SEQ ID NO: 21685 - RNA, 2073 nt, Artificial Sequence
  mRNA product Design b-4 (A100) comprising derived and/or modified sequence from LASV(Lassa virus/H.sapiens-wt/NGA/2015/ISTH_0543;Clade II)__AVO03640__SP-IgE_NP(2-569) (opt4)
aggagagucccgcagucggcguccagcggcucugcuuguucgugugugugucguugcaggccuuauucaagcuuaccauggacuggaccuggauccuguuccugguggccgccgccaccagagugcacagcagcgccagcaaggaggugaagagcuuccuguggacccagagccugagaagagagcugagcggcuacugcagcaacaucaagcugcagguggugaaggacgcccaggcccugcugcacggccuggacuucagcgaggugagcaacgugcagagacugaugagaaagcagaagagagacgacagcgaccugaagagacugagagaccugaaccaggccgugaacaaccugguggagcugaagagcacccagcagaagagcauccugagagugggcacccugaccagcgacgaccugcugacccuggccgccgaccuggagaagcugaagagcaaggugaucagaaccgagagaccccugagcagcggcguguacaugggcaaccugagcacccagcagcuggagcagagaagagcccugcugaacaugaucggcauggugggcggcgcccagggcacccagcccggcagagacggcguggugagagugugggacgugaagaaccccgaccugcugaacaaccaguucggcaccaugcccagccugacccuggccugccugaccaagcagggccagguggaccugaacgacgccgugcuggcccugaccgaccugggccugaucuacaccgccaaguaccccaacagcagcgaccuggacagacugagccagagccaccccauccugaacaugguggacaccaagaagagcagccugaacaucagcggcuacaacuucagccugggcgccgccgugaaggccggcgccugcaugcuggacggcggcaacaugcuggagaccaucaaggugaccccccagaccauggacggcauccugaagagcauccugaaggugaagaagagccugggcauguucgugagcgacacccccggcgagagaaaccccuacgagaacauccuguacaagaucugccugagcggcgacggcuggcccuacaucgccagcagaaccagcaucgugggcagagccugggagaacaccaccguggaccuggagagcgacggcaagccccagaaggugggcagcgccggcagcaacaagagccugcagagcgccggcuuccccaccggccugaccuacagccagcugaugacccugaaggacagcaugaugcagcuggaccccagcgccaagaccuggaucgacaucgagggcagacccgaggaccccguggagaucgcccuguaccagcccaugagcggcugcuacauccacuucuucagagagcccaccgaccugaagcaguucaagcaggacgccaaguacagccacggcaucgacguggccgaccuguuccccgcccagcccggccugaccagcgccgugaucgaggcccugcccagaaacauggugcugaccugccagggcagcgacgacaucaagagacugcuggacagccagggcagaaaggacaucaagcugaucgacaucgcccugagcaaggccgacagcagaagauucgagaacgccgugugggaccagugcaaggaccugugccacaugcacaccggcguggugguggagaagaagaagagaggcggcaaggaggagaucaccccccacugcgcccugauggacugcaucauguacgacgccgccgugagcggcggccugaacauccccgugcugagagccgugcugcccagagacaugguguucagaaccagcagccccaagguggugcugugaggacuaguaauaaggaaacuguaugaaugucugugggcaggaagugaagagauccuucuguaaagguuuuuggaauuaugucugcugaauaauaaacuuuuuugaaauaauaaaucugguagaaaaaugagaucuaaaaaaaaaaaaaaaaaaaaaaaaaaaaaaaaaaaaaaaaaaaaaaaaaaaaaaaaaaaaaaaaaaaaaaaaaaaaaaaaaaaaaaaaaaaaaaaaaaaa

SEQ ID NO: 21686 - RNA, 2073 nt, Artificial Sequence
  mRNA product Design b-4 (A100) comprising derived and/or modified sequence from LASV(Lassa virus/H.sapiens-wt/NGA/2016/ISTH_0009;Clade II)__AVO03572__SP-IgE_NP(2-569) (opt4)
aggagagucccgcagucggcguccagcggcucugcuuguucgugugugugucguugcaggccuuauucaagcuuaccauggacuggaccuggauccuguuccugguggccgccgccaccagagugcacagcagcgccagcaaggaggugaagagcuuccuguggacccagagccugagaagagagcugagcggcuacugcagcaacaucaagcugcagguggugaaggacgcccaggcccugcugcacggccuggacuucagcgaggugagcaacgugcagagacugaugagaaagcagaagagagacgacagcgaccugaagagacugagagaccugaaccaggccgugaacaaccugguggagcugaagagcacccagcagaagagcauccugagagugggcacccugaccagcgacgaccugcugacccuggccgccgaccuggagaagcugaagagcaaggugaucagaaccgagagaccccugagcagcggcguguacaugggcaaccugagcacccagcagcuggagcagagaagagcccugcugaacaugaucggcauggugggcggcgcccagggcacccagcccggcagagacggcguggugagagugugggacgugaagaaccccgaccugcugaacaaccaguucggcaccaugcccagccugacccuggccugccugaccaagcagggccagguggaccugaacgacgccgugcuggcccugaccgaccugggccugaucuacaccgccaaguaccccaacagcagcgaccuggacagacugagccagagccaccccauccugaacaugguggacaccaagaagagcagccugaacaucagcggcuacaacuucagccugggcgccgccgugaaggccggcgccugcaugcuggacggcggcaacaugcuggagaccaucaaggugaccccccagaccauggacggcauccugaagagcauccugaaggugaagaagagccugggcauguucgugagcgacacccccggcgagagaaaccccuacgagaacauccuguacaagaucugccugagcggcgacggcuggcccuacaucgccagcagaaccagcaucgugggcagagccugggagaacaccaccguggaccuggagagcgacggcaagccccagaaggugggcagcgccggcagcaacaagagccugcagagcgccggcuuccccaccggccugaccuacagccagcugaugacccugaaggacagcaugaugcagcuggaccccagcgccaagaccuggaucgacaucgagggcagacccgaggaccccguggagaucgcccuguaccagcccaugagcggcugcuacauccacuucuucagagagcccaccgaccugaagcaguucaagcaggacgccaaguacagccacggcaucgacguggccgaccuguuccccgcccagcccggccugaccagcgccgugaucgaggcccugcccagaaacauggugcugaccugccagggcagcgacgacaucaagagacugcuggacagccagggcagaagagacaucaagcugaucgacaucgcccugagcaaggccgacagcagaagauucgagaacgccgugugggaccagugcaaggaccugugccacaugcacaccggcguggugguggagaagaagaagagaggcggcaaggaggagaucaccccccacugcgcccugauggacugcaucauguacgacgccgccgugagcggcggccugaacauccccgugcugagagccgugcugcccagagacaugguguucagaaccagcagccccaagguggugcugugaggacuaguaauaaggaaacuguaugaaugucugugggcaggaagugaagagauccuucuguaaagguuuuuggaauuaugucugcugaauaauaaacuuuuuugaaauaauaaaucugguagaaaaaugagaucuaaaaaaaaaaaaaaaaaaaaaaaaaaaaaaaaaaaaaaaaaaaaaaaaaaaaaaaaaaaaaaaaaaaaaaaaaaaaaaaaaaaaaaaaaaaaaaaaaaaa

SEQ ID NO: 21687 - RNA, 2073 nt, Artificial Sequence
  mRNA product Design b-4 (A100) comprising derived and/or modified sequence from LASV(Lassa virus/H.sapiens-wt/NGA/2016/ISTH_0017;Clade II)__AVO03568__SP-IgE_NP(2-569) (opt4)
aggagagucccgcagucggcguccagcggcucugcuuguucgugugugugucguugcaggccuuauucaagcuuaccauggacuggaccuggauccuguuccugguggccgccgccaccagagugcacagcagcgccagcaaggaggugaagagcuuccuguggacccagagccugagaagagagcugagcggcuacugcagcagcaucaagcugcagguggugaaggacgcccaggcccugcugcacggccuggacuucagcgaggugagcaacgugcagagacugaugagaaagcagaagagagacgacagcgaccugaagagacugagagaccugaaccaggccgugaacaaccugguggagcugaagagcacccagcagaagagcauccugagagugggcacccugaccagcgacgaccugcugacccuggccgccgaccuggagaagcugaagagcaaggugaucagaaccgagagaccccugagcagcggcguguacaugggcaaccugagcacccagcagcuggagcagagaagagcccugcugaacaugaucggcauggccggcggcgcccagggcacccagcccggcagagacggcguggugagagugugggacgugaagaaccccgaccugcugaacaaccaguucggcaccaugcccagccugacccuggccugccugaccaagcagggccagguggaccugaacgacgccgugcuggcccugaccgaccugggccugaucuacaccgccaaguaccccaacagcagcgaccuggacagacugagccagagccaccccauccugaacaugguggacaccaagaagagcagccugaacaucagcggcuacaacuucagccugggcgccgccgugaaggccggcgccugcaugcuggacggcggcaacaugcuggagaccaucaaggugaccccccagaccauggacggcauccugaagagcauccugaaggugaagagaagccugggcauguucgugagcgacgcccccggcgagagaaaccccuacgagaacauccuguacaagaucugccugagcggcgacggcuggcccuacaucgccagcagaaccagcaucgugggcagagccugggagaacaccaccguggaccuggagagcgacggcaagccccagaaggugggcgccaccggcagcaacaagagccugcagagcgccggcuuccccaccggccugaccuacagccagcugaugacccugaaggacagcaugaugcagcuggaccccagcgccaagaccuggaucgacaucgagggcagacccgaggaccccguggagguggcccuguaccagcccgugagcggcugcuacauccacuucuucagagagcccaccgaccugaagcaguucaagcaggacgccaaguacagccacggcaucgacguggccgaccuguuccccgcccagcccggccugaccagcgccgugaucgaggcccugcccagaaacauggugcugaccugccagggcagcgacgacaucaagaagcugcuggacagccagggcagaaaggacaucaagcugaucgacaucgcccugagcaaggccgacagcagaagauucgagaacgccgugugggaccagugcaaggaccugugccacaugcacaccggcguggugguggagaagaagaagagaggcggcaaggaggagaucaccccccacugcgcccugauggacugcaucauguacgacgccgccgugagcggcggccugaacauccccgugcugagagccgugcugcccagagacaugguguucagaaccagcagccccaagguggugcugugaggacuaguaauaaggaaacuguaugaaugucugugggcaggaagugaagagauccuucuguaaagguuuuuggaauuaugucugcugaauaauaaacuuuuuugaaauaauaaaucugguagaaaaaugagaucuaaaaaaaaaaaaaaaaaaaaaaaaaaaaaaaaaaaaaaaaaaaaaaaaaaaaaaaaaaaaaaaaaaaaaaaaaaaaaaaaaaaaaaaaaaaaaaaaaaaa

SEQ ID NO: 21688 - RNA, 2073 nt, Artificial Sequence
  mRNA product Design b-4 (A100) comprising derived and/or modified sequence from LASV(Lassa virus/H.sapiens-wt/NGA/2018/ISTH_0959;Clade II)__AVV65100__SP-IgE_NP(2-569) (opt4)
aggagagucccgcagucggcguccagcggcucugcuuguucgugugugugucguugcaggccuuauucaagcuuaccauggacuggaccuggauccuguuccugguggccgccgccaccagagugcacagcagcgccagcaaggaggugaagagcuuccuguggacccagagccugagaagagagcugagcggcuacugcagcaacaucaagcugcagguggugaaggacgcccaggcccugcugcacggccuggacuucagcgaggugagcaacgugcagagacugaugagaaagcagaagagagacgacagcgaccugaagagacugagagaccugaaccaggccgugaacaaccugguggagcugaagagcacccagcagaagagcauccugagagugggcacccugaccagcgacgaccugcugacccuggccgccgaccuggagaagcugaagagcaaggugaucagaaccgagagaccccugagcagcggcguguacaugggcaaccugagcacccagcagcuggagcagagaagagcccugcugaaccugaucggcauggugggcggcgcccagggcacccagcccggcagagacggcguggugagagugugggacgugaagaaccccgaccugcugaacaaccaguucggcaccaugcccagccugacccuggccugccugaccaagcagggccagguggaccugaacgacguggugcuggcccugaccgaccugggccugaucuacaccgccaaguaccccaacagcagcgaccuggacagacugagccagagccaccccauccugaacaugguggacaccaagaagagcagccugaacaucagcggcuucaacuucagccugggcgccgccgugaaggccggcgccugcaugcuggacggcggcaacaugcuggagaccaucaaggugaccccccagaccauggacggcauccugaagagcauccugaaggugaagaagagccugggcauguucgugagcgacacccccggcgagagaaaccccuacgagaacauccuguacaagaucugccugagcggcgacggcuggcccuacaucgccagcagaaccagcaucgugggcagagccugggagaacaccaccguggaccuggagagcgacggcaagccccacaaggugggcaccgccggcagcaacaagagccugcagagcgccggcuuccccaccggccugaccuacagccagcugaugacccugaaggacagcaugaugcagcuggaccccagcgccaagaccuggaucgacaucgagggcagacccgaggaccccguggagaucgcccuguaccagcccaugagcggcugcuacauccacuucuucagagagcccaccgaccugaagcaguucaagcaggacgccaaguacagccacggcaucgacguggccgaccuguuccccgcccagcccggccugaccagcgccgugaucgaggcccugcccagaaacauggugcugaccugccagggcagcgacgacaucaagagacugcuggacagccagggcagaaaggacaucaagcugaucgacaucgcccugagcaagaccgacagcagaagauucgagaacgccgugugggaccagugcaaggaccugugccacaugcacaccggcguggugguggagaagaagaagagaggcggcaaggaggagaucaccccccacugcgcccugauggacugcaucauguacgacgccgccgugagcggcggccugaacauccccgugcugagagccgugcugcccagagacaugguguucagaaccagcagccccaagguggugcugugaggacuaguaauaaggaaacuguaugaaugucugugggcaggaagugaagagauccuucuguaaagguuuuuggaauuaugucugcugaauaauaaacuuuuuugaaauaauaaaucugguagaaaaaugagaucuaaaaaaaaaaaaaaaaaaaaaaaaaaaaaaaaaaaaaaaaaaaaaaaaaaaaaaaaaaaaaaaaaaaaaaaaaaaaaaaaaaaaaaaaaaaaaaaaaaaa

SEQ ID NO: 21689 - RNA, 2073 nt, Artificial Sequence
  mRNA product Design b-4 (A100) comprising derived and/or modified sequence from LASV(LASV003-NIG-2008;Clade II)__AIT17581__SP-IgE_NP(2-569) (opt4)
aggagagucccgcagucggcguccagcggcucugcuuguucgugugugugucguugcaggccuuauucaagcuuaccauggacuggaccuggauccuguuccugguggccgccgccaccagagugcacagcagcgccagcaaggaggugaagagcuuccuguggacccagagccugagaagagagcugagcggcuacugcagcagcaucaagcugcagguggugaaggacgcccaggcccugcugcacggccuggacuucagcgaggugagcaacgugcagagacugaugagaaagcagaagagagacgacagcgaccugaagagacugagagaccugaaccaggccgugaacaaccugguggagcugaagagcacccagcagaagagcgugcugagagugggcacccugaccagcgacgaccugcugacccuggccgccgaccuggagaagcugaagagcaaggugaucagaaccgagagaccccugagcagcggcguguacaugggcaaccugagcgcccagcagcuggagcagagaagaacccugcugaacaugaucggcauggugggcggcgcccagggcacccagcccggcagagacggcguggugagagugugggacgugaagaaccccgaccugcugaacaaccaguucggcaccaugcccagccugacccuggccugccugaccaagcagggccagguggaccugaacgacguggugcuggcccugaccgaccugggccugaucuacaccgccaaguaccccaacagcagcgaccuggacagacugagccagagccaccccauccugagcaugguggacaccaagaagagcagccugaacaucagcggcuacaacuucagccugggcgccgccgugaaggccggcgccugcaugcuggacggcggcaacaugcuggagaccaucaaggugaccccccagaccauggacggcauccugaagagcauccugaaggugaagaagagccugggcauguucgugagcgacacccccggcgagagaaaccccuacgagaacauccuguacaagaucugccugagcggcgacggcuggcccuacaucgccagcagaaccagcaucgugggcagagccugggagaacaccaccguggaccuggagagcgacggcaagccccagaaggugggcaccgccggcagcaacaagagccugcagagcgccggcuuccccaccggccugaccuacagccagcugaugacccugaaggacagcaugaugcagcuggaccccagcgccaagaccuggaucgacaucgagggcagacccgaggaccccguggagaucgcccuguaccagcccaugagcggcugcuacauccacuucuucagagagcccaccgaccugaagcaguucaagcaggacgccaaguacagccacggcaucgacgugaccgaccuguuccccgcccagcccggccugaccagcgccgugaucgaggcccugcccagaaacauggugcugaccugccagggcagcgacgacaucaagagacugcuggacagccagggcagaagagacaucaagcugaucgacaucgcccugagcaaggccgacagcagaagauucgagaacgccgugugggaccagugcaaggaccugugccacaugcacaccggcguggugguggagaagaagaagagaggcggcaaggaggagaucaccccccacugcgcccugauggacugcaucauguacgacgccgccgugagcggcggccugaacauccccgugcugagagccgugcugcccagagacaugguguucagaaccagcagccccaagguggugcugugaggacuaguaauaaggaaacuguaugaaugucugugggcaggaagugaagagauccuucuguaaagguuuuuggaauuaugucugcugaauaauaaacuuuuuugaaauaauaaaucugguagaaaaaugagaucuaaaaaaaaaaaaaaaaaaaaaaaaaaaaaaaaaaaaaaaaaaaaaaaaaaaaaaaaaaaaaaaaaaaaaaaaaaaaaaaaaaaaaaaaaaaaaaaaaaaa

SEQ ID NO: 21690 - RNA, 2073 nt, Artificial Sequence
  mRNA product Design b-4 (A100) comprising derived and/or modified sequence from LASV(LASV035-NIG-2009;Clade II)__AIT17589__SP-IgE_NP(2-569) (opt4)
aggagagucccgcagucggcguccagcggcucugcuuguucgugugugugucguugcaggccuuauucaagcuuaccauggacuggaccuggauccuguuccugguggccgccgccaccagagugcacagcagcgccagcaaggaggugaagagcuuccuguggacccagagccugagaagagagcugagcggcuacugcagcagcaucaagcugcagguggugaaggacgcccaggcccugcugcacggccuggacuucagcgaggugagcaacgugcagagacugaugagaaagcagaagagagacgacagcgaccugaagagacugagagaccugaaccaggccgugaacaaccugguggagcugaagagcacccagcagaagagcauccugagagugggcacccugaccagcgacgaccugcugacccuggccgccgaccuggagaagcugaagagcaaggugaucagaaccgagagaccccugagcagcggcguguacaugggcaaccugagcgcccagcagcuggagcagagaagagcccugcugaacaugaucggcauggugggcggcgcccagggcacccagcccggcagagacggcguggugagagugugggacgugaagaaccccgaccugcugaacaaccaguucggcaccaugcccagccugacccuggccugccugaccaagcagggccagguggaccugaacgacgccgugcuggcccugaccgaccugggccugaucuacaccgccaaguaccccaacagcagcgaccuggacagacugagccagagccaccccauccugaacaugguggacaccaagaagagcagccugaacaucagcggcuacaacuucagccugggcgccgccgugaaggccggcgccugcaugcuggacggcggcaacaugcuggagaccaucaaggugaccccccagaccauggacggcauccugaagagcauccugaaggugaagagaagccugggcauguucgugagcgacacccccggcgagagaaaccccuacgagaacauccuguacaagaucugccugagcggcgacggcuggcccuacaucgccagcagaaccagcaucgugggcagagccugggagaacaccaccguggaccuggagagcgacggcaagccccagaaggugggcaccaccggcagcaacaagagccugcagagcgccggcuuccccaccggccugaccuacagccagcugaugacccugaaggacagcaugaugcagcuggaccccagcgccaagaccuggaucgacaucgagggcagacccgaggaccccguggagaucgcccuguaccagcccaugagcggcugcuacauccacuucuucagagagcccaccgaccugaagcaguucaagcaggacgccaaguacagccacggcaucgacguggccgaccuguuccccgcccagcccggccugaccagcgccgugaucgaggcccugcccagaaacauggugcugaccugccagggcagcgacgacaucaagaagcugcuggacagccagggcagaagagacaucaagcugaucgacaucgcccugagcaaggccgacagcagaaaguucgagaacgccgugugggaccagugcaaggaccugugccacaugcacaccggcguggugguggagaagaagaagagaggcggcaaggaggagaucaccccccacugcgcccugauggacugcaucauguacgacgccgccgugagcggcggccugaacauccccgugcugagagccgugcugcccagagacaugguguucagaaccagcagccccaagguggugcugugaggacuaguaauaaggaaacuguaugaaugucugugggcaggaagugaagagauccuucuguaaagguuuuuggaauuaugucugcugaauaauaaacuuuuuugaaauaauaaaucugguagaaaaaugagaucuaaaaaaaaaaaaaaaaaaaaaaaaaaaaaaaaaaaaaaaaaaaaaaaaaaaaaaaaaaaaaaaaaaaaaaaaaaaaaaaaaaaaaaaaaaaaaaaaaaaa

SEQ ID NO: 21691 - RNA, 2073 nt, Artificial Sequence
  mRNA product Design b-4 (A100) comprising derived and/or modified sequence from LASV(LASV1000-NIG-2009;Clade II)__AIT17783__SP-IgE_NP(2-569) (opt4)
aggagagucccgcagucggcguccagcggcucugcuuguucgugugugugucguugcaggccuuauucaagcuuaccauggacuggaccuggauccuguuccugguggccgccgccaccagagugcacagcagcgccagcaaggaggugaagagcuuccuguggacccagagccugagaagagagcugagcggcuacugcagcaacaucaagcugcagguggugaaggacgcccaggcccugcugcacggccuggacuucagcgaggugagcaacgugcagagacugaugagaaagcagaagagagacgacagcgaccugaagagacugagagaccugaaccaggccgugaacaaccugguggagcugaagagcacccagcagaagagcauccugagagugggcacccugaccagcgacgaccugcugacccuggccgccgaccuggagaagcugaagagcaaggugaucagaaccgagagaccccugagcagcggcguguacaugggcaaccugagcacccagcagcuggagcagagaagagcccugcugaacaugaucggcauggugggcggcgcccagggcacccagcccggcagagacggcguggugagagugugggacgugaagaaccccgaccugcugaacaaccaguucggcaccaugcccagccugacccuggccugccugaccaagcagggccagguggaccugaacgacguggugcuggcccugaccgaccugggccugaucuacaccgccaaguaccccaacagcagcgaccuggacagacugagccagagccaccccauccugaacaugguggacaccaagaagagcagccugaacaucagcggcuacaacuucagccugggcgccgccgugaaggccggcgccugcaugcuggacggcggcaacaugcuggagaccaucaaggugaccccccagaccauggacggcauccugaagagcauccugaaggugaagaagagccugggcauguucgugagcgacacccccggcgagagaaaccccuacgagaacauccuguacaagaucugccugagcggcgacggcuggcccuacaucgccagcagaaccagcaucgugggcagagccugggagaacaccaccguggaccuggagagcgacggcaagccccagaaggugggcaccgccggcagcaacaagagccugcagagcgccggcuuccccaccggccugaccuacagccagcugaugacccugaaggacagcaugaugcagcuggaccccagcgccaagaccuggaucgacaucgagggcagacccgaggaccccguggagaucgcccuguaccagcccgugagcggcugcuacauccacuucuucagagagcccaccgaccugaagcaguucaagcaggacgccaaguacagccacggcaucgacguggccgaccuguuccccgcccagcccggccugaccagcgccgugaucgaggcccugcccagaaacauggugcugaccugccagggcagcgacgacaucaagagacugcuggacagccagggcagaagagacaucaagcugaucgacaucgcccugagcaaggccgacagcagaagauucgagaacgccgugugggaccagugcaaggaccugugccacaugcacaccggcguggugguggagaagaagaagagaggcggcaaggaggagaucaccccccacugcgcccugauggacugcaucauguacgacgccgccgugagcggcggccugaacauccccgugcugagagccgugcugcccagagacaugguguucagaaccagcagccccaagguggugcugugaggacuaguaauaaggaaacuguaugaaugucugugggcaggaagugaagagauccuucuguaaagguuuuuggaauuaugucugcugaauaauaaacuuuuuugaaauaauaaaucugguagaaaaaugagaucuaaaaaaaaaaaaaaaaaaaaaaaaaaaaaaaaaaaaaaaaaaaaaaaaaaaaaaaaaaaaaaaaaaaaaaaaaaaaaaaaaaaaaaaaaaaaaaaaaaaa

SEQ ID NO: 21692 - RNA, 2073 nt, Artificial Sequence
  mRNA product Design b-4 (A100) comprising derived and/or modified sequence from LASV(LASV221-NIG-2010;Clade II)__AIT17625__SP-IgE_NP(2-569) (opt4)
aggagagucccgcagucggcguccagcggcucugcuuguucgugugugugucguugcaggccuuauucaagcuuaccauggacuggaccuggauccuguuccugguggccgccgccaccagagugcacagcagcgccagcaaggaggugaagagcuuccuguggacccagagccugagaagagagcugagcggcuacugcagcagcaucaagcugcagguggugaaggacgcccaggcccugcugcacggccuggacuucagcgaggugagcaacgugcagagacugaugagaaagcagagaagagacgacagcgaccugaagagacugagagaccugaaccaggccgugaacaaccugguggagcugaagagcacccagcagaagagcauccugagagugggcacccugaccagcgacgaccugcugacccuggccgccgaccuggagaagcugaagagcaaggugaucagaaccgagagaccccugagcagcggcguguacaugggcaaccugagcacccagcagcuggagcagagaagagcccugcugaacaugaucggcauggugggcggcgcccagggcacccagcccggcagagacggcguggugagagugugggacgugaagaaccccgaccugcugaacaaccaguucggcaccaugcccagccugacccuggccugccugaccaagcagggccagguggaccugaacgacgccgugcuggcccugaccgaccugggccugaucuacaccgccaaguaccccaacagcagcgaccuggacagacugagccagagccaccccauccugaacaugguggacaccaagaagagcagccugaacaucagcggcuacaacuucagccugggcgccgccgugaaggccggcgccugcaugcuggacggcggcaacaugcuggagaccaucaaggugaccccccagaccguggacggcauccugaagagcauccugaaggugaagagaagccugggcauguucgugagcgacacccccggcgagagaaaccccuacgagaacauccuguacaagaucugccugagcggcgacggcuggcccuacaucgccagcagaaccagcaucgugggcagagccugggagaacaccaccguggaccuggagagcgacggcaagccccagaaggugggcaccgccggcagcaacaagagccugcagagcgccggcuuccccaccggccugaccuacagccagcugaugacccugaaggacagcaugaugcagcuggaccccagcgccaagaccuggaucgacaucgagggcagacccgaggaccccguggagaucgcccuguaccagcccaugagcggcugcuacauccacuucuucagagagcccaccgaccugaagcaguucaagcaggacgccaaguacagccacggcaucgacguggccgaccuguuccccgcccagcccggccugaccagcgccgugaucgaggcccugcccagaaacauggugcugaccugccagggcagcgacgacaucaagagacugcuggacagccagggcagaagagacaucaagcugaucgacaucgcccugagcaaggccgacagcagaaaguucgagaacgccgugugggaccagugcaaggaccugugccacaugcacaccggcguggugguggagaagaagaagagaggcggcaaggaggagaucaccccccacugcgcccugauggacugcaucauguacgacgccgccgugagcggcggccugaacauccccgugcugagagccgugcugcccagagacaugguguucagaaccagcagccccaagguggugcugugaggacuaguaauaaggaaacuguaugaaugucugugggcaggaagugaagagauccuucuguaaagguuuuuggaauuaugucugcugaauaauaaacuuuuuugaaauaauaaaucugguagaaaaaugagaucuaaaaaaaaaaaaaaaaaaaaaaaaaaaaaaaaaaaaaaaaaaaaaaaaaaaaaaaaaaaaaaaaaaaaaaaaaaaaaaaaaaaaaaaaaaaaaaaaaaaa

SEQ ID NO: 21693 - RNA, 2073 nt, Artificial Sequence
  mRNA product Design b-4 (A100) comprising derived and/or modified sequence from LASV(LASV237-NIG-2010;Clade II)__AIT17639__SP-IgE_NP(2-569) (opt4)
aggagagucccgcagucggcguccagcggcucugcuuguucgugugugugucguugcaggccuuauucaagcuuaccauggacuggaccuggauccuguuccugguggccgccgccaccagagugcacagcagcgccagcaaggaggugaagagcuuccuguggacccagagccugagaagagagcugagcggcuacugcagcaacaucaagcugcagguggugaaggacgcccaggcccugcugcacggccuggacuucagcgaggugagcaacgugcagagacugaugagaaagcagaagagagacgacagcgaccugaagagacugagagaccugaaccaggccgugaacaaccugguggagcugaagagcacccagcagaagagcauccugagagugggcacccugaccagcgacgaccugcugacccuggccgccgaccuggagaagcugaagagcaaggugaucagaaccgagagaccccugagcagcggcguguacaugggcaaccugagcacccagcagcuggagcagagaagagcccugcugaacaugaucggcauggugggcggcgcccagggcacccagcccggcagagacggcguggugagagugugggacgugaagaaccccgaccugcugaacaaccaguucggcaccaugcccagccugacccuggccugccugaccaagcagggccagguggaccugaacgacgccgugcuggcccugaccgaccugggccugaucuacaccgccaaguaccccaacagcagcgaccuggacagacugagccagagccaccccauccugaacaugguggacaucaagaagagcagccugaacaucagcggcuacaacuucagccugggcgccgccgugaaggccggcgccugcaugcuggacggcggcaacaugcuggagaccaucaaggugaccccccagaccauggacggcauccugaagagcauccugaaggugaagagaagccugggcauguucgugagcgacacccccggcgagagaaaccccuacgagaacauccuguacaagaucugccugagcggcgacggcuggcccuacaucgccagcagaaccagcaucgugggcagagccugggagaacaccaccguggaccuggagagcgacggcaagccccagaaggugggcagcgccggcagcaacaagagccugcagagcgccggcuuccccaccggccugaccuacagccagcugaugacccugaaggacagcaugaugcagcuggaccccagcgccaagaccuggaucgacaucgagggcagacccgaggaccccguggagaucgcccuguaccagcccaugagcggcugcuacauccacuucuucagagagcccaccgaccugaagcaguucaagcaggacgccaaguacagccacggcaucgacguggccgaccuguuccccgcccagcccggccugaccagcgccgugaucgaggcccugcccagaaacauggugcugaccugccagggcagcgacgacaucaagagacugcuggacagccagggcagaagagacaucaagcugaucgacaucgcccugagcaaggccgacagcagaagauucgagaacgccgugugggaccagugcaaggaccugugccacaugcacaccggcguggugguggagaagaagaagagaggcggcaaggaggagaucaccccccacugcgcccugauggacugcaucauguacgacgccgccgugagcggcggccugaacauccccgugcugagagccgugcugcccagagacaugguguucagaaccagcagccccaagguggugcugugaggacuaguaauaaggaaacuguaugaaugucugugggcaggaagugaagagauccuucuguaaagguuuuuggaauuaugucugcugaauaauaaacuuuuuugaaauaauaaaucugguagaaaaaugagaucuaaaaaaaaaaaaaaaaaaaaaaaaaaaaaaaaaaaaaaaaaaaaaaaaaaaaaaaaaaaaaaaaaaaaaaaaaaaaaaaaaaaaaaaaaaaaaaaaaaaa

SEQ ID NO: 21694 - RNA, 2073 nt, Artificial Sequence
  mRNA product Design b-4 (A100) comprising derived and/or modified sequence from LASV(LASV253-NIG-2011;Clade II)__AIT17671__SP-IgE_NP(2-569) (opt4)
aggagagucccgcagucggcguccagcggcucugcuuguucgugugugugucguugcaggccuuauucaagcuuaccauggacuggaccuggauccuguuccugguggccgccgccaccagagugcacagcagcgccagcaaggaggugaagagcuuccuguggacccagagccugagaagagagcugagcggcuacugcagcagcaucaagcugcagguggugaaggacgcccaggcccugcugcacggccuggacuucagcgaggugagcaacgugcagagacugaugagaaagcagaagagagacgacagcgaccugaagagacugagagaccugaaccaggccgugaacaaccugguggagcugaagagcacccagcagaagagcgugcugagagugggcacccugaccagcgacgaccugcugacccuggccgccgaccuggagaagcugaagagcaaggugaucagaaccgagagaccccugagcagcggcguguacaugggcaaccugagcacccagcagcuggagcagagaagagcccugcugaacaugaucggcauggugggcggcgcccagggcacccagcccggcagagacggcguggugagagugugggacgugaagaaccccgaccugcugaacaaccaguucggcaccaugcccagccugacccuggccugccugaccaagcagggccagguggaccugaacgacguggugcuggcccugaccgaccugggccugaucuacaccgccaaguaccccaacagcagcgaccuggacagacugagccagagccaccccauccugaacaugguggacaccaagaagagcagccugaacaucagcggcuacaacuucagccugggcgccgccgugaaggccggcgccugcaugcuggacggcggcaacaugcuggagaccaucaaggugaccccccagaccauggacggcauccugaagagcauccugaaggugaagaagagccugggcauguucgugagcgacacccccggcgagagaaaccccuacgagaacauccuguacaagaucugccugagcggcgacggcuggcccuacaucgccagcagaaccagcaucgugggcagagccugggagaacaccaccguggaccuggagagcgacggcaagccccagaaggugggcaccgccggcagcaacaagagccugcagagcgccggcuuccccaccggccugaccuacagccagcugaugacccugaaggacagcaugaugcagcuggaccccagcgccaagaccuggaucgacaucgagggcagacccgaggaccccguggagaucgcccuguaccagcccaugagcggcugcuacauccacuucuucagagagcccaccgaccugaagcaguucaagcaggacgccaaguacagccacggcaucgacgugaccgaccuguuccccgcccagcccggccugaccagcgccgugaucgaggcccugcccagaaacauggugcugaccugccagggcagcgacgacaucaagagacugcuggacagccagggcagaagagacaucaagcugaucgacaucgcccugagcaaggccgacagcagaagauucgagaacgccgugugggaccagugcaaggaccugugccacaugcacaccggcguggugguggagaagaagaagagaggcggcaaggaggagaucaccccccacugcgcccugauggacugcaucauguacgacgccgccgugagcggcggccugaacauccccgugcugagagccgugcugcccagagacaugguguucagaaccagcagccccaagguggugcugugaggacuaguaauaaggaaacuguaugaaugucugugggcaggaagugaagagauccuucuguaaagguuuuuggaauuaugucugcugaauaauaaacuuuuuugaaauaauaaaucugguagaaaaaugagaucuaaaaaaaaaaaaaaaaaaaaaaaaaaaaaaaaaaaaaaaaaaaaaaaaaaaaaaaaaaaaaaaaaaaaaaaaaaaaaaaaaaaaaaaaaaaaaaaaaaaa

SEQ ID NO: 21695 - RNA, 2073 nt, Artificial Sequence
  mRNA product Design b-4 (A100) comprising derived and/or modified sequence from LASV(LASV254-NIG-2011;Clade II)__AIT17675__SP-IgE_NP(2-569) (opt4)
aggagagucccgcagucggcguccagcggcucugcuuguucgugugugugucguugcaggccuuauucaagcuuaccauggacuggaccuggauccuguuccugguggccgccgccaccagagugcacagcagcgccagcaaggaggugaagagcuuccuguggacccagagccugagaagagagcugagcggcuacugcagcagcaucaagcugcagguggugaaggacgcccaggcccugcugcacggccuggacuucagcgaggugagcaacgugcagagacugaugagaaagcagaagagagacgacagcgaccugaagagacugagagaccugaaccaggccgugaacaaccugguggagcugaagagcacccagcagaagagcgugcugagagugggcacccugaccagcgacgaccugcugacccuggccgccgaccuggagaagcugaagagcaaggugaucagaaccgagagaccccugagcagcggcguguacaugggcaaccugagcacccagcagcuggagcagagaagagcccugcugaacaugaucggcauggugggcggcgcccagggcacccagcccggcagagacggcguggugagagugugggacgugaagaaccccgaccugcugaacaaccaguucggcaccaugcccagccugacccuggccugccugaccaagcagggccagguggaccugaacgacgccgugcuggcccugaccgaccugggccugaucuacaccgccaaguaccccaacagcagcgaccuggacagacugagccagagccaccccauccugaacaugguggacaccaagaagagcagccugaacaucagcggcuacaacuucagccugggcgccgccgugaaggccggcgccugcaugcuggacggcggcaacaugcuggagaccaucaaggugaccccccagaccauggacggcauccugaagagcauccugaaggugaagaagagccugggcauguucgugagcgacacccccggcgagagaaaccccuacgagaacauccuguacaagaucugccugagcggcgacggcuggcccuacaucgccagcagaaccagcaucgugggcagagccugggagaacaccaucguggaccuggagagcgacggcaagccccagaaggugggcaccgccggcagcaacaagagccugcagagcgccggcuuccccaccggccugaccuacagccagcugaugacccugaaggacagcaugaugcagcuggaccccagcgccaagaccuggaucgacaucgagggcagacccgaggaccccguggagaucgcccuguaccagcccaugagcggcugcuacauccacuucuucagagagcccaccgaccugaagcaguucaagcaggacgccaaguacagccacggcaucgacguggccgaccuguuccccgcccagcccggccugaccagcgccgugaucgaggcccugcccagaaacauggugcugaccugccagggcagcgacgacaucaagagacugcuggacagccagggcagaagagacaucaagcugaucgacaucgcccugagcaaggccgacagcagaagauucgagaacgccgugugggaccagugcaaggaccugugccacaugcacaccggcguggugguggagaagaagaagagaggcggcaaggaggagaucaccccccacugcgcccugauggacugcaucauguacgacgccgccgugagcggcggccugaacauccccgugcugagagccgugcugcccagagacaugguguucagaaccagcagccccaagguggugcugugaggacuaguaauaaggaaacuguaugaaugucugugggcaggaagugaagagauccuucuguaaagguuuuuggaauuaugucugcugaauaauaaacuuuuuugaaauaauaaaucugguagaaaaaugagaucuaaaaaaaaaaaaaaaaaaaaaaaaaaaaaaaaaaaaaaaaaaaaaaaaaaaaaaaaaaaaaaaaaaaaaaaaaaaaaaaaaaaaaaaaaaaaaaaaaaaa

SEQ ID NO: 21696 - RNA, 2073 nt, Artificial Sequence
  mRNA product Design b-4 (A100) comprising derived and/or modified sequence from LASV(Nig08-04;Clade II)__ADU56611__SP-IgE_NP(2-569) (opt4)
aggagagucccgcagucggcguccagcggcucugcuuguucgugugugugucguugcaggccuuauucaagcuuaccauggacuggaccuggauccuguuccugguggccgccgccaccagagugcacagcagcgccagcaaggaggugaagagcuuccuguggacccagagccugagaagagagcugagcggcuacugcagcaacaucaagcugcagguggugaaggacgcccaggcccugcugcacggccuggacuucagcgaggugagcaacgugcagagacugaugagaaagcagaagagagacgacggcgaccugaagagacugagagaccugaaccaggccgugaacaaccugguggagcugaagagcacccagcagaagagcgugcugagagugggcacccugaccagcgacgaccugcugacccuggccgccgaccuggagaagcugaagagcaaggugaucagaaccgagagaccccugagcagcggcguguacaugggcaaccugagcacccagcagcuggagcagagaaaggcccugcugagcaugaucggcauggugggcggcgcccagggcacccagcccggcagagacggcguggugagagugugggacgugaagaaccccgaccugcugaacaaccaguucggcaccaugcccagccugacccuggccugccugaccaagcagggccagguggaccugaacgacgccgugcuggcccugaccgaccugggccugaucuacaccgccaaguaccccaacagcagcgaccuggacagacugagccagagccaccccauccugaacaugguggacaccaagaagagcagccugaacaucagcggcuacaacuucagccugggcgccgccgugaaggccggcgccugcaugcuggacggcggcaacaugcuggagaccaucaaggugaccccccagaccauggacggcauccugaagagcauccugaaggugaagagaagccugggcauguucgugagcgacacccccggcgagagaaaccccuacgagaacauccuguacaagaucugccugagcggcgacggcuggcccuacaucgccagcagaaccagcaucgugggcagagccugggagaacaccaccguggaccuggagagcgacggcaagccccagaaggugggcaccgccggcagcaacaagagccugcagagcgccggcuuccccaccggccugaccuacagccagcugaugacccugaaggacagcaugaugcagcuggaccccagcgccaagaccuggaucgacaucgagggcagacccgaggaccccguggagaucgcccuguaccagcccaugagcggcugcuacauccacuucuucagagagcccaccgaccugaagcaguucaagcaggacgccaaguacagccacggcaucgacgugaccgaccuguucagcgcccagcccggccugaccagcgccgugaucgaggcccugcccagaaacauggugcugaccugccagggcagcgacgacaucaagaagcugcuggacagccagggcagaagagacaucaagcugaucgacaucagccugaacaaggccgacagcagaagauucgagaacgccgugugggaccagugcaaggaccugugccacaugcacaccggcguggugguggagaagaagaagagaggcggcaaggaggagaucaccccccacugcgcccugauggacugcaucauguucgacgccgccgugagcggcggccugaacauccccauccugagagccgugcugcccagagacaugguguucagaaccagcagccccaagguggugcugugaggacuaguaauaaggaaacuguaugaaugucugugggcaggaagugaagagauccuucuguaaagguuuuuggaauuaugucugcugaauaauaaacuuuuuugaaauaauaaaucugguagaaaaaugagaucuaaaaaaaaaaaaaaaaaaaaaaaaaaaaaaaaaaaaaaaaaaaaaaaaaaaaaaaaaaaaaaaaaaaaaaaaaaaaaaaaaaaaaaaaaaaaaaaaaaaa

SEQ ID NO: 21697 - RNA, 2076 nt, Artificial Sequence
  mRNA product Design b-4 (A100) comprising derived and/or modified sequence from LASV(GA391;Clade III)__AAA46284__SP-IgE_NP(2-570) (opt4)
aggagagucccgcagucggcguccagcggcucugcuuguucgugugugugucguugcaggccuuauucaagcuuaccauggacuggaccuggauccuguuccugguggccgccgccaccagagugcacagcagcgccagcaaggaggugagaagcugccuguggacccagagccugagaagagagcugagcggcuacugcagcaacaucaagcugcagguggugaaggacgcccaggcccugcugcacggccuggacuucagcgaggugagcaacgugcagagacugaugagaaagcagaagagagacgacggcgaccugaagagacugagagaccugaaccaggccgugaacaaccugguggagcugaagagcacccagcagaagagcgugcugagagugggcacccugagcagcgacgaccugcugauccuggccgccgaccuggagaagcugaagagcaaggugaccagaaccgagagaccccugagcagcggcguguacaugggcaaccugagcagccagcagcuggaccagagaagagcccugcugaacaugaucggcaugaccggcgugagcggcggcggcaagggcgccagcaacggcaucgugagagugugggacgugaagaacgccgagcugcugaacaaccaguucggcaccaugcccagccugacccuggccugccugaccaagcagggccagguggaccugaacgacgccgugcaggcccugaccgaccugggccugaucuacaccgccaaguaccccaacagcagcgaccuggacagacugagccagagccaccccauccugaacaugaucgacaccaagaagagcagccugaacaucagcggcuacaacuucagccugggcgccgccgugaaggccggcgccugcaugcuggacggcggcaacaugcuggagaccaucaaggugagcccccagaccauggacggcauccugaagagcauccugaaggugaagaagagccugggcauguucgugagcgacacccccggcgagagaaaccccuacgagaacauccuguacaagaucugccugagcggcgacggcuggagcuacaucgccagcagaaccagcaucgugggcagagccugggagaacaccgugguggaccuggagcaggacaacaagccccagaagaucggcaacggcggcagcaacaagagccugcagagcgccggcuucgccgccggccugaucuacagccagcugaugacccugaaggacuucaagugcuucaaccugauccccaacgccaagaccuggauggacaucgagggcagacccgaggaccccguggagaucgcccuguaccagcccagcagcggcugcuacgugcacuucuucagagagcccaccgaccugaagcaguucaagcaggacgccaaguacagccacggcagagacgugaccgaccuguucgccgcccagcccggccugaccagcgccgugaucgaggcccugcccagaaacauggugaucaccugccagggcagcgaggacaucagaaagcugcuggagagccagggcagaagagacaucaagcugaucgacaucacccugagcaaggccgacagcagaaaguucgagaacgccgugugggaccaguucaaggaccugugccacaugcacaccggcguggugguggagaagaagaagagaggcggcaaggaggagaucaccccccacugcgcccugauggacugcaucauguucgacgccgccgugagcggcggccuggacgccaaggugcugagaguggugcugcccagagacaugguguucagaaccagcacccccaagguggugcugugaggacuaguaauaaggaaacuguaugaaugucugugggcaggaagugaagagauccuucuguaaagguuuuuggaauuaugucugcugaauaauaaacuuuuuugaaauaauaaaucugguagaaaaaugagaucuaaaaaaaaaaaaaaaaaaaaaaaaaaaaaaaaaaaaaaaaaaaaaaaaaaaaaaaaaaaaaaaaaaaaaaaaaaaaaaaaaaaaaaaaaaaaaaaaaaaa

SEQ ID NO: 21698 - RNA, 2073 nt, Artificial Sequence
  mRNA product Design b-4 (A100) comprising derived and/or modified sequence from LASV(Nig08-A19;Clade III)__ADU56619__SP-IgE_NP(2-569) (opt4)
aggagagucccgcagucggcguccagcggcucugcuuguucgugugugugucguugcaggccuuauucaagcuuaccauggacuggaccuggauccuguuccugguggccgccgccaccagagugcacagcagcgccagcaaggaggugaagagcuuccuguggacccagagccugagaagagagcugagcggcuacugcagcaacaucaagcugcagguggugaaggacgcccaggcccugcugcacggccuggacuucagcgaggugagcaacgugcagagacugaugagaaagcagaagagagacgacggcgaccugaagagacugagagaccugaaccaggccgugaacaaccugguggagcugaagagcacccagcagaagagcgugcugagagugggcacccugagcagcgacgaccugcuggugcuggccgccgaccuggagaagcugaagagcaagguggugagaaccgagagaccccugagcagcggcaucuacaugggcaaccugagcagccagcagcuggaccagagaaaggcccugcugaacaugaucggcaugaccggcggcaacggcggcagaaacaccaccagcgacggcaucgugagagugugggacgugaagaacgccgagcugcugaacaaccaguucggcaccaugcccagccugacccuggccugccugaccaagcagggccagguggaccugaacgacgccgugcaggcccugaccgaccugggccugaucuacaccgccaaguaccccaacagcagcgaccuggacagacuggcccagagccaccccauccugaacaugaucgacaccaagaagagcagccugaacaucagcggcuacaacuucagccugggcgccgccgugaaggccggcgccugcaugcuggacggcggcaacaugcuggagaccaucaaggugagcccccagaccauggacggcauccugaagagcauccugaaggugaagagaagccugggcauguucaucagcgacacccccggcgagagaaaccccuacgagaacauccuguacaagaucugccugagcggcgacggcuggcccuacaucgccagcagaaccagcaucgugggcagagccugggagaacaccgugguggaccuggagagcgacaacaagccccagaagaccggcaacggcggcagcaacaagagccugcagagcgccggcuucgccgccggccugaccuacagccagcugaugacccugaaggacagcaugcugcagcuggaccccaacgccaagaccuggauggacaucgagggcagacccgaggaccccguggagaucgcccuguaccagcccagcagcggcugcuacauccacuucuucagagagcccaccgaccugaagcaguucaagcaggacgccaaguacagccacggcaucgacgugaccgaccuguucgccgcccagcccggccugaccagcgccgugaucgaggcccugcccagaaacauggugaucaccugccagggcagcgaggacaucagaaagcugcuggagagccagggcagaagagacaucaagcugaucgacaucagccugagcaagguggacagcagaaaguucgagaacgccgugugggaccaguucaaggaccugugccacaugcacaccggcaucgugguggagaagaagaagagaggcggcaaggaggagaucaccccccacugcgcccugauggacugcaucauguucgacgccgccgugagcggcggcguggacgccaaggugcugagagccgugcugcccagagacaugguguucagaaccagcacccccaagguggugcugugaggacuaguaauaaggaaacuguaugaaugucugugggcaggaagugaagagauccuucuguaaagguuuuuggaauuaugucugcugaauaauaaacuuuuuugaaauaauaaaucugguagaaaaaugagaucuaaaaaaaaaaaaaaaaaaaaaaaaaaaaaaaaaaaaaaaaaaaaaaaaaaaaaaaaaaaaaaaaaaaaaaaaaaaaaaaaaaaaaaaaaaaaaaaaaaaa

SEQ ID NO: 21699 - RNA, 2073 nt, Artificial Sequence
  mRNA product Design b-4 (A100) comprising derived and/or modified sequence from LASV(G1180-SLE-2010;Clade IV)__AIT17169__SP-IgE_NP(2-569) (opt4)
aggagagucccgcagucggcguccagcggcucugcuuguucgugugugugucguugcaggccuuauucaagcuuaccauggacuggaccuggauccuguuccugguggccgccgccaccagagugcacagcagcgccagcaaggagaucaagagcuuccuguggacccagagccugagaagagagcugagcggcuacugcagcaacaucaagcugcagguggugaaggacgcccaggcccugcugcacggccuggacuucagcgaggugagcaacgugcagagacugaugagaaaggagagaagagacgacaacgaccugaagagacugagagaccugaaccaggccgugaacaaccugguggagcugaagagcacccagcagaagagcauccugagagugggcacccugaccagcgacgaccugcugauccuggccgccgaccuggagaagcugaagagcaaggugaucagaaccgagagaccccugagcgccggcguguacaugggcaaccugagcagccagcagcuggaccagagaagagcccugcugagcaugaucggcaugagcagcggcaaccagagagcccaggccggcagagacggcguggugagagugugggacgugaagaacguggagcugcugaacaaccaguucggcaccaugcccagccugacccuggccugccugaccaagcagggccagguggaccugaacgacgccgugcaggcccugaccgaccugggccugaucuacaccgccaaguaccccaacaccagcgaccuggacagacugacccagagccaccccauccugaacaugaucgacaccaagaagagcagccugaacaucagcggcuacaacuucagccugggcgccgccgugaaggccggcgccugcaugcuggacggcggcaacaugcuggagaccaucaaggugagcccccagaccauggacggcauccugaagagcauccugaaggugaagaaggcccugggcauguucaucagcgacacccccggcgagagaaaccccuacgagaacauccuguacaagaucugccugagcggcgacggcuggcccuacaucgccagcagaaccagcaucaccggcagagccugggagaacaccgugguggaccuggagagcgacggcaagccccagaaggccggcagcaacaacagcaacaagagccugcagagcgugggcuucaccgccggccugaccuacagccagcugaugacccugaaggacgccaugcugcagcuggaccccaacgccaagaccuggauggacaucgagggcagacccgaggaccccguggagaucgcccuguaccagcccagcagcggcugcuacauccacuucuucagagagcccaccgaccugaagcaguucaagcaggacgccaaguacagccacggcaucgacgugaccgaccuguucgccgcccagcccggccugaccagcgccgugaucgacgcccugcccagaaacauggugaucaccugccagggcagcgacgacaucagaaagcugcuggagagccagggcagaaaggacaucaagcugaucgacaucgcccugagcaagaccgacagcagaaaguacgagaacgccgugugggaccaguacaaggaccugugccacaugcacaccggcguggugguggagaagaagaagagaggcggcaaggaggagaucaccccccacugcgcccugauggacugcaucauguucgacgccgccgugagcggcggccugaacaccagcgugcugagagccgugcugcccagagacaugguguucagaaccagcacccccagaguggugcugugaggacuaguaauaaggaaacuguaugaaugucugugggcaggaagugaagagauccuucuguaaagguuuuuggaauuaugucugcugaauaauaaacuuuuuugaaauaauaaaucugguagaaaaaugagaucuaaaaaaaaaaaaaaaaaaaaaaaaaaaaaaaaaaaaaaaaaaaaaaaaaaaaaaaaaaaaaaaaaaaaaaaaaaaaaaaaaaaaaaaaaaaaaaaaaaaa

SEQ ID NO: 21700 - RNA, 2073 nt, Artificial Sequence
  mRNA product Design b-4 (A100) comprising derived and/or modified sequence from LASV(G1442-SLE-2011;Clade IV)__AIT17181__SP-IgE_NP(2-569) (opt4)
aggagagucccgcagucggcguccagcggcucugcuuguucgugugugugucguugcaggccuuauucaagcuuaccauggacuggaccuggauccuguuccugguggccgccgccaccagagugcacagcagcgccagcaaggaggugaagagcuuccuguggacccagagccugagaagagagcugagcggcuacugcagcaacaucaagcugcagguggugaaggacgcccaggcccugcugcacggccuggacuucagcgaggugagcaacgugcagagacugaugagaaagcagagaagagacgacaacgaccugaagagacugagagaccugaaccaggccgugaacaaccugguggagcugaagagcacccagcagaagagcgugcugagagugggcacccugaccagcgacgaccugcuggugcuggccgccgaccuggagaagcugaagagcaaggugaucagaaccgagagaccccugagcgccggcguguacaugggcaaccugagcagccagcagcuggaccagagaagagcccugcugaacaugaucggcaugagcggcggcauccagggcaccagaaccggcagagacggcguggugagagugugggacgugaagaacgccgaccugcugaacaaccaguucggcaccaugcccagccugacccuggccugccugaccaagcagggccagguggaccugaacgacguggugcaggcccugaccgaccugggccugaucuacaccgccaaguaccccaacgccagcgaccuggacagacugacccagagccaccccauccugaacaugaucgacaccaagaagagcagccugaacaucagcggcuacaacuucagccugggcgccgccgugaaggccggcgccugcaugcuggacggcggcaacaugcuggagaccaucaaggugagcccccagaccauggacggcauccugaagagcauccugaaggugaagaagacccugggcauguucaucagcgacacccccggcgagagaaaccccuacgagaacauccuguacaagaucugccugagcggcgacggcuggcccuacaucgccagcagaaccagcaucaccggcagagccugggagaacaccgugguggaccuggagagcgacggcaagccccagaaggccggcagcaacaacagcaacaagagccugcagagcgccggcuucgccgccggccugaccuacagccagcugaugacccugaaggacgccaugcugcagcuggaccccaacgccaagaccuggauggacaucgagggcagacccgaggaccccguggagaucgcccuguaccagcccagcagcggcugcuacauccacuucuucagagagcccaccgaccugaagcaguucaagcaggacgccaaguacagccacggcaucgacgugaccgaccuguucgccgcccagcccggccugaccagcgccgugaucgaggcccugcccagaaacauggugaucaccugccagggcagcgacgacaucaagaagcugcuggagagccagggcagaaaggacaucaagcugaucgacaucgcccugagcaagaccgacagcagaaaguacgagaacgccgugugggaccaguacaaggaccugugccacaugcacaccggcguggugguggagaagaagaagagaggcggcaaggaggagaucaccccccacugcgcccugauggacugcaucauguucgacgccgccgugagcggcggccugaacacccuggugcugagagccgugcugcccagagacaugguguucagaaccagcacccccagaguggugcugugaggacuaguaauaaggaaacuguaugaaugucugugggcaggaagugaagagauccuucuguaaagguuuuuggaauuaugucugcugaauaauaaacuuuuuugaaauaauaaaucugguagaaaaaugagaucuaaaaaaaaaaaaaaaaaaaaaaaaaaaaaaaaaaaaaaaaaaaaaaaaaaaaaaaaaaaaaaaaaaaaaaaaaaaaaaaaaaaaaaaaaaaaaaaaaaaa

SEQ ID NO: 21701 - RNA, 2073 nt, Artificial Sequence
  mRNA product Design b-4 (A100) comprising derived and/or modified sequence from LASV(G3010-SLE-2013;Clade IV)__AIT17345__SP-IgE_NP(2-569) (opt4)
aggagagucccgcagucggcguccagcggcucugcuuguucgugugugugucguugcaggccuuauucaagcuuaccauggacuggaccuggauccuguuccugguggccgccgccaccagagugcacagcagcgccagcaaggagaucaagagcuuccuguggacccagagccugagaagagagcugagcggcuacugcagcaacaucaagcugcagguggugaaggacgcccaggcccugcugcacggccuggacuucagcgaggugagcaacgugcagagacugaugagaaaggagagaagagacgacaacgaccugaagagacugagagaccugaaccaggccgugaacaaccugguggagcugaagagcacccagcagaagagcauccugagagugggcacccugaccagcgacgaccugcugauccuggccgccgaccuggagaagcugaagagcaaggugaccagaaccgagagaccccugagcgccggcguguacaugggcaaccugagcagccagcagcuggaccagagaagagcccugcugagcaugaucggcaugagcagcggcgugcagggcgccagagccggcagagacggcguggugagagugugggacgugaagaacgccgagcugcugaacaaccaguucggcaccaugcccagccugacccuggccugccugaccaagcagggccagguggaccugaacgacguggugcaggcccugaccgaccugggccugaucuacaccgccaaguaccccaacaccagcgaccuggacagacugacccagagccaccccauccugaacaugaucgacaccaagaagagcagccugaacaucagcggcuacaacuucagccugggcgccgccgugaaggccggcgccugcaugcuggacggcggcaacaugcuggagaccaucaaggugagcccccagaccauggacggcauccugaagagcauccugaaggugaagaaggcccugggcauguucaucagcgagacccccggcgagagaaaccccuacgagaacauccuguacaagaucugccugagcggcgacggcuggcccuacaucgccagcagaaccagcaucaccggcagagccugggagaacaccgugguggaccuggagagcgacggcaagccccagaaggccggcagcaacaacagcaacaagagccugcagagcgccggcuucaccgccggccugaccuacagccagcugaugacccugaaggacgccaugcugcagcuggaccccaacgccaagaccuggauggacaucgagggcagacccgaggaccccguggagguggcccuguaccagcccagcagcggcugcuacauccacuucuucagagagcccaccgaccugaagcaguucaagcaggacgccaaguacagccacggcaucgacgugaccgaccuguucgccgcccagcccggccugaccagcgccgugaucgacgcccugcccagaaacauggugaucaccugccagggcagcgacgacaucaagaagcugcuggagagccagggcagaaaggacaucaagcugaucgacaucgcccugagcaagaccgacagcagaaaguacgagaacgccgugugggaccaguacaaggaccugugccacaugcacaccggcguggugguggagaagaagaagagaggcggcaaggaggagaucaccccccacugcgcccugauggacugcaucauguucgacgccgccgugagcggcggccugaacaccagcgugcugagagccgugcugcccagagacaugguguucagaaccagcacccccagaguggugcugugaggacuaguaauaaggaaacuguaugaaugucugugggcaggaagugaagagauccuucuguaaagguuuuuggaauuaugucugcugaauaauaaacuuuuuugaaauaauaaaucugguagaaaaaugagaucuaaaaaaaaaaaaaaaaaaaaaaaaaaaaaaaaaaaaaaaaaaaaaaaaaaaaaaaaaaaaaaaaaaaaaaaaaaaaaaaaaaaaaaaaaaaaaaaaaaaa

SEQ ID NO: 21702 - RNA, 2073 nt, Artificial Sequence
  mRNA product Design b-4 (A100) comprising derived and/or modified sequence from LASV(G502-SLE-2009;Clade IV)__AIT17127__SP-IgE_NP(2-569) (opt4)
aggagagucccgcagucggcguccagcggcucugcuuguucgugugugugucguugcaggccuuauucaagcuuaccauggacuggaccuggauccuguuccugguggccgccgccaccagagugcacagcagcgccagcaaggagaucaagagcuuccuguggacccagagccugagaagagagcugagcggcuacugcagcaacaucaagcugcagguggugaaggacgcccaggcccugcugcacggccuggacuucagcgaggugagcaacgugcagagacugaugagaaaggagagaagagacgacaacgaccugaagagacugagagaccugaaccaggccgugaacaaccugguggagcugaagagcacccagcagaagagcauccugagagugggcacccugaccagcgacgaccugcugauccuggccgccgaccuggagaagcugaagagcaaggugaucagaaccgagagaccccugagcgccggcguguacaugggcaaccugagcagccagcagcuggaccagagaagagcccugcugagcaugaucggcaugagcggcggcaaccagggcgugagagccggcaaggacggcguggugagagugugggacgugaagaacgccgagcugcugaacaaccaguucggcaccaugcccagccugacccuggccugccugaccaagcagggccagguggaccugaacgacgccgugcaggcccugaccgaccugggccugaucuacaccgccaaguaccccaacaccagcgaccuggacagacugacccagagccaccccauccugaacaugaucgacaccaagaagagcagccugaacaucagcggcuacaacuucagccugggcgccgccgugaaggccggcgccugcaugcuggacggcggcaacaugcuggagaccaucaaggugagcccccagaccauggacggcauccugaagagcauccugaaggugaagaaggcccugggcauguucaucagcgacacccccggcgagagaaaccccuacgagaacauccuguacaagaucugccugagcggcgacggcuggcccuacaucgccagcagaaccagcaucaccggcagagccugggagaacaccgugguggaccuggagagcgacggcaagccccagaaggccggcagcaacaacagcaacaagagccugcagagcgccggcuucaccgccggccugaccuacagccagcugaugacccugaaggacgccaugcugcagcuggaccccaacaccaagaccuggauggacaucgagggcagacccgaggaccccguggagaucgcccuguaccagcccagcagcggcugcuacauccacuucuucagagagcccaccgaccugaagcaguucaagcaggacgccaaguacagccacggcaucgacgugaccgaccuguucgccgcccagcccggccugaccagcgccgugaucgacgcccugcccagaaacauggugaucaccugccagggcagcgacgacaucagaaagcugcuggagagccagggcagaaaggacaucaagcugaucgacaucgcccugaacaagaccgacagcagaaaguacgagaacgccgugugggaccaguacaaggaccugugccacaugcacaccggcguggugguggagaagaagaagagaggcggcaaggaggagaucaccccccacugcgcccugauggacugcaucauguucgacgccgccgugagcggcggccugaacaccagcgugcugagagccgugcugcccagagacaugguguucagaaccagcacccccagaguggugcugugaggacuaguaauaaggaaacuguaugaaugucugugggcaggaagugaagagauccuucuguaaagguuuuuggaauuaugucugcugaauaauaaacuuuuuugaaauaauaaaucugguagaaaaaugagaucuaaaaaaaaaaaaaaaaaaaaaaaaaaaaaaaaaaaaaaaaaaaaaaaaaaaaaaaaaaaaaaaaaaaaaaaaaaaaaaaaaaaaaaaaaaaaaaaaaaaa

SEQ ID NO: 21703 - RNA, 2073 nt, Artificial Sequence
  mRNA product Design b-4 (A100) comprising derived and/or modified sequence from LASV(G733-SLE-2010;Clade IV)__AIT17155__SP-IgE_NP(2-569) (opt4)
aggagagucccgcagucggcguccagcggcucugcuuguucgugugugugucguugcaggccuuauucaagcuuaccauggacuggaccuggauccuguuccugguggccgccgccaccagagugcacagcagcgccagcaaggagaucaagagcuuccuguggacccagagccugagaagagagcugagcggcuacugcagcaacaucaagcugcagguggugaaggacgcccaggcccugcugcacggccuggacuucagcgaggugagcaacgugcagagacugaugagaaaggagagaagagacgacaacgaccugaagagacugagagaccugaaccaggccgugaacaaccugguggagcugaagagcacccagcagaagagcgugcugagagugggcacccugaccagcgacgagcugcuggugcuggccgccgaccuggagaagcugaagagcaaggugaucagaaccgagagaccccugagcgccggcguguacaugggcaaccugagcagccagcagcuggaccagagaagagcccugcugagcaugaucggcaugagcggcggcaaccagggcgccagaaccggcagagacggcguggugagagugugggacgugaagaacgccgagcugcugaacaaccaguucggcaccaugcccagccugacccuggccugccugaccaagcagggccagguggaccugaacgacgccgugcaggcccugaccgaccugggccugaucuacaccgccaaguaccccaacaccagcgaccuggacagacugacccagagccaccccauccugaacaugaucgacaccaagaagagcagccugaacaucagcggcuacaacuucagccugggcgccgccgugaaggccggcgccugcaugcuggacggcggcaacaugcuggagaccaucaaggugagcccccagaccauggacggcauccugaagagcauccugaaggugaagaaggcccugggcauguucaucagcgacacccccggcgagagaaaccccuacgagaacauccuguacaagaucugccugagcggcgacggcuggcccuacaucgccagcagaaccagcaucaccggcagagccugggagaacaccgugguggaccuggagagcgacggcaagccccagaaggccggcagcaacaacagcaacaagagccugcagagcgccggcuucaccgccggccugaccuacagccagcugaugacccugaaggacgccaugcugcagcuggaccccaacgccaagaccuggauggacaucgagggcagacccgaggaccccguggagaucgcccuguaccagcccagcagcggcugcuacauccacuucuucagagagcccaccgaccugaagcaguucaagcaggacgccaaguacagccacggcaucgacgugaccgaccuguucgccgcccagcccggccugaccagcgccgugaucgacgcccugcccagaaacauggugaucaccugccagggcagcgacgacaucagaaagcugcuggagagccagggcagaaaggacaucaagcugaucgacaucgcccugagcaagaucgacagcagaaaguacgagaacgccgugugggaccaguacaaggaccugugccacaugcacaccggcguggugguggagaagaagaagagaggcggcaaggaggagaucaccccccacugcgcccugauggacugcaucauguucgacgccgccgugagcggcggccugaacagccuggugcugagagccgugcugcccagagacaugguguucagaaccagcacccccagaguggugcugugaggacuaguaauaaggaaacuguaugaaugucugugggcaggaagugaagagauccuucuguaaagguuuuuggaauuaugucugcugaauaauaaacuuuuuugaaauaauaaaucugguagaaaaaugagaucuaaaaaaaaaaaaaaaaaaaaaaaaaaaaaaaaaaaaaaaaaaaaaaaaaaaaaaaaaaaaaaaaaaaaaaaaaaaaaaaaaaaaaaaaaaaaaaaaaaaa

SEQ ID NO: 21704 - RNA, 2073 nt, Artificial Sequence
  mRNA product Design b-4 (A100) comprising derived and/or modified sequence from MOPV/LASV reassortant(IGS-1;Clade IV)__AFY05578__SP-IgE_NP(2-569) (opt4)
aggagagucccgcagucggcguccagcggcucugcuuguucgugugugugucguugcaggccuuauucaagcuuaccauggacuggaccuggauccuguuccugguggccgccgccaccagagugcacagcagcgccagcaaggagaucaagagcuuccuguggacccagagccugagaagagagcugagcggcuacugcagcaacaucaagcugcagguggugaaggacgcccaggcccugcugcacggccuggacuucagcgaggugagcaacgugcagagacugaugagaaaggagagaagagacgacaacgaccugaagagacugagagaccugaaccaggccgugaacaaccugguggagcugaagagcacccagcagaagagcauccugagagugggcacccugaccagcgacgaccugcugauccuggccgccgaccuggagaagcugagaagcaaggugaucagaaccgagagaccccugagcgccggcguguacaugggcaaccugagcagccagcagcuggaccagagaagagcccugcugaacaugaucggcaugagcggcggcaaccagggcgccagagccggcagagacggcguggugagagugugggacgugaagaacgccgagcugcugagcaaccaguucggcaccaugcccagccugacccuggccugccugaccaagcagggccagguggaccugaacgacgccgugcaggcccugaccgaccugggccugaucuacaccgccaaguaccccaacaccagcgaccuggacagacugacccagagccaccccauccugaacaugaucgacaccaagaagagcagccugaacaucagcggcuacaacuucagccugggcgccgccgugaaggccggcgccugcaugcuggacggcggcaacaugcuggagaccaucaaggugagcccccagaccauggacggcauccugaagagcauccugaaggugaagaaggcccugggcauguucaucagcgacacccccggcgagagaaaccccuacgagaacauccuguacaagaucugccugagcggcgacggcuggcccuacaucgccagcagaaccagcaucaccggcagagccugggagaacaccgugguggaccuggagagcgacggcaagccccagaaggccgacagcaacaacagcagcaagagccugcagagcgccggcuucaccgccggccugaccuacagccagcugaugacccugaaggacgccaugcugcagcuggaccccaacgccaagaccuggauggacaucgagggcagacccgaggaccccguggagaucgcccuguaccagcccagcagcggcugcuacauccacuucuucagagagcccaccgaccugaagcaguucaagcaggacgccaaguacagccacggcaucgacgugaccgaccuguucgccacccagcccggccugaccagcgccgugaucgacgcccugcccagaaacauggugaucaccugccagggcagcgacgacaucagaaagcugcuggagagccagggcagaaaggacaucaagcugaucgacaucgaccugagcaagaccgacagcagaaaguacgagaacgccgugugggaccaguacaaggaccugugccacaugcacaccggcguggugguggagaagaagaagagaggcggcaaggaggagaucaccccccacugcgcccugauggacugcaucauguucgacgccgccgugagcggcggccugaacaccagcgugcugagagccgugcugcccagagacaugguguucagaaccagcacccccagaguggugcugugaggacuaguaauaaggaaacuguaugaaugucugugggcaggaagugaagagauccuucuguaaagguuuuuggaauuaugucugcugaauaauaaacuuuuuugaaauaauaaaucugguagaaaaaugagaucuaaaaaaaaaaaaaaaaaaaaaaaaaaaaaaaaaaaaaaaaaaaaaaaaaaaaaaaaaaaaaaaaaaaaaaaaaaaaaaaaaaaaaaaaaaaaaaaaaaaa

SEQ ID NO: 21705 - RNA, 2073 nt, Artificial Sequence
  mRNA product Design b-4 (A100) comprising derived and/or modified sequence from LASV(LM765-SLE-2012;Clade IV)__AIT17815__SP-IgE_NP(2-569) (opt4)
aggagagucccgcagucggcguccagcggcucugcuuguucgugugugugucguugcaggccuuauucaagcuuaccauggacuggaccuggauccuguuccugguggccgccgccaccagagugcacagcagcgccagcaaggagaucaagagcuuccuguggacccagagccugagaagagagcugagcggcuacugcagcaacaucaagcugcagguggugaaggacgcccaggcccugcugcacggccuggacuucagcgaggugagcaacgugcagagacugaugagaaaggagagaagagacgacaacgaccugaagagacugagagaccugaaccaggccgugaacaaccugguggagcugaagagcacccagcagaagagcauccugagagugggcacccugaccagcgacgaccugcugauccuggccgccgaccuggagaagcugaagagcaaggugaccagaaccgagagaccccugagcgccggcguguacaugggcaaccugagcagccagcagcuggaccagagaagagcccugcuggacaugaucggcaugagcggcagcaaccagggcgccagagccggcagagacggcguggugagagugugggacgugaagaacgccgagcugcugaacaaccaguucggcaccaugcccagccugacccuggccugccugaccaagcagggccagguggaccugaacgacgccgugcaggcccugaccgaccugggccugaucuacaccgccaaguaccccaacaccagcgaccuggacagacugacccagagccaccccauccugaacaugaucgacaccaagaagagcagccugaacaucagcggcuacaacuucagccugggcgccgccgugaaggccggcgccugcaugcuggacggcggcaacaugcuggagaccaucaaggugagcccccagaccauggacggcauccugaagagcauccugaaggugaagaaggcccugggcauguucaucagcgacgcccccggcgagagaaaccccuacgagaacauccuguacaagaucugccugagcggcgacggcuggcccuacaucgccagcagaaccagcaucaccggcagagccugggagaacaccgugguggaccuggagagcgacggcaagccccagaaggccggcagcaacggcagcaacaagagccugcagagcgccggcuucaccgccggccugaccuacagccagcugaugacccugaaggacgccaugcugcagcuggaccccaacgccaagaccuggauggacaucgagggcagacccgaggaccccguggagaucgcccuguaccagcccagcagcggcugcuacauccacuucuucagagagcccaccgaccugaagcaguucaagcaggacgccaaguacagccacggcaucgacgugaccgaccuguucgccgcccagcccggccugaccagcgccgugaucgacgcccugcccagaaacauggugaucaccugccagggcagcgacgacaucagaaagcuguucgagagccagggcagaaaggacaucaagcugaucgacaucgcccugagcaagaccgacagcagaaaguacgagaacgccgugugggaccaguacaaggaccugugccacaugcacaccggcaucgugguggagaagaagaagagaggcggcaaggaggagaucaccccccacugcgcccugauggacugcaucauguucgacgccgccgugagcggcggccugaacaccagcgugcugagagccgugcugcccagagacaugguguucagaaccagcacccccagaguggugcugugaggacuaguaauaaggaaacuguaugaaugucugugggcaggaagugaagagauccuucuguaaagguuuuuggaauuaugucugcugaauaauaaacuuuuuugaaauaauaaaucugguagaaaaaugagaucuaaaaaaaaaaaaaaaaaaaaaaaaaaaaaaaaaaaaaaaaaaaaaaaaaaaaaaaaaaaaaaaaaaaaaaaaaaaaaaaaaaaaaaaaaaaaaaaaaaaa

SEQ ID NO: 21706 - RNA, 2073 nt, Artificial Sequence
  mRNA product Design b-4 (A100) comprising derived and/or modified sequence from LASV(LM776-SLE-2012;Clade IV)__AIT17825__SP-IgE_NP(2-569) (opt4)
aggagagucccgcagucggcguccagcggcucugcuuguucgugugugugucguugcaggccuuauucaagcuuaccauggacuggaccuggauccuguuccugguggccgccgccaccagagugcacagcagcgccagcaaggagaucaagagcuuccuguggacccagagccugagaagagagcugagcagcuacugcagcaacaucaagcugcagguggugaaggacgcccaggcccugcugcacggccuggacuucagcgaggugagcaacgugcagagacugaugagaaaggagagaagagacgacaacgaccugaagagacugagagaccugaaccaggccgugaacaaccugguggagcugaagagcacccagcagaagagcauccugagagugggcacccugaccagcgacgaccugcugauccuggccgccgaccuggagaagcugaagagcaaggugaccagaaccgagagaccccugagcgccggcguguacaugggcaaccugagcagccagcagcuggaccagagaagagcccugcugagcaugaucggcaugagcggcagcaaccagggcgccagagccggcagagacggcguggugagagugugggacgugaagaacgccgagcugcugaacaaccaguucggcaccaugcccagccugacccuggccugccugaccaagcagggccagguggaccugaacgacgccgugcaggcccugaccgaccugggccugaucuacaccgccaaguaccccaacaccagcgaccuggacagacugacccagagccaccccauccugaacaugaucgacaccaagaagagcagccugaacaucagcggcuacaacuucagccugggcgccgccgugaaggccggcgccugcaugcuggacggcggcaacaugcuggagaccaucaaggugagcccccagaccauggacggcauccugaagagcauccugaaggugaagaaggcccugggcauguucaucagcgacacccccggcgagagaaaccccuacgagaacauccuguacaagaucugccugagcggcgacggcuggcccuacaucgccagcagaaccagcaucaccggcagagccugggagaacaccgugguggaccuggagagcgacggcaagccccagaaggccggcagcaacaacagcaacaagagccugcagagcgccggcuucaccgccggccugaccuacagccagcugaugacccugaaggacgccaugcugcagcuggaccccaacgccaagaccuggauggacaucgagggcagacccgaggaccccguggagguggcccuguaccagcccagcagcggcugcuacauccacuucuucagagagcccaccgaccugaagcaguucaagcaggacgccaaguacagccacggcaucgacgugaccgaccuguucgccgcccagcccggccugaccagcgccgugaucgacgcccugcccagaaacauggugaucaccugccagggcagcgacgacaucagaaagcugcuggagagccagggcagaaaggacaucaagcugaucgacaucgcccugagcaagaccgacagcagaaaguacgagaacgccgugugggaccaguacaaggaccugugccacaugcacaccggcguggugguggagaagaagaagagaggcggcaaggaggagaucaccccccacugcgcccugauggacugcaucauguucgacgccgccgugagcggcggccugaacaccagcgugcugagagccgugcugcccagagacaugguguucagaaccagcacccccagaguggugcugugaggacuaguaauaaggaaacuguaugaaugucugugggcaggaagugaagagauccuucuguaaagguuuuuggaauuaugucugcugaauaauaaacuuuuuugaaauaauaaaucugguagaaaaaugagaucuaaaaaaaaaaaaaaaaaaaaaaaaaaaaaaaaaaaaaaaaaaaaaaaaaaaaaaaaaaaaaaaaaaaaaaaaaaaaaaaaaaaaaaaaaaaaaaaaaaaa

SEQ ID NO: 21707 - RNA, 2073 nt, Artificial Sequence
  mRNA product Design b-4 (A100) comprising derived and/or modified sequence from LASV(Mad39;Clade IV)__ANH09723__SP-IgE_NP(2-569) (opt4)
aggagagucccgcagucggcguccagcggcucugcuuguucgugugugugucguugcaggccuuauucaagcuuaccauggacuggaccuggauccuguuccugguggccgccgccaccagagugcacagcagcgccagcaaggagaucaagagcuuccuguggacccagagccugagaagagagcugagcggcuacugcagcaacaucaagcugcagguggugaaggacgcccaggcccugcugcacggccuggacuucagcgaggugagcaacgugcagagacugaugagaaagcagagaagagacgacaacgaccugaagagacugagagaccugaaccaggccgugaacaaccugguggagcugaagagcacccagcagaagagcgugcugagagugggcacccugaccagcgacgaccugcugacccuggccgccgaccuggagaagcugaagagcaaggugaccagaaccgagagaccccugaccgccggcguguacaugggcaaccugagcagccagcagcuggaccagagaagagcccugcugaacaugaucggcaugagcggcggcaaccagggcgccagaaccggcagagacggcguggugagagugugggacgugaagaacgccgagcugcugaacaaccaguucggcaccaugcccagccugacccuggccugccugaccaagcagggccagguggaccugaacgacguggugcaggcccugaccgaccugggccugaucuacaccgccaaguaccccaacaccagcgaccuggacagacugacccagagccaccccauccugaacaugaucgacaccaacaagagcagccugaacaucagcggcuacaacuucagccugggcgccgccgugaaggccggcgccugcaugcuggacggcggcaacaugcuggagaccaucaaggugagcccccagaccauggacggcauccugaagagcauccugaaggugaagaagagccugggcauguucaucagcgacacccccggcgagagaaaccccuacgagaacauccuguacaagaucugccugagcggcgacggcuggcccuacaucgccagcagaaccagcaucaccggcagagccugggagaacaccgugguggaccuggagagcggcggcaagccccagaaggccggcagcaacaacagcaacaagagccugcagagcgccggcuucgccgccggccugaccuacagccagcugaugacccugaaggacgccaugcugcagcuggaccccaacgccaagaccuggauggacaucgagggcagacccgaggaccccguggagaucgcccuguaccagcccaucagcggcugcuacauccacuucuucagagagcccaccgaccugaagcaguucaagcaggacgccaaguacagccacggcaucgacgugaccgaccuguucgccgcccagcccggccugaccagcgccgugaucgaggcccugcccagaaacauggugaucaccugccagggcagcgacgacaucagaaagcuguucgagagccagggcagaaaggacaucaagcugaucgacaucgcccugagcaagaccgacagcagaaaguacgagaacgccgugugggaccaguacaaggaccugugccacaugcacaccggcguggugguggagaagaagaagaagggcggcaaggaggagaucaccccccacugcgcccugauggacugcaucauguucgacgccgccgugagcggcggccugaacacccuggugcugagagccgugcugcccagagacaugguguucagaaccagcacccccaagguggugcugugaggacuaguaauaaggaaacuguaugaaugucugugggcaggaagugaagagauccuucuguaaagguuuuuggaauuaugucugcugaauaauaaacuuuuuugaaauaauaaaucugguagaaaaaugagaucuaaaaaaaaaaaaaaaaaaaaaaaaaaaaaaaaaaaaaaaaaaaaaaaaaaaaaaaaaaaaaaaaaaaaaaaaaaaaaaaaaaaaaaaaaaaaaaaaaaaa

SEQ ID NO: 21708 - RNA, 2073 nt, Artificial Sequence
  mRNA product Design b-4 (A100) comprising derived and/or modified sequence from LASV(Z0947-SLE-2011;Clade IV)__AIT17841__SP-IgE_NP(2-569) (opt4)
aggagagucccgcagucggcguccagcggcucugcuuguucgugugugugucguugcaggccuuauucaagcuuaccauggacuggaccuggauccuguuccugguggccgccgccaccagagugcacagcagcgccagcaaggagaucaagagcuuccuguggacccagagccugagaagagagcugagcggcuacugcagcaacaucaagcugcagguggugaaggacgcccaggcccugcugcacggccuggacuucagcgaggugagcaacgugcagagacugaugagaaaggagagaagagacgacaacgaccugaagagacugagagaccugaaccaggccgugaacaaccugguggagcugaagagcacccagcagaagagcauccugagagugggcacccugaccagcgacgaccugcugauccuggccgccgaccuggagaagcugaagagcaaggugaccagaaccgagagaccccugagcgccggcguguacaugggcaaccugagcagccagcagcuggaccagagaagagcccugcugaacaugaucggcaugagcggcagcaaccagggcgccagaaccggcagagacggcguggugagagugugggacgugaagaacgccgagcugcugaacaaccaguucggcaccaugcccagccugacccuggccugccugaccaagcagggccagguggaccugaacgacgccgugcaggcccugaccgaccugggccugaucuacaccgccaaguaccccaacaccagcgaccuggacagacugacccagagccaccccauccugaacaugaucgacaccaagaagagcagccugaacaucagcggcuacaacuucagccugggcgccgccgugaaggccggcgccugcaugcuggacggcggcaacaugcuggagaccaucaaggugagcccccagaccauggacggcauccugaagagcauccugaaggugaagaaggcccugggcauguucaucagcgacgcccccggcgagagaaaccccuacgagaacauccuguacaagaucugccugagcggcgacggcuggcccuacaucgccagcagaaccagcaucaccggcagagccugggagaacaccgugguggaccuggagagcgacggcaagccccagaaggccggcagcaacggcagcaacaagagccugcagagcgccggcuucaccgccggccugaccuacagccagcugaugacccugaaggacgccaugcugcagcuggaccccaacgccaagaccuggauggacaucgagggcagacccgaggaccccguggagaucgcccuguaccagcccagcagcggcugcuacauccacuucuucagagagcccaccgaccugaagcaguucaagcaggacgccaaguacagccacggcaucgacgugaccgaccuguucgccgcccagcccggccugaccagcgccgugaucgacgcccugcccagaaacauggugaucaccugccagggcagcgacgacaucagaaagcuguucgagagccagggcagaaaggacaucaagcugaucgacaucgcccugagcaagaccgacagcagaaaguacgagaacgccgugugggaccaguacaaggaccugugccacaugcacaccggcaucgugguggagaagaagaagagaggcggcaaggaggagaucaccccccacugcgcccugauggacugcaucauguucgacgccgccgugagcggcggccugaacaccagcgugcugagagccgugcugcccagagacaugguguucagaaccagcacccccagaguggugcugugaggacuaguaauaaggaaacuguaugaaugucugugggcaggaagugaagagauccuucuguaaagguuuuuggaauuaugucugcugaauaauaaacuuuuuugaaauaauaaaucugguagaaaaaugagaucuaaaaaaaaaaaaaaaaaaaaaaaaaaaaaaaaaaaaaaaaaaaaaaaaaaaaaaaaaaaaaaaaaaaaaaaaaaaaaaaaaaaaaaaaaaaaaaaaaaaa

SEQ ID NO: 21709 - RNA, 2073 nt, Artificial Sequence
  mRNA product Design b-4 (A100) comprising derived and/or modified sequence from LASV(Josiah;Clade IV)__NP_694869__SP-IgE_NP(2-569) (opt5)
aggagagucccgcagucggcguccagcggcucugcuuguucgugugugugucguugcaggccuuauucaagcuuaccauggacuggaccuggauccuguuccucguggccgcugccacaagaguccacagcagcgccuccaaggagaucaaaucuuuccuguggacccagagccucagacgggaacuguccggcuacugcucuaacauuaagcugcaaguggucaaagacgcucaggcccugcuccacgggcuggauuuuagcgagguuuccaaugugcagcgccuuaugagaaaggaacggcgcgacgauaacgaccugaaaagacuccgggaucugaaucaggcggugaacaaucuggucgagcucaagucuacacaacaaaagagcauccugcgcgugggaacgcuuaccuccgacgaucugcucauucuggcugccgaccuugaaaaacuuaagagcaaaguuaucagaacagagcggccccucucugccggcguguauauggggaaccuguccagccagcagcuggaucagcgcagagcucuccugaauaugauuggaaugucuggcgggaaccagggagcccgggcuggccgcgacggcgucgugagaguuugggaugugaagaaugccgagcuucugaacaaucaguucgggaccaugccuucccucacacuggcgugucuuaccaaacagggacaagucgaccugaacgaugccgugcaggcucucacagaccugggccugaucuacaccgccaaguauccgaauacgagcgaccucgaucggcugacccagucucaucccauccuuaacaugauugacacaaagaaauccagccugaauaucuccggguacaacuuuucucucggagcugccgugaaggcgggcgccugcaugcuggaugggggaaacaugcuugaaaccauuaaagucagcccucaaacaauggacggcauccugaaguccauucucaaaguuaagaaagcucugggcauguucaucagcgauacccccggggagcgcaauccuuaugaaaacauucuguacaagaucugucucucuggagacggcuggcccuauaucgccuccagaacgagcauuacagggcgggcuugggagaauaccgugguggaucuggagucugacggaaagccucagaaagccgauagcaacaauuccucuaagagccuucaguccgccggcuuuacagcugggcugaccuacagccagcucaugacccugaaagacgcgaugcugcaacuugauccgaacgccaagacauggauggacaucgaaggaagacccgaggacccugucgaaauugcucucuaccagcccucuuccggcugcuauauccacuucuuucgcgagccuacggaucugaaacaguucaagcaggacgccaaguacagccauggcauugaugugaccgaccuguuugccacacaacccgggcucaccucugcuguuaucgaugcccugccgcggaauauggugaucacaugucagggauccgacgauauuagaaaacuucuggaaagccagggccgcaaggacaucaaacucauugauaucgcgcuguccaagaccgacucucggaaauaugagaacgcugucugggaucaguacaaggaccugugccacaugcauacgggggugguuguggagaagaaaaagagaggaggcaaagaagagauuacaccucacugugcccuuauggauugcaucauguucgacgccgcugucagcgggggccucaauaccuccgugcugcgcgccguccugccccgggacaugguguuuagaaccucuacaccucgcguugugcucugaggacuaguaauaaggaaacuguaugaaugucugugggcaggaagugaagagauccuucuguaaagguuuuuggaauuaugucugcugaauaauaaacuuuuuugaaauaauaaaucugguagaaaaaugagaucuaaaaaaaaaaaaaaaaaaaaaaaaaaaaaaaaaaaaaaaaaaaaaaaaaaaaaaaaaaaaaaaaaaaaaaaaaaaaaaaaaaaaaaaaaaaaaaaaaaaa

SEQ ID NO: 21710 - RNA, 2073 nt, Artificial Sequence
  mRNA product Design b-4 (A100) comprising derived and/or modified sequence from LASV(LP;Clade I)__AAF86702__SP-IgE_NP(2-569) (opt5)
aggagagucccgcagucggcguccagcggcucugcuuguucgugugugugucguugcaggccuuauucaagcuuaccauggacuggaccuggauccuguuccucguggccgcugccacaagaguccacagcagcaacuccaaggagaucaaaucuuuccuguggacccagagccucagacgggaacuguccggcuacugcucuaauauuaagcuccaaguggucaaagacgcccaggcucugcuccacgggcuggauuuuagcgagguuuccaacgugcagcgccuuaugagaaagcagaaacgggacgaugccgaccugaagcgccucagagaucugaaucaagcggugaacaaucuggucgaacucaagucuacacagcagaaaaacgugcugcggguuggaacgcuuagcuccgacgaucugaucacccucgcugccgaccuggagaaacuuaaaagcaaggugauucgcacagaaagaccccugucuuccggcgucuauauggggaaucucagcucucagcaacuggaucagcggcgcgcccugcucuccaugaucggaaugagcggcgggccucagggaaacagaaccggcggcgacggggugguucgggugugggaugucaaaaaugcugagcugcuuaacaaucaguucggaacaaugccgucucugacccucgccugucugacaaagcaaggccagguggaccuuaacgaugcugugcaggcccugaccgaccucgggcugauuuacacggcgaaguaucccaauuccagcgaccuggauaugcucacccaaucccauccuauccugggaauggucgacacaaagaagucuagccuuaacaucuccggcuacaauuuuagccugggggccgcuguuaaagccggagcuugcaugcucgauggcggcaacaugcuggagaccauuaaggugucuccccagacaauggacgggauccuuaaauccauucugaaggugaaacgcagccucggaauguucaucucugauaccccuggcgaaagaaaccccuaugagaauauucuguacaagaucugucugagcggggaaggauggccuuauauugccucccggacgucuaucacaggccgcgcgugggagaacacccucgucgaccuggagagcgauaauaagccgcccaaacuuaacuccgccgggagcaauaagucucugcaggcugccggacucaacgcuggccugacauacucccagcugaugacccuuaaagacugcaugcuccaacuggauccuagcucuaagaccuggaucgacauugaaggcagacccgaggauccuguggaaaucgcccuguuucagcccuccagcggguguuacauucacuucuuucgggagccgacagaccucaaacaguucaagcaggacgccaaguauucccauggaaucgauguuacggaccuguuuucuacccaaccuggccuuacaagcgcugugauugaagcgcugcccagaaauaugguccuuaccugccagggguccgaugacaucaaaaagcugcuggagucucagggacgccgggauaucaaacuuauugacaucagccucuccaaggccgauagcagaaaauucgagaacgcugugugggaccaguacaaggaucugugucacaugcauacaggcguuguggucgaaaagaaaaagcgcgggggcaaagaggaaauuaccccucacugcgcccugcucgacuguaucauguuugaugccgcuacgacaggaucucugaauauuaccacccuucgggccgugcugcccagagacauggucuuccgcacauccacccccaaggugguucucugaggacuaguaauaaggaaacuguaugaaugucugugggcaggaagugaagagauccuucuguaaagguuuuuggaauuaugucugcugaauaauaaacuuuuuugaaauaauaaaucugguagaaaaaugagaucuaaaaaaaaaaaaaaaaaaaaaaaaaaaaaaaaaaaaaaaaaaaaaaaaaaaaaaaaaaaaaaaaaaaaaaaaaaaaaaaaaaaaaaaaaaaaaaaaaaaa

SEQ ID NO: 21711 - RNA, 2073 nt, Artificial Sequence
  mRNA product Design b-4 (A100) comprising derived and/or modified sequence from LASV(803213;Clade II)__AAF86704__SP-IgE_NP(2-569) (opt5)
aggagagucccgcagucggcguccagcggcucugcuuguucgugugugugucguugcaggccuuauucaagcuuaccauggacuggaccuggauccuguuccucguggccgcugccacaagaguccacagcagcgccuccaaggaggugaaaucuuuccuguggacccagagccucagacgggaacuguccggcuacugcucuaacaucaaacuucaagucguuaaggacgcucaggcccugcuccacgggcuggauuuuagcgaggugaauaacgugcagcgccuuaugagaaagcagaaacgggacgauggagaccugaagcgccucagagaucugaaucaagcggucaacaaucugguggaacucaaguccacacagcagaaaucuauucugcggguuggcacgcuuaccagcgacgaucugcucacacuggcugccgaccuugagaagcugaaauccaaggugauccgcaccgaaagaccccucagcucuggggucuauaugggaaaccuguccacacagcaacuggagcagcggcgcgcccuccugaauaugauuggcauggugggaggagcucagggcacccagccuggcagagaugggguugugcgggucugggacgugaaaaacccggaucuucugaauaaccaauucggaacaaugcccagccucacccuggccugucuuacgaagcagggccagguggaccugaaugaugcuguccucgcccugaccgaccuggggcucaucuacacagcgaaguauccuaacucuuccgaccuggaucgccuuagccaaucucaucccauucugaauaugguugacaccaaaaaguccagccucaacaucuccggauacaauuuuucucugggcgccgcugugaaagccggggcuugcaugcuugauggaggcaacaugcuggagacaaucaaggugaccccucagacgauggacggcauucucaaaagcauccugaaggucaaaagaucccuggggauguucgugagcgauacacccggagaacggaacccuuaugagaauauucucuacaagaucugucugucuggcgacggguggccguauauugccucccgcaccagcaucguugggagagcgugggaaaacacaaccguggaucuugagucugacggcaagccccagaaagucgggaccgccggaagcaauaagucccugcagucugcuggcuuuccuacaggccucacguacagccaacugaugacccugaaagauuccaugaugcagcuugaccccagcgccaagacauggauugauaucgaggggcggccugaagaccccguggagaucgcucucuaccagccgaugucuggaugcuauauucacuucuuuagagaaccuaccgaccugaaacaguucaagcaagaugccaaguacucccauggcaucgacguugccgaucuguuucccgcucagccugggcucacaagcgcggugauugaggcccugccccgcaacaugguccuuaccugucagggaucugacgauaucaaaaagcugcucgacucccagggccggagagauauuaaacugaucgacaucagccuguccaagguggauucucgcaaauucgaaaaugcugucugggaccaaugcaaggaucuuugucacaugcauacgggggugguuguggagaagaaaaagcggggcggaaaagaggaaauuacaccccacugcgcccucauggacuguaucauguuugaugccgcugucagcggcgggcugaacauuccugugcugagagccguucucccgcgcgacaugguguuccggaccuccucucccaaggucgugcugugaggacuaguaauaaggaaacuguaugaaugucugugggcaggaagugaagagauccuucuguaaagguuuuuggaauuaugucugcugaauaauaaacuuuuuugaaauaauaaaucugguagaaaaaugagaucuaaaaaaaaaaaaaaaaaaaaaaaaaaaaaaaaaaaaaaaaaaaaaaaaaaaaaaaaaaaaaaaaaaaaaaaaaaaaaaaaaaaaaaaaaaaaaaaaaaaa

SEQ ID NO: 21712 - RNA, 2076 nt, Artificial Sequence
  mRNA product Design b-4 (A100) comprising derived and/or modified sequence from LASV(GA391;Clade III)__CAA36646__SP-IgE_NP(2-570) (opt5)
aggagagucccgcagucggcguccagcggcucugcuuguucgugugugugucguugcaggccuuauucaagcuuaccauggacuggaccuggauccuguuccucguggccgcugccacaagaguccacagcagcgccuccaaggaggugagaucuuuccuguggacccagagccuccggcgcgaacuguccggcuacugcucuaacaucaaacuucaagucguuaaggacgcucaggcccugcuccacgggcuggauuuuagcgagguguccaaugugcagagacuuaugcggaaacagaagcgcgacgauggagaccugaaaagacuccgggaucugaaccaagcggucaauaaccugguggaacucaagucuacacagcagaaaagcguucugcgcgugggcacgcuuuccagcgacgaucugcucauucuggcugccgaccuugagaaacugaagucuaaagucaccagaacagaacggccccucuccagcgggguguauaugggaaaucugucuucccagcaacuggaucagcgcagagcccuccugaacaugaucggcaugaccgggguuagcggaggcggcaagggggcuucugacggaauugugcgggucugggaugugaaaaaugccgagcuucugaacaaucaguucggcacaaugccuucccucacccuggcuugucuuacaaagcaggggcaaguggaccugaacgaugccguccaggcgcucaccgaccugggacugaucuacacggccaaguauccgaauagcuccgaccucgaucgccugucucagagccaucccauucuuaacaugaucgacaccaaaaaguccagccugaauaucucuggcuacaacuuuucccucggggcugccguuaaagcuggagccugcaugcuggauggcggcaauaugcuugagacaauuaaggugagcccucaaaccauggacgggauccugaaaucuauucucaaggugaaaaagagccugggaauguucgucuccgauacacccggcgaaagaaacccuuaugagaacauccuguacaagauuugucucucuggggacggauggcccuauaucgcgagccggaccuccauugugggccgcgccugggaaaauacgguuguggaucuggagcaggacaacaaaccucagaagaucgggaauggaggcagcaacaaaucucuucaguccgcuggcuuugccgcugggcugacauacagccaacucaugacccugaaggauuucaaaugcuuuaaucugaucccgaacgccaagacauggauggacauugagggaagacccgaagauccugucgagaucgcccuuuaccagcccucuuccggcuguuaugugcacuucuuucgggaaccuaccgaccucaagcaguucaaacaggacgcuaaguacagccaugggauugauguuaccgaccuguuugcggcccaacccggacugacauccgcugugaucgaggcccucccgagaaauauggucauuacgugccagggcucugaagauauccgcaaacugcuugagagccaggggcggagagacaucaagcugauugauaucacccucuccaaagccgacucucgcaaguucgagaacgcugugugggaucaguuuaaggaccugugucacaugcauacaggcgucgugguugaaaagaagaaacggggaggcaaggaggaaauuaccccucacugcgcccugauggauuguaucauguucgacgcggcugugagcgggggacuugaugccaaaguccucagagugguucugccccgcgacaugguguuccggacauccaccccuaaggucgugcugugaggacuaguaauaaggaaacuguaugaaugucugugggcaggaagugaagagauccuucuguaaagguuuuuggaauuaugucugcugaauaauaaacuuuuuugaaauaauaaaucugguagaaaaaugagaucuaaaaaaaaaaaaaaaaaaaaaaaaaaaaaaaaaaaaaaaaaaaaaaaaaaaaaaaaaaaaaaaaaaaaaaaaaaaaaaaaaaaaaaaaaaaaaaaaaaaa

SEQ ID NO: 21713 - RNA, 2073 nt, Artificial Sequence
  mRNA product Design b-4 (A100) comprising derived and/or modified sequence from LASV(AV;Clade V)__CCA30315__SP-IgE_NP(2-569) (opt5)
aggagagucccgcagucggcguccagcggcucugcuuguucgugugugugucguugcaggccuuauucaagcuuaccauggacuggaccuggauccuguuccucguggccgcugccacaagaguccacagcagcgccuccaaggaggugaaaucuuuccuguggacccagagccucagacgggaacuguccggcuacugcucuaacaucaaacuucaagucguuaaggacgcucaggcccugcuccacgggcuggauuuuagcgagguguccaaugugcagcgccuuaugagaaagcagcggcgcgacgauucugaccugaaaagacuccgggaucugaaccaagcggucaauaaccugguggaacucaagagcacacagcagaaguccguucugcgcgugggaacgcuuagcucugacgaucugcucacccuggcugccgaccuugagaaacugaaguccaaagucacaagaaccgaacggccccucagcucuggcguguauauggggaaucuguccagccagcaacuggaucagcgcagagcccuccugaaccuuauuggaaugacaaauggcucucaggggucccaggcuggacgggacggcguugugcgcgucugggaugugaagaacgccgagcugcucaauaaccaauucggcaccaugccuagccugacacuugcuugucugaccaaacagggacagguggaccucaaugaugucguucaagcccugacggaccuggggcucaucuacaccgcgaaguauccgaacacauccgaccuggauagacuuacccagucucaucccauucugaauaugaucgacacaaagaaaagcucccucaacauuagcggcuacaauuuuucucugggggccgcugugaaggccggagcuugcaugcuugauggcgggaacaugcuggagaccaucaaaguguccccucagagcauggacggaauccucaagucuauucugaaagucaagcgggcccugggcauguucgugagcgauacgcccggcgaacgcaacccuuaugagaauauccucuacaaaauuugucuguccggggacggauggcccuauaucgcgucuagaacaagcauuguuggccgggccugggaaaacaccguggucgaucuugagacagacgggaagccucagaagaucggauccggcaauagcaacaaaucucugcaauccgcuggguuuagcgccggacucaccuacucucagcugaugacccugaaggaugcuaugcuucagcucgacccgaaugccaaaacauggauggauauugagggcagacccgaagacccuguggagguugcccuguaccagcccaucuccggcugcuauauccacuucuuucgcgaaccuacggaccugaagcaauucaaacaggaugcuaaguacagccaugggauugacaucgcggaucucuuugccgcucagcccggacugaccuccgccgugauugaggcccuuccgcggaacauggucaucacaugucagggcucugaagacauuaagaaacugcucgagagccaagggagaaaggauaucaaacugaucgacauugcucuguccaagaucgauucucgcaaauucgagaaugccgugugggaccaguauaaggaucuuugccacaugcauaccggagucgugguugaaaagaaaaagcggggcgggaaagaggaaauuacaccucacugugcgcucauggacugcaucauguuugaugcugccgugagcggcggacugaacacccugguccucagagccgugcugccccgcgacaugguuuuccggacguccacaccuagagugguccuuugaggacuaguaauaaggaaacuguaugaaugucugugggcaggaagugaagagauccuucuguaaagguuuuuggaauuaugucugcugaauaauaaacuuuuuugaaauaauaaaucugguagaaaaaugagaucuaaaaaaaaaaaaaaaaaaaaaaaaaaaaaaaaaaaaaaaaaaaaaaaaaaaaaaaaaaaaaaaaaaaaaaaaaaaaaaaaaaaaaaaaaaaaaaaaaaaa

SEQ ID NO: 21714 - RNA, 2073 nt, Artificial Sequence
  mRNA product Design b-4 (A100) comprising derived and/or modified sequence from LASV(Togo/2016/7082;Clade VI)__AMR44578__SP-IgE_NP(2-569) (opt5)
aggagagucccgcagucggcguccagcggcucugcuuguucgugugugugucguugcaggccuuauucaagcuuaccauggacuggaccuggauccuguuccucguggccgcugccacaagaguccacagcagcaacuccaaggaggugaaaucuuuccuguggacccagagccucagacgggaacuguccggcuacugcucuaauaucaaacuucaagucguuaaagacgcccaggcucugcuccacgggcuggauuuuagcgagguguccaacgugcagcgccuuaugagaaagcagaaacgggacgauggagaccugaagcgccucagagaucugaaucaagccgucaacaaucugguggaacucaagucuguucagcagaaaagcauucugcgggugggcacacuuacguccgacgaucugcucacccuggcggcugaccuugagaagcugaaaagcaaggucacacgcaccgaaagaccccucucuuccgggguguauaugggaaaccugagcucucagcaacuggaucagcggcgcgcccuccuguccaugaucggcaugagcgggggaaaucagaacucucagccuaaaggcgacggcguugugagagucugggaugugaagaaugccgaccuucugaacaaucaauucgggacaaugccgucccucacccuggcuugucuuacaaagcagggacagguggaucugaacgacgccguccaagcucucaccgaccugggccugauuuacacggccaaauaucccaauagcuccgaucucgaccggcugucucagagccauccuauccuuaacaugauugauaccaagaaauccagccugaauaucucuggguacaacuuuucccucggagcggccaucaagacaggcgcuugcaugcuggacgggggaaacaugcuugagaccauuaaaguuacaccccagaccauggauggcauccucaagagcauucugaaagugaagcgcucucugggcauguucaucagcgacacgccuggggagagaaaucccuaugaaaacauucuguacaagaucugucucuccggagauggcuggccuuauauugccucucggacagcuaucaucgggcgcgccugggagaauaccguggucgaccuggaaagcgauuccaaaccgcagaagauuggaagcaacggcucuaauaaaucccuucaaagcgcgggguuugcccccggacugacauacucucagcucaugacccugaaggacuccaugcugcagcuugauccuaacgcuaaaaccuggaucgacauugagggcagacccgaggacccuguggaaguugcccucuuccagcccaucagcggcugcuacauucacuuuuuccgggagccgacagaucugaagcaauuuaagcaggacgcuaaauauucccaugggaucgaugugacggaccuguucgccgcccagccuggacucaccucugcugucaucgaagcgcugcccagaaauauggugcuuacaugucagggcagcgaugacauuaagaaacugcucgauucccaagggcgccgggacaucaagcugauugauguuucucugaacaaaaucgacagcagaaaguuugagaaugccgugugggaucaguacaaggaccuuugccacaugcauaccggagucguggucgaaaagaagaaaaagggcgggaaagaggagauuacaccucacugugcucuccuggauugcaucauguucgacgccgccguguccggcggacugaacgcuaccguucuccgcgccgugcugccccgggacauggucuuuagaacgagcucucccaaggugguucuuugaggacuaguaauaaggaaacuguaugaaugucugugggcaggaagugaagagauccuucuguaaagguuuuuggaauuaugucugcugaauaauaaacuuuuuugaaauaauaaaucugguagaaaaaugagaucuaaaaaaaaaaaaaaaaaaaaaaaaaaaaaaaaaaaaaaaaaaaaaaaaaaaaaaaaaaaaaaaaaaaaaaaaaaaaaaaaaaaaaaaaaaaaaaaaaaaa

SEQ ID NO: 21715 - RNA, 2073 nt, Artificial Sequence
  mRNA product Design b-4 (A100) comprising derived and/or modified sequence from LASV(KAK-428;Clade n.d. (VII))__ANH09741__SP-IgE_NP(2-569) (opt5)
aggagagucccgcagucggcguccagcggcucugcuuguucgugugugugucguugcaggccuuauucaagcuuaccauggacuggaccuggauccuguuccucguggccgcugccacaagaguccacagcagcaacuccaaggaggugaaaucuuuccuguggacccagagccucagacgggaacuguccggcuacugcacaaauaucaaacuucaagucguuaaggacgcccaggcucugcuccacgggcuggauuuuucugaggugagcaacgugcagcgccuuaugagaaagcagaaacgggacgauaaugaccugaagcgccucagagaucugaaccaagccgucaauaaccugguggaacucaaguccguucagcagaaaucugugcugaaggucggaacgcuuaauagcgacgaucugcucacccuggcggcugaccuugagaaacugaaguccaaagugguucggacagaacgcccccucagcucuggcguguauauggggaaccuguccagccagcaacuggaucagagacgggcccuccugaauaugauuggaauggccggcgggucucagggaaaccagccuucccgcgacggcgucgugagagugugggaugucaagaaugcugaccuucugaacaaucaauucggcaccaugccgagccucacacuggccugucuuaccaagcaggggcagguugaucugaacgacguggugcucgcucugacagaccugggacucaucuacaccgccaaauaucccaauucuuccgaucuggaccggcuuagccaaaaccauccuguccugaacaugauugaugugaauaaguccucucucaacaucagcggcuacaauuuuucccugggggcggccguuaaagcuggagccugcaugcuugacggcgggaacaugcuggagacgauuaagaucagcccccagaccguggauggaauccucaaaucuauucugaaggucaaacgcgcucugggcauguucguguccgacacaccuggcgagagaaaucccuaugaaaacauccucuacaagguuugucugagcgggaauggauggccuuauauugccucucggaccagcaucgugggccgcgcgugggagaacacagucguggaucuugaauccaauaagaaccagccgaaagucgggaauaacggaucuaauaagaugcugcagagcuccggcuuugccaccgggcucacguacagccaacugaugacacugagagacucuaugcuucagcucgaucccaccgcuaaaacauggauugacaucgagggacggccugaggaucccguggaacuggcccuguuccagccuuccagcggcugcuacauucacuuuuucagagagcccaccgaccucaagcaguuuaaacaagacgcuaaguauucucauggcaucgauguuaacgaccuguucuccgcccagccggggcuuaccagcgccgugcuggaagcucucccucgcaauaugguccugacaugucagggauccgaugacauccggaagcugcuugauucucaggacagaaaagauauuaagcucaucgacauuagccuguccaaagcggaugcccgcaaguuugagaacgacgugugggaucaauucaaagaccugugccacaugcauacgggcaucguuguggaaaagaagaaaaagggagggaaacaggagaugacaccccacugugcucuccuggauugcauuauguuugacgccgccgucucuggcgggcuuaacgugccuacccugcgggcugugcuccccaccgacaugguuuucagaacaaucaccacgaaggucgugcugugaggacuaguaauaaggaaacuguaugaaugucugugggcaggaagugaagagauccuucuguaaagguuuuuggaauuaugucugcugaauaauaaacuuuuuugaaauaauaaaucugguagaaaaaugagaucuaaaaaaaaaaaaaaaaaaaaaaaaaaaaaaaaaaaaaaaaaaaaaaaaaaaaaaaaaaaaaaaaaaaaaaaaaaaaaaaaaaaaaaaaaaaaaaaaaaaa

SEQ ID NO: 21716 - RNA, 2073 nt, Artificial Sequence; identical to SEQ ID NO: 21710
  mRNA product Design b-4 (A100) comprising derived and/or modified sequence from LASV(Pinneo-NIG-1969;Clade I)__AIT17837__SP-IgE_NP(2-569) (opt5)

SEQ ID NO: 21717 - RNA, 2073 nt, Artificial Sequence
  mRNA product Design b-4 (A100) comprising derived and/or modified sequence from LASV(ISTH0009-NIG-2011;Clade II)__AIT17405__SP-IgE_NP(2-569) (opt5)
aggagagucccgcagucggcguccagcggcucugcuuguucgugugugugucguugcaggccuuauucaagcuuaccauggacuggaccuggauccuguuccucguggccgcugccacaagaguccacagcagcguguccaaggaggucaaaucuuuccuguggacccagagccucagacgggaacuguccggcuacugcucuaacaucaaacuucaaguugugaaggacgcccaggcucugcuccacgggcuggauuuuagcgagguguccaauguccagcgccuuaugagaaagcagaaacgggacgauucugaccugaagcgccucagagaucugaaccaagccgugaauaaccugguugaacucaagagcacacagcagaaauccauucugcgggugggaacgcuuaccagcgacgaucugcucacacuggcggcugaccuugagaagcugaaaucuaaggucauccgcaccgaaagaccccucuccagcggcguguauauggggaaucugucuacacagcaacuggagcagcggcgcgcccuccugaacaugauuggaaugguuggcggggcccagggaacccagccuggcagagauggcgugguccgggugugggacgugaaaaauccggaucuucugaacaaucaauucgggacaaugcccucccucacccuggcuugucuuacgaagcagggacaggucgaccugaacgaugccguucucgcucugaccgaccugggccucaucuacacagccaaguauccuaauagcucugaccuggaucgccuuucccaaagccaucccauucugaacaugguggacaucaaaaaguccucucucaauaucagcggguacaacuuuucccugggagcggccgugaaagcuggcgccugcaugcuugaugggggaaauaugcuggagaccauuaaggucacaccucagaccauggacggcauccucaaaagcauucugaaggugaaaagaucucugggcauguucguuuccgauacgcccggggaacggaacccuuaugagaacauccucuacaagauuugucugagcggagacggcuggccguauaucgcuucucgcacaagcauuguggggagagccugggaaaauaccacagucgaucuugaguccgacggaaagccccagaaagugggcucugcggggagcaacaagucccugcagagcgccggauuuccuaccggccucaccuacucucaacugaugacacugaaagauuccaugaugcagcuugaccccagcgcuaagacguggaucgauaucgagggccggccugaagaccccguugagauugcccucuaccagccgaugucugggugcuauauccacuucuuuagagaaccuaccgaccugaaacaguucaagcaagaugcuaaguacucccauggaauugacguggccgaucuguuucccgcccagccuggccucacaagcgcugucaucgaggcgcugccccgcaauauggugcuuaccugucagggguccgacgauauuaaacggcugcucgacucucagggaagacgcgauaucaagcugaucgacauugcccugagcaaagcugauucccggagauucgaaaacgccgucugggaccaaugcaaggaucuuugucacaugcauacaggcgugguuguggagaaaaagaagcgcgggggcaaagaggaaaucacgccccacugcgcccucauggacuguauuauguaugaugcugccgucucuggaggccugaauaucccugugcugcgggcgguucucccgagagacaugguguuucgcaccagcucccccaaggucgugcugugaggacuaguaauaaggaaacuguaugaaugucugugggcaggaagugaagagauccuucuguaaagguuuuuggaauuaugucugcugaauaauaaacuuuuuugaaauaauaaaucugguagaaaaaugagaucuaaaaaaaaaaaaaaaaaaaaaaaaaaaaaaaaaaaaaaaaaaaaaaaaaaaaaaaaaaaaaaaaaaaaaaaaaaaaaaaaaaaaaaaaaaaaaaaaaaaa

SEQ ID NO: 21718 - RNA, 2073 nt, Artificial Sequence
  mRNA product Design b-4 (A100) comprising derived and/or modified sequence from LASV(ISTH2010-NIG-2012;Clade II)__AIT17483__SP-IgE_NP(2-569) (opt5)
aggagagucccgcagucggcguccagcggcucugcuuguucgugugugugucguugcaggccuuauucaagcuuaccauggacuggaccuggauccuguuccucguggccgcugccacaagaguccacagcagcgccuccaaggaggugaaaucuuuccuguggacccagagccucagacgggaacuguccggcuacugcucuaacaucaaacuucaagucguuaaggacgcucaggcccugcuccacgggcuggauuuuagcgagguguccaaugugcagcgccuuaugagaaagcagaaacgggacgauucugaccugaagcgccucagagaucugaaccaagcggucaauaaccugguggaacucaagagcacacagcagaaauccauucugcggguuggaacgcuuaccagcgacgaucugcucacacuggcugccgaccuugagaagcugaaaucuaaggugauccgcaccgaaagaccccucuccagcggcgucuauauggggaaucugucuacacagcaacuggagcagcggcgcgcccuccugaaccuuauuggaauggugggcggggcucagggaacccagccuggcagagauggcguugugcgggucugggacgugaaaaauccggaucugcucaacaaucaauucgggacaaugcccucccugacccuugccugucugacgaagcagggacagguggaccucaacgaugcuguccuggcccugaccgaccucggccugaucuacacagcgaaguauccuaauagcucugaccuugaucgccugucccaaagccaucccauucucaacaugguugacaccaaaaaguccucucugaauaucagcggguuuaacuucucccuuggagccgcugugaaagccggcgcuugcaugcuggaugggggaaauaugcucgagacaaucaaggugaccccucagacgauggacggcauucugaaaagcauccugaaggucaaaaagucucucggcauguuuguguccgauacacccggggaaagaaacccuuacgagaacauucuguauaagaucugucuuagcggagacggcuggccguacauugccucucggaccagcaucguugggcgcgcgugggaaaauacaaccguggaucuggaguccgacggaaaaccccacaaggucggcaccgccgggucuaacaaaagccuccaguccgcuggauucccuacaggccugacguauagccagcugaugacccuuaaggauucuaugaugcaacucgaccccuccgccaaaacauggauugauaucgagggcagaccugaagaccccguggagaucgcucuguaccagccgaugagcgggugcuacauucacuuuuuccgggaaccuaccgaccugaagcaguuuaagcaggaugccaaauauucucauggaaucgacguugccgaucucuuccccgcucaaccuggccugacauccgcggugauugaggcccuucccagaaauaugguccugaccugucaggggagcgacgauaucaagcgccuccuggacucccagggacggagagauauuaaacugaucgacaucgcucuuucuaaggccgauagccgccgguuugaaaacgccgugugggaccagugcaaagaucucugucauaugcacacgggcgucgugguugagaagaagaaaagagggggcaaggaggaaauuacaccccacugcgcucugauggacuguaucauguacgaugccgcgguguccggaggccugaauauuccuguccuccgcgcugugcugccgcgggacaugguuuucagaaccucuagccccaaagugguccuuugaggacuaguaauaaggaaacuguaugaaugucugugggcaggaagugaagagauccuucuguaaagguuuuuggaauuaugucugcugaauaauaaacuuuuuugaaauaauaaaucugguagaaaaaugagaucuaaaaaaaaaaaaaaaaaaaaaaaaaaaaaaaaaaaaaaaaaaaaaaaaaaaaaaaaaaaaaaaaaaaaaaaaaaaaaaaaaaaaaaaaaaaaaaaaaaaa

SEQ ID NO: 21719 - RNA, 2073 nt, Artificial Sequence
  mRNA product Design b-4 (A100) comprising derived and/or modified sequence from LASV(Lassa virus/H.sapiens-wt/NGA/2015/ISTH_0543;Clade II)__AVO03640__SP-IgE_NP(2-569) (opt5)
aggagagucccgcagucggcguccagcggcucugcuuguucgugugugugucguugcaggccuuauucaagcuuaccauggacuggaccuggauccuguuccucguggccgcugccacaagaguccacagcagcgccuccaaggaggugaaaucuuuccuguggacccagagccucagacgggaacuguccggcuacugcucuaacaucaaacuucaagucguuaaggacgcucaggcccugcuccacgggcuggauuuuagcgagguguccaaugugcagcgccuuaugagaaagcagaaacgggacgauucugaccugaagcgccucagagaucugaaccaagcggucaauaaccugguggaacucaagagcacacagcagaaauccauucugcggguuggaacgcuuaccagcgacgaucugcucacacuggcugccgaccuugagaagcugaaaucuaaggugauccgcaccgaaagaccccucuccagcggcgucuauauggggaaucugucuacacagcaacuggagcagcggcgcgcccuccugaacaugauuggaauggugggcggggcucagggaacccagccuggcagagauggcguugugcgggucugggacgugaaaaauccggaucuucugaacaaucaauucgggacaaugcccucccucacccuggccugucuuacgaagcagggacagguggaccugaacgaugcuguccucgcccugaccgaccugggccucaucuacacagcgaaguauccuaauagcucugaccuggaucgccuuucccaaagccaucccauucugaacaugguugacaccaaaaaguccucucucaauaucagcggguacaacuuuucccugggagccgcugugaaagccggcgcuugcaugcuugaugggggaaauaugcuggagacaaucaaggugaccccucagacgauggacggcauucucaaaagcauccugaaggucaaaaagucucugggcauguucguguccgauacacccggggaaagaaacccuuaugagaacauucucuacaagaucugucugagcggagacggcuggccguauauugccucucggaccagcaucguugggcgcgcgugggaaaauacaaccguggaucuugaguccgacggaaaaccccagaaggucggcucugccgggagcaacaaaucccugcagagcgcuggauuuccuaccggccucacauacucucaacugaugacgcugaaggauuccaugaugcagcuugaccccagcgccaaaaccuggauugauaucgagggcagaccugaagaccccguggagaucgcucucuaccagccgaugucugggugcuauauucacuucuuucgggaaccuacagaccugaagcaguucaagcaagaugccaaauacucccauggaaucgacguugccgaucuguuucccgcucagccuggccucaccagcgcggugauugaggcccugcccagaaauaugguccuuacaugucagggguccgacgauaucaagcgccugcucgacucucagggacggaaagauauuaagcugaucgacaucgcucugagcaaagccgauuccagacgcuucgaaaacgccgugugggaccaaugcaaggaucuuugucacaugcauaccggcgucgugguugagaagaaaaagagagggggcaaagaggaaauuacgccccacugcgcucucauggacuguaucauguaugaugccgcggugucuggaggccugaauauuccuguccugcgggcugugcucccgcgcgacaugguuuuucggacaagcucccccaaggugguccugugaggacuaguaauaaggaaacuguaugaaugucugugggcaggaagugaagagauccuucuguaaagguuuuuggaauuaugucugcugaauaauaaacuuuuuugaaauaauaaaucugguagaaaaaugagaucuaaaaaaaaaaaaaaaaaaaaaaaaaaaaaaaaaaaaaaaaaaaaaaaaaaaaaaaaaaaaaaaaaaaaaaaaaaaaaaaaaaaaaaaaaaaaaaaaaaaa

SEQ ID NO: 21720 - RNA, 2073 nt, Artificial Sequence
  mRNA product Design b-4 (A100) comprising derived and/or modified sequence from LASV(Lassa virus/H.sapiens-wt/NGA/2016/ISTH_0009;Clade II)__AVO03572__SP-IgE_NP(2-569) (opt5)
aggagagucccgcagucggcguccagcggcucugcuuguucgugugugugucguugcaggccuuauucaagcuuaccauggacuggaccuggauccuguuccucguggccgcugccacaagaguccacagcagcgccuccaaggaggugaaaucuuuccuguggacccagagccucagacgggaacuguccggcuacugcucuaacaucaaacuucaagucguuaaggacgcucaggcccugcuccacgggcuggauuuuagcgagguguccaaugugcagcgccuuaugagaaagcagaaacgggacgauucugaccugaagcgccucagagaucugaaccaagcggucaauaaccugguggaacucaagagcacacagcagaaauccauucugcggguuggaacgcuuaccagcgacgaucugcucacacuggcugccgaccuugagaagcugaaaucuaaggugauccgcaccgaaagaccccucuccagcggcgucuauauggggaaucugucuacacagcaacuggagcagcggcgcgcccuccugaacaugauuggaauggugggcggggcucagggaacccagccuggcagagauggcguugugcgggucugggacgugaaaaauccggaucuucugaacaaucaauucgggacaaugcccucccucacccuggccugucuuacgaagcagggacagguggaccugaacgaugcuguccucgcccugaccgaccugggccucaucuacacagcgaaguauccuaauagcucugaccuggaucgccuuucccaaagccaucccauucugaacaugguugacaccaaaaaguccucucucaauaucagcggguacaacuuuucccugggagccgcugugaaagccggcgcuugcaugcuugaugggggaaauaugcuggagacaaucaaggugaccccucagacgauggacggcauucucaaaagcauccugaaggucaaaaagucucugggcauguucguguccgauacacccggggaaagaaacccuuaugagaacauucucuacaagaucugucugagcggagacggcuggccguauauugccucucggaccagcaucguugggcgcgcgugggaaaauacaaccguggaucuugaguccgacggaaaaccccagaaggucggcucugccgggagcaacaaaucccugcagagcgcuggauuuccuaccggccucacauacucucaacugaugacgcugaaggauuccaugaugcagcuugaccccagcgccaaaaccuggauugauaucgagggcagaccugaagaccccguggagaucgcucucuaccagccgaugucugggugcuauauucacuucuuucgggaaccuacagaccugaagcaguucaagcaagaugccaaauacucccauggaaucgacguugccgaucuguuucccgcucagccuggccucaccagcgcggugauugaggcccugcccagaaauaugguccuuacaugucagggguccgacgauaucaagcgccugcucgacucucagggacggagagauauuaaacugaucgacaucgcucugagcaaggccgauucccgccgguucgaaaacgccgugugggaccaaugcaaagaucuuugucacaugcauaccggcgucgugguugagaagaagaaaagagggggcaaggaggaaauuacgccccacugcgcucucauggacuguaucauguaugaugccgcggugucuggaggccugaauauuccuguccugcgcgcugugcucccgcgggacaugguuuuuagaacaagcucccccaaagugguccugugaggacuaguaauaaggaaacuguaugaaugucugugggcaggaagugaagagauccuucuguaaagguuuuuggaauuaugucugcugaauaauaaacuuuuuugaaauaauaaaucugguagaaaaaugagaucuaaaaaaaaaaaaaaaaaaaaaaaaaaaaaaaaaaaaaaaaaaaaaaaaaaaaaaaaaaaaaaaaaaaaaaaaaaaaaaaaaaaaaaaaaaaaaaaaaaaa

SEQ ID NO: 21721 - RNA, 2073 nt, Artificial Sequence
  mRNA product Design b-4 (A100) comprising derived and/or modified sequence from LASV(Lassa virus/H.sapiens-wt/NGA/2016/ISTH_0017;Clade II)__AVO03568__SP-IgE_NP(2-569) (opt5)
aggagagucccgcagucggcguccagcggcucugcuuguucgugugugugucguugcaggccuuauucaagcuuaccauggacuggaccuggauccuguuccucguggccgcugccacaagaguccacagcagcgccuccaaggaggugaaaucuuuccuguggacccagagccucagacgggaacuguccggcuacugcucuagcaucaaacuucaagucguuaaggacgcucaggcccugcuccacgggcuggauuuuuccgaggugucuaacgugcagcgccuuaugagaaagcagaaacgggacgauagcgaccugaagcgccucagagaucugaaucaagcggucaacaaucugguggaacucaaguccacacagcagaaaagcauucugcggguuggaacgcuuaccucugacgaucugcucacacuggcugccgaccuugagaagcugaaauccaaggugauccgcaccgaaagaccccucagcucuggcgucuauauggggaaccuguccacacagcaacuggagcagcggcgcgcccuccugaauaugauuggaauggcuggcggggcccagggaacccagccuggcagagauggcgugguucgggugugggacgucaaaaacccggaucuucugaauaaccaauucgggacaaugcccagccucacccuggcuugucuuacgaagcagggacagguggaccugaaugaugccgugcucgcgcugaccgaccugggccucaucuacacagccaaguauccuaacucuuccgaccuggaucgccuuagccaaucccaucccauucugaauauggucgacaccaaaaagucuagccucaacaucuccggguacaauuuuagccugggagcugccguuaaagcuggcgccugcaugcuugaugggggaaacaugcuggagacaaucaaggugaccccucagacgauggacggcauucucaaaucuauccugaaggugaaaagaucccugggcauguucgucagcgaugcgcccggggaacggaauccuuaugagaacauucucuacaagaucugucugucuggagacggcuggccguauauugccagccgcacauccaucguggggagagcuugggaaaacaccacaguugaucuugagucugacggaaagccccagaaagugggcgccaccgggagcaauaagucccugcagagcgcuggauuuccuaccggccucacauacucucaacugaugacgcugaaagauuccaugaugcagcuugaccccagcgccaagaccuggauugauaucgagggccggccugaagaccccgucgagguggcccucuaccagccgguuucugggugcuauauccacuucuuuagagaaccuacagaccugaaacaguucaagcaagaugcuaaguacucccauggaauugacguggcggaucuguuucccgcccagccuggccucaccagcgcugucaucgaggcccugccccgcaacauggugcuuacaugucagggguccgacgauauuaaaaagcugcucgacucucagggacggaaagauaucaagcugauugacaucgcccugagcaaagcugauuccagacgcuucgaaaaugccgucugggaccaaugcaaggaucuuugucacaugcauaccggcgugguuguggagaagaaaaagagagggggcaaagaggaaaucacgccccacugcgcgcucauggacuguauuauguaugaugcugccgucucuggaggccugaacaucccugugcugcgggccguucucccgcgcgacaugguguuucggacaagcucccccaaggucgugcugugaggacuaguaauaaggaaacuguaugaaugucugugggcaggaagugaagagauccuucuguaaagguuuuuggaauuaugucugcugaauaauaaacuuuuuugaaauaauaaaucugguagaaaaaugagaucuaaaaaaaaaaaaaaaaaaaaaaaaaaaaaaaaaaaaaaaaaaaaaaaaaaaaaaaaaaaaaaaaaaaaaaaaaaaaaaaaaaaaaaaaaaaaaaaaaaaa

SEQ ID NO: 21722 - RNA, 2073 nt, Artificial Sequence
  mRNA product Design b-4 (A100) comprising derived and/or modified sequence from LASV(Lassa virus/H.sapiens-wt/NGA/2018/ISTH_0959;Clade II)__AVV65100__SP-IgE_NP(2-569) (opt5)
aggagagucccgcagucggcguccagcggcucugcuuguucgugugugugucguugcaggccuuauucaagcuuaccauggacuggaccuggauccuguuccucguggccgcugccacaagaguccacagcagcgccuccaaggaggugaaaucuuuccuguggacccagagccucagacgggaacuguccggcuacugcucuaacaucaaacuucaagucguuaaggacgcucaggcccugcuccacgggcuggauuuuagcgagguguccaaugugcagcgccuuaugagaaagcagaaacgggacgauucugaccugaagcgccucagagaucugaaccaagcggucaauaaccugguggaacucaagagcacccagcagaaauccauucugcggguuggaacgcuuaccagcgacgaucugcucacacuggcugccgaccuugagaagcugaaaucuaaggugauccgcaccgaaagaccccucuccagcggcgucuauauggggaaucugucuacacagcaacuggagcagcggcgcgcccuccugaaccuuauuggaauggugggcggggcucagggaacccagccuggcagagauggcguugugcgggucugggacgugaaaaauccggaucugcucaacaaucaauucgggacaaugcccucccugacccuugccugucugacgaagcagggacagguggaccucaacgaugucguucuggcucugaccgaccucggccugaucuacacagccaaguauccuaauagcucugaccuugaucgccugucccaaagccaucccauucucaacaugguggacaccaaaaaguccucucugaauaucagcggguuuaacuucucccuuggagcggccgugaaagcuggcgccugcaugcuggaugggggaaauaugcucgagacaaucaaggucaccccucagacgauggacggcauucugaaaagcauccugaaggugaaaaagucucucggcauguuuguuuccgauacacccggggaaagaaacccuuacgagaacauucuguauaagaucugucuuagcggagacggcuggccguacauugcuucucggaccagcaucguggggcgcgccugggaaaauacaaccgucgaucuggaguccgacggaaaaccccacaaggugggcaccgcggggucuaacaaaagccuccaguccgccggauucccuacaggccugacguauagccagcugaugacccuuaaggauucuaugaugcaacucgaccccuccgcuaaaacauggauugauaucgagggcagaccugaagaccccguugagaucgcccuguaccagccgaugagcgggugcuacauucacuuuuuccgggaaccuaccgaccugaagcaguuuaagcaggaugcuaaauauucucauggaaucgacguggccgaucucuuccccgcccaaccuggccugacauccgcugucauugaggcgcuucccagaaauauggugcugaccugucaggggagcgacgauaucaagcgccuccuggacucccagggacggaaagauauuaagcugaucgacaucgcccuuucuaaaacggauagcagacgcuuugaaaacgcugucugggaccagugcaaggaucucugucauaugcacacaggcgugguuguggagaagaaaaagagagggggcaaagaggaaauuacaccccacugcgcccugauggacuguaucauguacgaugccgcugucuccggaggccugaauauuccugugcuccgggccguucugccgcgcgacaugguguuccggaccucuagccccaaggucgugcuuugaggacuaguaauaaggaaacuguaugaaugucugugggcaggaagugaagagauccuucuguaaagguuuuuggaauuaugucugcugaauaauaaacuuuuuugaaauaauaaaucugguagaaaaaugagaucuaaaaaaaaaaaaaaaaaaaaaaaaaaaaaaaaaaaaaaaaaaaaaaaaaaaaaaaaaaaaaaaaaaaaaaaaaaaaaaaaaaaaaaaaaaaaaaaaaaaa

SEQ ID NO: 21723 - RNA, 2073 nt, Artificial Sequence
  mRNA product Design b-4 (A100) comprising derived and/or modified sequence from LASV(LASV003-NIG-2008;Clade II)__AIT17581__SP-IgE_NP(2-569) (opt5)
aggagagucccgcagucggcguccagcggcucugcuuguucgugugugugucguugcaggccuuauucaagcuuaccauggacuggaccuggauccuguuccucguggccgcugccacaagaguccacagcagcgccuccaaggaggugaaaucuuuccuguggacccagagccucagacgggaacuguccggcuacugcucuagcaucaaacuucaagucguuaaggacgcucaggcccugcuccacgggcuggauuuuuccgaggugucuaacgugcagcgccuuaugagaaagcagaaacgggacgauagcgaccugaagcgccucagagaucugaaucaagcggucaacaaucugguggaacucaaguccacccagcagaaaagcguucugcgggugggaacgcuuaccucugacgaucugcucacacuggcugccgaccuugagaagcugaaauccaaggucauucgcaccgaaagaccccucagcucuggcguguauauggggaaccuguccgcccagcaacuggagcagcggcgcacacuccugaauaugaucggaaugguuggcggggcucagggaacccagccuggcagagauggcgugguccgggugugggacgugaaaaacccggaucuucugaauaaccaauucgggacaaugcccagccucacccuggccugucuuacgaagcagggacaggucgaccugaaugauguugugcucgcucugaccgaccugggccucauuuacacagccaaguauccuaacucuuccgaccuggaucgccuuagccaaucccaucccauccugucuaugguggacaccaaaaagagcucccucaauauuagcggguacaacuuuucucugggagcggccgucaaagcuggcgccugcaugcuugaugggggaaauaugcuggagacaaucaaggugaccccucagacgauggacggcauccucaaauccauucugaagguuaaaaagagccugggcauguucgugucugauacacccggggaaagaaacccuuaugagaauauccucuacaagauuugucugagcggagacggcuggccguauaucgcuucccggaccucuauugucgggcgcgccugggaaaacacaaccguggaucuugagagcgacggaaaaccccagaagguuggcaccgcgggguccaacaaaagccugcagucugccggauuuccuacaggccucacguacucccaacugaugacccugaaggauagcaugaugcagcuugaccccucugcuaaaacauggaucgauauugagggcagaccugaagaccccguggagaucgcccucuaccagccgauguccgggugcuauauccacuucuuucgggaaccuaccgaccugaagcaguucaagcaagaugcuaaauacagccauggaauugacgucacagaucuguuucccgcccagccuggccucaccuccgccgugaucgaggcucugcccagaaauaugguccuuacgugucaggggucugacgauauuaagcgccugcucgacagccagggacggagagauaucaaacugauugacaucgcgcuguccaaggccgauucucgccgguucgaaaacgcugugugggaccaaugcaaagaucuuugucacaugcauacaggcguuguggucgagaagaagaaaagagggggcaaggaggaaaucacaccccacugcgcccucauggacuguauuauguaugaugccgcugugagcggaggccugaauaucccuguucugcgcgccgugcucccgcgggacauggucuuuagaaccuccagccccaaaguggugcugugaggacuaguaauaaggaaacuguaugaaugucugugggcaggaagugaagagauccuucuguaaagguuuuuggaauuaugucugcugaauaauaaacuuuuuugaaauaauaaaucugguagaaaaaugagaucuaaaaaaaaaaaaaaaaaaaaaaaaaaaaaaaaaaaaaaaaaaaaaaaaaaaaaaaaaaaaaaaaaaaaaaaaaaaaaaaaaaaaaaaaaaaaaaaaaaaa

SEQ ID NO: 21724 - RNA, 2073 nt, Artificial Sequence
  mRNA product Design b-4 (A100) comprising derived and/or modified sequence from LASV(LASV035-NIG-2009;Clade II)__AIT17589__SP-IgE_NP(2-569) (opt5)
aggagagucccgcagucggcguccagcggcucugcuuguucgugugugugucguugcaggccuuauucaagcuuaccauggacuggaccuggauccuguuccucguggccgcugccacaagaguccacagcagcgccuccaaggaggugaaaucuuuccuguggacccagagccucagacgggaacuguccggcuacugcucuagcaucaaacuucaagucguuaaagacgcucaggcccugcuccacgggcuggauuuuuccgaggugucuaacgugcagcgccuuaugagaaagcagaaacgggacgauagcgaccugaagcgccucagagaucugaaucaagcggucaacaaucugguggaacucaaguccacacagcagaaaagcauucugcggguuggaacgcuuaccucugacgaucugcucacacuggcugccgaccuugagaagcugaaauccaaggugauccgcaccgaaagaccccucagcucuggcgucuauauggggaaccuguccgcccagcaacuggagcagcggcgcgcucuccugaauaugauuggaauggugggcggggcccagggaacacagccuggcagagauggcguugugcgggucugggacgugaaaaacccggaucuucugaauaaccaauucgggaccaugcccagccucacacuggcuugucuuaccaagcagggacagguggaccugaaugaugccguccucgcgcugacggaccugggccucaucuacaccgccaaguauccuaacucuuccgaccuggaucgccuuagccaaucccaucccauucugaauaugguugacacaaagaagucuagccucaacaucuccggguacaauuuuagccugggagcugccgugaaagcuggcgccugcaugcuugaugggggaaacaugcuggagaccaucaaggugacaccucagaccauggacggcauucucaaaucuauccugaaggucaaaagaucccugggcauguucgugagcgauacgcccggggaacggaauccuuaugagaacauucucuacaagaucugucugucuggagacggcuggccguauauugcgagccgcacauccaucguugggagagccugggaaaacaccacaguggaucuugagucugacggaaagccccagaaagucggcaccaccgggagcaauaagucccugcagagcgcuggauuuccuacaggccucacguacucucaacugaugacccugaaagauuccaugaugcagcuugaccccagcgccaagacauggauugauaucgagggccggccugaagaccccguggagaucgcucucuaccagccgaugucugggugcuauauucacuucuuuagagaaccuaccgaccugaaacaguucaagcaagaugccaaguacucccauggaaucgacguugccgaucuguuucccgcucagccuggccucacaagcgcggugauugaggcccugccccgcaacaugguccuuaccugucagggguccgacgauaucaaaaagcugcucgacucucagggacggagagauauuaaacugaucgacaucgcucugagcaaggccgauucccgcaaauucgaaaaugccgugugggaccaaugcaaggaucuuugucacaugcauacgggcgucgugguugagaagaaaaagagagggggcaaagaggaaauuacaccccacugcgcucucauggacuguaucauguaugaugccgcggugucuggaggccugaacauuccuguccugcgggcugugcucccgcgcgacaugguuuuucggaccagcucccccaaggugguccugugaggacuaguaauaaggaaacuguaugaaugucugugggcaggaagugaagagauccuucuguaaagguuuuuggaauuaugucugcugaauaauaaacuuuuuugaaauaauaaaucugguagaaaaaugagaucuaaaaaaaaaaaaaaaaaaaaaaaaaaaaaaaaaaaaaaaaaaaaaaaaaaaaaaaaaaaaaaaaaaaaaaaaaaaaaaaaaaaaaaaaaaaaaaaaaaaa

SEQ ID NO: 21725 - RNA, 2073 nt, Artificial Sequence
  mRNA product Design b-4 (A100) comprising derived and/or modified sequence from LASV(LASV1000-NIG-2009;Clade II)__AIT17783__SP-IgE_NP(2-569) (opt5)
aggagagucccgcagucggcguccagcggcucugcuuguucgugugugugucguugcaggccuuauucaagcuuaccauggacuggaccuggauccuguuccucguggccgcugccacaagaguccacagcagcgccuccaaggaggugaaaucuuuccuguggacccagagccucagacgggaacuguccggcuacugcucuaacaucaaacuucaagucguuaaggacgcucaggcccugcuccacgggcuggauuuuagcgagguguccaaugugcagcgccuuaugagaaagcagaaacgggacgauucugaccugaagcgccucagagaucugaaccaagcggucaauaaccugguggaacucaagagcacacagcagaaauccauucugcggguuggaacgcuuaccagcgacgaucugcucacacuggcugccgaccuugagaagcugaaaucuaaggugauccgcaccgaaagaccccucuccagcggcgucuauauggggaaucugucuacacagcaacuggagcagcggcgcgcccuccugaacaugauuggaauggugggcggggcucagggaacccagccuggcagagauggcguugugcgggucugggacgugaaaaauccggaucuucugaacaaucaauucgggacaaugcccucccucacccuggccugucuuacgaagcagggacagguggaccugaacgaugucguucucgcucugaccgaccugggccucaucuacacagccaaguauccuaauagcucugaccuggaucgccuuucccaaagccaucccauucugaacaugguggacaccaaaaaguccucucucaauaucagcggguacaacuuuucccugggagcggccgugaaagcuggcgccugcaugcuugaugggggaaauaugcuggagacaaucaaggucaccccucagacgauggacggcauucucaaaagcauccugaaggugaaaaagucucugggcauguucguuuccgauacacccggggaaagaaacccuuaugagaacauucucuacaagaucugucugagcggagacggcuggccguauauugcuucucggaccagcaucguggggcgcgccugggaaaauacaaccgucgaucuugaguccgacggaaaaccccagaaggugggcaccgcggggucuaacaaaagccugcaguccgccggauuuccuacaggccucacguacagccaacugaugacccugaaggauucuaugaugcagcuugaccccuccgcuaaaacauggauugauaucgagggcagaccugaagaccccguugagaucgcccucuaccagccggugagcgggugcuauauucacuucuuucgggaaccuaccgaccugaagcaguucaagcaagaugcuaaauacucucauggaaucgacgucgccgaucuguuucccgcccagccuggccucacauccgcugugauugaggcgcugcccagaaauaugguccuuaccugucaggggagcgacgauaucaagcgccugcucgacucccagggacggagagauauuaaacugaucgacaucgcccugucuaaggcugauagccgccgguucgaaaacgccgugugggaccaaugcaaagaucuuugucacaugcauacgggcguuguggucgagaagaagaaaagagggggcaaggaggaaauuacaccccacugcgcccucauggacuguaucauguaugaugcugccguguccggaggccugaauauuccuguucugcgcgcggugcucccgcgggacauggucuuuagaaccucuagccccaaaguggugcugugaggacuaguaauaaggaaacuguaugaaugucugugggcaggaagugaagagauccuucuguaaagguuuuuggaauuaugucugcugaauaauaaacuuuuuugaaauaauaaaucugguagaaaaaugagaucuaaaaaaaaaaaaaaaaaaaaaaaaaaaaaaaaaaaaaaaaaaaaaaaaaaaaaaaaaaaaaaaaaaaaaaaaaaaaaaaaaaaaaaaaaaaaaaaaaaaa

SEQ ID NO: 21726 - RNA, 2073 nt, Artificial Sequence
  mRNA product Design b-4 (A100) comprising derived and/or modified sequence from LASV(LASV221-NIG-2010;Clade II)__AIT17625__SP-IgE_NP(2-569) (opt5)
aggagagucccgcagucggcguccagcggcucugcuuguucgugugugugucguugcaggccuuauucaagcuuaccauggacuggaccuggauccuguuccucguggccgcugccacaagaguccacagcagcgccuccaaggaggugaaaucuuuccuguggacccagagccucagacgggaacuguccggcuacugcucuagcaucaaacuucaagucguuaaggacgcucaggcccugcuccacgggcuggauuuuuccgaggugucuaacgugcagcgccuuaugagaaagcagcggcgcgacgauagcgaccugaaaagacuccgggaucugaaucaagcggucaacaaucugguggaacucaaguccacacagcaaaagagcauucugcgcguuggaacgcuuaccucugacgaucugcucacacuggcugccgaccuugagaaacugaaguccaaagugaucagaaccgaacggccccucagcucuggcgucuauauggggaaccuguccacacagcagcuggagcagcgcagagcccuccugaauaugauuggaauggugggcggggcucagggaacccagccuggccgggauggcguugugcgcgucugggacgugaagaacccggaucuucugaauaaccaauucgggacaaugcccagccucacccuggccugucuuacgaaacagggacagguggaccugaaugaugcuguccucgcccugaccgaccugggccucaucuacacagcgaaguauccuaacucuuccgaccuggauagacuuagccaaucccaucccauucugaauaugguugacaccaagaaaucuagccucaacaucuccggguacaauuuuagccugggagccgcugugaaggccggcgcuugcaugcuugaugggggaaacaugcuggagacaaucaaagugaccccucagacggucgacggcauucucaagucuauccugaaagugaagcggucccugggcauguucguuagcgauacacccggggaacgcaauccuuaugagaacauucucuacaaaaucugucugucuggagacggcuggccguauauugccagcagaaccuccaucguggggcgggcgugggaaaacacaaccgucgaucuugagucugacggaaagccccagaaggugggcaccgccgggagcaauaaaucccugcagagcgcuggauuuccuacaggccucacguacucucaacugaugacccugaaggauuccaugaugcagcuugaccccagcgccaaaacauggauugauaucgagggcagaccugaagaccccguugagaucgcucucuaccagccgaugucugggugcuauauucacuucuuucgcgaaccuaccgaccugaagcaguucaaacaagaugccaaguacucccauggaaucgacguggccgaucuguuucccgcucagccuggccucacaagcgcggucauugaggcccugccccggaacauggugcuuaccugucagggguccgacgauaucaagagacugcucgacucucagggacgccgggauauuaaacugaucgacaucgcucugagcaaggccgauuccagaaaauucgaaaaugccgucugggaccaaugcaaggaucuuugucacaugcauacgggcgugguuguggagaaaaagaagcgcgggggcaaagaggaaauuacaccccacugcgcucucauggacuguaucauguaugaugccgcggucucuggaggccugaacauuccugugcugcgggcuguucucccgagagacaugguguuucgcaccagcucccccaaggucgugcugugaggacuaguaauaaggaaacuguaugaaugucugugggcaggaagugaagagauccuucuguaaagguuuuuggaauuaugucugcugaauaauaaacuuuuuugaaauaauaaaucugguagaaaaaugagaucuaaaaaaaaaaaaaaaaaaaaaaaaaaaaaaaaaaaaaaaaaaaaaaaaaaaaaaaaaaaaaaaaaaaaaaaaaaaaaaaaaaaaaaaaaaaaaaaaaaaa

SEQ ID NO: 21727 - RNA, 2073 nt, Artificial Sequence
  mRNA product Design b-4 (A100) comprising derived and/or modified sequence from LASV(LASV237-NIG-2010;Clade II)__AIT17639__SP-IgE_NP(2-569) (opt5)
aggagagucccgcagucggcguccagcggcucugcuuguucgugugugugucguugcaggccuuauucaagcuuaccauggacuggaccuggauccuguuccucguggccgcugccacaagaguccacagcagcgccuccaaggaggugaaaucuuuccuguggacccagagccucagacgggaacuguccggcuacugcucuaacaucaaacuucaagucguuaaggacgcucaggcccugcuccacgggcuggauuuuagcgagguguccaaugugcagcgccuuaugagaaagcagaaacgggacgauucugaccugaagcgccucagagaucugaaccaagcggucaauaaccugguggaacucaagagcacacagcagaaauccauucugcggguuggaacgcuuaccagcgacgaucugcucacacuggcugccgaccuugagaagcugaaaucuaaggugauccgcaccgaaagaccccucuccagcggcgucuauauggggaaucugucuacacagcaacuggagcagcggcgcgcccuccugaacaugauuggaauggugggcggggcucagggaacccagccuggcagagauggcguugugcgggucugggacgugaaaaauccggaucuucugaacaaucaauucgggacaaugcccucccucacccuggccugucuuacgaagcagggacagguggaccugaacgaugcuguccucgcccugaccgaccugggccucaucuacacagcgaaguauccuaauagcucugaccuggaucgccuuucccaaagccaucccauucugaacaugguugacaucaaaaaguccucucucaauaucagcggguacaacuuuucccugggagccgcugugaaagccggcgcuugcaugcuugaugggggaaauaugcuggagaccauuaaggugacaccucagaccauggacggcauccucaaaagcauucugaaggucaaaagaucucugggcauguucguguccgauacgcccggggaacggaacccuuaugagaacauccucuacaagauuugucugagcggagacggcuggccguauaucgccucucgcacaagcauuguugggagagcgugggaaaauaccacaguggaucuugaguccgacggaaagccccagaaagucggcucugccgggagcaacaagucccugcagagcgcuggauuuccuaccggccucaccuacucucaacugaugacacugaaagauuccaugaugcagcuugaccccagcgccaagacguggaucgauaucgagggccggccugaagaccccguggagauugcucucuaccagccgaugucugggugcuauauccacuucuuuagagaaccuaccgaccugaaacaguucaagcaagaugccaaguacucccauggaauugacguugccgaucuguuucccgcucagccuggccucacaagcgcggugaucgaggcccugccccgcaauaugguccuuaccugucagggguccgacgauauuaaacggcugcucgacucucagggaagacgcgauaucaagcugaucgacauugcucugagcaaagccgauucccggagauucgaaaacgccgugugggaccaaugcaaggaucuuugucacaugcauacaggcgucgugguugagaaaaagaagcgcgggggcaaagaggaaaucacgccccacugcgcucucauggacuguauuauguaugaugccgcggugucuggaggccugaauaucccuguccugcgggcugugcucccgagagacaugguuuuucgcaccagcucccccaaggugguccugugaggacuaguaauaaggaaacuguaugaaugucugugggcaggaagugaagagauccuucuguaaagguuuuuggaauuaugucugcugaauaauaaacuuuuuugaaauaauaaaucugguagaaaaaugagaucuaaaaaaaaaaaaaaaaaaaaaaaaaaaaaaaaaaaaaaaaaaaaaaaaaaaaaaaaaaaaaaaaaaaaaaaaaaaaaaaaaaaaaaaaaaaaaaaaaaaa

SEQ ID NO: 21728 - RNA, 2073 nt, Artificial Sequence
  mRNA product Design b-4 (A100) comprising derived and/or modified sequence from LASV(LASV253-NIG-2011;Clade II)__AIT17671__SP-IgE_NP(2-569) (opt5)
aggagagucccgcagucggcguccagcggcucugcuuguucgugugugugucguugcaggccuuauucaagcuuaccauggacuggaccuggauccuguuccucguggccgcugccacaagaguccacagcagcgccuccaaggaggugaaaucuuuccuguggacccagagccucagacgggaacuguccggcuacugcucuagcaucaaacuucaagucguuaaggacgcucaggcccugcuccacgggcuggauuuuuccgaggugucuaacgugcagcgccuuaugagaaagcagaaacgggacgauagcgaccugaagcgccucagagaucugaaucaagcggucaacaaucugguggaacucaaguccacccagcagaaaagcguucugcgggugggaacgcuuaccucugacgaucugcucacacuggcugccgaccuugagaagcugaaauccaaggucauucgcaccgaaagaccccucagcucuggcguguauauggggaaccuguccacacagcaacuggagcagcggcgcgcccuccugaauaugaucggaaugguuggcggggcucagggaacccagccuggcagagauggcgugguccgggugugggacgugaaaaacccggaucuucugaauaaccaauucgggacaaugcccagccucacccuggccugucuuacgaagcagggacaggucgaccugaaugauguugugcucgcucugaccgaccugggccucauuuacacagccaaguauccuaacucuuccgaccuggaucgccuuagccaaucccaucccauccugaauaugguggacaccaaaaagucuagccucaacauuuccggguacaauuuuagccugggagcggccgucaaagcuggcgccugcaugcuugaugggggaaacaugcuggagacaaucaaggugaccccucagacgauggacggcauccucaaaucuauucugaagguuaaaaagucccugggcauguucgugagcgauacacccggggaaagaaauccuuaugagaacauccucuacaagauuugucugucuggagacggcuggccguauaucgcuagccggaccuccauugucgggcgcgccugggaaaacacaaccguggaucuugagucugacggaaaaccccagaagguuggcaccgcggggagcaauaaaucccugcagagcgccggauuuccuacaggccucacguacucucaacugaugacccugaaggauuccaugaugcagcuugaccccagcgcuaaaacauggaucgauauugagggcagaccugaagaccccguggagaucgcccucuaccagccgaugucugggugcuauauccacuucuuucgggaaccuaccgaccugaagcaguucaagcaagaugcuaaauacucccauggaauugacgucacagaucuguuucccgcccagccuggccucaccagcgccgugaucgaggcucugcccagaaacaugguccuuacgugucagggguccgacgauauuaagcgccugcucgacucucagggacggagagauaucaaacugauugacaucgcgcugagcaaggccgauucccgccgguucgaaaaugcugugugggaccaaugcaaagaucuuugucacaugcauacaggcguuguggucgagaagaagaaaagagggggcaaggaggaaaucacaccccacugcgcccucauggacuguauuauguaugaugccgcugugucuggaggccugaacaucccuguucugcgcgccgugcucccgcgggacauggucuuuagaaccagcucccccaaaguggugcugugaggacuaguaauaaggaaacuguaugaaugucugugggcaggaagugaagagauccuucuguaaagguuuuuggaauuaugucugcugaauaauaaacuuuuuugaaauaauaaaucugguagaaaaaugagaucuaaaaaaaaaaaaaaaaaaaaaaaaaaaaaaaaaaaaaaaaaaaaaaaaaaaaaaaaaaaaaaaaaaaaaaaaaaaaaaaaaaaaaaaaaaaaaaaaaaaa

SEQ ID NO: 21729 - RNA, 2073 nt, Artificial Sequence
  mRNA product Design b-4 (A100) comprising derived and/or modified sequence from LASV(LASV254-NIG-2011;Clade II)__AIT17675__SP-IgE_NP(2-569) (opt5)
aggagagucccgcagucggcguccagcggcucugcuuguucgugugugugucguugcaggccuuauucaagcuuaccauggacuggaccuggauccuguuccucguggccgcugccacaagaguccacagcagcgccuccaaggaggugaaaucuuuccuguggacccagagccucagacgggaacuguccggcuacugcucuagcaucaaacuucaagucguuaaggacgcucaggcccugcuccacgggcuggauuuuuccgaggugucuaacgugcagcgccuuaugagaaagcagaaacgggacgauagcgaccugaagcgccucagagaucugaaucaagcggucaacaaucugguggaacucaaguccacacagcagaaaagcguucugcgggugggaacgcuuaccucugacgaucugcucacacuggcugccgaccuugagaagcugaaauccaaggucauucgcaccgaaagaccccucagcucuggcguguauauggggaaccuguccacacagcaacuggagcagcggcgcgcccuccugaauaugaucggaaugguuggcggggcucagggaacccagccuggcagagauggcgugguccgggugugggacgugaaaaacccggaucuucugaauaaccaauucgggacaaugcccagccucacccuggccugucuuacgaagcagggacaggucgaccugaaugaugcuguucucgcccugaccgaccugggccucauuuacacagcgaaguauccuaacucuuccgaccuggaucgccuuagccaaucccaucccauccugaauaugguggacaccaaaaagucuagccucaacauuuccggguacaauuuuagccugggagccgcugugaaagccggcgcuugcaugcuugaugggggaaacaugcuggagacaaucaaggucaccccucagacgauggacggcauccucaaaucuauucugaaggugaaaaagucccugggcauguucguuagcgauacacccggggaaagaaauccuuaugagaacauccucuacaagauuugucugucuggagacggcuggccguauaucgccagccggaccuccauuguggggcgcgcgugggaaaacacaaucgucgaucuugagucugacggaaaaccccagaaggugggcaccgccgggagcaauaaaucccugcagagcgcuggauuuccuaccggccucacauacucucaacugaugacgcugaaggauuccaugaugcagcuugaccccagcgccaaaaccuggauugauaucgagggcagaccugaagaccccguugagaucgcucucuaccagccgaugucugggugcuauauucacuucuuucgggaaccuacagaccugaagcaguucaagcaagaugccaaauacucccauggaaucgacguggccgaucuguuucccgcucagccuggccucaccagcgcggucauugaggcccugcccagaaacauggugcuuacaugucagggguccgacgauaucaagcgccugcucgacucucagggacggagagauauuaaacugaucgacaucgcucugagcaaggccgauucccgccgguucgaaaaugccgucugggaccaaugcaaagaucuuugucacaugcauaccggcgugguuguggagaagaagaaaagagggggcaaggaggaaauuacgccccacugcgcucucauggacuguaucauguaugaugccgcggucucuggaggccugaacauuccugugcugcgcgcuguucucccgcgggacaugguguuuagaacaagcucccccaaagucgugcugugaggacuaguaauaaggaaacuguaugaaugucugugggcaggaagugaagagauccuucuguaaagguuuuuggaauuaugucugcugaauaauaaacuuuuuugaaauaauaaaucugguagaaaaaugagaucuaaaaaaaaaaaaaaaaaaaaaaaaaaaaaaaaaaaaaaaaaaaaaaaaaaaaaaaaaaaaaaaaaaaaaaaaaaaaaaaaaaaaaaaaaaaaaaaaaaaa

SEQ ID NO: 21730 - RNA, 2073 nt, Artificial Sequence
  mRNA product Design b-4 (A100) comprising derived and/or modified sequence from LASV(Nig08-04;Clade II)__ADU56611__SP-IgE_NP(2-569) (opt5)
aggagagucccgcagucggcguccagcggcucugcuuguucgugugugugucguugcaggccuuauucaagcuuaccauggacuggaccuggauccuguuccucguggccgcugccacaagaguccacagcagcgccuccaaggaggugaaaucuuuccuguggacccagagccucagacgggaacuguccggcuacugcucuaacaucaaacuucaagucguuaaggacgcucaggcccugcuccacgggcuggauuuuagcgagguguccaaugugcagcgccuuaugagaaagcagaaacgggacgauggagaccugaagcgccucagagaucugaaccaagcggucaauaaccugguggaacucaagucuacccagcagaaaagcguucugcgggugggcacgcuuaccuccgacgaucugcucacacuggcugccgaccuugagaagcugaaaagcaaggucauucgcaccgaaagaccccucucuuccgggguguauaugggaaaucugagcacacagcaacuggagcagcggaaagcccuccugucuaugaucggcaugguugggggagcucagggcacccagccuggccgcgaugggguggucagagugugggacgugaagaacccggaucuucugaauaaccaauucggaacaaugcccucccucacccuggccugucuuacgaagcagggccaggucgaccugaaugaugcuguucucgcccugaccgaccuggggcucauuuacacagcgaaauauccuaacagcucugaccuggaucggcuuucccaaagccaucccauccugaauaugguggacaccaagaaauccucucucaacauuagcggauacaauuuuucccugggcgccgcugugaaggccggggcuugcaugcuugauggaggcaacaugcuggagacaaucaaagucaccccucagacgauggacggcauccucaagagcauucugaaagugaagcgcucucuggggauguucguuuccgauacacccggagaaagaaauccuuaugagaacauccucuacaagauuugucugagcggcgacggguggccguauaucgccucucggaccagcauugugggacgcgcgugggaaaacacaaccgucgaucuugaguccgacggcaaaccccagaagguggggaccgccggaucuaauaaaagccugcaguccgcuggcuuuccuacaggccucacguacagccaacugaugacccugaaggauucuaugaugcagcuugaccccuccgccaaaacauggaucgauauugaggggagaccugaagaccccguugagaucgcucucuaccagccgaugagcggaugcuauauccacuucuuucgggaaccuaccgaccugaagcaguucaagcaagaugccaaauacucucauggcauugacgugacagaucuguuuuccgcccagcccgggcucaccagcgcugucaucgaggcgcugccuagaaacauggugcuuacgugucagggauccgacgauauuaagaaacugcucgacucucagggccgccgggauaucaagcugauugacaucagccugaauaaagccgauuccagacgcuucgaaaacgcugucugggaccaaugcaaggaucuuugucacaugcauacaggggugguuguggagaagaaaaagcggggcggaaaagaggaaaucacaccccacugcgcccucauggacuguauuauguuugaugccgcugucucuggcgggcugaauauccccauucugagagccgugcucccucgcgacaugguuuuccggaccagcuccccgaaggugguccugugaggacuaguaauaaggaaacuguaugaaugucugugggcaggaagugaagagauccuucuguaaagguuuuuggaauuaugucugcugaauaauaaacuuuuuugaaauaauaaaucugguagaaaaaugagaucuaaaaaaaaaaaaaaaaaaaaaaaaaaaaaaaaaaaaaaaaaaaaaaaaaaaaaaaaaaaaaaaaaaaaaaaaaaaaaaaaaaaaaaaaaaaaaaaaaaaa

SEQ ID NO: 21731 - RNA, 2076 nt, Artificial Sequence
  mRNA product Design b-4 (A100) comprising derived and/or modified sequence from LASV(GA391;Clade III)__AAA46284__SP-IgE_NP(2-570) (opt5)
aggagagucccgcagucggcguccagcggcucugcuuguucgugugugugucguugcaggccuuauucaagcuuaccauggacuggaccuggauccuguuccucguggccgcugccacaagaguccacagcagcgccuccaaggaggugagaucuugccuguggacccagagccuccggcgcgaacuguccggcuacuguucuaacaucaaacuucaagucguuaaggacgcucaggcccugcuccacgggcuggauuucagcgagguguccaaugugcagagacuuaugcggaaacagaagcgcgacgauggagaccugaaaagacuccgggaucugaaccaagcggucaauaaccugguggaacucaagucuacacagcagaaaagcguucugcgcgugggcacgcuuuccagcgacgaucugcucauucuggcugccgaccuugagaaacugaagucuaaagucaccagaacagaacggccccucuccagcgggguguauaugggaaaucugucuucccagcaacuggaucagcgcagagcccuccugaacaugaucggcaugaccgggguuagcggaggcggcaagggggcuucuaauggaauugugcgggucugggacgugaaaaacgccgagcuucugaauaaccaguuuggcacaaugccuucccucacccuggcuugccuuacaaagcaggggcaaguggaucugaaugacgccguccaggcgcucaccgaucugggacugaucuacacggccaaguauccgaacagcuccgaccucgaccgccugucucagagccaucccauucuuaauaugaucgauaccaaaaaguccagccugaacaucucuggcuacaauuucucccucggggcugccguuaaagcuggagccuguaugcuggacggcggcaacaugcuugagacaauuaaggugagcccucaaaccauggaugggauccugaaaucuauucucaaggugaaaaagagccugggaauguuugucuccgacacacccggcgaaagaaacccuuaugagaauauccuguacaagauuugccucucuggggauggauggagcuauaucgcgucccggaccagcauugugggccgcgccugggaaaacacgguuguggaccuggagcaggauaauaaaccccagaagaucgggaacggaggcucuaauaaaucccuucagagcgcuggcuucgccgcugggcugaucuacucucaacucaugacacugaaggacuuuaaauguuucaaccugauuccuaaugccaagaccuggauggauaucgagggaagaccggaagaccccgucgagauugcccuuuaccagccuuccagcggcugcuaugugcacuuuuuccgggaacccacagaucucaagcaguuuaaacaggacgcuaaguacucccaugggagagacguuaccgaucuguucgcggcccaaccuggacugaccucugcugugaucgaggcccucccccgcaacauggucauuacaugucagggcagcgaagacauccggaaacugcuugagucccaggggagacgcgauaucaagcugauugacaucacgcucucuaaagccgauagccggaaguuugagaaugcugugugggaccaguucaaggaucugugccacaugcauaccggcgucgugguugaaaagaagaaaagaggaggcaaggaggaaauuacaccgcacugugcccugauggacugcaucauguuugaugcggcuguguccgggggacuugacgccaaaguccuccgcgugguucugccucgggauaugguguucagaaccagcacacccaaggucgugcugugaggacuaguaauaaggaaacuguaugaaugucugugggcaggaagugaagagauccuucuguaaagguuuuuggaauuaugucugcugaauaauaaacuuuuuugaaauaauaaaucugguagaaaaaugagaucuaaaaaaaaaaaaaaaaaaaaaaaaaaaaaaaaaaaaaaaaaaaaaaaaaaaaaaaaaaaaaaaaaaaaaaaaaaaaaaaaaaaaaaaaaaaaaaaaaaaa

SEQ ID NO: 21732 - RNA, 2073 nt, Artificial Sequence
  mRNA product Design b-4 (A100) comprising derived and/or modified sequence from LASV(Nig08-A19;Clade III)__ADU56619__SP-IgE_NP(2-569) (opt5)
aggagagucccgcagucggcguccagcggcucugcuuguucgugugugugucguugcaggccuuauucaagcuuaccauggacuggaccuggauccuguuccucguggccgcugccacaagaguccacagcagcgccuccaaggaggugaaaucuuuccuguggacccagagccucagacgggaacuguccggcuacugcucuaacaucaaacuucaagucguuaaggacgcucaggcccugcuccacgggcuggauuuuagcgagguguccaaugugcagcgccuuaugagaaagcagaaacgggacgauggagaccugaagcgccucagagaucugaaccaagcggucaauaaccugguggaacucaagucuacacagcagaaaagcguucugcgggugggcacgcuuuccagcgacgaucugcucguccuggcugccgaccuugagaagcugaaaucuaaggugguucgcaccgaaagaccccucuccagcgggauuuauaugggaaaucugucuucccagcaacuggaucagcggaaagcccuccugaacaugaucggcaugacagggggaaauggcggccgcaacaccacaagcgacgggauugugagagucugggaugugaagaaugcugagcuucugaacaaucaguucggaaccaugccuucucucacacuggccugucuuaccaagcagggccaaguggaccugaacgaugcuguccaggcccucacggaccuggggcugaucuacaccgcgaaauaucccaauuccagcgaccucgaucggcuggcccagucccauccgauucuuaacaugaucgacacaaagaaaucuagccugaauaucuccggauacaacuuuagccucggcgcugccguuaaggcuggggccugcaugcuggauggaggcaacaugcuugagaccauuaaagugucuccucaaacaauggacggcauccugaaguccauucucaaagugaagcgcagccuggggauguucaucucugauacccccggagaaagaaauccuuaugagaacauucuguacaagaucugucucagcggcgacggguggcccuauauugcgucccggacgucuaucgucggacgcgccugggaaaauacagugguugaucuggagagcgacaacaaaccucagaagaccggcaaugggggauccaacaaaagccuucagucugcuggcuuugccgcuggccugacauacucccagcucaugacccugaaggauagcaugcugcaacuugacccgaaugccaaaaccuggauggauaucgaggggagacccgaagacccuguggagauugcccucuaccagcccucuuccggaugcuauauccacuucuuucgggaaccuacagaccugaagcaguucaagcaggaugcuaaauacagccauggcauugacgucacggaucuguuugcggcccaacccgggcucaccuccgcugugaucgaggcccugccgagaaacaugguuauuacaugucagggaucugaagacauccgcaaacuucuggagagccagggccggagagauaucaagcucauugacaucucccugucuaagguggauagccgcaaauucgagaaugccgucugggaccaguuuaaggaucugugccacaugcauaccgggauuguggucgaaaagaaaaagcggggcggaaaagaggaaaucacaccucacugugcucuuauggacugcauuauguucgaugccgcgguguccggcgggguugacgcuaaggugcucagagccguccugccccgcgauaugguguuucggaccagcacgccuaaaguugugcugugaggacuaguaauaaggaaacuguaugaaugucugugggcaggaagugaagagauccuucuguaaagguuuuuggaauuaugucugcugaauaauaaacuuuuuugaaauaauaaaucugguagaaaaaugagaucuaaaaaaaaaaaaaaaaaaaaaaaaaaaaaaaaaaaaaaaaaaaaaaaaaaaaaaaaaaaaaaaaaaaaaaaaaaaaaaaaaaaaaaaaaaaaaaaaaaaa

SEQ ID NO: 21733 - RNA, 2073 nt, Artificial Sequence
  mRNA product Design b-4 (A100) comprising derived and/or modified sequence from LASV(G1180-SLE-2010;Clade IV)__AIT17169__SP-IgE_NP(2-569) (opt5)
aggagagucccgcagucggcguccagcggcucugcuuguucgugugugugucguugcaggccuuauucaagcuuaccauggacuggaccuggauccuguuccucguggccgcugccacaagaguccacagcagcgccuccaaggagaucaaaucuuuccuguggacccagagccucagacgggaacuguccggcuacugcucuaacauuaagcugcaaguggucaaagacgcucaggcccugcuccacgggcuggauuuuagcgagguuuccaaugugcagcgccuuaugagaaaggaacggcgcgacgauaacgaccugaaaagacuccgggaucugaaucaggcggugaacaaucuggucgagcucaagucuacacaacaaaagagcauccugcgcgugggaacgcuuaccuccgacgaucugcucauucuggcugccgaccuugaaaaacuuaagagcaaaguuaucagaacagagcggccccucucugccggcguguauauggggaaccuguccagccagcagcuggaucagcgcagagcucuccugucuaugauuggaauguccagcggcaaucagcgggcccaggcugggcgcgacggagucgugagaguuugggaugugaagaacgucgagcuucugaauaaccaguucggcaccaugccuucucucacacuggccugucuuaccaaacaaggccagguggaccugaaugaugcggugcaggcccucacagaccuggggcugaucuacaccgcuaaguauccgaacacguccgaccucgaucggcugacccaaagccaucccauccuuaauaugauugacacaaagaaauccucucugaacaucagcggauacaauuuuucccucggcgccgcugucaaggccggggcgugcaugcuggauggaggcaacaugcuugaaaccauuaaaguuagcccucagacaauggacgggauccugaagucuauucucaaagugaagaaagcccugggaauguucaucuccgauacccccggcgagcgcaacccuuaugaaaauauucuguacaagaucugucucagcggcgacggguggcccuauaucgcuucuagaacgagcauuacaggacgggccugggagaacaccguggucgaucuggaguccgacggcaagccucagaaagcugggucuaauaacagcaauaagucccuucagagcgugggauuuacagccggccugaccuacucucaacucaugacccugaaagaugccaugcugcagcuugacccgaacgcuaagacauggauggauaucgaagggagacccgaggacccuguugaaauugcgcucuaccagcccuccagcggaugcuauauccacuucuuucgcgagccuacggaccugaaacaguucaagcaagaugccaaguacucucauggcauugacgugaccgaucuguuugcugcccagcccggccucacauccgccgucaucgacgcucugccgcggaauauggugaucaccugucaggggagcgaugacauuagaaaacuucuggaaucccagggacgcaaggauaucaaacucauugacaucgcccugucuaagacagauagccggaaauaugagaacgcgguuugggaccaauacaaggaucugugccacaugcauaccggcguggucguggagaagaaaaagagagggggaaaagaagagauuacgccucacugugcucuuauggacugcaucauguucgaugccgccgucuccggcgggcucaauacaucugugcugcgcgcuguucugccccgggacaugguguuuagaaccagcaccccucgcgucgugcucugaggacuaguaauaaggaaacuguaugaaugucugugggcaggaagugaagagauccuucuguaaagguuuuuggaauuaugucugcugaauaauaaacuuuuuugaaauaauaaaucugguagaaaaaugagaucuaaaaaaaaaaaaaaaaaaaaaaaaaaaaaaaaaaaaaaaaaaaaaaaaaaaaaaaaaaaaaaaaaaaaaaaaaaaaaaaaaaaaaaaaaaaaaaaaaaaa

SEQ ID NO: 21734 - RNA, 2073 nt, Artificial Sequence
  mRNA product Design b-4 (A100) comprising derived and/or modified sequence from LASV(G1442-SLE-2011;Clade IV)__AIT17181__SP-IgE_NP(2-569) (opt5)
aggagagucccgcagucggcguccagcggcucugcuuguucgugugugugucguugcaggccuuauucaagcuuaccauggacuggaccuggauccuguuccucguggccgcugccacaagaguccacagcagcgccuccaaggaggugaaaucuuuccuguggacccagagccucagacgggaacuguccggcuacugcucuaacaucaaacuucaagucguuaaggacgcucaggcccugcuccacgggcuggauuuuagcgagguguccaaugugcagcgccuuaugagaaagcagcggcgcgacgauaacgaccugaaaagacuccgggaucugaaucaagcggucaacaaucugguggaacucaagucuacacagcaaaagagcguucugcgcgugggaacgcuuaccuccgacgaucugcucguccuggcugccgaccuugagaaacuuaagagcaaagugauuagaacagaacggccccucucugccggcguuuauauggggaaccuguccagccagcagcuggaucagcgcagagcucuccugaauaugaucggaaugucuggcgggauucagggaacccggacaggccgcgacggcguggucagagugugggaugugaagaacgccgaccuucugaauaaccaguucgggaccaugccuucccucacacuggcuugucuuaccaaacaaggacaggucgaucugaaugacguugugcaggcccucacggaccugggccugaucuacaccgcgaaguauccgaacgccagcgaucucgaccggcugacacaaucucaucccauucuuaauaugaucgauaccaagaaauccagccugaacaucuccggguacaauuuuucucucggagcugccgugaaggcuggcgccugcaugcuggacgggggaaacaugcuugagacaauuaaagucagcccucagaccauggauggcauccugaaguccauucucaaagugaagaaaacgcugggcauguucaucagcgacacacccggggagcgcaacccuuaugaaaauauucuguacaagaucugucucucuggagauggcuggcccuauauugcguccagaaccagcaucacagggcgggccugggagaacaccguuguggaccuggaaucugauggaaagccucagaaagcuggcagcaauaacuccaauaagucucuucagagcgccggguuugcugccggacugaccuacucccaacucaugacacugaaagacgccaugcugcagcuugauccgaacgcuaagacguggauggacaucgagggcagacccgaggacccugucgaaauugcgcucuaccagcccagcucuggcugcuauauccacuucuuucgcgagccuaccgaucugaaacaguucaagcaagacgccaaguacucccaugggauugaugugacagaccuguuugcugcccagcccggacucaccagcgccguuaucgaagcucugccgcggaauauggugauuacaugucagggcucugaugacaucaaaaagcugcuggagucccaggggagaaaagauaucaagcucauugacaucgcccugagcaaaaccgauucccgcaaguaugaaaacgcggucugggaccaauacaaggaucugugccacaugcauacgggaguggucguggagaaaaagaaacggggcgggaaggaggaaauuacaccucacugugcucuuauggacugcaucauguucgaugccgccguuucuggcggacucaauacccuggugcugagagcuguccucccccgcgacaugguguuucggaccagcacaccuagaguugugcugugaggacuaguaauaaggaaacuguaugaaugucugugggcaggaagugaagagauccuucuguaaagguuuuuggaauuaugucugcugaauaauaaacuuuuuugaaauaauaaaucugguagaaaaaugagaucuaaaaaaaaaaaaaaaaaaaaaaaaaaaaaaaaaaaaaaaaaaaaaaaaaaaaaaaaaaaaaaaaaaaaaaaaaaaaaaaaaaaaaaaaaaaaaaaaaaaa

SEQ ID NO: 21735 - RNA, 2073 nt, Artificial Sequence
  mRNA product Design b-4 (A100) comprising derived and/or modified sequence from LASV(G3010-SLE-2013;Clade IV)__AIT17345__SP-IgE_NP(2-569) (opt5)
aggagagucccgcagucggcguccagcggcucugcuuguucgugugugugucguugcaggccuuauucaagcuuaccauggacuggaccuggauccuguuccucguggccgcugccacaagaguccacagcagcgccuccaaggagaucaaaucuuuccuguggacccagagccucagacgggaacuguccggcuacugcucuaacauuaaacuucaaguggucaaagacgcucaggcccugcuccacgggcuggauuuuagcgagguuuccaaugugcagcgccuuaugagaaaggaacggcgcgacgauaacgaccugaaaagacuccgggaucugaaucaggcggugaacaaucuggucgagcucaagucuacacaacaaaagagcauccugcgcgugggaacgcuuaccuccgacgaucugcucauucuggcugccgaccuugaaaaacuuaagagcaaaguuacaagaaccgagcggccccucucugccggcguguauauggggaaccuguccagccagcagcuggaucagcgcagagcucuccugucuaugaucggaauguccagcggcguccagggggcccgggcuggacgcgacggcgugguuagagugugggaugucaagaaugccgagcuucugaacaaucaguucggcacaaugccuucucucacccuggcgugucuuacaaaacaggggcaaguggaccugaacgaugugguccaggcccucaccgaccugggacugauuuacacggcuaaguauccgaauaccuccgaccucgaucggcugacacagagccaucccauccuuaacaugaucgacaccaagaaauccucucugaauauuagcggcuacaacuuuucccucggggccgcuguuaaggccggagcgugcaugcuggauggcgggaauaugcuugaaacaaucaaagugagcccucaaaccauggacggcauucugaagucuauccucaaagugaagaaagcccugggaauguucauuuccgagacgcccggcgaacgcaacccuuaugagaacauccuguacaagauuugucucagcggggauggauggcccuauaucgcuucuagaacaagcaucaccggccgggccugggagaauacagucguggaccuggaauccgaugggaagccucagaaagcuggaucuaacaauagcaacaagucccuucagagcgccggcuuuaccgccgggcugaccuacucucagcucaugacacugaaagacgcuaugcugcaacuugauccgaaugcgaagacguggauggacauugagggaagacccgaagauccuguugagguggcccucuaccagcccuccagcggcugcuauauccacuucuuucgcgaaccuaccgaccugaaacaguucaagcaggacgcuaaguacucucauggcauugaugucacagaccuguuugccgcccaacccgggcucaccuccgcugugaucgaugcccugccgcggaacaugguuauuacaugucagggaagcgacgauaucaaaaagcugcuggagucccagggcagaaaagacaucaagcucauugauaucgcgcugucuaaaaccgacagccgcaaguaugagaaugcugugugggaucaguacaaggaccugugccacaugcauacgggggucguggucgaaaagaagaaacggggaggcaaggaggaaauuacaccucacugugcccuuauggauugcaucauguucgacgccgcuguguccgggggccucaacaccucuguucugagagccgugcugccccgcgauauggucuuucggaccagcacaccuagagugguucucugaggacuaguaauaaggaaacuguaugaaugucugugggcaggaagugaagagauccuucuguaaagguuuuuggaauuaugucugcugaauaauaaacuuuuuugaaauaauaaaucugguagaaaaaugagaucuaaaaaaaaaaaaaaaaaaaaaaaaaaaaaaaaaaaaaaaaaaaaaaaaaaaaaaaaaaaaaaaaaaaaaaaaaaaaaaaaaaaaaaaaaaaaaaaaaaaa

SEQ ID NO: 21736 - RNA, 2073 nt, Artificial Sequence
  mRNA product Design b-4 (A100) comprising derived and/or modified sequence from LASV(G502-SLE-2009;Clade IV)__AIT17127__SP-IgE_NP(2-569) (opt5)
aggagagucccgcagucggcguccagcggcucugcuuguucgugugugugucguugcaggccuuauucaagcuuaccauggacuggaccuggauccuguuccucguggccgcugccacaagaguccacagcagcgccuccaaggagaucaaaucuuuccuguggacccagagccucagacgggaacuguccggcuacugcucuaacauuaagcugcaaguggucaaagacgcucaggcccugcuccacgggcuggauuuuagcgagguuuccaaugugcagcgccuuaugagaaaggaacggcgcgacgauaacgaccugaaaagacuccgggaucugaaucaggcggugaacaaucuggucgagcucaagucuacacaacaaaagagcauccugcgcgugggaacgcuuaccuccgacgaucugcucauucuggcugccgaccuugaaaaacuuaagagcaaaguuaucagaacagagcggccccucucugccggcguguauauggggaaccuguccagccagcagcuggaucagcgcagagcucuccugucuaugauuggaauguccggcgggaaucagggaguccgggccggcaaggacggcgugguucgcgugugggaugucaaaaacgcugagcuucugaauaaccaguucgggaccaugccuagccucacacuggccugucuuaccaagcagggacaaguggaccugaaugaugcggugcaggcccucacagaccugggccugaucuacaccgcuaaguauccgaacacgucugaccucgauagacugacccagucccaucccauccuuaauaugauugacaccaaaaagagcucccugaacaucucuggguacaauuuuagccucggagccgcugucaaagccggcgcgugcaugcuggaugggggaaacaugcuugaaacaauuaagguuuccccucaaacaauggacggcauccugaaaagcauucucaaggugaaaaaggcccugggcauguucaucucugauacccccggggagcggaacccuuaugaaaauauucuguacaagaucugucucuccggagacggcuggcccuauaucgcuagccgcacgucuauuacagggagagccugggagaacaccguggucgaucuggagagcgacggaaaaccucagaaggcuggcuccaauaacucuaauaaaagccuucaguccgccggguuuacagccggacugaccuacagccagcucaugacccugaaggaugcuaugcugcaacuugacccgaacacaaaaacguggauggauaucgaaggccggcccgaggacccuguggaaauugcgcucuaccagcccucuuccggcugcuauauccacuucuuuagagagccuaccgaccugaagcaguucaagcaggaugccaaauacagccaugggauugacguuacagaucuguuugcugcccaacccggacucaccucugccgugaucgacgcucugccgcgcaauauggucaucacaugucagggcuccgaugacauucggaaacuucuggaaagccaggggagaaaggauaucaagcucauugacaucgcccugaacaaaaccgauucccgcaaguaugagaaugcggugugggaccaguacaaggaucugugccacaugcauacgggaguuguggucgagaaaaagaaacggggcgggaaggaagagauuacaccucacugugcucuuauggacugcaucauguucgaugccgccgugucuggcggacucaacaccagcguccugagagcugugcugccccgcgacaugguuuuucggaccuccacaccuagagugguccucugaggacuaguaauaaggaaacuguaugaaugucugugggcaggaagugaagagauccuucuguaaagguuuuuggaauuaugucugcugaauaauaaacuuuuuugaaauaauaaaucugguagaaaaaugagaucuaaaaaaaaaaaaaaaaaaaaaaaaaaaaaaaaaaaaaaaaaaaaaaaaaaaaaaaaaaaaaaaaaaaaaaaaaaaaaaaaaaaaaaaaaaaaaaaaaaaa

SEQ ID NO: 21737 - RNA, 2073 nt, Artificial Sequence
  mRNA product Design b-4 (A100) comprising derived and/or modified sequence from LASV(G733-SLE-2010;Clade IV)__AIT17155__SP-IgE_NP(2-569) (opt5)
aggagagucccgcagucggcguccagcggcucugcuuguucgugugugugucguugcaggccuuauucaagcuuaccauggacuggaccuggauccuguuccucguggccgcugccacaagaguccacagcagcgccuccaaggagaucaaaucuuuccuguggacccagagccucagacgggaacuguccggcuacugcucuaacauuaagcugcaaguggucaaagacgcucaggcccugcuccacgggcuggauuuuagcgagguuuccaaugugcagcgccuuaugagaaaggaacggcgcgacgauaacgaccugaaaagacuccgggaucugaaucaggcggugaacaaucuggucgagcucaagucuacacaacaaaagagcgugcugcgcguuggaacgcuuaccuccgacgaacugcucgugcuggcugccgaucuugagaaacuuaagagcaaagucaucagaacagagcggccccucucugccggcguguauauggggaaccuguccagccagcagcuggaccagcgcagagcucuccugucuaugauuggaauguccggcgggaaucagggagcccggaccggccgcgauggcguugugagagucugggacgugaagaacgcugaacuucugaauaaccaguucgggacaaugccuagccucacccuggccugucuuacaaaacagggacaaguggaucugaaugacgcgguccaggcccucaccgaucugggccugaucuacacggcuaaguauccgaacaccucugaccucgaccggcugacacagucccaucccauucuuaauaugaucgauaccaagaaaagcucccugaacaucucuggguacaauuuuagccucggagccgcuguuaaggccggcgcgugcaugcuggacgggggaaacaugcuugagacaauuaaaguguccccucaaaccauggauggcauccucaagagcauucugaaagugaagaaagcccugggcauguucaucucugacacgcccggggaacgcaacccuuaugagaauauucuguacaagaucugucucuccggagauggcuggcccuauauugcuagcagaacaucuaucaccgggcgggccugggagaacacagucguggaccuggaaagcgauggaaagccucagaaagcuggcuccaauaacucuaauaagagccuucaguccgccggguuuaccgccggacugaccuacagccagcucaugacacugaaagacgcuaugcugcaacuugauccgaacgcgaagacguggauggacaucgagggcagacccgaagauccuguugagauugcccucuaccagcccucuuccggcugcuauauccacuucuuucgcgaaccuaccgaccugaaacaguucaagcaggacgcuaaguacagccaugggauugaugugacagaccuguuugccgcccaacccggacucaccucugcugucaucgaugcccugccgcggaauauggugauuacaugucagggcuccgacgauaucagaaaacuucuggagagccaggggcgcaaggacaucaaacucauugauaucgcgcuguccaagauugacucucggaaauaugagaacgcuguuugggaucaguacaaggaccugugccacaugcauaccggaguggucguggaaaagaaaaagagaggcgggaaagaggaaaucacgccucacugugcccuuauggauugcauuauguucgacgccgcugucagcggcggacucaauucccuggugcugcgcgccguucucccccgggauaugguguuuagaacaucuaccccucgcgucgugcugugaggacuaguaauaaggaaacuguaugaaugucugugggcaggaagugaagagauccuucuguaaagguuuuuggaauuaugucugcugaauaauaaacuuuuuugaaauaauaaaucugguagaaaaaugagaucuaaaaaaaaaaaaaaaaaaaaaaaaaaaaaaaaaaaaaaaaaaaaaaaaaaaaaaaaaaaaaaaaaaaaaaaaaaaaaaaaaaaaaaaaaaaaaaaaaaaa

SEQ ID NO: 21738 - RNA, 2073 nt, Artificial Sequence
  mRNA product Design b-4 (A100) comprising derived and/or modified sequence from MOPV/LASV reassortant(IGS-1;Clade IV)__AFY05578__SP-IgE_NP(2-569) (opt5)
aggagagucccgcagucggcguccagcggcucugcuuguucgugugugugucguugcaggccuuauucaagcuuaccauggacuggaccuggauccuguuccucguggccgcugccacaagaguccacagcagcgccuccaaggagaucaaaucuuuccuguggacccagagccucagacgggaacuguccggcuacugcucuaacauuaaacuucaaguggucaaggacgcucaggcccugcuccacgggcuggauuuuagcgagguuuccaaugugcagcgccuuaugagaaaggaacggcgcgacgauaacgaccugaaaagacuccgggaucugaaucaggcggugaacaaucuggucgagcucaagucuacacaacaaaagagcauccugcgcgugggaacgcuuaccuccgacgaucugcucauucuggcugccgaccuugaaaaacugagaagcaagguuauccggacagagcgcccccucucugccggcguguauauggggaaccuguccagccagcagcuggaucagagacgggcucuccugaauaugauuggaaugucuggcgggaaccagggagcccgcgcuggcagagacggcgucgugcggguuugggaugugaaaaaugccgagcuucuguccaaccaguucgggaccaugccuagccucacacuggcgugucuuaccaagcagggacaagucgaccugaaugaugccgugcaggcucucacagaccugggccugaucuacaccgccaaauauccgaacacgucugaccucgaucgccugacccagucccaucccauccuuaauaugauugacacaaagaaaagcucccugaacaucucuggguacaauuuuagccucggagcugccgugaaggcgggcgccugcaugcuggaugggggaaacaugcuugaaaccauuaaggucuccccucaaacaauggacggcauccugaaaagcauucucaagguuaaaaaggcucugggcauguucaucucugauacccccggggagagaaacccuuaugaaaauauucuguacaaaaucugucucuccggagacggcuggcccuauaucgccagccggacgucuauuacagggagagcuugggagaacaccgugguggaucuggagagcgacggaaagccucagaaggccgauuccaauaacucuagcaaaucccuucagagcgccggcuuuacagcugggcugaccuacucucagcucaugacccugaaggacgcgaugcugcaacuugauccgaaugccaaaacauggauggacaucgaaggacgccccgaggacccugucgaaauugcucucuaccagcccuccagcggcugcuauauccacuucuuucgggagccuacggaucugaagcaguucaaacaggacgccaaguacucucauggcauugaugugaccgaccuguuugccacacaacccgggcucaccuccgcuguuaucgaugcccugccgagaaacauggugaucacaugucagggaagcgacgauauucgcaaacuucuggaaucccagggccggaaggacaucaagcucauugauaucgaccugucuaaaaccgauagcagaaaguaugagaaugcggucugggaccaguacaaagaucugugccacaugcauacgggggugguuguggagaagaagaaacgcggaggcaaggaagagauuacaccucacugugcucuuauggacugcaucauguucgacgccgccgucuccgggggccucaacaccucugugcugcgggcuguccugcccagagauaugguguuucgcaccagcacaccucggguugugcucugaggacuaguaauaaggaaacuguaugaaugucugugggcaggaagugaagagauccuucuguaaagguuuuuggaauuaugucugcugaauaauaaacuuuuuugaaauaauaaaucugguagaaaaaugagaucuaaaaaaaaaaaaaaaaaaaaaaaaaaaaaaaaaaaaaaaaaaaaaaaaaaaaaaaaaaaaaaaaaaaaaaaaaaaaaaaaaaaaaaaaaaaaaaaaaaaa

SEQ ID NO: 21739 - RNA, 2073 nt, Artificial Sequence
  mRNA product Design b-4 (A100) comprising derived and/or modified sequence from LASV(LM765-SLE-2012;Clade IV)__AIT17815__SP-IgE_NP(2-569) (opt5)
aggagagucccgcagucggcguccagcggcucugcuuguucgugugugugucguugcaggccuuauucaagcuuaccauggacuggaccuggauccuguuccucguggccgcugccacaagaguccacagcagcgccuccaaggagaucaaaucuuuccuguggacccagagccucagacgggaacuguccggcuacugcucuaacauuaagcugcaaguggucaaagacgcucaggcccugcuccacgggcuggauuuuagcgagguuuccaaugugcagcgccuuaugagaaaggaacggcgcgacgauaacgaccugaaaagacuccgggaucugaaucaggcggugaacaaucuggucgagcucaagucuacacaacaaaagagcauccugcgcgugggaacgcuuaccuccgacgaucugcucauucuggcugccgaccuugaaaaacuuaagagcaaaguuacaagaaccgagcggccccucucugccggcguguauauggggaaccuguccagccagcagcuggaucagcgcagagcucuccuggacaugaucggaaugucuggcuccaaucagggggcccgggcuggacgcgauggcgucgugagaguuugggacgugaagaacgccgagcuucugaauaaccaguucggcacaaugccuagccucacccuggcgugucuuacaaaacaggggcaagucgaucugaaugacgccgugcaggcucucaccgaccugggacugauuuacacggccaaguauccgaacaccucugaucucgaccggcugacacagucccaucccauccuuaauaugaucgauaccaagaaaagcucccugaacauuucuggcuacaauuuuagccucggggcugccgugaaggcgggagccugcaugcuggacggcgggaacaugcuugaaacaaucaaagucuccccucaaaccauggauggcauucucaagagcauccugaaaguuaagaaagcucugggaauguucauuucugacgcccccggcgagcgcaacccuuaugaaaauauccuguacaagauuugucucuccggggauggauggcccuauaucgcuagcagaacgucuaucacaggccgggccugggagaacaccgugguggaccuggagagcgaugggaagccucagaaagccggauccaauggcucuaacaagagccuucaguccgcuggguuuacagcgggacugaccuacagccagcucaugacccugaaagacgccaugcugcaacuugauccgaaugcuaagacauggauggacauugaaggcagacccgaggacccugucgaaaucgcccucuaccagcccucuuccggcugcuauauucacuucuuucgcgagccuacggaucugaaacaguucaagcaggacgccaaguacagccaugggaucgaugugaccgaccuguuugcugcccaacccggacucacaucugcgguuauugaugcucugccgcggaacauggugaucaccugucagggcuccgacgauaucagaaaacuuuucgaaagccaggggcgcaaggacauuaaacugaucgauauugcccucuccaagacagacucucggaaauaugagaaugccgucugggaucaguacaaggaccugugccacaugcauaccggaaucgugguugagaagaaaaagagaggcgggaaagaagagauuacgccucacugugcucugauggauugcaucauguuugacgccgcugugagcggcggacuuaacacauccguccuccgcgccgugcugccccgggacauggucuucagaaccucuaccccucgcgugguucugugaggacuaguaauaaggaaacuguaugaaugucugugggcaggaagugaagagauccuucuguaaagguuuuuggaauuaugucugcugaauaauaaacuuuuuugaaauaauaaaucugguagaaaaaugagaucuaaaaaaaaaaaaaaaaaaaaaaaaaaaaaaaaaaaaaaaaaaaaaaaaaaaaaaaaaaaaaaaaaaaaaaaaaaaaaaaaaaaaaaaaaaaaaaaaaaaa

SEQ ID NO: 21740 - RNA, 2073 nt, Artificial Sequence
  mRNA product Design b-4 (A100) comprising derived and/or modified sequence from LASV(LM776-SLE-2012;Clade IV)__AIT17825__SP-IgE_NP(2-569) (opt5)
aggagagucccgcagucggcguccagcggcucugcuuguucgugugugugucguugcaggccuuauucaagcuuaccauggacuggaccuggauccuguuccucguggccgcugccacaagaguccacagcagcgccuccaaggagaucaaaucuuuccuguggacccagagccucagacgggaacuguccucuuacugcagcaacauuaaacuucaaguggucaaggacgcucaggcccugcuccacggccuggauuuuuccgagguuucuaaugugcagcgccuuaugagaaaggaacggcgcgacgauaacgaccugaaaagacuccgggaucugaaucaggcggugaacaaucuggucgagcucaagagcacacaacagaaguccauccugcgcguggggacgcuuaccagcgacgaucugcucauucuggcugccgaccuugaaaaacugaagucuaaaguuacaagaaccgagcggccccucuccgccggaguguauaugggcaaccugagcucucagcagcuggaucaacgcagagcucuccuguccaugaucgggaugagcggaucuaaucagggcgcccgggcugggcgcgacggagucgugagaguuugggaugugaagaacgccgagcuucugaauaaccaguucggcacaaugccuucccucacccuggcgugucuuacaaaacagggccaagucgaccugaaugaugccgugcaggcucucaccgaccuggggcugauuuacacggccaaguauccgaacaccagcgaccucgaucggcugacacagucccaucccauccuuaauaugaucgacaccaagaaaucuagccugaacauuuccggauacaauuuuagccucggcgcugccgugaaggcgggggccugcaugcuggauggaggcaacaugcuugaaacaaucaaagucucuccucaaaccauggacgggauucugaaguccauccucaaaguuaagaaagcucugggaauguucauuagcgauacgcccggcgagcgcaacccuuaugaaaauauccuguacaagauuugucucucuggcgacggguggcccuauaucgccagcagaacauccaucaccggacgggcuugggagaacacagugguggaucuggagucugacggcaagccucagaaagccgggagcaauaacuccaauaagagccuucagucugccggauuuaccgcuggccugaccuacucccagcucaugacacugaaagaugcgaugcugcaacuugacccgaacgccaagacguggauggauauugaagggagacccgaggacccugucgaaguggcucucuaccagcccagcucuggaugcuauauccacuucuuucgcgagccuaccgaccugaaacaguucaagcaggaugccaaguacucccauggcauugacguuacagaucuguuugccgcucaacccggccucaccagcgccgugaucgacgcgcugccgcggaauauggucauuacaugucagggguccgaugacaucagaaaacuucuggaaucucagggacgcaaggauaucaaacucauugacaucgcucugagcaagaccgauucccggaaauaugagaacgccgugugggaccaguacaaggaucugugccacaugcauacgggcguuguggucgagaagaaaaagagagggggaaaagaagagauuacaccucacugugcccuuauggacugcaucauguucgaugcugccgugucuggcgggcucaauaccagcguccugcgcgcugugcugccccgggacaugguuuuuagaaccuccacaccucgcgugguccucugaggacuaguaauaaggaaacuguaugaaugucugugggcaggaagugaagagauccuucuguaaagguuuuuggaauuaugucugcugaauaauaaacuuuuuugaaauaauaaaucugguagaaaaaugagaucuaaaaaaaaaaaaaaaaaaaaaaaaaaaaaaaaaaaaaaaaaaaaaaaaaaaaaaaaaaaaaaaaaaaaaaaaaaaaaaaaaaaaaaaaaaaaaaaaaaaa

SEQ ID NO: 21741 - RNA, 2073 nt, Artificial Sequence
  mRNA product Design b-4 (A100) comprising derived and/or modified sequence from LASV(Mad39;Clade IV)__ANH09723__SP-IgE_NP(2-569) (opt5)
aggagagucccgcagucggcguccagcggcucugcuuguucgugugugugucguugcaggccuuauucaagcuuaccauggacuggaccuggauccuguuccucguggccgcugccacaagaguccacagcagcgccuccaaggagaucaaaucuuuccuguggacccagagccucagacgggaacuguccggcuacugcucuaacauuaagcugcaaguggucaaagacgcucaggcccugcuccacgggcuggauuuuagcgagguuuccaaugugcagcgccuuaugagaaagcagcggcgcgacgauaacgaccugaaaagacuccgggaucugaaucaagcggugaacaaucuggucgaacucaagucuacacagcaaaagagcgugcugcgcguuggaacgcuuaccuccgacgaucugcucacacuggcugccgaccuugagaaacuuaagagcaaagugaccagaacagaacggccccucaccgccggcgucuauauggggaaccugucuucccagcagcuggaucagcgcagagcucuccugaauaugaucggaaugagcggcgggaaccagggagcccggacaggccgcgacggcgugguuagagugugggaugucaagaaugcugagcuucugaacaaucaguucgggaccaugccuucucucacgcuggccugucuuaccaaacaaggacagguggaccugaacgaugugguccaggcgcucacagaccugggccugauuuacaccgccaaguauccgaauacauccgaccucgaucggcugacccaaagccaucccauccuuaacaugauugacacgaauaagucuucccugaacaucagcggguacaacuuuucccucggagcugccguuaaagcuggcgccugcaugcuggaugggggaaauaugcuugagacaaucaaggugucuccucagaccauggacggcauucugaaaagcauccucaaggugaaaaagucccugggcauguucauuagcgauacacccggggaacgcaacccuuaugagaauauccuguacaaaauuugucucucuggagacggcuggcccuauaucgcguccagaaccagcauuaccgggcgggccugggaaaacacagucguggaucuggagucuggaggcaagccucagaaggcugggagcaauaacuccaauaaaucucuucagagcgccggauuugcugccggccugacguacucccaacucaugacccugaaggacgccaugcugcagcuugauccgaacgcuaaaacauggauggacaucgagggcagacccgaagauccuguugagaucgcgcucuaccagcccauuagcgggugcuauauccacuucuuucgcgaaccuaccgaccugaagcaguucaaacaagacgccaaguacucucauggaauugaugugacagaccuguuugcugcccagcccggccucaccuccgccgucaucgaggcucugccgcggaauauggugauuacgugucaggggagcgaugacaucagaaaacuuuucgaaucucagggacgcaaggauaucaagcugauugacaucgcccucuccaaaacagauagccggaaguaugagaacgcgguuugggaccaauacaaagaucugugccacaugcauaccggcguggucguggagaagaagaaaaagggcgggaaagaagagauuaccccucacugugcucugauggacugcaucauguuugaugccgccgucuccggaggccuuaauacacucgugcugagagcuguucugccccgcgacaugguguuccggaccucuacaccuaaggucgugcucugaggacuaguaauaaggaaacuguaugaaugucugugggcaggaagugaagagauccuucuguaaagguuuuuggaauuaugucugcugaauaauaaacuuuuuugaaauaauaaaucugguagaaaaaugagaucuaaaaaaaaaaaaaaaaaaaaaaaaaaaaaaaaaaaaaaaaaaaaaaaaaaaaaaaaaaaaaaaaaaaaaaaaaaaaaaaaaaaaaaaaaaaaaaaaaaaa

SEQ ID NO: 21742 - RNA, 2073 nt, Artificial Sequence
  mRNA product Design b-4 (A100) comprising derived and/or modified sequence from LASV(Z0947-SLE-2011;Clade IV)__AIT17841__SP-IgE_NP(2-569) (opt5)
aggagagucccgcagucggcguccagcggcucugcuuguucgugugugugucguugcaggccuuauucaagcuuaccauggacuggaccuggauccuguuccucguggccgcugccacaagaguccacagcagcgccuccaaggagaucaaaucuuuccuguggacccagagccucagacgggaacuguccggcuacugcucuaacauuaagcugcaaguggucaaagacgcucaggcccugcuccacgggcuggauuuuagcgagguuuccaaugugcagcgccuuaugagaaaggaacggcgcgacgauaacgaccugaaaagacuccgggaucugaaucaggcggugaacaaucuggucgagcucaagucuacacaacaaaagagcauccugcgcgugggaacgcuuaccuccgacgaucugcucauucuggcugccgaccuugaaaaacuuaagagcaaaguuacaagaaccgagcggccccucucugccggcguguauauggggaaccuguccagccagcagcuggaucagcgcagagcucuccugaauaugaucggaaugucuggcuccaaccagggggcccggacaggacgcgacggcgucgugagaguuugggaugugaagaaugcugagcuucugaacaaucaguucggcaccaugccuagccucacacuggccugucuuaccaaacaggggcaagucgaccugaacgaugcggugcaggcccucacggaccugggacugauuuacaccgcuaaguauccgaauacaucugaccucgaucggcugacccagucccaucccauccuuaacaugaucgacacaaagaaaagcucccugaauauuucuggcuacaacuuuagccucggggccgcugugaaggccggagcgugcaugcuggauggcgggaacaugcuugaaaccaucaaagucuccccucaaacgauggacggcauucucaagagcauccugaaaguuaagaaagcccugggaauguucauuucugaugcucccggcgagcgcaauccuuaugaaaacauccuguacaagauuugucucuccggggacggauggcccuauaucgccagcagaacaucuaucaccggccgggcuugggagaauacagugguggaucuggagagcgacgggaagccucagaaagccggauccaacggcucuaauaagagccuucaguccgccggguuuaccgcuggacugaccuacagccagcucaugacacugaaagaugcgaugcugcaacuugacccgaacgccaagacguggauggauauugaaggcagacccgaggacccugucgaaaucgcucucuaccagcccucuuccggcugcuauauucacuucuuucgcgagccuaccgaccugaaacaguucaagcaggaugccaaguacagccaugggaucgacgugacagaucuguuugccgcucaacccggacucaccucugccguuauugacgcgcugccgcggaauauggugaucacaugucagggcuccgaugacaucagaaaacuuuucgaaagccaggggcgcaaggauauuaaacugaucgacauugcucucuccaagaccgauucucggaaauaugagaacgccgucugggaccaguacaaggaucugugccacaugcauacgggaaucgugguugagaagaaaaagagaggcgggaaagaagagauuacaccucacugugcccugauggacugcaucauguuugaugcugccgugagcggcggacuuaauaccuccguccuccgcgcugugcugccccgggacauggucuucagaaccucuacaccucgcgugguucugugaggacuaguaauaaggaaacuguaugaaugucugugggcaggaagugaagagauccuucuguaaagguuuuuggaauuaugucugcugaauaauaaacuuuuuugaaauaauaaaucugguagaaaaaugagaucuaaaaaaaaaaaaaaaaaaaaaaaaaaaaaaaaaaaaaaaaaaaaaaaaaaaaaaaaaaaaaaaaaaaaaaaaaaaaaaaaaaaaaaaaaaaaaaaaaaaa

SEQ ID NO: 21743 - RNA, 1943 nt, Artificial Sequence
  mRNA product Design i-3 (hSL-A64-N5) comprising derived and/or modified sequence from LASV(Josiah;Clade IV)__NP_694869__SP-IgE_NP(2-569) (opt1)
aggagaaagcuuaccauggacuggaccuggauccuguuccucguggccgccgcgacccgcguccacagcagcgccuccaaggagaucaagagcuuccuguggacccagucccuccgccgggagcugagcggcuacugcuccaacaucaagcuccagguggucaaggacgcccaggcgcugcugcacgggcuggacuucagcgagguguccaacgugcagcgccucaugcggaaggagcgccgggacgacaacgaccugaagcgccugcgggaccucaaccaggccgucaacaaccugguggagcucaagagcacccagcagaaguccauccugcgcgugggcacccugaccagcgacgaccugcucauccuggccgccgaccuggagaagcucaaguccaaggucauccggaccgagcgcccccugagcgccgggguguacaugggcaaccuguccagccagcagcucgaccagcggcgcgcgcugcugaacaugaucgggauguccggcggcaaccagggggcccgggccggccgcgacggggugguccgggugugggacgugaagaacgccgagcuccugaacaaccaguucggcaccaugccgagccugacgcucgcgugccugaccaagcaggggcaggucgaccugaacgacgccgugcaggcccucaccgaccugggccugaucuacaccgccaaguaccccaacacguccgaccucgaccgccugacccagagccaccccauccugaacaugaucgacaccaagaaguccagccucaacaucagcggcuacaacuucucccugggggccgcggugaaggccggcgccugcaugcuggacgggggcaacaugcucgagaccaucaaggucagcccccagacgauggacggcauccugaaguccauccugaaggugaagaaggcccucgggauguucaucagcgacaccccgggcgagcggaaccccuacgagaacauccuguacaagaucugccuguccggggacggcuggcccuacaucgccagccgcaccuccaucaccgggcgggcgugggagaacacgguggucgaccucgagagcgacggcaagccccagaaggccgacuccaacaacagcuccaagagccugcaguccgccggcuucaccgccgggcugaccuacagccagcucaugacccugaaggacgccaugcugcagcuggacccgaacgcgaagacguggauggacaucgagggccgccccgaggaccccguggagaucgcccucuaccagcccuccagcgggugcuacauccacuucuuccgggagccgaccgaccugaagcaguucaagcaggacgccaaguacucccacggcaucgacgugaccgaccuguucgccacccagcccgggcucacgagcgccgucaucgacgcgcugccccgcaacauggugaucacgugccagggcuccgacgacauccgcaagcugcucgagagccagggccggaaggacaucaagcugaucgacaucgcccugagcaagaccgacucccgcaaguacgagaacgccgugugggaccaguacaaggaccucugccacaugcacaccggggucguggucgagaagaagaagcggggcgggaaggaggagaucaccccgcacugcgcccugauggacugcaucauguucgacgcggccgugagcggcgggcugaacaccuccgugcuccgcgccguccugccccgggacaugguguuccgcaccagcacgccccgggugguccugugaggacuaguuauaagacugacuagcccgaugggccucccaacgggcccuccuccccuccuugcaccgagauuaaucaaaggcucuuuucagagccaccaaaaaaaaaaaaaaaaaaaaaaaaaaaaaaaaaaaaaaaaaaaaaaaaaaaaaaaaaaaaaaaaagaauu

SEQ ID NO: 21744 - RNA, 1943 nt, Artificial Sequence
  mRNA product Design i-3 (hSL-A64-N5) comprising derived and/or modified sequence from LASV(LP;Clade I)__AAF86702__SP-IgE_NP(2-569) (opt1)
aggagaaagcuuaccauggacuggaccuggauccuguuccucguggccgccgcgacccgcguccacagcagcaacuccaaggagaucaagagcuuccuguggacccagucccuccgccgggagcugagcggcuacugcuccaacaucaagcuccagguggucaaggacgcccaggcccugcugcacgggcuggacuucagcgagguguccaacgugcagcgccucaugcggaagcagaagcgcgacgacgcggaccugaagcggcugcgcgaccucaaccaggccgucaacaaccugguggagcucaagagcacccagcagaagaacgugcugcgggucggcacgcuguccagcgacgaccugaucacccucgccgccgaccuggagaagcugaaguccaaggugauccgcaccgagcggccccucagcuccgggguguacaugggcaaccugagcucccagcagcuggaccagcgccgggcccuccugagcaugaucgggauguccggcggcccgcaggggaaccgcaccggcggggacggcgucgugcgggugugggacgucaagaacgcggagcugcucaacaaccaguucgggacgaugcccagccugacccuggccugccucaccaagcagggccagguggaccugaacgacgccgugcaggcccugaccgaccucggccugaucuacacggcgaaguaccccaacuccagcgaccuggacaugcucacccagagccaccccauccuggggauggucgacaccaagaaguccagccugaacaucuccggcuacaacuucagccucggggccgccgugaaggccggcgccugcaugcuggacggcgggaacaugcuggagaccaucaagguguccccgcagacgauggacggcauccucaagagcauccugaaggucaagcgcucccuggggauguucaucagcgacacccccggcgagcggaaccccuacgagaacauccucuacaagaucugccuguccggggagggcuggcccuacaucgcgagccgcaccuccaucaccggccgggccugggagaacacgcugguggaccucgagagcgacaacaagccgcccaagcugaacuccgccgggagcaacaagucccugcaggccgccggccucaacgcggggcugaccuacagccagcugaugacccugaaggacugcaugcuccagcuggaccccuccagcaagaccuggaucgacaucgagggccgccccgaggacccgguggagaucgcccuguuccagcccuccagcgggugcuacauccacuucuuccgggagcccacggaccucaagcaguucaagcaggacgccaaguacagccacggcaucgacgucaccgaccuguucuccacccagcccggccugaccagcgccgugaucgaggcccucccgcgcaacauggugcugacgugccagggguccgacgacaucaagaagcugcucgagagccagggccggcgcgacaucaagcugaucgacaucucccugagcaaggcggacucccgcaaguucgagaacgccgucugggaccaguacaaggaccucugccacaugcacaccgggguggucguggagaagaagaagcggggcgggaaggaggagaucacgccccacugcgcccugcuggacugcaucauguucgacgccgccaccaccggcagccucaacaucaccacccugcgcgcggugcugccccgggacauggucuuccgcaccuccacgcccaagguggugcucugaggacuaguuauaagacugacuagcccgaugggccucccaacgggcccuccuccccuccuugcaccgagauuaaucaaaggcucuuuucagagccaccaaaaaaaaaaaaaaaaaaaaaaaaaaaaaaaaaaaaaaaaaaaaaaaaaaaaaaaaaaaaaaaaagaauu

SEQ ID NO: 21745 - RNA, 1943 nt, Artificial Sequence
  mRNA product Design i-3 (hSL-A64-N5) comprising derived and/or modified sequence from LASV(803213;Clade II)__AAF86704__SP-IgE_NP(2-569) (opt1)
aggagaaagcuuaccauggacuggaccuggauccuguuccucguggccgccgcgacccgcguccacagcagcgccuccaaggaggugaaguccuuccuguggacccagagccuccgccgggagcugagcggcuacugcuccaacaucaagcugcaggucgugaaggacgcccaggcgcuccugcacgggcuggacuucagcgaggugaacaacguccagcgccucaugcggaagcagaagcgcgacgacggcgaccugaagcggcugcgcgaccucaaccaggccgugaacaaccugguggagcugaaguccacccagcagaaguccauccuccgggucgggacgcugaccagcgacgaccugcucacccuggccgccgaccuggagaagcucaagagcaaggugauccgcaccgagcggccccuguccagcggcguguacauggggaaccuguccacgcagcagcucgagcagcgccgggcccugcugaacaugaucggcauggucggcggggcgcagggcacccagccggggcgcgacggcguggugcgggucugggacgugaagaaccccgaccuccugaacaaccaguucgggaccaugcccagccugacccucgccugccugacgaagcagggccagguggaccugaacgacgccguccucgcccugaccgaccugggccucaucuacaccgcgaaguaccccaacuccagcgaccuggaccgccugucccagagccacccgauccucaacaugguggacaccaagaaguccagccugaacaucagcggguacaacuucucccugggcgccgccgugaaggccggggccugcaugcucgacggcggcaacaugcuggagacgaucaaggucacgccccagaccauggacgggauccucaagagcauccugaaggugaagcggucccugggcauguucgugagcgacacccccggggagcgcaaccccuacgagaacauccuguacaagaucugccucuccggcgacggguggccguacaucgcgagccggaccuccaucgucggccgcgccugggagaacaccaccguggaccuggagagcgacggcaagccccagaagguggggaccgccggcuccaacaagagccugcaguccgccggguuccccacgggccucaccuacagccagcugaugacccugaaggacuccaugaugcagcuggaccccagcgccaagaccuggaucgacaucgaggggcggccggaggaccccgucgagaucgcgcucuaccagcccauguccggcugcuacauccacuucuuccgcgagcccacggaccugaagcaguucaagcaggacgccaaguacagccacggcaucgacguggccgaccuguucccggcccagcccgggcucaccuccgccgucaucgaggcgcugccccggaacauggugcugaccugccagggcagcgacgacaucaagaagcuccuggacucccaggggcgccgcgacaucaagcugaucgacaucagccucagcaagguggacucccggaaguucgagaacgccgucugggaccagugcaaggaccugugccacaugcacaccggcgugguggucgagaagaagaagcgcgggggcaaggaggagaucacgccccacugcgcccugauggacugcaucauguucgacgccgccgugagcggcgggcucaacaucccggugcugcgggcgguccugccccgcgacaugguguuccggaccuccagccccaaggugguccucugaggacuaguuauaagacugacuagcccgaugggccucccaacgggcccuccuccccuccuugcaccgagauuaaucaaaggcucuuuucagagccaccaaaaaaaaaaaaaaaaaaaaaaaaaaaaaaaaaaaaaaaaaaaaaaaaaaaaaaaaaaaaaaaaagaauu

SEQ ID NO: 21746 - RNA, 1946 nt, Artificial Sequence
  mRNA product Design i-3 (hSL-A64-N5) comprising derived and/or modified sequence from LASV(GA391;Clade III)__CAA36646__SP-IgE_NP(2-570) (opt1)
aggagaaagcuuaccauggacuggaccuggauccuguuccucguggccgccgcgacccgcguccacagcagcgccuccaaggaggugcgcagcuuccuguggacccagucccuccggcgcgagcugagcggcuacugcuccaacaucaagcugcaggucgugaaggacgcccaggcgcuccugcacgggcuggacuucagcgagguguccaacguccagcggcucaugcgcaagcagaagcgggacgacggcgaccugaagcgccugcgggaccucaaccaggccgugaacaaccugguggagcucaagagcacccagcagaaguccguccugcgcguggggacccugagcuccgacgaccugcucauccuggccgccgaccuggagaagcucaagagcaaggugacccggaccgagcgcccccuguccagcggcgucuacauggggaaccuguccagccagcagcucgaccagcggcgcgcccugcugaacaugaucggcaugaccggcguguccgggggcgggaagggcgcgagcgacgggaucgugcgggucugggacgugaagaacgccgagcuccugaacaaccaguucggcacgaugccgucccugacccucgccugccugaccaagcagggccagguggaccugaacgacgccguccaggcgcucaccgaccuggggcugaucuacacggccaaguaccccaacagcagcgaccucgaccgccugucccagagccaccccauccugaacaugaucgacaccaagaaguccagccucaacaucuccggcuacaacuucagccugggggccgccgugaaggccggcgcgugcaugcuggacggcgggaacaugcucgagaccaucaaggugagcccccagaccauggacggcauccucaaguccauccugaaggucaagaagucccuggggauguucgugagcgacacgccgggcgagcggaaccccuacgagaacauccuguacaagaucugccuguccggggacggcuggcccuacaucgccagccgcaccuccaucgugggccgggccugggagaacaccgucguggaccucgagcaggacaacaagccccagaagaucgggaacggcgggagcaacaagucccugcagagcgccggcuucgccgcggggcugaccuacucccagcucaugacgcugaaggacuucaagugcuucaaccugaucccgaacgccaagaccuggauggacaucgagggccgccccgaggaccccguggagaucgcccuguaccagcccagcuccggcugcuacguccacuucuuccgggagccgaccgaccucaagcaguucaagcaggacgccaaguacagccacgggaucgacgugaccgaccuguucgccgcgcagcccggccugacgagcgccgucaucgaggcccucccccgcaacauggugaucacgugccagggguccgaggacauccggaagcugcuggagagccagggccgccgcgacaucaagcucaucgacaucacccuguccaaggccgacagccggaaguucgagaacgccgugugggaccaguucaaggaccugugccacaugcacaccggggucgugguggagaagaagaagcgcggcggcaaggaggagaucacgccccacugcgcgcucauggacugcaucauguucgacgccgccgucuccgggggccuggacgccaaggugcugcgggugguccucccgcgcgacaugguguuccggaccagcacccccaaggugguccugugaggacuaguuauaagacugacuagcccgaugggccucccaacgggcccuccuccccuccuugcaccgagauuaaucaaaggcucuuuucagagccaccaaaaaaaaaaaaaaaaaaaaaaaaaaaaaaaaaaaaaaaaaaaaaaaaaaaaaaaaaaaaaaaaagaauu

SEQ ID NO: 21747 - RNA, 1943 nt, Artificial Sequence
  mRNA product Design i-3 (hSL-A64-N5) comprising derived and/or modified sequence from LASV(AV;Clade V)__CCA30315__SP-IgE_NP(2-569) (opt1)
aggagaaagcuuaccauggacuggaccuggauccuguuccucguggccgccgcgacccgcguccacagcagcgccuccaaggaggugaaguccuuccuguggacccagagccuccgccgggagcugagcggcuacugcuccaacaucaagcugcaggucgugaaggacgcccaggcgcuccugcacgggcuggacuucagcgagguguccaacguccagcgccucaugcggaagcagcgccgggacgacagcgaccugaagcgccugcgggaccucaaccaggccgugaacaaccugguggagcugaaguccacccagcagaaguccguccuccgcgugggcacgcugagcagcgacgaccugcucacccuggccgccgaccuggagaagcucaaguccaaggugacccggaccgagcgcccccugagcuccggggucuacaugggcaaccugagcucccagcagcucgaccagcggcgcgcccugcugaaccucaucgggaugacgaacggcagccagggcucccaggcggggcgggacggcguggugcgcgucugggacgugaagaacgccgagcugcugaacaaccaguucgggaccaugccgagccucacccuggccugccugaccaagcagggccagguggaccucaacgacgucgugcaggcccugacggaccuggggcucaucuacaccgcgaaguaccccaacaccagcgaccuggaccggcugacccagucccaccccauccucaacaugaucgacacgaagaaguccagccugaacaucagcggcuacaacuucucccugggcgccgccgugaaggccggggccugcaugcucgacggcgggaacaugcuggagaccaucaaggucagcccccaguccauggacggcauccucaagagcauccugaaggugaagcgcgcgcugggcauguucguguccgacaccccgggggagcggaaccccuacgagaacauccuguacaagaucugccucagcggcgacggguggcccuacaucgccucccgcaccagcaucgucggccgggccugggagaacacggugguggaccuggagaccgacgggaagccccagaagaucggcuccggcaacagcaacaagucccugcagagcgccggguucuccgccggccucaccuacagccagcugaugacccugaaggacgcgaugcugcagcucgacccgaacgccaagacguggauggacaucgaggggcgccccgaggaccccgucgagguggcccuguaccagcccaucuccggcugcuacauccacuucuuccgggagccgaccgaccugaagcaguucaagcaggacgccaaguacagccacgggaucgacaucgccgaccucuucgcggcccagcccggccugaccagcgccgucaucgaggcccugccccgcaacauggugaucacgugccagggcuccgaggacaucaagaagcuccuggagagccaggggcgcaaggacaucaagcugaucgacaucgcccucuccaagaucgacagccggaaguucgagaacgcggugugggaccaguacaaggaccugugccacaugcacaccggcgucgugguggagaagaagaagcgcgggggcaaggaggagaucaccccgcacugcgcccugauggacugcaucauguucgacgccgccgucuccgggggccucaacacccuggugcugcgggcggugcucccccgcgacauggucuuccggaccagcacgccccgcguggugcugugaggacuaguuauaagacugacuagcccgaugggccucccaacgggcccuccuccccuccuugcaccgagauuaaucaaaggcucuuuucagagccaccaaaaaaaaaaaaaaaaaaaaaaaaaaaaaaaaaaaaaaaaaaaaaaaaaaaaaaaaaaaaaaaaagaauu

SEQ ID NO: 21748 - RNA, 1943 nt, Artificial Sequence
  mRNA product Design i-3 (hSL-A64-N5) comprising derived and/or modified sequence from LASV(Togo/2016/7082;Clade VI)__AMR44578__SP-IgE_NP(2-569) (opt1)
aggagaaagcuuaccauggacuggaccuggauccuguuccucguggccgccgcgacccgcguccacagcagcaacuccaaggaggugaaguccuuccuguggacccagagccuccgccgggagcugagcggcuacugcuccaacaucaagcugcaggucgugaaggacgcccaggcccuccugcacgggcuggacuucagcgagguguccaacguccagcgccucaugcggaagcagaagcgcgacgacggcgaccugaagcggcugcgcgaccucaaccaggcggugaacaaccugguggagcucaagagcguccagcagaaguccauccugcggguggggacccugaccagcgacgaccugcucacccuggccgccgaccuggagaagcucaaguccaaggugacccgcaccgagcggccccugagcuccggcgucuacauggggaaccugagcucccagcagcucgaccagcgccgggcccugcugagcaugaucggcauguccggcgggaaccagaacagccagccgaagggcgacgggguggugcgcgucugggacgugaagaacgccgaccuccugaacaaccaguucggcacgaugcccucccugacccucgcgugccugaccaagcagggccagguggaccugaacgacgccguccaggcccucaccgaccuggggcugaucuacacggccaaguaccccaacagcagcgaccucgaccggcugucccagagccaccccauccugaacaugaucgacaccaagaaguccagccucaacaucuccggcuacaacuucagccugggggcggccaucaagaccggcgccugcaugcuggacgggggcaacaugcucgagaccaucaaggugacgccgcagaccauggacggcauccugaaguccauccugaaggugaagcgcagccucgggauguucaucuccgacacccccggcgagcggaaccccuacgagaacauccuguacaagaucugccugagcggggacggcuggcccuacaucgccucccgcaccgccaucaucgggcgggcgugggagaacacggucguggaccucgagagcgacuccaagccgcagaagaucggcagcaacggcuccaacaagagccugcaguccgccggguucgcccccggccugaccuacagccagcucaugacccugaaggacuccaugcugcagcuggaccccaacgccaagaccuggaucgacaucgaggggcgccccgaggacccgguggaggucgcccucuuccagcccaucagcggcugcuacauccacuucuuccgggagcccacggaccugaagcaguucaagcaggacgcgaaguacagccacgggaucgacgugaccgaccuguucgccgcccagcccggccucaccuccgccgugaucgaggcccugccgcgcaacaugguccugaccugccagggcagcgacgacaucaagaagcuccuggacucccaggggcggcgcgacaucaagcugaucgacgugagccucaacaagaucgacucccgcaaguucgagaacgcggucugggaccaguacaaggaccugugccacaugcacacgggcgugguggucgagaagaagaagaagggcgggaaggaggagaucacgccccacugcgcccugcucgacugcaucauguucgacgccgccgugagcgggggccugaacgccaccgugcugcgggcgguccucccccgcgacaugguguuccggaccuccagccccaaggugguccugugaggacuaguuauaagacugacuagcccgaugggccucccaacgggcccuccuccccuccuugcaccgagauuaaucaaaggcucuuuucagagccaccaaaaaaaaaaaaaaaaaaaaaaaaaaaaaaaaaaaaaaaaaaaaaaaaaaaaaaaaaaaaaaaaagaauu

SEQ ID NO: 21749 - RNA, 1943 nt, Artificial Sequence
  mRNA product Design i-3 (hSL-A64-N5) comprising derived and/or modified sequence from LASV(KAK-428;Clade n.d. (VII))__ANH09741__SP-IgE_NP(2-569) (opt1)
aggagaaagcuuaccauggacuggaccuggauccuguuccucguggccgccgcgacccgcguccacagcagcaacuccaaggaggugaaguccuuccuguggacccagagccuccgccgggagcugagcggcuacugcaccaacaucaagcugcaggucgugaaggacgcccaggcccuccugcacgggcuggacuucuccgaggugagcaacguccagcgccucaugcggaagcagaagcgcgacgacaacgaccugaagcggcugcgcgaccucaaccaggcggugaacaaccugguggagcugaaguccguccagcagaaguccgugcucaaggugggcacgcugaacagcgacgaccugcucacccuggccgccgaccuggagaagcucaagagcaaggucgugcggaccgagcgcccccuguccagcgggguguacaugggcaaccuguccagccagcagcucgaccagcggcgcgcccugcugaacaugaucgggauggccggcggcucccaggggaaccagccgagccgggacggcgucgugcgcgugugggacgucaagaacgcggaccuccugaacaaccaguucgggaccaugcccucccugacgcucgccugccugaccaagcagggccagguggaccugaacgacgugguccucgcccugaccgaccuggggcucaucuacaccgccaaguaccccaacagcuccgaccuggaccggcugagccagaaccaccccgugcucaacaugaucgacgugaacaagagcucccugaacaucagcggcuacaacuucucccugggcgcggccgucaaggccggggccugcaugcucgacggcgggaacaugcuggagacgaucaagaucagcccgcagaccguggacggcauccugaaguccauccucaaggugaagcgcgcccugggcauguucgucagcgacacccccggggagcggaaccccuacgagaacauccuguacaaggugugccucuccggcaacggguggcccuacaucgcgagccgcaccuccaucgucggccgggccugggagaacacggugguggaccuggagagcaacaagaaccagccgaaggucgggaacaacggcuccaacaagaugcugcagagcuccggcuucgccaccgggcucaccuacagccagcugaugacccugcgcgacuccaugcugcagcucgaccccacggccaagaccuggaucgacaucgagggccggcccgaggaccccguggagcuggcccuguuccagccgagcuccgggugcuacauccacuucuuccgcgagcccaccgaccucaagcaguucaagcaggacgcgaaguacagccacggcaucgacgugaacgaccuguucuccgcccagcccgggcugaccagcgccguccucgaggcccugccccggaacauggugcugacgugccagggcagcgacgacauccgcaagcuccuggacucccaggaccgcaaggacaucaagcugaucgacaucagccucuccaaggccgacgcgcggaaguucgagaacgacgugugggaccaguucaaggaccugugccacaugcacaccggcaucgucguggagaagaagaagaagggcgggaagcaggagaugaccccgcacugcgcccugcucgacugcaucauguucgacgccgccgugagcgggggccugaacguccccacccugcgcgccgugcuccccacggacaugguguuccggaccaucaccaccaaggucgugcugugaggacuaguuauaagacugacuagcccgaugggccucccaacgggcccuccuccccuccuugcaccgagauuaaucaaaggcucuuuucagagccaccaaaaaaaaaaaaaaaaaaaaaaaaaaaaaaaaaaaaaaaaaaaaaaaaaaaaaaaaaaaaaaaaagaauu

SEQ ID NO: 21750 - RNA, 1943 nt, Artificial Sequence; identical to SEQ ID NO: 21744
  mRNA product Design i-3 (hSL-A64-N5) comprising derived and/or modified sequence from LASV(Pinneo-NIG-1969;Clade I)__AIT17837__SP-IgE_NP(2-569) (opt1)

SEQ ID NO: 21751 - RNA, 1943 nt, Artificial Sequence
  mRNA product Design i-3 (hSL-A64-N5) comprising derived and/or modified sequence from LASV(ISTH0009-NIG-2011;Clade II)__AIT17405__SP-IgE_NP(2-569) (opt1)
aggagaaagcuuaccauggacuggaccuggauccuguuccucguggccgccgcgacccgcguccacagcagcguguccaaggaggucaagagcuuccuguggacccagucccuccgccgggagcugagcggcuacugcuccaacaucaagcuccagguggugaaggacgcccaggcccugcugcacgggcuggacuucagcgaggucuccaacgugcagcgccucaugcggaagcagaagcgcgacgacagcgaccugaagcggcugcgcgaccucaaccaggcggugaacaaccuggucgagcugaaguccacccagcagaaguccauccuccgggugggcacccugaccagcgacgaccugcucacccuggccgccgaccuggagaagcucaagagcaaggugauccgcaccgagcggccccuguccagcggggucuacaugggcaaccuguccacgcagcagcucgagcagcgccgggcccugcugaacaugaucgggauggugggcggcgcccaggggacccagccgggccgcgacggggugguccgggugugggacgugaagaaccccgaccuccugaacaaccaguucggcaccaugcccagccugacccucgcgugccugacgaagcaggggcaggucgaccugaacgacgccgugcucgcccugaccgaccugggccucaucuacaccgccaaguaccccaacuccagcgaccuggaccgccugucccagagccacccgauccucaacaugguggacaucaagaaguccagccugaacaucagcggcuacaacuucucccugggggcggccgucaaggccggcgccugcaugcucgacgggggcaacaugcuggagaccaucaaggugacgccccagaccauggacggcauccucaagagcauccugaaggugaagcggucccuggggauguucgucagcgacacccccggcgagcgcaaccccuacgagaacauccuguacaagaucugccucuccggggacggcuggccguacaucgccagccggaccuccaucguggggcgcgcgugggagaacacgaccguggaccuggagagcgacggcaagccccagaaggucggcuccgccgggagcaacaagucccugcagagcgccggcuuccccaccgggcucaccuacucccagcugaugacgcugaaggacagcaugaugcagcuggaccccuccgccaagaccuggaucgacaucgagggccggccggaggaccccguggagaucgcccucuaccagcccaugagcgggugcuacauccacuucuuccgcgagcccaccgaccugaagcaguucaagcaggacgcgaaguacucccacggcaucgacgucgccgaccuguucccggcccagcccggccucaccagcgccgugaucgaggcccugccccggaacauggugcugacgugccaggggagcgacgacaucaagcgccuccuggacucccagggccgccgggacaucaagcugaucgacaucgcgcucagcaaggccgacucccgccgguucgagaacgccgucugggaccagugcaaggaccugugccacaugcacaccggggugguggucgagaagaagaagcgcggcgggaaggaggagaucacgccccacugcgcccugauggacugcaucauguacgacgccgcggugagcggcggccucaacaucccggugcugcgggccguccugccccgcgacaugguguuccggaccuccagccccaaggugguccucugaggacuaguuauaagacugacuagcccgaugggccucccaacgggcccuccuccccuccuugcaccgagauuaaucaaaggcucuuuucagagccaccaaaaaaaaaaaaaaaaaaaaaaaaaaaaaaaaaaaaaaaaaaaaaaaaaaaaaaaaaaaaaaaaagaauu

SEQ ID NO: 21752 - RNA, 1943 nt, Artificial Sequence
  mRNA product Design i-3 (hSL-A64-N5) comprising derived and/or modified sequence from LASV(ISTH2010-NIG-2012;Clade II)__AIT17483__SP-IgE_NP(2-569) (opt1)
aggagaaagcuuaccauggacuggaccuggauccuguuccucguggccgccgcgacccgcguccacagcagcgccuccaaggaggugaaguccuuccuguggacccagagccuccgccgggagcugagcggcuacugcuccaacaucaagcugcaggucgugaaggacgcccaggcgcuccugcacgggcuggacuucagcgagguguccaacguccagcgccucaugcggaagcagaagcgcgacgacagcgaccugaagcggcugcgcgaccucaaccaggccgugaacaaccugguggagcugaaguccacccagcagaaguccauccuccgggucggcacgcugaccagcgacgaccugcucacccuggccgccgaccuggagaagcucaagagcaaggugauccgcaccgagcggccccuguccagcgggguguacaugggcaaccuguccacgcagcagcucgagcagcgccgggcccugcugaaccucaucgggauggucggcggcgcgcaggggacccagccgggccgcgacgggguggugcgggucugggacgugaagaaccccgaccugcugaacaaccaguucggcaccaugcccagccucacccuggccugccugacgaagcagggccagguggaccucaacgacgccguccuggcccugaccgaccucgggcugaucuacaccgcgaaguaccccaacuccagcgaccuggaccgccucucccagagccacccgauccugaacaugguggacaccaagaaguccagccugaacaucagcggcuucaacuucucccucggggccgccgugaaggccggcgccugcaugcuggacgggggcaacaugcuggagacgaucaaggucacgccccagaccauggacggcauccucaagagcauccugaaggugaagaagucccuggggauguucgugagcgacacccccggcgagcggaaccccuacgagaacauccucuacaagaucugccuguccggggacggcuggccguacaucgcgagccgcaccuccaucgucgggcgggccugggagaacaccaccguggaccuggagagcgacggcaagccccacaaggugggcaccgccggguccaacaagagccuccaguccgccggcuuccccacggggcugaccuacagccagcugaugacccugaaggacuccaugaugcagcucgaccccagcgccaagaccuggaucgacaucgagggccgcccggaggaccccgucgagaucgcgcuguaccagcccauguccgggugcuacauccacuucuuccgggagcccacggaccugaagcaguucaagcaggacgccaaguacagccacggcaucgacguggccgaccucuucccggcccagcccggccugaccuccgccgucaucgaggcgcugccccgcaacauggugcugaccugccaggggagcgacgacaucaagcggcuccuggacagccagggccgccgcgacaucaagcucaucgacaucgcccuguccaaggccgacagccggcgcuucgagaacgccgugugggaccagugcaaggaccugugccacaugcacaccggggucgugguggagaagaagaagcggggcgggaaggaggagaucacgccccacugcgcccucauggacugcaucauguacgacgcggccgucuccggcggccugaacaucccggugcugcgcgccgugcucccccgggacauggucuuccgcaccagcucccccaagguggugcugugaggacuaguuauaagacugacuagcccgaugggccucccaacgggcccuccuccccuccuugcaccgagauuaaucaaaggcucuuuucagagccaccaaaaaaaaaaaaaaaaaaaaaaaaaaaaaaaaaaaaaaaaaaaaaaaaaaaaaaaaaaaaaaaaagaauu

SEQ ID NO: 21753 - RNA, 1943 nt, Artificial Sequence
  mRNA product Design i-3 (hSL-A64-N5) comprising derived and/or modified sequence from LASV(Lassa virus/H.sapiens-wt/NGA/2015/ISTH_0543;Clade II)__AVO03640__SP-IgE_NP(2-569) (opt1)
aggagaaagcuuaccauggacuggaccuggauccuguuccucguggccgccgcgacccgcguccacagcagcgccuccaaggaggugaaguccuuccuguggacccagagccuccgccgggagcugagcggcuacugcuccaacaucaagcugcaggucgugaaggacgcccaggcgcuccugcacgggcuggacuucagcgagguguccaacguccagcgccucaugcggaagcagaagcgcgacgacagcgaccugaagcggcugcgcgaccucaaccaggccgugaacaaccugguggagcugaaguccacccagcagaaguccauccuccgggucggcacgcugaccagcgacgaccugcucacccuggccgccgaccuggagaagcucaagagcaaggugauccgcaccgagcggccccuguccagcgggguguacaugggcaaccuguccacgcagcagcucgagcagcgccgggcccugcugaacaugaucgggauggucggcggcgcgcaggggacccagccgggccgcgacgggguggugcgggucugggacgugaagaaccccgaccuccugaacaaccaguucggcaccaugcccagccugacccucgccugccugacgaagcagggccagguggaccugaacgacgccguccucgcccugaccgaccuggggcucaucuacaccgcgaaguaccccaacuccagcgaccuggaccgccugucccagagccacccgauccucaacaugguggacaccaagaaguccagccugaacaucagcggcuacaacuucucccugggggccgccgugaaggccggcgccugcaugcucgacgggggcaacaugcuggagacgaucaaggucacgccccagaccauggacggcauccucaagagcauccugaaggugaagaagucccuggggauguucgugagcgacacccccggcgagcggaaccccuacgagaacauccuguacaagaucugccucuccggggacggcuggccguacaucgcgagccgcaccuccaucgucgggcgggccugggagaacaccaccguggaccuggagagcgacggcaagccccagaaggugggcuccgccgggagcaacaagucccugcagagcgccggcuuccccaccgggcucacguacucccagcugaugacccugaaggacagcaugaugcagcuggaccccuccgccaagaccuggaucgacaucgagggccgcccggaggaccccgucgagaucgcgcucuaccagcccaugagcgggugcuacauccacuucuuccgggagcccaccgaccugaagcaguucaagcaggacgccaaguacucccacggcaucgacguggccgaccuguucccggcccagcccggccucacgagcgccgucaucgaggcgcugccccgcaacauggugcugaccugccaggggagcgacgacaucaagcggcuccuggacucccagggccgcaaggacaucaagcugaucgacaucgcccucagcaaggccgacucccgccgguucgagaacgccgugugggaccagugcaaggaccugugccacaugcacaccggggucgugguggagaagaagaagcgcggcgggaaggaggagaucacgccccacugcgcccugauggacugcaucauguacgacgcggccgucagcggcggccucaacaucccggugcugcgggccgugcugccccgcgacauggucuuccggaccuccagccccaagguggugcucugaggacuaguuauaagacugacuagcccgaugggccucccaacgggcccuccuccccuccuugcaccgagauuaaucaaaggcucuuuucagagccaccaaaaaaaaaaaaaaaaaaaaaaaaaaaaaaaaaaaaaaaaaaaaaaaaaaaaaaaaaaaaaaaaagaauu

SEQ ID NO: 21754 - RNA, 1943 nt, Artificial Sequence
  mRNA product Design i-3 (hSL-A64-N5) comprising derived and/or modified sequence from LASV(Lassa virus/H.sapiens-wt/NGA/2016/ISTH_0009;Clade II)__AVO03572__SP-IgE_NP(2-569) (opt1)
aggagaaagcuuaccauggacuggaccuggauccuguuccucguggccgccgcgacccgcguccacagcagcgccuccaaggaggugaaguccuuccuguggacccagagccuccgccgggagcugagcggcuacugcuccaacaucaagcugcaggucgugaaggacgcccaggcgcuccugcacgggcuggacuucagcgagguguccaacguccagcgccucaugcggaagcagaagcgcgacgacagcgaccugaagcggcugcgcgaccucaaccaggccgugaacaaccugguggagcugaaguccacccagcagaaguccauccuccgggucggcacgcugaccagcgacgaccugcucacccuggccgccgaccuggagaagcucaagagcaaggugauccgcaccgagcggccccuguccagcgggguguacaugggcaaccuguccacgcagcagcucgagcagcgccgggcccugcugaacaugaucgggauggucggcggcgcgcaggggacccagccgggccgcgacgggguggugcgggucugggacgugaagaaccccgaccuccugaacaaccaguucggcaccaugcccagccugacccucgccugccugacgaagcagggccagguggaccugaacgacgccguccucgcccugaccgaccuggggcucaucuacaccgcgaaguaccccaacuccagcgaccuggaccgccugucccagagccacccgauccucaacaugguggacaccaagaaguccagccugaacaucagcggcuacaacuucucccugggggccgccgugaaggccggcgccugcaugcucgacgggggcaacaugcuggagacgaucaaggucacgccccagaccauggacggcauccucaagagcauccugaaggugaagaagucccuggggauguucgugagcgacacccccggcgagcggaaccccuacgagaacauccuguacaagaucugccucuccggggacggcuggccguacaucgcgagccgcaccuccaucgucgggcgggccugggagaacaccaccguggaccuggagagcgacggcaagccccagaaggugggcuccgccgggagcaacaagucccugcagagcgccggcuuccccaccgggcucacguacucccagcugaugacccugaaggacagcaugaugcagcuggaccccuccgccaagaccuggaucgacaucgagggccgcccggaggaccccgucgagaucgcgcucuaccagcccaugagcgggugcuacauccacuucuuccgggagcccaccgaccugaagcaguucaagcaggacgccaaguacucccacggcaucgacguggccgaccuguucccggcccagcccggccucacgagcgccgucaucgaggcgcugccccgcaacauggugcugaccugccaggggagcgacgacaucaagcggcuccuggacucccagggccgccgcgacaucaagcugaucgacaucgcccucagcaaggccgacucccggcgcuucgagaacgccgugugggaccagugcaaggaccugugccacaugcacaccggggucgugguggagaagaagaagcggggcgggaaggaggagaucacgccccacugcgcccugauggacugcaucauguacgacgcggccgucagcggcggccucaacaucccggugcugcgcgccgugcugccccgggacauggucuuccgcaccuccagccccaagguggugcucugaggacuaguuauaagacugacuagcccgaugggccucccaacgggcccuccuccccuccuugcaccgagauuaaucaaaggcucuuuucagagccaccaaaaaaaaaaaaaaaaaaaaaaaaaaaaaaaaaaaaaaaaaaaaaaaaaaaaaaaaaaaaaaaaagaauu

SEQ ID NO: 21755 - RNA, 1943 nt, Artificial Sequence
  mRNA product Design i-3 (hSL-A64-N5) comprising derived and/or modified sequence from LASV(Lassa virus/H.sapiens-wt/NGA/2016/ISTH_0017;Clade II)__AVO03568__SP-IgE_NP(2-569) (opt1)
aggagaaagcuuaccauggacuggaccuggauccuguuccucguggccgccgcgacccgcguccacagcagcgccuccaaggaggugaaguccuuccuguggacccagagccuccgccgggagcugagcggcuacugcuccagcaucaagcugcaggucgugaaggacgcccaggcgcuccugcacgggcuggacuucuccgaggugagcaacguccagcgccucaugcggaagcagaagcgcgacgacuccgaccugaagcggcugcgcgaccucaaccaggccgugaacaaccugguggagcucaagagcacccagcagaaguccauccugcgggucggcacgcugaccagcgacgaccugcucacccuggccgccgaccuggagaagcucaaguccaaggugauccgcaccgagcggccccugagcuccgggguguacaugggcaaccugagcacgcagcagcucgagcagcgccgggcccugcugaacaugaucgggauggcgggcggcgcccaggggacccagccgggccgcgacggggucgugcgggugugggacgucaagaaccccgaccuccugaacaaccaguucggcaccaugcccucccugacccucgccugccugacgaagcagggccagguggaccugaacgacgccgugcucgcgcugaccgaccuggggcucaucuacaccgccaaguaccccaacagcuccgaccuggaccgccugagccagagccacccgauccucaacauggucgacaccaagaaguccagccugaacaucuccggcuacaacuucagccugggggccgccgugaaggccggcgcgugcaugcucgacgggggcaacaugcuggagacgaucaaggugacgccccagaccauggacggcauccugaaguccauccucaaggucaagcggagccuggggauguucguguccgacgcccccggcgagcgcaaccccuacgagaacauccuguacaagaucugccucagcggggacggcuggccguacaucgccucccggaccagcaucguggggcgcgccugggagaacaccaccgucgaccuggaguccgacggcaagccccagaaggugggcgccaccgggagcaacaagucccugcagagcgcgggcuuccccaccgggcucacguacucccagcugaugacccugaaggacagcaugaugcagcuggaccccuccgccaagaccuggaucgacaucgagggccggccggaggaccccguggaggucgcccucuaccagcccgugagcgggugcuacauccacuucuuccgcgagcccaccgaccugaagcaguucaagcaggacgccaaguacucccacggcaucgacgucgccgaccuguucccggcgcagcccggccucacgagcgccgugaucgaggcccugccccggaacauggugcugaccugccaggggagcgacgacaucaagaagcuccuggacucccagggccgcaaggacaucaagcugaucgacaucgcccucagcaaggccgacucccgccgguucgagaacgcggucugggaccagugcaaggaccugugccacaugcacaccggggugguggucgagaagaagaagcgcggcgggaaggaggagaucacgccccacugcgcccugauggacugcaucauguacgacgccgccgugagcggcggccucaacaucccggugcugcgggcgguccugccccgcgacaugguguuccggaccuccagccccaaggugguccucugaggacuaguuauaagacugacuagcccgaugggccucccaacgggcccuccuccccuccuugcaccgagauuaaucaaaggcucuuuucagagccaccaaaaaaaaaaaaaaaaaaaaaaaaaaaaaaaaaaaaaaaaaaaaaaaaaaaaaaaaaaaaaaaaagaauu

SEQ ID NO: 21756 - RNA, 1943 nt, Artificial Sequence
  mRNA product Design i-3 (hSL-A64-N5) comprising derived and/or modified sequence from LASV(Lassa virus/H.sapiens-wt/NGA/2018/ISTH_0959;Clade II)__AVV65100__SP-IgE_NP(2-569) (opt1)
aggagaaagcuuaccauggacuggaccuggauccuguuccucguggccgccgcgacccgcguccacagcagcgccuccaaggaggugaaguccuuccuguggacccagagccuccgccgggagcugagcggcuacugcuccaacaucaagcugcaggucgugaaggacgcccaggcgcuccugcacgggcuggacuucagcgagguguccaacguccagcgccucaugcggaagcagaagcgcgacgacagcgaccugaagcggcugcgcgaccucaaccaggccgugaacaaccugguggagcugaaguccacccagcagaaguccauccuccgggucggcacccugaccagcgacgaccugcucacccuggccgccgaccuggagaagcucaagagcaaggugauccgcaccgagcggccccuguccagcgggguguacaugggcaaccuguccacgcagcagcucgagcagcgccgggcccugcugaaccucaucgggauggucggcggcgcgcaggggacccagccgggccgcgacgggguggugcgggucugggacgugaagaaccccgaccugcugaacaaccaguucggcaccaugcccagccucacccuggccugccugacgaagcagggccagguggaccucaacgacgucgugcuggcccugaccgaccucgggcugaucuacaccgccaaguaccccaacuccagcgaccuggaccgccucucccagagccacccgauccugaacaugguggacaccaagaaguccagccugaacaucagcggcuucaacuucucccucggggcggccgucaaggccggcgccugcaugcuggacgggggcaacaugcuggagacgaucaaggugacgccccagaccauggacggcauccucaagagcauccugaaggugaagaagucccuggggauguucgucagcgacacccccggcgagcggaaccccuacgagaacauccucuacaagaucugccuguccggggacggcuggccguacaucgccagccgcaccuccaucguggggcgggcgugggagaacaccaccguggaccuggagagcgacggcaagccccacaaggucggcaccgccggguccaacaagagccuccaguccgccggcuuccccacggggcugaccuacagccagcugaugacccugaaggacuccaugaugcagcucgaccccagcgccaagaccuggaucgacaucgagggccgcccggaggaccccguggagaucgcccuguaccagcccauguccgggugcuacauccacuucuuccgggagcccacggaccugaagcaguucaagcaggacgcgaaguacagccacggcaucgacgucgccgaccucuucccggcccagcccggccugaccuccgccgugaucgaggcccugccccgcaacauggugcugaccugccaggggagcgacgacaucaagcggcuccuggacagccagggccgcaaggacaucaagcucaucgacaucgcgcuguccaagaccgacagccgccgguucgagaacgccgucugggaccagugcaaggaccugugccacaugcacacgggggugguggucgagaagaagaagcgcggcgggaaggaggagaucacgccccacugcgcccucauggacugcaucauguacgacgccgccguguccggcggccugaacaucccggugcugcgggcgguccucccccgcgacaugguguuccggaccagcucccccaaggugguccugugaggacuaguuauaagacugacuagcccgaugggccucccaacgggcccuccuccccuccuugcaccgagauuaaucaaaggcucuuuucagagccaccaaaaaaaaaaaaaaaaaaaaaaaaaaaaaaaaaaaaaaaaaaaaaaaaaaaaaaaaaaaaaaaaagaauu

SEQ ID NO: 21757 - RNA, 1943 nt, Artificial Sequence
  mRNA product Design i-3 (hSL-A64-N5) comprising derived and/or modified sequence from LASV(LASV003-NIG-2008;Clade II)__AIT17581__SP-IgE_NP(2-569) (opt1)
aggagaaagcuuaccauggacuggaccuggauccuguuccucguggccgccgcgacccgcguccacagcagcgccuccaaggaggugaaguccuuccuguggacccagagccuccgccgggagcugagcggcuacugcuccagcaucaagcugcaggucgugaaggacgcccaggcgcuccugcacgggcuggacuucuccgaggugagcaacguccagcgccucaugcggaagcagaagcgcgacgacuccgaccugaagcggcugcgcgaccucaaccaggccgugaacaaccugguggagcucaagagcacccagcagaaguccguccugcgggugggcacccugaccagcgacgaccugcucacccuggccgccgaccuggagaagcucaaguccaaggugauccgcaccgagcggccccugagcuccggggucuacaugggcaaccugagcgcccagcagcucgagcagcgccggacgcugcugaacaugaucgggauggugggcggcgcgcaggggacccagccgggccgcgacggggugguccgggugugggacgugaagaaccccgaccuccugaacaaccaguucggcaccaugcccucccugacccucgccugccugacgaagcaggggcaggucgaccugaacgacguggugcucgcccugaccgaccugggccucaucuacaccgccaaguaccccaacagcuccgaccuggaccgccugagccagagccacccgauccucuccauggucgacaccaagaaguccagccugaacaucagcggcuacaacuucucccugggggcggccgugaaggccggcgccugcaugcucgacgggggcaacaugcuggagacgaucaaggugacgccccagaccauggacggcauccucaagagcauccugaaggucaagaagucccuggggauguucgugagcgacacccccggcgagcggaaccccuacgagaacauccuguacaagaucugccucuccggggacggcuggccguacaucgccagccgcaccuccaucguggggcgggcgugggagaacaccaccgucgaccuggagagcgacggcaagccccagaaggugggcaccgccggguccaacaagagccugcaguccgccggcuuccccacggggcucaccuacagccagcugaugacccugaaggacuccaugaugcagcuggaccccagcgccaagaccuggaucgacaucgagggccgcccggaggaccccgucgagaucgcccucuaccagcccauguccgggugcuacauccacuucuuccgggagcccacggaccugaagcaguucaagcaggacgcgaaguacagccacggcaucgacgugaccgaccuguucccggcccagcccggccucaccagcgccgugaucgaggcccugccccgcaacaugguccugaccugccagggguccgacgacaucaagcggcuccuggacagccagggccgccgcgacaucaagcugaucgacaucgcccucuccaaggcggacagccggcgcuucgagaacgccgugugggaccagugcaaggaccugugccacaugcacacggggguggucguggagaagaagaagcggggcgggaaggaggagaucacgccccacugcgcccugauggacugcaucauguacgacgccgccguguccggcggccucaacaucccgguccugcgcgcggugcugccccgggacaugguguuccgcaccagcucccccaaggucgugcucugaggacuaguuauaagacugacuagcccgaugggccucccaacgggcccuccuccccuccuugcaccgagauuaaucaaaggcucuuuucagagccaccaaaaaaaaaaaaaaaaaaaaaaaaaaaaaaaaaaaaaaaaaaaaaaaaaaaaaaaaaaaaaaaaagaauu

SEQ ID NO: 21758 - RNA, 1943 nt, Artificial Sequence
  mRNA product Design i-3 (hSL-A64-N5) comprising derived and/or modified sequence from LASV(LASV035-NIG-2009;Clade II)__AIT17589__SP-IgE_NP(2-569) (opt1)
aggagaaagcuuaccauggacuggaccuggauccuguuccucguggccgccgcgacccgcguccacagcagcgccuccaaggaggugaaguccuuccuguggacccagagccuccgccgggagcugagcggcuacugcuccagcaucaagcugcaggucgugaaggacgcccaggcgcuccugcacgggcuggacuucuccgaggugagcaacguccagcgccucaugcggaagcagaagcgcgacgacuccgaccugaagcggcugcgcgaccucaaccaggccgugaacaaccugguggagcucaagagcacccagcagaaguccauccugcgggucggcacgcugaccagcgacgaccugcucacccuggccgccgaccuggagaagcucaaguccaaggugauccgcaccgagcggccccugagcuccgggguguacaugggcaaccugagcgcccagcagcucgagcagcgccgggcgcugcugaacaugaucgggauggucggcggcgcccaggggacgcagccgggccgcgacgggguggugcgggucugggacgugaagaaccccgaccuccugaacaaccaguucggcaccaugcccucccugacccucgccugccugaccaagcagggccagguggaccugaacgacgccguccucgcgcugacggaccuggggcucaucuacaccgccaaguaccccaacagcuccgaccuggaccgccugagccagagccacccgauccucaacaugguggacaccaagaaguccagccugaacaucuccggcuacaacuucagccugggggccgccgugaaggccggcgcgugcaugcucgacgggggcaacaugcuggagaccaucaaggucacgccccagaccauggacggcauccugaaguccauccucaaggugaagcggagccuggggauguucguguccgacacccccggcgagcgcaaccccuacgagaacauccuguacaagaucugccucagcggggacggcuggccguacaucgccucccggaccagcaucgucgggcgcgccugggagaacacgaccguggaccuggaguccgacggcaagccccagaaggugggcaccaccgggagcaacaagucccugcagagcgccggcuuccccacggggcucaccuacucccagcugaugacccugaaggacagcaugaugcagcuggaccccuccgccaagaccuggaucgacaucgagggccggccggaggaccccgucgagaucgcgcucuaccagcccaugagcgggugcuacauccacuucuuccgcgagcccacggaccugaagcaguucaagcaggacgccaaguacucccacggcaucgacguggccgaccuguucccggcccagcccggccucaccagcgccgucaucgaggcgcugccccggaacauggugcugaccugccaggggagcgacgacaucaagaagcuccuggacucccagggccgccgcgacaucaagcugaucgacaucgcccucagcaaggccgacucccggaaguucgagaacgccgugugggaccagugcaaggaccugugccacaugcacaccggggucgugguggagaagaagaagcgcggcgggaaggaggagaucacgccccacugcgcccugauggacugcaucauguacgacgcggccgucagcggcggccucaacaucccggugcugcgggccgugcugccccgcgacauggucuuccggaccuccagccccaagguggugcucugaggacuaguuauaagacugacuagcccgaugggccucccaacgggcccuccuccccuccuugcaccgagauuaaucaaaggcucuuuucagagccaccaaaaaaaaaaaaaaaaaaaaaaaaaaaaaaaaaaaaaaaaaaaaaaaaaaaaaaaaaaaaaaaaagaauu

SEQ ID NO: 21759 - RNA, 1943 nt, Artificial Sequence
  mRNA product Design i-3 (hSL-A64-N5) comprising derived and/or modified sequence from LASV(LASV1000-NIG-2009;Clade II)__AIT17783__SP-IgE_NP(2-569) (opt1)
aggagaaagcuuaccauggacuggaccuggauccuguuccucguggccgccgcgacccgcguccacagcagcgccuccaaggaggugaaguccuuccuguggacccagagccuccgccgggagcugagcggcuacugcuccaacaucaagcugcaggucgugaaggacgcccaggcgcuccugcacgggcuggacuucagcgagguguccaacguccagcgccucaugcggaagcagaagcgcgacgacagcgaccugaagcggcugcgcgaccucaaccaggccgugaacaaccugguggagcugaaguccacccagcagaaguccauccuccgggucggcacgcugaccagcgacgaccugcucacccuggccgccgaccuggagaagcucaagagcaaggugauccgcaccgagcggccccuguccagcgggguguacaugggcaaccuguccacgcagcagcucgagcagcgccgggcccugcugaacaugaucgggauggucggcggcgcgcaggggacccagccgggccgcgacgggguggugcgggucugggacgugaagaaccccgaccuccugaacaaccaguucggcaccaugcccagccugacccucgccugccugacgaagcagggccagguggaccugaacgacgucgugcucgcccugaccgaccuggggcucaucuacaccgccaaguaccccaacuccagcgaccuggaccgccugucccagagccacccgauccucaacaugguggacaccaagaaguccagccugaacaucagcggcuacaacuucucccugggggcggccgucaaggccggcgccugcaugcucgacgggggcaacaugcuggagacgaucaaggugacgccccagaccauggacggcauccucaagagcauccugaaggugaagaagucccuggggauguucgucagcgacacccccggcgagcggaaccccuacgagaacauccuguacaagaucugccucuccggggacggcuggccguacaucgccagccgcaccuccaucguggggcgggcgugggagaacaccaccguggaccuggagagcgacggcaagccccagaaggucggcaccgccggguccaacaagagccugcaguccgccggcuuccccacggggcucaccuacagccagcugaugacccugaaggacuccaugaugcagcuggaccccagcgccaagaccuggaucgacaucgagggccgcccggaggaccccguggagaucgcccucuaccagcccgucuccgggugcuacauccacuucuuccgggagcccacggaccugaagcaguucaagcaggacgcgaaguacagccacggcaucgacguggccgaccuguucccggcccagcccggccucaccuccgccgugaucgaggcccugccccgcaacaugguccugaccugccaggggagcgacgacaucaagcggcuccuggacagccagggccgccgcgacaucaagcugaucgacaucgcgcucuccaaggccgacagccggcgcuucgagaacgccgugugggaccagugcaaggaccugugccacaugcacaccgggguggucguggagaagaagaagcggggcgggaaggaggagaucacgccccacugcgcccugauggacugcaucauguacgacgccgcgguguccggcggccucaacaucccgguccugcgcgccgugcugccccgggacaugguguuccgcaccagcucccccaaggucgugcucugaggacuaguuauaagacugacuagcccgaugggccucccaacgggcccuccuccccuccuugcaccgagauuaaucaaaggcucuuuucagagccaccaaaaaaaaaaaaaaaaaaaaaaaaaaaaaaaaaaaaaaaaaaaaaaaaaaaaaaaaaaaaaaaaagaauu

SEQ ID NO: 21760 - RNA, 1943 nt, Artificial Sequence
  mRNA product Design i-3 (hSL-A64-N5) comprising derived and/or modified sequence from LASV(LASV221-NIG-2010;Clade II)__AIT17625__SP-IgE_NP(2-569) (opt1)
aggagaaagcuuaccauggacuggaccuggauccuguuccucguggccgccgcgacccgcguccacagcagcgccuccaaggaggugaaguccuuccuguggacccagagccuccgccgggagcugagcggcuacugcuccagcaucaagcugcaggucgugaaggacgcccaggcgcuccugcacgggcuggacuucuccgaggugagcaacguccagcgccucaugcggaagcagcgccgggacgacuccgaccugaagcgccugcgggaccucaaccaggccgugaacaaccugguggagcucaagagcacccagcagaaguccauccugcgcgucggcacgcugaccagcgacgaccugcucacccuggccgccgaccuggagaagcucaaguccaaggugauccggaccgagcgcccccugagcuccgggguguacaugggcaaccugagcacgcagcagcucgagcagcggcgcgcccugcugaacaugaucgggauggucggcggcgcgcaggggacccagccgggccgggacgggguggugcgcgucugggacgugaagaaccccgaccuccugaacaaccaguucggcaccaugcccucccugacccucgccugccugacgaagcagggccagguggaccugaacgacgccguccucgcccugaccgaccuggggcucaucuacaccgcgaaguaccccaacagcuccgaccuggaccggcugagccagagccacccgauccucaacaugguggacaccaagaaguccagccugaacaucuccggcuacaacuucagccugggggccgccgugaaggccggcgccugcaugcucgacgggggcaacaugcuggagacgaucaaggucacgccccagaccguggacggcauccugaaguccauccucaaggugaagcgcagccuggggauguucgucuccgacacccccggcgagcggaaccccuacgagaacauccuguacaagaucugccucagcggggacggcuggccguacaucgcgucccgcaccagcaucguggggcgggccugggagaacaccaccguggaccuggaguccgacggcaagccccagaaggucggcaccgccgggagcaacaagucccugcagagcgccggcuuccccacggggcucaccuacucccagcugaugacccugaaggacagcaugaugcagcuggaccccuccgccaagaccuggaucgacaucgagggccgcccggaggaccccguggagaucgcgcucuaccagcccaugagcgggugcuacauccacuucuuccgggagcccacggaccugaagcaguucaagcaggacgccaaguacucccacggcaucgacgucgccgaccuguucccggcccagcccggccucaccagcgccgugaucgaggcgcugccccgcaacauggugcugaccugccaggggagcgacgacaucaagcgccuccuggacucccagggccggcgcgacaucaagcugaucgacaucgcccucagcaaggccgacucccggaaguucgagaacgccgucugggaccagugcaaggaccugugccacaugcacaccggggugguggucgagaagaagaagcgcggcgggaaggaggagaucacgccccacugcgcccugauggacugcaucauguacgacgcggccgugagcggcggccucaacaucccggugcugcgggccguccugccccgcgacaugguguuccggaccuccagccccaaggugguccucugaggacuaguuauaagacugacuagcccgaugggccucccaacgggcccuccuccccuccuugcaccgagauuaaucaaaggcucuuuucagagccaccaaaaaaaaaaaaaaaaaaaaaaaaaaaaaaaaaaaaaaaaaaaaaaaaaaaaaaaaaaaaaaaaagaauu

SEQ ID NO: 21761 - RNA, 1943 nt, Artificial Sequence
  mRNA product Design i-3 (hSL-A64-N5) comprising derived and/or modified sequence from LASV(LASV237-NIG-2010;Clade II)__AIT17639__SP-IgE_NP(2-569) (opt1)
aggagaaagcuuaccauggacuggaccuggauccuguuccucguggccgccgcgacccgcguccacagcagcgccuccaaggaggugaaguccuuccuguggacccagagccuccgccgggagcugagcggcuacugcuccaacaucaagcugcaggucgugaaggacgcccaggcgcuccugcacgggcuggacuucagcgagguguccaacguccagcgccucaugcggaagcagaagcgcgacgacagcgaccugaagcggcugcgcgaccucaaccaggccgugaacaaccugguggagcugaaguccacccagcagaaguccauccuccgggucggcacccugaccagcgacgaccugcucacccuggccgccgaccuggagaagcucaagagcaaggugauccgcaccgagcggccccuguccagcgggguguacaugggcaaccuguccacgcagcagcucgagcagcgccgggcccugcugaacaugaucgggauggucggcggcgcgcaggggacccagccgggccgcgacgggguggugcgggucugggacgugaagaaccccgaccuccugaacaaccaguucggcaccaugcccagccugacccucgccugccugacgaagcagggccagguggaccugaacgacgccguccucgcccugaccgaccuggggcucaucuacaccgcgaaguaccccaacuccagcgaccuggaccgccugucccagagccacccgauccucaacaugguggacaucaagaaguccagccugaacaucagcggcuacaacuucucccugggggccgccgugaaggccggcgccugcaugcucgacgggggcaacaugcuggagaccaucaaggucacgccccagaccauggacggcauccucaagagcauccugaaggugaagcggucccuggggauguucgugagcgacacccccggcgagcgcaaccccuacgagaacauccuguacaagaucugccucuccggggacggcuggccguacaucgcgagccggaccuccaucgucgggcgcgccugggagaacacgaccguggaccuggagagcgacggcaagccccagaaggugggcuccgccgggagcaacaagucccugcagagcgccggcuuccccaccgggcucaccuacucccagcugaugacgcugaaggacagcaugaugcagcuggaccccuccgccaagaccuggaucgacaucgagggccggccggaggaccccgucgagaucgcgcucuaccagcccaugagcgggugcuacauccacuucuuccgcgagcccaccgaccugaagcaguucaagcaggacgccaaguacucccacggcaucgacguggccgaccuguucccggcccagcccggccucaccagcgccgucaucgaggcgcugccccggaacauggugcugacgugccaggggagcgacgacaucaagcgccuccuggacucccagggccgccgggacaucaagcugaucgacaucgcccucagcaaggccgacucccgccgguucgagaacgccgugugggaccagugcaaggaccugugccacaugcacaccggggucgugguggagaagaagaagcgcggcgggaaggaggagaucacgccccacugcgcccugauggacugcaucauguacgacgcggccgucagcggcggccucaacaucccggugcugcgggccgugcugccccgcgacauggucuuccggaccuccagccccaagguggugcucugaggacuaguuauaagacugacuagcccgaugggccucccaacgggcccuccuccccuccuugcaccgagauuaaucaaaggcucuuuucagagccaccaaaaaaaaaaaaaaaaaaaaaaaaaaaaaaaaaaaaaaaaaaaaaaaaaaaaaaaaaaaaaaaaagaauu

SEQ ID NO: 21762 - RNA, 1943 nt, Artificial Sequence
  mRNA product Design i-3 (hSL-A64-N5) comprising derived and/or modified sequence from LASV(LASV253-NIG-2011;Clade II)__AIT17671__SP-IgE_NP(2-569) (opt1)
aggagaaagcuuaccauggacuggaccuggauccuguuccucguggccgccgcgacccgcguccacagcagcgccuccaaggaggugaaguccuuccuguggacccagagccuccgccgggagcugagcggcuacugcuccagcaucaagcugcaggucgugaaggacgcccaggcgcuccugcacgggcuggacuucuccgaggugagcaacguccagcgccucaugcggaagcagaagcgcgacgacuccgaccugaagcggcugcgcgaccucaaccaggccgugaacaaccugguggagcucaagagcacccagcagaaguccguccugcgggugggcacccugaccagcgacgaccugcucacccuggccgccgaccuggagaagcucaaguccaaggugauccgcaccgagcggccccugagcuccggggucuacaugggcaaccugagcacgcagcagcucgagcagcgccgggcccugcugaacaugaucgggauggugggcggcgcgcaggggacccagccgggccgcgacggggugguccgggugugggacgugaagaaccccgaccuccugaacaaccaguucggcaccaugcccucccugacccucgccugccugacgaagcaggggcaggucgaccugaacgacguggugcucgcccugaccgaccugggccucaucuacaccgccaaguaccccaacagcuccgaccuggaccgccugagccagagccacccgauccucaacauggucgacaccaagaaguccagccugaacaucuccggcuacaacuucagccugggggcggccgugaaggccggcgccugcaugcucgacgggggcaacaugcuggagacgaucaaggugacgccccagaccauggacggcauccugaaguccauccucaaggucaagaagucccuggggauguucgugagcgacacccccggcgagcggaaccccuacgagaacauccuguacaagaucugccucagcggggacggcuggccguacaucgccucccgcaccagcaucguggggcgggcgugggagaacaccaccgucgaccuggaguccgacggcaagccccagaaggugggcaccgccgggagcaacaagucccugcagagcgccggcuuccccacggggcucaccuacucccagcugaugacccugaaggacagcaugaugcagcuggaccccuccgccaagaccuggaucgacaucgagggccgcccggaggaccccgucgagaucgcccucuaccagcccaugagcgggugcuacauccacuucuuccgggagcccacggaccugaagcaguucaagcaggacgcgaaguacucccacggcaucgacgugaccgaccuguucccggcccagcccggccucaccagcgccgugaucgaggcccugccccgcaacaugguccugaccugccaggggagcgacgacaucaagcggcuccuggacucccagggccgccgcgacaucaagcugaucgacaucgcccucagcaaggcggacucccggcgcuucgagaacgccgugugggaccagugcaaggaccugugccacaugcacacggggguggucguggagaagaagaagcggggcgggaaggaggagaucacgccccacugcgcccugauggacugcaucauguacgacgccgccgugagcggcggccucaacaucccgguccugcgcgcggugcugccccgggacaugguguuccgcaccuccagccccaaggucgugcucugaggacuaguuauaagacugacuagcccgaugggccucccaacgggcccuccuccccuccuugcaccgagauuaaucaaaggcucuuuucagagccaccaaaaaaaaaaaaaaaaaaaaaaaaaaaaaaaaaaaaaaaaaaaaaaaaaaaaaaaaaaaaaaaaagaauu

SEQ ID NO: 21763 - RNA, 1943 nt, Artificial Sequence
  mRNA product Design i-3 (hSL-A64-N5) comprising derived and/or modified sequence from LASV(LASV254-NIG-2011;Clade II)__AIT17675__SP-IgE_NP(2-569) (opt1)
aggagaaagcuuaccauggacuggaccuggauccuguuccucguggccgccgcgacccgcguccacagcagcgccuccaaggaggugaaguccuuccuguggacccagagccuccgccgggagcugagcggcuacugcuccagcaucaagcugcaggucgugaaggacgcccaggcgcuccugcacgggcuggacuucuccgaggugagcaacguccagcgccucaugcggaagcagaagcgcgacgacuccgaccugaagcggcugcgcgaccucaaccaggccgugaacaaccugguggagcucaagagcacccagcagaaguccguccugcgggugggcacgcugaccagcgacgaccugcucacccuggccgccgaccuggagaagcucaaguccaaggugauccgcaccgagcggccccugagcuccggggucuacaugggcaaccugagcacgcagcagcucgagcagcgccgggcccugcugaacaugaucgggauggugggcggcgcgcaggggacccagccgggccgcgacggggugguccgggugugggacgugaagaaccccgaccuccugaacaaccaguucggcaccaugcccucccugacccucgccugccugacgaagcaggggcaggucgaccugaacgacgccgugcucgcccugaccgaccugggccucaucuacaccgcgaaguaccccaacagcuccgaccuggaccgccugagccagagccacccgauccucaacaugguggacaccaagaaguccagccugaacaucuccggcuacaacuucagccugggggccgccgucaaggccggcgccugcaugcucgacgggggcaacaugcuggagacgaucaaggugacgccccagaccauggacggcauccugaaguccauccucaaggugaagaagucccuggggauguucgucagcgacacccccggcgagcggaaccccuacgagaacauccuguacaagaucugccucagcggggacggcuggccguacaucgcgucccgcaccagcaucguggggcgggccugggagaacaccaucguggaccuggaguccgacggcaagccccagaaggucggcaccgccgggagcaacaagucccugcagagcgccggcuuccccaccgggcucacguacucccagcugaugacccugaaggacagcaugaugcagcuggaccccuccgccaagaccuggaucgacaucgagggccgcccggaggaccccguggagaucgcgcucuaccagcccaugagcgggugcuacauccacuucuuccgggagcccaccgaccugaagcaguucaagcaggacgccaaguacucccacggcaucgacgucgccgaccuguucccggcccagcccggccucacgagcgccgugaucgaggcgcugccccgcaacauggugcugaccugccaggggagcgacgacaucaagcggcuccuggacucccagggccgccgcgacaucaagcugaucgacaucgcccucagcaaggccgacucccggcgcuucgagaacgccgucugggaccagugcaaggaccugugccacaugcacaccggggugguggucgagaagaagaagcggggcgggaaggaggagaucacgccccacugcgcccugauggacugcaucauguacgacgcggccgugagcggcggccucaacaucccggugcugcgcgccguccugccccgggacaugguguuccgcaccuccagccccaaggugguccucugaggacuaguuauaagacugacuagcccgaugggccucccaacgggcccuccuccccuccuugcaccgagauuaaucaaaggcucuuuucagagccaccaaaaaaaaaaaaaaaaaaaaaaaaaaaaaaaaaaaaaaaaaaaaaaaaaaaaaaaaaaaaaaaaagaauu

SEQ ID NO: 21764 - RNA, 1943 nt, Artificial Sequence
  mRNA product Design i-3 (hSL-A64-N5) comprising derived and/or modified sequence from LASV(Nig08-04;Clade II)__ADU56611__SP-IgE_NP(2-569) (opt1)
aggagaaagcuuaccauggacuggaccuggauccuguuccucguggccgccgcgacccgcguccacagcagcgccuccaaggaggugaaguccuuccuguggacccagagccuccgccgggagcugagcggcuacugcuccaacaucaagcugcaggucgugaaggacgcccaggcgcuccugcacgggcuggacuucagcgagguguccaacguccagcgccucaugcggaagcagaagcgcgacgacggcgaccugaagcggcugcgcgaccucaaccaggccgugaacaaccugguggagcucaagagcacccagcagaaguccguccugcggguggggacccugaccagcgacgaccugcucacccuggccgccgaccuggagaagcucaaguccaaggugauccgcaccgagcggccccugagcuccggcgucuacauggggaaccugagcacgcagcagcucgagcagcgcaaggcccugcuguccaugaucggcauggugggcggggcgcagggcacccagccggggcgggacggcgugguccgcgugugggacgugaagaaccccgaccuccugaacaaccaguucgggaccaugcccagccugacccucgccugccugacgaagcagggccaggucgaccugaacgacgccgugcucgcccugaccgaccugggccucaucuacaccgcgaaguaccccaacuccagcgaccuggaccggcugucccagagccacccgauccucaacaugguggacaccaagaaguccagccugaacaucagcggguacaacuucucccugggcgccgccgucaaggccggggccugcaugcucgacggcggcaacaugcuggagacgaucaaggugacgccccagaccauggacgggauccucaagagcauccugaaggugaagcgcucccugggcauguucgucagcgacacccccggggagcggaaccccuacgagaacauccuguacaagaucugccucuccggcgacggguggccguacaucgcgagccgcaccuccaucgugggccgggccugggagaacaccaccguggaccuggagagcgacggcaagccccagaaggucgggaccgccggcuccaacaagagccugcaguccgccggguuccccacgggccucaccuacagccagcugaugacccugaaggacuccaugaugcagcuggaccccagcgccaagaccuggaucgacaucgaggggcgcccggaggaccccguggagaucgcgcucuaccagcccauguccggcugcuacauccacuucuuccgggagcccacggaccugaagcaguucaagcaggacgccaaguacagccacggcaucgacgucaccgaccuguucuccgcccagccggggcucaccagcgccgugaucgaggcccugccccgcaacauggugcugaccugccagggcagcgacgacaucaagaagcuccuggacucccaggggcggcgcgacaucaagcugaucgacaucagccucaacaaggcggacucccgccgguucgagaacgccgucugggaccagugcaaggaccugugccacaugcacacgggcgugguggucgagaagaagaagcgcgggggcaaggaggagaucacgccccacugcgcccugauggacugcaucauguucgacgccgccgugagcggcgggcucaacauccccauccugcgggcggugcugccgcgcgacauggucuuccggaccuccagccccaagguggugcucugaggacuaguuauaagacugacuagcccgaugggccucccaacgggcccuccuccccuccuugcaccgagauuaaucaaaggcucuuuucagagccaccaaaaaaaaaaaaaaaaaaaaaaaaaaaaaaaaaaaaaaaaaaaaaaaaaaaaaaaaaaaaaaaaagaauu

SEQ ID NO: 21765 - RNA, 1946 nt, Artificial Sequence
  mRNA product Design i-3 (hSL-A64-N5) comprising derived and/or modified sequence from LASV(GA391;Clade III)__AAA46284__SP-IgE_NP(2-570) (opt1)
aggagaaagcuuaccauggacuggaccuggauccuguuccucguggccgccgcgacccgcguccacagcagcgccuccaaggaggugcgcagcugccuguggacccagucccuccggcgcgagcugagcggcuacugcuccaacaucaagcugcaggucgugaaggacgcccaggcgcuccugcacgggcuggacuucagcgagguguccaacguccagcggcucaugcgcaagcagaagcgggacgacggcgaccugaagcgccugcgggaccucaaccaggccgugaacaaccugguggagcugaaguccacccagcagaaguccguccuccgcguggggacgcugagcuccgacgaccugcucauccuggccgccgaccuggagaagcucaagagcaaggugacccggaccgagcgcccccuguccagcggcgucuacauggggaaccuguccagccagcagcucgaccagcggcgcgcccugcugaacaugaucggcaugaccggcguguccgggggcgggaagggcgcgagcaacgggaucgugcgggucugggacgugaagaacgccgagcuccugaacaaccaguucggcacgaugccgucccugacccucgccugccugaccaagcagggccagguggaccugaacgacgccguccaggcgcucaccgaccuggggcugaucuacacggccaaguaccccaacagcagcgaccucgaccgccugucccagagccaccccauccugaacaugaucgacaccaagaaguccagccucaacaucuccggcuacaacuucagccugggggccgccgugaaggccggcgcgugcaugcuggacggcgggaacaugcucgagaccaucaaggugagcccccagaccauggacggcauccucaagagcauccugaaggucaagaagucccuggggauguucgugagcgacacgccgggcgagcggaaccccuacgagaacauccuguacaagaucugccuguccggggacggcuggagcuacaucgccucccgcaccagcaucgugggccgggccugggagaacaccgucguggaccucgagcaggacaacaagccccagaagaucgggaacggcggguccaacaagagccugcaguccgccggcuucgccgcggggcugaucuacagccagcucaugacccugaaggacuucaagugcuucaaccugauccccaacgccaagacguggauggacaucgagggccgcccggaggaccccguggagaucgcccuguaccagcccuccagcggcugcuacguccacuucuuccgggagcccaccgaccucaagcaguucaagcaggacgccaaguacagccacgggcgcgacgugaccgaccuguucgccgcgcagccgggccugaccuccgccgucaucgaggcccucccccggaacauggugaucacgugccaggggagcgaggacauccgcaagcugcuggagucccagggccgccgggacaucaagcucaucgacaucacccugagcaaggccgacucccgcaaguucgagaacgccgugugggaccaguucaaggaccugugccacaugcacaccggggucgugguggagaagaagaagcggggcggcaaggaggagaucacgccccacugcgcgcucauggacugcaucauguucgacgccgccgucagcgggggccuggacgccaaggugcugcgcgugguccucccccgggacaugguguuccgcaccuccaccccgaaggugguccugugaggacuaguuauaagacugacuagcccgaugggccucccaacgggcccuccuccccuccuugcaccgagauuaaucaaaggcucuuuucagagccaccaaaaaaaaaaaaaaaaaaaaaaaaaaaaaaaaaaaaaaaaaaaaaaaaaaaaaaaaaaaaaaaaagaauu

SEQ ID NO: 21766 - RNA, 1943 nt, Artificial Sequence
  mRNA product Design i-3 (hSL-A64-N5) comprising derived and/or modified sequence from LASV(Nig08-A19;Clade III)__ADU56619__SP-IgE_NP(2-569) (opt1)
aggagaaagcuuaccauggacuggaccuggauccuguuccucguggccgccgcgacccgcguccacagcagcgccuccaaggaggugaaguccuuccuguggacccagucccuccgccgggagcugagcggcuacugcuccaacaucaagcugcaggucgugaaggacgcccaggcgcuccugcacgggcuggacuucagcgagguguccaacguccagcgccucaugcggaagcagaagcgcgacgacggcgaccugaagcggcugcgcgaccucaaccaggccgugaacaaccugguggagcucaagagcacccagcagaaguccguccugcggguggggacccugagcuccgacgaccugcucgugcuggccgccgaccuggagaagcucaagagcaaggucgugcgcaccgagcggccccuguccagcggcaucuacauggggaaccuguccagccagcagcucgaccagcgcaaggcccugcugaacaugaucggcaugaccggcgggaacggcgggcggaacaccacguccgacggcaucgugcgcgucugggacgugaagaacgcggagcuccugaacaaccaguucgggaccaugccgagccugacccucgccugccugaccaagcagggccagguggaccugaacgacgccguccaggcccucacggaccugggccugaucuacaccgcgaaguaccccaacuccagcgaccucgaccggcuggcccagagccaccccauccugaacaugaucgacaccaagaaguccagccucaacaucuccggguacaacuucagccugggcgccgccgugaaggccggggcgugcaugcuggacggcggcaacaugcucgagaccaucaaggugagcccccagacgauggacgggauccucaagagcauccugaaggucaagcgcucccugggcauguucaucagcgacaccccgggggagcggaaccccuacgagaacauccuguacaagaucugccuguccggcgacggguggcccuacaucgccagccgcaccuccaucgugggccgggccugggagaacaccguggucgaccucgagagcgacaacaagccccagaagacgggcaacgggggcuccaacaagagccugcaguccgccggguucgccgcgggccugaccuacagccagcucaugacccugaaggacuccaugcugcagcuggacccgaacgccaagaccuggauggacaucgaggggcgccccgaggaccccguggagaucgcccucuaccagcccagcuccggcugcuacauccacuucuuccgggagccgacggaccugaagcaguucaagcaggacgccaaguacagccacggcaucgacgugaccgaccuguucgccgcgcagcccgggcucaccagcgccgucaucgaggcccugccccgcaacauggugaucacgugccagggcuccgaggacauccggaagcugcucgagagccaggggcgccgcgacaucaagcugaucgacaucucccugagcaaggucgacucccggaaguucgagaacgccgugugggaccaguucaaggaccucugccacaugcacaccggcaucguggucgagaagaagaagcgcgggggcaaggaggagaucacgccccacugcgcccugauggacugcaucauguucgacgcggccgugagcggcgggguggacgccaagguccugcgggccgugcucccgcgcgacaugguguuccggaccuccacccccaaggucgugcugugaggacuaguuauaagacugacuagcccgaugggccucccaacgggcccuccuccccuccuugcaccgagauuaaucaaaggcucuuuucagagccaccaaaaaaaaaaaaaaaaaaaaaaaaaaaaaaaaaaaaaaaaaaaaaaaaaaaaaaaaaaaaaaaaagaauu

SEQ ID NO: 21767 - RNA, 1943 nt, Artificial Sequence
  mRNA product Design i-3 (hSL-A64-N5) comprising derived and/or modified sequence from LASV(G1180-SLE-2010;Clade IV)__AIT17169__SP-IgE_NP(2-569) (opt1)
aggagaaagcuuaccauggacuggaccuggauccuguuccucguggccgccgcgacccgcguccacagcagcgccuccaaggagaucaagagcuuccuguggacccagucccuccgccgggagcugagcggcuacugcuccaacaucaagcuccagguggucaaggacgcccaggcgcugcugcacgggcuggacuucagcgagguguccaacgugcagcgccucaugcggaaggagcgccgggacgacaacgaccugaagcgccugcgggaccucaaccaggccgucaacaaccugguggagcucaagagcacccagcagaaguccauccugcgcgugggcacccugaccagcgacgaccugcucauccuggccgccgaccuggagaagcucaaguccaaggucauccggaccgagcgcccccugagcgccgggguguacaugggcaaccuguccagccagcagcucgaccagcggcgcgcgcugcuguccaugaucgggaugagcuccggcaaccagcgggcccaggccggccgcgacggggugguccgggugugggacgugaagaacgucgagcuccugaacaaccaguucggcaccaugccgagccugacgcucgccugccugaccaagcagggccagguggaccugaacgacgcggugcaggcccucaccgaccuggggcugaucuacaccgccaaguaccccaacacguccgaccucgaccgccugacccagagccaccccauccugaacaugaucgacaccaagaaguccagccucaacaucagcggguacaacuucucccugggcgccgccgucaaggcgggcgccugcaugcuggacgggggcaacaugcucgagaccaucaaggugagcccccagacgauggacgggauccugaaguccauccugaaggugaagaaggcccucggcauguucaucagcgacaccccgggcgagcggaaccccuacgagaacauccuguacaagaucugccuguccggggacggcuggcccuacaucgccagccgcaccuccaucaccgggcgggccugggagaacacggucguggaccucgagagcgacggcaagccccagaaggcgggguccaacaacagcaacaagucccugcagagcgugggcuucaccgccggccugaccuacucccagcucaugacccugaaggacgccaugcugcagcuggacccgaacgccaagacguggauggacaucgaggggcgccccgaggaccccgucgagaucgcccucuaccagcccagcuccggcugcuacauccacuucuuccgggagccgaccgaccugaagcaguucaagcaggacgcgaaguacagccacgggaucgacgugaccgaccuguucgccgcccagcccggccucaccuccgccgugaucgacgcccugccccgcaacauggucaucacgugccaggggagcgacgacauccgcaagcugcucgagagccagggccggaaggacaucaagcugaucgacaucgcgcuguccaagaccgacagccgcaaguacgagaacgccgugugggaccaguacaaggaccucugccacaugcacaccggcgucgugguggagaagaagaagcgcgggggcaaggaggagaucacgccccacugcgcccugauggacugcaucauguucgacgccgcggucuccgggggccugaacaccagcgugcuccgggccgugcugccgcgggacauggucuuccgcaccuccacgccccggguggugcugugaggacuaguuauaagacugacuagcccgaugggccucccaacgggcccuccuccccuccuugcaccgagauuaaucaaaggcucuuuucagagccaccaaaaaaaaaaaaaaaaaaaaaaaaaaaaaaaaaaaaaaaaaaaaaaaaaaaaaaaaaaaaaaaaagaauu

SEQ ID NO: 21768 - RNA, 1943 nt, Artificial Sequence
  mRNA product Design i-3 (hSL-A64-N5) comprising derived and/or modified sequence from LASV(G1442-SLE-2011;Clade IV)__AIT17181__SP-IgE_NP(2-569) (opt1)
aggagaaagcuuaccauggacuggaccuggauccuguuccucguggccgccgcgacccgcguccacagcagcgccuccaaggaggugaaguccuuccuguggacccagagccuccgccgggagcugagcggcuacugcuccaacaucaagcugcaggucgugaaggacgcccaggcgcuccugcacgggcuggacuucagcgagguguccaacguccagcgccucaugcggaagcagcgccgggacgacaacgaccugaagcgccugcgggaccucaaccaggccgugaacaaccugguggagcucaagagcacccagcagaaguccguccugcgcgugggcacccugaccagcgacgaccugcucgugcuggccgccgaccuggagaagcucaaguccaaggucauccggaccgagcgcccccugagcgccgggguguacaugggcaaccuguccagccagcagcucgaccagcggcgcgcgcugcugaacaugaucgggauguccggcggcauccaggggacccggacgggccgcgacggggugguccgggugugggacgugaagaacgccgaccuccugaacaaccaguucggcaccaugccgagccugacccucgccugccugaccaagcaggggcaggucgaccugaacgacguggugcaggcccucacggaccugggccugaucuacaccgcgaaguaccccaacgccuccgaccucgaccgccugacccagagccaccccauccugaacaugaucgacaccaagaaguccagccucaacaucagcggcuacaacuucucccugggggccgccgucaaggccggcgcgugcaugcuggacgggggcaacaugcucgagacgaucaaggugagcccccagaccauggacggcauccugaaguccauccugaaggugaagaagacccucgggauguucaucagcgacaccccgggcgagcggaaccccuacgagaacauccuguacaagaucugccuguccggggacggcuggcccuacaucgccagccgcacguccaucaccgggcgggccugggagaacaccgucguggaccucgagagcgacggcaagccccagaaggccggcuccaacaacagcaacaagucccugcagagcgccggguucgcggccggccugaccuacucccagcucaugacgcugaaggacgccaugcugcagcuggacccgaacgccaagaccuggauggacaucgaggggcgccccgaggaccccguggagaucgcccucuaccagcccagcuccggcugcuacauccacuucuuccgggagccgaccgaccugaagcaguucaagcaggacgcgaaguacagccacgggaucgacgucaccgaccuguucgccgcccagcccggccucacguccgccgugaucgaggcccugccccgcaacauggucaucacgugccagggcagcgacgacaucaagaagcugcucgagucccaggggcgcaaggacaucaagcugaucgacaucgcgcugagcaagaccgacagccggaaguacgagaacgccgugugggaccaguacaaggaccucugccacaugcacaccggcguggucguggagaagaagaagcgcgggggcaaggaggagaucaccccgcacugcgcccugauggacugcaucauguucgacgccgcgguguccgggggccugaacacccucguccugcgggccgugcugccccgcgacaugguguuccggaccagcacgccccgcgucgugcucugaggacuaguuauaagacugacuagcccgaugggccucccaacgggcccuccuccccuccuugcaccgagauuaaucaaaggcucuuuucagagccaccaaaaaaaaaaaaaaaaaaaaaaaaaaaaaaaaaaaaaaaaaaaaaaaaaaaaaaaaaaaaaaaaagaauu

SEQ ID NO: 21769 - RNA, 1943 nt, Artificial Sequence
  mRNA product Design i-3 (hSL-A64-N5) comprising derived and/or modified sequence from LASV(G3010-SLE-2013;Clade IV)__AIT17345__SP-IgE_NP(2-569) (opt1)
aggagaaagcuuaccauggacuggaccuggauccuguuccucguggccgccgcgacccgcguccacagcagcgccuccaaggagaucaagagcuuccuguggacccagucccuccgccgggagcugagcggcuacugcuccaacaucaagcuccagguggucaaggacgcccaggcgcugcugcacgggcuggacuucagcgagguguccaacgugcagcgccucaugcggaaggagcgccgggacgacaacgaccugaagcgccugcgggaccucaaccaggccgucaacaaccugguggagcucaagagcacccagcagaaguccauccugcgcgugggcacccugaccagcgacgaccugcucauccuggccgccgaccuggagaagcucaaguccaaggucacccggaccgagcgcccccugagcgccgggguguacaugggcaaccuguccagccagcagcucgaccagcggcgcgcgcugcuguccaugaucgggaugagcuccggcgugcagggcgcccgggccgggcgcgacggcgucgugcgggugugggacgucaagaacgccgagcuccugaacaaccaguucgggacgaugccgagccugacccucgcgugccugaccaagcagggccagguggaccugaacgacgugguccaggcccucaccgaccuggggcugaucuacacggccaaguaccccaacaccuccgaccucgaccgccugacccagagccaccccauccugaacaugaucgacaccaagaaguccagccucaacaucagcggcuacaacuucucccugggcgccgccgugaaggcgggggccugcaugcuggacggcgggaacaugcucgagacgaucaaggugagcccccagaccauggacggcauccugaaguccauccugaaggucaagaaggcccucggcauguucaucagcgagaccccgggggagcggaaccccuacgagaacauccuguacaagaucugccuguccggcgacggguggcccuacaucgccagccgcaccuccaucacgggccgggccugggagaacaccgugguggaccucgagagcgacgggaagccccagaaggcgggcuccaacaacagcaacaagucccugcagagcgccggcuucaccgccgggcugaccuacucccagcucaugacgcugaaggacgccaugcugcagcuggacccgaacgccaagaccuggauggacaucgagggccgccccgaggaccccgucgagguggcgcucuaccagcccagcuccgggugcuacauccacuucuuccgggagccgaccgaccugaagcaguucaagcaggacgccaaguacagccacggcaucgacgugaccgaccuguucgccgcccagcccgggcucacguccgccgucaucgacgcgcugccccgcaacauggugaucacgugccagggcagcgacgacaucaagaagcugcucgagagccagggccgcaaggacaucaagcugaucgacaucgcccuguccaagaccgacagccggaaguacgagaacgccgucugggaccaguacaaggaccucugccacaugcacaccggggugguggucgagaagaagaagcgcggcgggaaggaggagaucaccccgcacugcgcccugauggacugcaucauguucgacgcggccguguccggcgggcugaacaccagcgugcuccgggccguccugccccgcgacaugguguuccggaccuccacgccccgcgugguccugugaggacuaguuauaagacugacuagcccgaugggccucccaacgggcccuccuccccuccuugcaccgagauuaaucaaaggcucuuuucagagccaccaaaaaaaaaaaaaaaaaaaaaaaaaaaaaaaaaaaaaaaaaaaaaaaaaaaaaaaaaaaaaaaaagaauu

SEQ ID NO: 21770 - RNA, 1943 nt, Artificial Sequence
  mRNA product Design i-3 (hSL-A64-N5) comprising derived and/or modified sequence from LASV(G502-SLE-2009;Clade IV)__AIT17127__SP-IgE_NP(2-569) (opt1)
aggagaaagcuuaccauggacuggaccuggauccuguuccucguggccgccgcgacccgcguccacagcagcgccuccaaggagaucaagagcuuccuguggacccagucccuccgccgggagcugagcggcuacugcuccaacaucaagcuccagguggucaaggacgcccaggcgcugcugcacgggcuggacuucagcgagguguccaacgugcagcgccucaugcggaaggagcgccgggacgacaacgaccugaagcgccugcgggaccucaaccaggccgucaacaaccugguggagcucaagagcacccagcagaaguccauccugcgcgugggcacccugaccagcgacgaccugcucauccuggccgccgaccuggagaagcucaaguccaaggucauccggaccgagcgcccccugagcgccgggguguacaugggcaaccuguccagccagcagcucgaccagcggcgcgcgcugcuguccaugaucgggaugagcggcggcaaccagggggugcgggccggcaaggacggggucgugcgcgugugggacgucaagaacgccgagcuccugaacaaccaguucggcaccaugccgucccugacgcucgccugccugaccaagcagggccagguggaccugaacgacgcggugcaggcccucaccgaccuggggcugaucuacaccgccaaguaccccaacacgagcgaccucgaccggcugacccagucccaccccauccugaacaugaucgacaccaagaaguccagccucaacaucuccggcuacaacuucagccugggggccgccgucaaggcgggcgccugcaugcuggacgggggcaacaugcucgagaccaucaaggugagcccccagacgauggacggcauccucaagagcauccugaaggugaagaaggcccuggggauguucaucuccgacaccccgggcgagcgcaaccccuacgagaacauccuguacaagaucugccugagcggggacggcuggcccuacaucgccucccggaccagcaucaccgggcgcgccugggagaacacggucguggaccucgaguccgacggcaagccccagaaggcgggcagcaacaacuccaacaagagccugcaguccgccggguucaccgccggccugaccuacagccagcucaugacccugaaggacgccaugcugcagcuggacccgaacacgaagaccuggauggacaucgaggggcggcccgaggaccccguggagaucgcccucuaccagcccuccagcggcugcuacauccacuucuuccgcgagccgaccgaccugaagcaguucaagcaggacgcgaaguacucccacgggaucgacgucaccgaccuguucgccgcccagcccggccucacgagcgccgugaucgacgcccugccccggaacauggugaucacgugccagggcuccgacgacauccgcaagcugcucgagagccaggggcgcaaggacaucaagcugaucgacaucgcgcugaacaagaccgacagccggaaguacgagaacgccgucugggaccaguacaaggaccucugccacaugcacaccggcguggucguggagaagaagaagcgcgggggcaaggaggagaucaccccgcacugcgcccugauggacugcaucauguucgacgccgcgguguccgggggccugaacaccagcguccuccgggccgugcugccccgcgacaugguguuccggaccuccacgccccgcgucgugcugugaggacuaguuauaagacugacuagcccgaugggccucccaacgggcccuccuccccuccuugcaccgagauuaaucaaaggcucuuuucagagccaccaaaaaaaaaaaaaaaaaaaaaaaaaaaaaaaaaaaaaaaaaaaaaaaaaaaaaaaaaaaaaaaaagaauu

SEQ ID NO: 21771 - RNA, 1943 nt, Artificial Sequence
  mRNA product Design i-3 (hSL-A64-N5) comprising derived and/or modified sequence from LASV(G733-SLE-2010;Clade IV)__AIT17155__SP-IgE_NP(2-569) (opt1)
aggagaaagcuuaccauggacuggaccuggauccuguuccucguggccgccgcgacccgcguccacagcagcgccuccaaggagaucaagagcuuccuguggacccagucccuccgccgggagcugagcggcuacugcuccaacaucaagcuccagguggucaaggacgcccaggcgcugcugcacgggcuggacuucagcgagguguccaacgugcagcgccucaugcggaaggagcgccgggacgacaacgaccugaagcgccugcgggaccucaaccaggccgucaacaaccugguggagcucaagagcacccagcagaaguccgugcugcgcgucggcacccugaccagcgacgagcugcucgugcuggccgccgaccuggagaagcucaaguccaaggugauccggaccgagcgcccccugagcgccggggucuacaugggcaaccuguccagccagcagcucgaccagcggcgcgcgcugcuguccaugaucgggaugagcggcggcaaccagggggcccggaccggccgcgacgggguggugcgggucugggacgugaagaacgccgagcuccugaacaaccaguucggcaccaugccgucccugacccucgccugccugaccaagcagggccagguggaccugaacgacgcgguccaggcccucaccgaccuggggcugaucuacacggccaaguaccccaacaccagcgaccucgaccgccugacccagucccaccccauccugaacaugaucgacaccaagaaguccagccucaacaucuccggcuacaacuucagccugggggccgccgugaaggcgggcgccugcaugcuggacgggggcaacaugcucgagacgaucaaggugagcccccagaccauggacggcauccucaagagcauccugaaggucaagaaggcccuggggauguucaucuccgacaccccgggcgagcggaaccccuacgagaacauccuguacaagaucugccugagcggggacggcuggcccuacaucgccucccgcaccagcaucacggggcgggccugggagaacaccgugguggaccucgaguccgacggcaagccccagaaggcgggcagcaacaacuccaacaagagccugcaguccgccggguucaccgccggccugaccuacagccagcucaugacgcugaaggacgccaugcugcagcuggacccgaacgccaagaccuggauggacaucgaggggcgccccgaggaccccgucgagaucgcgcucuaccagcccuccagcggcugcuacauccacuucuuccgggagccgaccgaccugaagcaguucaagcaggacgccaaguacucccacgggaucgacgugaccgaccuguucgccgcccagcccggccucacgagcgccgugaucgacgcgcugccccgcaacauggucaucacgugccagggcuccgacgacauccgcaagcugcucgagagccaggggcggaaggacaucaagcugaucgacaucgcccugagcaagaucgacucccgcaaguacgagaacgccgugugggaccaguacaaggaccucugccacaugcacaccggcgucgugguggagaagaagaagcgcgggggcaaggaggagaucacgccccacugcgcccugauggacugcaucauguucgacgcggccgucagcgggggccugaacucccucgugcugcgggccgugcugccgcgggacauggucuuccgcaccagcacgccccggguggugcucugaggacuaguuauaagacugacuagcccgaugggccucccaacgggcccuccuccccuccuugcaccgagauuaaucaaaggcucuuuucagagccaccaaaaaaaaaaaaaaaaaaaaaaaaaaaaaaaaaaaaaaaaaaaaaaaaaaaaaaaaaaaaaaaaagaauu

SEQ ID NO: 21772 - RNA, 1943 nt, Artificial Sequence
  mRNA product Design i-3 (hSL-A64-N5) comprising derived and/or modified sequence from MOPV/LASV reassortant(IGS-1;Clade IV)__AFY05578__SP-IgE_NP(2-569) (opt1)
aggagaaagcuuaccauggacuggaccuggauccuguuccucguggccgccgcgacccgcguccacagcagcgccuccaaggagaucaagagcuuccuguggacccagucccuccgccgggagcugagcggcuacugcuccaacaucaagcuccagguggucaaggacgcccaggcgcugcugcacgggcuggacuucagcgagguguccaacgugcagcgccucaugcggaaggagcgccgggacgacaacgaccugaagcgccugcgggaccucaaccaggccgucaacaaccugguggagcucaagagcacccagcagaaguccauccugcgcgugggcacccugaccagcgacgaccugcucauccuggccgccgaccuggagaagcuccgguccaaggucauccgcaccgagcggccccugagcgccgggguguacaugggcaaccuguccagccagcagcucgaccagcgccgggcgcugcugaacaugaucgggauguccggcggcaaccagggggcccgcgccggccgggacggggugguccgcgugugggacgugaagaacgccgagcuccugagcaaccaguucggcaccaugccgucccugacgcucgcgugccugaccaagcaggggcaggucgaccugaacgacgccgugcaggcccucaccgaccugggccugaucuacaccgccaaguaccccaacacgagcgaccucgaccggcugacccagucccaccccauccugaacaugaucgacaccaagaaguccagccucaacaucuccggcuacaacuucagccugggggccgcggugaaggccggcgccugcaugcuggacgggggcaacaugcucgagaccaucaaggucagcccccagacgauggacggcauccucaagagcauccugaaggugaagaaggcccuggggauguucaucuccgacaccccgggcgagcgcaaccccuacgagaacauccuguacaagaucugccugagcggggacggcuggcccuacaucgccucccggaccagcaucaccgggcgcgcgugggagaacacgguggucgaccucgaguccgacggcaagccccagaaggccgacagcaacaacuccagcaagucccugcagagcgccggcuucaccgccgggcugaccuacucccagcucaugacccugaaggacgccaugcugcagcuggacccgaacgcgaagacguggauggacaucgagggccggcccgaggaccccguggagaucgcccucuaccagcccagcuccgggugcuacauccacuucuuccgcgagccgaccgaccugaagcaguucaagcaggacgccaaguacagccacggcaucgacgugaccgaccuguucgccacccagcccgggcucacguccgccgucaucgacgcgcugccccgcaacauggugaucacgugccagggcagcgacgacauccggaagcugcucgagagccagggccgcaaggacaucaagcugaucgacaucgaccuguccaagaccgacagccggaaguacgagaacgccgugugggaccaguacaaggaccucugccacaugcacaccggggucguggucgagaagaagaagcgcggcgggaaggaggagaucaccccgcacugcgcccugauggacugcaucauguucgacgccgcgguguccggcgggcugaacaccagcgugcuccgggccguccugccccgcgacaugguguuccggaccuccacgccccgcgugguccugugaggacuaguuauaagacugacuagcccgaugggccucccaacgggcccuccuccccuccuugcaccgagauuaaucaaaggcucuuuucagagccaccaaaaaaaaaaaaaaaaaaaaaaaaaaaaaaaaaaaaaaaaaaaaaaaaaaaaaaaaaaaaaaaaagaauu

SEQ ID NO: 21773 - RNA, 1943 nt, Artificial Sequence
  mRNA product Design i-3 (hSL-A64-N5) comprising derived and/or modified sequence from LASV(LM765-SLE-2012;Clade IV)__AIT17815__SP-IgE_NP(2-569) (opt1)
aggagaaagcuuaccauggacuggaccuggauccuguuccucguggccgccgcgacccgcguccacagcagcgccuccaaggagaucaagagcuuccuguggacccagucccuccgccgggagcugagcggcuacugcuccaacaucaagcuccagguggucaaggacgcccaggcgcugcugcacgggcuggacuucagcgagguguccaacgugcagcgccucaugcggaaggagcgccgggacgacaacgaccugaagcgccugcgggaccucaaccaggccgucaacaaccugguggagcucaagagcacccagcagaaguccauccugcgcgugggcacccugaccagcgacgaccugcucauccuggccgccgaccuggagaagcucaaguccaaggucacccggaccgagcgcccccugagcgccgggguguacaugggcaaccuguccagccagcagcucgaccagcggcgcgcgcugcuggacaugaucgggauguccggcagcaaccagggcgcccgggccgggcgcgacggcgugguccgggugugggacgugaagaacgccgagcuccugaacaaccaguucgggacgaugccgucccugacccucgcgugccugaccaagcagggccaggucgaccugaacgacgccgugcaggcccucaccgaccuggggcugaucuacacggccaaguaccccaacaccagcgaccucgaccgccugacccagucccaccccauccugaacaugaucgacaccaagaaguccagccucaacaucuccggcuacaacuucagccugggcgccgcggugaaggccggggccugcaugcuggacggcgggaacaugcucgagacgaucaaggucagcccccagaccauggacggcauccucaagagcauccugaaggugaagaaggcccugggcauguucaucuccgacgccccgggggagcggaaccccuacgagaacauccuguacaagaucugccugagcggcgacggguggcccuacaucgcgucccgcaccagcaucaccggccgggccugggagaacacgguggucgaccucgaguccgacgggaagccccagaaggccggcagcaacggcuccaacaagagccugcaguccgccggguucaccgccggccugaccuacagccagcucaugacccugaaggacgcgaugcugcagcuggacccgaacgccaagacguggauggacaucgaggggcgccccgaggaccccguggagaucgcccucuaccagcccuccagcggcugcuacauccacuucuuccgggagccgaccgaccugaagcaguucaagcaggacgccaaguacucccacgggaucgacgugaccgaccuguucgccgcgcagcccggccucaccagcgccgucaucgacgcccugccccgcaacauggugaucacgugccagggcuccgacgacauccgcaagcuguucgagagccaggggcggaaggacaucaagcucaucgacaucgcccugagcaagaccgacucccgcaaguacgagaacgcggugugggaccaguacaaggaccugugccacaugcacaccggcaucgucguggagaagaagaagcgcgggggcaaggaggagaucacgccccacugcgcccucauggacugcaucauguucgacgccgccgucagcgggggccugaacaccuccgugcugcgggccgugcucccgcgggacauggucuuccgcaccagcacgccccggguggugcugugaggacuaguuauaagacugacuagcccgaugggccucccaacgggcccuccuccccuccuugcaccgagauuaaucaaaggcucuuuucagagccaccaaaaaaaaaaaaaaaaaaaaaaaaaaaaaaaaaaaaaaaaaaaaaaaaaaaaaaaaaaaaaaaaagaauu

SEQ ID NO: 21774 - RNA, 1943 nt, Artificial Sequence
  mRNA product Design i-3 (hSL-A64-N5) comprising derived and/or modified sequence from LASV(LM776-SLE-2012;Clade IV)__AIT17825__SP-IgE_NP(2-569) (opt1)
aggagaaagcuuaccauggacuggaccuggauccuguuccucguggccgccgcgacccgcguccacagcagcgccuccaaggagaucaagagcuuccuguggacccagucccuccgccgggagcugagcuccuacugcagcaacaucaagcuccagguggucaaggacgcccaggcgcugcugcacggccuggacuucuccgaggugagcaacgugcagcgccucaugcggaaggagcgccgggacgacaacgaccugaagcgccugcgggaccucaaccaggccgucaacaaccugguggagcugaaguccacccagcagaaguccauccuccgcguggggacccugaccuccgacgaccugcucauccuggccgccgaccuggagaagcucaagagcaaggucacccggaccgagcgcccccuguccgccggcguguacauggggaaccugagcucccagcagcucgaccagcggcgcgcgcugcugagcaugaucggcauguccgggagcaaccagggcgcccgggccggccgcgacggggugguccgggugugggacgugaagaacgccgagcuccugaacaaccaguucggcacgaugccgucccugacccucgcgugccugaccaagcaggggcaggucgaccugaacgacgccgugcaggcccucaccgaccugggccugaucuacacggccaaguaccccaacaccagcgaccucgaccgccugacccagagccaccccauccugaacaugaucgacaccaagaaguccagccucaacaucuccggguacaacuucagccugggcgccgcggugaaggccggcgccugcaugcuggacgggggcaacaugcucgagacgaucaaggucagcccccagaccauggacgggauccucaagagcauccugaaggugaagaaggcccugggcauguucaucuccgacaccccgggcgagcggaaccccuacgagaacauccuguacaagaucugccugagcggggacggcuggcccuacaucgccucccgcaccagcaucacggggcgggcgugggagaacaccguggucgaccucgaguccgacggcaagccccagaaggccgggagcaacaacuccaacaagagccugcaguccgccggcuucaccgccggccugaccuacagccagcucaugacgcugaaggacgccaugcugcagcuggacccgaacgcgaagaccuggauggacaucgaggggcgccccgaggaccccguggagguggcccucuaccagcccuccagcggcugcuacauccacuucuuccgggagccgaccgaccugaagcaguucaagcaggacgccaaguacucccacgggaucgacgucaccgaccuguucgccgcccagcccggccucacgagcgcggugaucgacgcccugccccgcaacauggugaucacgugccaggggagcgacgacauccgcaagcugcucgagucccagggccggaaggacaucaagcugaucgacaucgcccugagcaagaccgacucccgcaaguacgagaacgccgucugggaccaguacaaggaccucugccacaugcacaccggcguggucguggagaagaagaagcgcgggggcaaggaggagaucaccccgcacugcgcgcugauggacugcaucauguucgacgccgccgugagcgggggccugaacaccuccguccuccgggccgugcugccccgggacaugguguuccgcaccagcacgccccgggucgugcugugaggacuaguuauaagacugacuagcccgaugggccucccaacgggcccuccuccccuccuugcaccgagauuaaucaaaggcucuuuucagagccaccaaaaaaaaaaaaaaaaaaaaaaaaaaaaaaaaaaaaaaaaaaaaaaaaaaaaaaaaaaaaaaaaagaauu

SEQ ID NO: 21775 - RNA, 1943 nt, Artificial Sequence
  mRNA product Design i-3 (hSL-A64-N5) comprising derived and/or modified sequence from LASV(Mad39;Clade IV)__ANH09723__SP-IgE_NP(2-569) (opt1)
aggagaaagcuuaccauggacuggaccuggauccuguuccucguggccgccgcgacccgcguccacagcagcgccuccaaggagaucaagagcuuccuguggacccagucccuccgccgggagcugagcggcuacugcuccaacaucaagcuccagguggucaaggacgcccaggcgcugcugcacgggcuggacuucagcgagguguccaacgugcagcgccucaugcggaagcagcgccgggacgacaacgaccugaagcgccugcgggaccucaaccaggccgucaacaaccugguggagcugaaguccacccagcagaaguccgugcuccgcgucggcacgcugaccagcgacgaccugcucacccuggccgccgaccuggagaagcucaaguccaaggugacccggacggagcgcccccugaccgccgggguguacaugggcaaccugagcucccagcagcucgaccagcggcgcgcgcugcugaacaugaucgggaugagcggcggcaaccagggggcccggaccggccgcgacggggucgugcgggugugggacgucaagaacgccgagcuccugaacaaccaguucggcaccaugccgucccugacgcucgccugccugaccaagcagggccagguggaccugaacgacgugguccaggcgcucaccgaccuggggcugaucuacaccgccaaguaccccaacacgagcgaccucgaccgccugacccagucccaccccauccugaacaugaucgacaccaacaagagcucccucaacaucagcggcuacaacuucagccugggggccgccgugaaggccggcgcgugcaugcuggacgggggcaacaugcucgagaccaucaaggugagcccccagacgauggacggcauccucaagagcauccugaaggucaagaagucccuggggauguucaucagcgacaccccgggcgagcggaaccccuacgagaacauccuguacaagaucugccuguccggggacggcuggcccuacaucgccagccgcaccuccaucaccgggcgggccugggagaacacggugguggaccucgagagcggcggcaagccccagaaggccggguccaacaacagcaacaagucccugcagagcgccggcuucgcggccgggcugaccuacucccagcucaugacccugaaggacgccaugcugcagcuggacccgaacgccaagaccuggauggacaucgagggccgccccgaggaccccgucgagaucgcccucuaccagcccaucagcgggugcuacauccacuucuuccgggagccgacggaccugaagcaguucaagcaggacgcgaaguacucccacggcaucgacgugaccgaccuguucgccgcccagcccggccucaccagcgccgugaucgaggcccugccccgcaacauggucaucacgugccagggguccgacgacauccgcaagcuguucgagagccagggccggaaggacaucaagcucaucgacaucgcgcuguccaagaccgacagccgcaaguacgagaacgccgugugggaccaguacaaggaccugugccacaugcacaccggggucgugguggagaagaagaagaagggcgggaaggaggagaucacgccccacugcgcccucauggacugcaucauguucgacgccgcggucagcggcggccugaacacccuggugcuccgggccgugcugccgcgcgacauggucuuccggaccuccacccccaagguggugcugugaggacuaguuauaagacugacuagcccgaugggccucccaacgggcccuccuccccuccuugcaccgagauuaaucaaaggcucuuuucagagccaccaaaaaaaaaaaaaaaaaaaaaaaaaaaaaaaaaaaaaaaaaaaaaaaaaaaaaaaaaaaaaaaaagaauu

SEQ ID NO: 21776 - RNA, 1943 nt, Artificial Sequence
  mRNA product Design i-3 (hSL-A64-N5) comprising derived and/or modified sequence from LASV(Z0947-SLE-2011;Clade IV)__AIT17841__SP-IgE_NP(2-569) (opt1)
aggagaaagcuuaccauggacuggaccuggauccuguuccucguggccgccgcgacccgcguccacagcagcgccuccaaggagaucaagagcuuccuguggacccagucccuccgccgggagcugagcggcuacugcuccaacaucaagcuccagguggucaaggacgcccaggcgcugcugcacgggcuggacuucagcgagguguccaacgugcagcgccucaugcggaaggagcgccgggacgacaacgaccugaagcgccugcgggaccucaaccaggccgucaacaaccugguggagcucaagagcacccagcagaaguccauccugcgcgugggcacccugaccagcgacgaccugcucauccuggccgccgaccuggagaagcucaaguccaaggucacccggaccgagcgcccccugagcgccgggguguacaugggcaaccuguccagccagcagcucgaccagcggcgcgcgcugcugaacaugaucgggauguccggcagcaaccagggcgcccggacggggcgcgacggcgugguccgggugugggacgugaagaacgccgagcuccugaacaaccaguucgggaccaugccgucccugacccucgccugccugaccaagcagggccaggucgaccugaacgacgcggugcaggcccucacggaccuggggcugaucuacaccgccaaguaccccaacaccagcgaccucgaccgccugacccagucccaccccauccugaacaugaucgacacgaagaaguccagccucaacaucuccggcuacaacuucagccugggcgccgccgugaaggcgggggccugcaugcuggacggcgggaacaugcucgagaccaucaaggucagcccccagaccauggacggcauccucaagagcauccugaaggugaagaaggcccugggcauguucaucuccgacgccccgggggagcggaaccccuacgagaacauccuguacaagaucugccugagcggcgacggguggcccuacaucgccucccgcaccagcaucacgggccgggcgugggagaacaccguggucgaccucgaguccgacgggaagccccagaaggccggcagcaacggcuccaacaagagccugcaguccgccggguucaccgccggccugaccuacagccagcucaugacgcugaaggacgccaugcugcagcuggacccgaacgcgaagaccuggauggacaucgaggggcgccccgaggaccccguggagaucgcccucuaccagcccuccagcggcugcuacauccacuucuuccgggagccgaccgaccugaagcaguucaagcaggacgccaaguacucccacgggaucgacgugaccgaccuguucgccgcccagcccggccucacgagcgcggucaucgacgcccugccccgcaacauggugaucacgugccagggcuccgacgacauccgcaagcuguucgagagccaggggcggaaggacaucaagcucaucgacaucgcccugagcaagaccgacucccgcaaguacgagaacgccgugugggaccaguacaaggaccugugccacaugcacaccggcaucgucguggagaagaagaagcgcgggggcaaggaggagaucaccccgcacugcgcgcucauggacugcaucauguucgacgccgccgucagcgggggccugaacaccuccgugcugcgggccgugcucccccgggacauggucuuccgcaccagcacgccccggguggugcugugaggacuaguuauaagacugacuagcccgaugggccucccaacgggcccuccuccccuccuugcaccgagauuaaucaaaggcucuuuucagagccaccaaaaaaaaaaaaaaaaaaaaaaaaaaaaaaaaaaaaaaaaaaaaaaaaaaaaaaaaaaaaaaaaagaauu

SEQ ID NO: 21777 - RNA, 1943 nt, Artificial Sequence
  mRNA product Design i-3 (hSL-A64-N5) comprising derived and/or modified sequence from LASV(Josiah;Clade IV)__NP_694869__SP-IgE_NP(2-569) (opt4)
aggagaaagcuuaccauggacuggaccuggauccuguuccugguggccgccgccaccagagugcacagcagcgccagcaaggagaucaagagcuuccuguggacccagagccugagaagagagcugagcggcuacugcagcaacaucaagcugcagguggugaaggacgcccaggcccugcugcacggccuggacuucagcgaggugagcaacgugcagagacugaugagaaaggagagaagagacgacaacgaccugaagagacugagagaccugaaccaggccgugaacaaccugguggagcugaagagcacccagcagaagagcauccugagagugggcacccugaccagcgacgaccugcugauccuggccgccgaccuggagaagcugaagagcaaggugaucagaaccgagagaccccugagcgccggcguguacaugggcaaccugagcagccagcagcuggaccagagaagagcccugcugaacaugaucggcaugagcggcggcaaccagggcgccagagccggcagagacggcguggugagagugugggacgugaagaacgccgagcugcugaacaaccaguucggcaccaugcccagccugacccuggccugccugaccaagcagggccagguggaccugaacgacgccgugcaggcccugaccgaccugggccugaucuacaccgccaaguaccccaacaccagcgaccuggacagacugacccagagccaccccauccugaacaugaucgacaccaagaagagcagccugaacaucagcggcuacaacuucagccugggcgccgccgugaaggccggcgccugcaugcuggacggcggcaacaugcuggagaccaucaaggugagcccccagaccauggacggcauccugaagagcauccugaaggugaagaaggcccugggcauguucaucagcgacacccccggcgagagaaaccccuacgagaacauccuguacaagaucugccugagcggcgacggcuggcccuacaucgccagcagaaccagcaucaccggcagagccugggagaacaccgugguggaccuggagagcgacggcaagccccagaaggccgacagcaacaacagcagcaagagccugcagagcgccggcuucaccgccggccugaccuacagccagcugaugacccugaaggacgccaugcugcagcuggaccccaacgccaagaccuggauggacaucgagggcagacccgaggaccccguggagaucgcccuguaccagcccagcagcggcugcuacauccacuucuucagagagcccaccgaccugaagcaguucaagcaggacgccaaguacagccacggcaucgacgugaccgaccuguucgccacccagcccggccugaccagcgccgugaucgacgcccugcccagaaacauggugaucaccugccagggcagcgacgacaucagaaagcugcuggagagccagggcagaaaggacaucaagcugaucgacaucgcccugagcaagaccgacagcagaaaguacgagaacgccgugugggaccaguacaaggaccugugccacaugcacaccggcguggugguggagaagaagaagagaggcggcaaggaggagaucaccccccacugcgcccugauggacugcaucauguucgacgccgccgugagcggcggccugaacaccagcgugcugagagccgugcugcccagagacaugguguucagaaccagcacccccagaguggugcugugaggacuaguuauaagacugacuagcccgaugggccucccaacgggcccuccuccccuccuugcaccgagauuaaucaaaggcucuuuucagagccaccaaaaaaaaaaaaaaaaaaaaaaaaaaaaaaaaaaaaaaaaaaaaaaaaaaaaaaaaaaaaaaaaagaauu

SEQ ID NO: 21778 - RNA, 1943 nt, Artificial Sequence
  mRNA product Design i-3 (hSL-A64-N5) comprising derived and/or modified sequence from LASV(LP;Clade I)__AAF86702__SP-IgE_NP(2-569) (opt4)
aggagaaagcuuaccauggacuggaccuggauccuguuccugguggccgccgccaccagagugcacagcagcaacagcaaggagaucaagagcuuccuguggacccagagccugagaagagagcugagcggcuacugcagcaacaucaagcugcagguggugaaggacgcccaggcccugcugcacggccuggacuucagcgaggugagcaacgugcagagacugaugagaaagcagaagagagacgacgccgaccugaagagacugagagaccugaaccaggccgugaacaaccugguggagcugaagagcacccagcagaagaacgugcugagagugggcacccugagcagcgacgaccugaucacccuggccgccgaccuggagaagcugaagagcaaggugaucagaaccgagagaccccugagcagcggcguguacaugggcaaccugagcagccagcagcuggaccagagaagagcccugcugagcaugaucggcaugagcggcggcccccagggcaacagaaccggcggcgacggcguggugagagugugggacgugaagaacgccgagcugcugaacaaccaguucggcaccaugcccagccugacccuggccugccugaccaagcagggccagguggaccugaacgacgccgugcaggcccugaccgaccugggccugaucuacaccgccaaguaccccaacagcagcgaccuggacaugcugacccagagccaccccauccugggcaugguggacaccaagaagagcagccugaacaucagcggcuacaacuucagccugggcgccgccgugaaggccggcgccugcaugcuggacggcggcaacaugcuggagaccaucaaggugagcccccagaccauggacggcauccugaagagcauccugaaggugaagagaagccugggcauguucaucagcgacacccccggcgagagaaaccccuacgagaacauccuguacaagaucugccugagcggcgagggcuggcccuacaucgccagcagaaccagcaucaccggcagagccugggagaacacccugguggaccuggagagcgacaacaagccccccaagcugaacagcgccggcagcaacaagagccugcaggccgccggccugaacgccggccugaccuacagccagcugaugacccugaaggacugcaugcugcagcuggaccccagcagcaagaccuggaucgacaucgagggcagacccgaggaccccguggagaucgcccuguuccagcccagcagcggcugcuacauccacuucuucagagagcccaccgaccugaagcaguucaagcaggacgccaaguacagccacggcaucgacgugaccgaccuguucagcacccagcccggccugaccagcgccgugaucgaggcccugcccagaaacauggugcugaccugccagggcagcgacgacaucaagaagcugcuggagagccagggcagaagagacaucaagcugaucgacaucagccugagcaaggccgacagcagaaaguucgagaacgccgugugggaccaguacaaggaccugugccacaugcacaccggcguggugguggagaagaagaagagaggcggcaaggaggagaucaccccccacugcgcccugcuggacugcaucauguucgacgccgccaccaccggcagccugaacaucaccacccugagagccgugcugcccagagacaugguguucagaaccagcacccccaagguggugcugugaggacuaguuauaagacugacuagcccgaugggccucccaacgggcccuccuccccuccuugcaccgagauuaaucaaaggcucuuuucagagccaccaaaaaaaaaaaaaaaaaaaaaaaaaaaaaaaaaaaaaaaaaaaaaaaaaaaaaaaaaaaaaaaaagaauu

SEQ ID NO: 21779 - RNA, 1943 nt, Artificial Sequence
  mRNA product Design i-3 (hSL-A64-N5) comprising derived and/or modified sequence from LASV(803213;Clade II)__AAF86704__SP-IgE_NP(2-569) (opt4)
aggagaaagcuuaccauggacuggaccuggauccuguuccugguggccgccgccaccagagugcacagcagcgccagcaaggaggugaagagcuuccuguggacccagagccugagaagagagcugagcggcuacugcagcaacaucaagcugcagguggugaaggacgcccaggcccugcugcacggccuggacuucagcgaggugaacaacgugcagagacugaugagaaagcagaagagagacgacggcgaccugaagagacugagagaccugaaccaggccgugaacaaccugguggagcugaagagcacccagcagaagagcauccugagagugggcacccugaccagcgacgaccugcugacccuggccgccgaccuggagaagcugaagagcaaggugaucagaaccgagagaccccugagcagcggcguguacaugggcaaccugagcacccagcagcuggagcagagaagagcccugcugaacaugaucggcauggugggcggcgcccagggcacccagcccggcagagacggcguggugagagugugggacgugaagaaccccgaccugcugaacaaccaguucggcaccaugcccagccugacccuggccugccugaccaagcagggccagguggaccugaacgacgccgugcuggcccugaccgaccugggccugaucuacaccgccaaguaccccaacagcagcgaccuggacagacugagccagagccaccccauccugaacaugguggacaccaagaagagcagccugaacaucagcggcuacaacuucagccugggcgccgccgugaaggccggcgccugcaugcuggacggcggcaacaugcuggagaccaucaaggugaccccccagaccauggacggcauccugaagagcauccugaaggugaagagaagccugggcauguucgugagcgacacccccggcgagagaaaccccuacgagaacauccuguacaagaucugccugagcggcgacggcuggcccuacaucgccagcagaaccagcaucgugggcagagccugggagaacaccaccguggaccuggagagcgacggcaagccccagaaggugggcaccgccggcagcaacaagagccugcagagcgccggcuuccccaccggccugaccuacagccagcugaugacccugaaggacagcaugaugcagcuggaccccagcgccaagaccuggaucgacaucgagggcagacccgaggaccccguggagaucgcccuguaccagcccaugagcggcugcuacauccacuucuucagagagcccaccgaccugaagcaguucaagcaggacgccaaguacagccacggcaucgacguggccgaccuguuccccgcccagcccggccugaccagcgccgugaucgaggcccugcccagaaacauggugcugaccugccagggcagcgacgacaucaagaagcugcuggacagccagggcagaagagacaucaagcugaucgacaucagccugagcaagguggacagcagaaaguucgagaacgccgugugggaccagugcaaggaccugugccacaugcacaccggcguggugguggagaagaagaagagaggcggcaaggaggagaucaccccccacugcgcccugauggacugcaucauguucgacgccgccgugagcggcggccugaacauccccgugcugagagccgugcugcccagagacaugguguucagaaccagcagccccaagguggugcugugaggacuaguuauaagacugacuagcccgaugggccucccaacgggcccuccuccccuccuugcaccgagauuaaucaaaggcucuuuucagagccaccaaaaaaaaaaaaaaaaaaaaaaaaaaaaaaaaaaaaaaaaaaaaaaaaaaaaaaaaaaaaaaaaagaauu

SEQ ID NO: 21780 - RNA, 1946 nt, Artificial Sequence
  mRNA product Design i-3 (hSL-A64-N5) comprising derived and/or modified sequence from LASV(GA391;Clade III)__CAA36646__SP-IgE_NP(2-570) (opt4)
aggagaaagcuuaccauggacuggaccuggauccuguuccugguggccgccgccaccagagugcacagcagcgccagcaaggaggugagaagcuuccuguggacccagagccugagaagagagcugagcggcuacugcagcaacaucaagcugcagguggugaaggacgcccaggcccugcugcacggccuggacuucagcgaggugagcaacgugcagagacugaugagaaagcagaagagagacgacggcgaccugaagagacugagagaccugaaccaggccgugaacaaccugguggagcugaagagcacccagcagaagagcgugcugagagugggcacccugagcagcgacgaccugcugauccuggccgccgaccuggagaagcugaagagcaaggugaccagaaccgagagaccccugagcagcggcguguacaugggcaaccugagcagccagcagcuggaccagagaagagcccugcugaacaugaucggcaugaccggcgugagcggcggcggcaagggcgccagcgacggcaucgugagagugugggacgugaagaacgccgagcugcugaacaaccaguucggcaccaugcccagccugacccuggccugccugaccaagcagggccagguggaccugaacgacgccgugcaggcccugaccgaccugggccugaucuacaccgccaaguaccccaacagcagcgaccuggacagacugagccagagccaccccauccugaacaugaucgacaccaagaagagcagccugaacaucagcggcuacaacuucagccugggcgccgccgugaaggccggcgccugcaugcuggacggcggcaacaugcuggagaccaucaaggugagcccccagaccauggacggcauccugaagagcauccugaaggugaagaagagccugggcauguucgugagcgacacccccggcgagagaaaccccuacgagaacauccuguacaagaucugccugagcggcgacggcuggcccuacaucgccagcagaaccagcaucgugggcagagccugggagaacaccgugguggaccuggagcaggacaacaagccccagaagaucggcaacggcggcagcaacaagagccugcagagcgccggcuucgccgccggccugaccuacagccagcugaugacccugaaggacuucaagugcuucaaccugauccccaacgccaagaccuggauggacaucgagggcagacccgaggaccccguggagaucgcccuguaccagcccagcagcggcugcuacgugcacuucuucagagagcccaccgaccugaagcaguucaagcaggacgccaaguacagccacggcaucgacgugaccgaccuguucgccgcccagcccggccugaccagcgccgugaucgaggcccugcccagaaacauggugaucaccugccagggcagcgaggacaucagaaagcugcuggagagccagggcagaagagacaucaagcugaucgacaucacccugagcaaggccgacagcagaaaguucgagaacgccgugugggaccaguucaaggaccugugccacaugcacaccggcguggugguggagaagaagaagagaggcggcaaggaggagaucaccccccacugcgcccugauggacugcaucauguucgacgccgccgugagcggcggccuggacgccaaggugcugagaguggugcugcccagagacaugguguucagaaccagcacccccaagguggugcugugaggacuaguuauaagacugacuagcccgaugggccucccaacgggcccuccuccccuccuugcaccgagauuaaucaaaggcucuuuucagagccaccaaaaaaaaaaaaaaaaaaaaaaaaaaaaaaaaaaaaaaaaaaaaaaaaaaaaaaaaaaaaaaaaagaauu

SEQ ID NO: 21781 - RNA, 1943 nt, Artificial Sequence
  mRNA product Design i-3 (hSL-A64-N5) comprising derived and/or modified sequence from LASV(AV;Clade V)__CCA30315__SP-IgE_NP(2-569) (opt4)
aggagaaagcuuaccauggacuggaccuggauccuguuccugguggccgccgccaccagagugcacagcagcgccagcaaggaggugaagagcuuccuguggacccagagccugagaagagagcugagcggcuacugcagcaacaucaagcugcagguggugaaggacgcccaggcccugcugcacggccuggacuucagcgaggugagcaacgugcagagacugaugagaaagcagagaagagacgacagcgaccugaagagacugagagaccugaaccaggccgugaacaaccugguggagcugaagagcacccagcagaagagcgugcugagagugggcacccugagcagcgacgaccugcugacccuggccgccgaccuggagaagcugaagagcaaggugaccagaaccgagagaccccugagcagcggcguguacaugggcaaccugagcagccagcagcuggaccagagaagagcccugcugaaccugaucggcaugaccaacggcagccagggcagccaggccggcagagacggcguggugagagugugggacgugaagaacgccgagcugcugaacaaccaguucggcaccaugcccagccugacccuggccugccugaccaagcagggccagguggaccugaacgacguggugcaggcccugaccgaccugggccugaucuacaccgccaaguaccccaacaccagcgaccuggacagacugacccagagccaccccauccugaacaugaucgacaccaagaagagcagccugaacaucagcggcuacaacuucagccugggcgccgccgugaaggccggcgccugcaugcuggacggcggcaacaugcuggagaccaucaaggugagcccccagagcauggacggcauccugaagagcauccugaaggugaagagagcccugggcauguucgugagcgacacccccggcgagagaaaccccuacgagaacauccuguacaagaucugccugagcggcgacggcuggcccuacaucgccagcagaaccagcaucgugggcagagccugggagaacaccgugguggaccuggagaccgacggcaagccccagaagaucggcagcggcaacagcaacaagagccugcagagcgccggcuucagcgccggccugaccuacagccagcugaugacccugaaggacgccaugcugcagcuggaccccaacgccaagaccuggauggacaucgagggcagacccgaggaccccguggagguggcccuguaccagcccaucagcggcugcuacauccacuucuucagagagcccaccgaccugaagcaguucaagcaggacgccaaguacagccacggcaucgacaucgccgaccuguucgccgcccagcccggccugaccagcgccgugaucgaggcccugcccagaaacauggugaucaccugccagggcagcgaggacaucaagaagcugcuggagagccagggcagaaaggacaucaagcugaucgacaucgcccugagcaagaucgacagcagaaaguucgagaacgccgugugggaccaguacaaggaccugugccacaugcacaccggcguggugguggagaagaagaagagaggcggcaaggaggagaucaccccccacugcgcccugauggacugcaucauguucgacgccgccgugagcggcggccugaacacccuggugcugagagccgugcugcccagagacaugguguucagaaccagcacccccagaguggugcugugaggacuaguuauaagacugacuagcccgaugggccucccaacgggcccuccuccccuccuugcaccgagauuaaucaaaggcucuuuucagagccaccaaaaaaaaaaaaaaaaaaaaaaaaaaaaaaaaaaaaaaaaaaaaaaaaaaaaaaaaaaaaaaaaagaauu

SEQ ID NO: 21782 - RNA, 1943 nt, Artificial Sequence
  mRNA product Design i-3 (hSL-A64-N5) comprising derived and/or modified sequence from LASV(Togo/2016/7082;Clade VI)__AMR44578__SP-IgE_NP(2-569) (opt4)
aggagaaagcuuaccauggacuggaccuggauccuguuccugguggccgccgccaccagagugcacagcagcaacagcaaggaggugaagagcuuccuguggacccagagccugagaagagagcugagcggcuacugcagcaacaucaagcugcagguggugaaggacgcccaggcccugcugcacggccuggacuucagcgaggugagcaacgugcagagacugaugagaaagcagaagagagacgacggcgaccugaagagacugagagaccugaaccaggccgugaacaaccugguggagcugaagagcgugcagcagaagagcauccugagagugggcacccugaccagcgacgaccugcugacccuggccgccgaccuggagaagcugaagagcaaggugaccagaaccgagagaccccugagcagcggcguguacaugggcaaccugagcagccagcagcuggaccagagaagagcccugcugagcaugaucggcaugagcggcggcaaccagaacagccagcccaagggcgacggcguggugagagugugggacgugaagaacgccgaccugcugaacaaccaguucggcaccaugcccagccugacccuggccugccugaccaagcagggccagguggaccugaacgacgccgugcaggcccugaccgaccugggccugaucuacaccgccaaguaccccaacagcagcgaccuggacagacugagccagagccaccccauccugaacaugaucgacaccaagaagagcagccugaacaucagcggcuacaacuucagccugggcgccgccaucaagaccggcgccugcaugcuggacggcggcaacaugcuggagaccaucaaggugaccccccagaccauggacggcauccugaagagcauccugaaggugaagagaagccugggcauguucaucagcgacacccccggcgagagaaaccccuacgagaacauccuguacaagaucugccugagcggcgacggcuggcccuacaucgccagcagaaccgccaucaucggcagagccugggagaacaccgugguggaccuggagagcgacagcaagccccagaagaucggcagcaacggcagcaacaagagccugcagagcgccggcuucgcccccggccugaccuacagccagcugaugacccugaaggacagcaugcugcagcuggaccccaacgccaagaccuggaucgacaucgagggcagacccgaggaccccguggagguggcccuguuccagcccaucagcggcugcuacauccacuucuucagagagcccaccgaccugaagcaguucaagcaggacgccaaguacagccacggcaucgacgugaccgaccuguucgccgcccagcccggccugaccagcgccgugaucgaggcccugcccagaaacauggugcugaccugccagggcagcgacgacaucaagaagcugcuggacagccagggcagaagagacaucaagcugaucgacgugagccugaacaagaucgacagcagaaaguucgagaacgccgugugggaccaguacaaggaccugugccacaugcacaccggcguggugguggagaagaagaagaagggcggcaaggaggagaucaccccccacugcgcccugcuggacugcaucauguucgacgccgccgugagcggcggccugaacgccaccgugcugagagccgugcugcccagagacaugguguucagaaccagcagccccaagguggugcugugaggacuaguuauaagacugacuagcccgaugggccucccaacgggcccuccuccccuccuugcaccgagauuaaucaaaggcucuuuucagagccaccaaaaaaaaaaaaaaaaaaaaaaaaaaaaaaaaaaaaaaaaaaaaaaaaaaaaaaaaaaaaaaaaagaauu

SEQ ID NO: 21783 - RNA, 1943 nt, Artificial Sequence
  mRNA product Design i-3 (hSL-A64-N5) comprising derived and/or modified sequence from LASV(KAK-428;Clade n.d. (VII))__ANH09741__SP-IgE_NP(2-569) (opt4)
aggagaaagcuuaccauggacuggaccuggauccuguuccugguggccgccgccaccagagugcacagcagcaacagcaaggaggugaagagcuuccuguggacccagagccugagaagagagcugagcggcuacugcaccaacaucaagcugcagguggugaaggacgcccaggcccugcugcacggccuggacuucagcgaggugagcaacgugcagagacugaugagaaagcagaagagagacgacaacgaccugaagagacugagagaccugaaccaggccgugaacaaccugguggagcugaagagcgugcagcagaagagcgugcugaaggugggcacccugaacagcgacgaccugcugacccuggccgccgaccuggagaagcugaagagcaagguggugagaaccgagagaccccugagcagcggcguguacaugggcaaccugagcagccagcagcuggaccagagaagagcccugcugaacaugaucggcauggccggcggcagccagggcaaccagcccagcagagacggcguggugagagugugggacgugaagaacgccgaccugcugaacaaccaguucggcaccaugcccagccugacccuggccugccugaccaagcagggccagguggaccugaacgacguggugcuggcccugaccgaccugggccugaucuacaccgccaaguaccccaacagcagcgaccuggacagacugagccagaaccaccccgugcugaacaugaucgacgugaacaagagcagccugaacaucagcggcuacaacuucagccugggcgccgccgugaaggccggcgccugcaugcuggacggcggcaacaugcuggagaccaucaagaucagcccccagaccguggacggcauccugaagagcauccugaaggugaagagagcccugggcauguucgugagcgacacccccggcgagagaaaccccuacgagaacauccuguacaaggugugccugagcggcaacggcuggcccuacaucgccagcagaaccagcaucgugggcagagccugggagaacaccgugguggaccuggagagcaacaagaaccagcccaaggugggcaacaacggcagcaacaagaugcugcagagcagcggcuucgccaccggccugaccuacagccagcugaugacccugagagacagcaugcugcagcuggaccccaccgccaagaccuggaucgacaucgagggcagacccgaggaccccguggagcuggcccuguuccagcccagcagcggcugcuacauccacuucuucagagagcccaccgaccugaagcaguucaagcaggacgccaaguacagccacggcaucgacgugaacgaccuguucagcgcccagcccggccugaccagcgccgugcuggaggcccugcccagaaacauggugcugaccugccagggcagcgacgacaucagaaagcugcuggacagccaggacagaaaggacaucaagcugaucgacaucagccugagcaaggccgacgccagaaaguucgagaacgacgugugggaccaguucaaggaccugugccacaugcacaccggcaucgugguggagaagaagaagaagggcggcaagcaggagaugaccccccacugcgcccugcuggacugcaucauguucgacgccgccgugagcggcggccugaacgugcccacccugagagccgugcugcccaccgacaugguguucagaaccaucaccaccaagguggugcugugaggacuaguuauaagacugacuagcccgaugggccucccaacgggcccuccuccccuccuugcaccgagauuaaucaaaggcucuuuucagagccaccaaaaaaaaaaaaaaaaaaaaaaaaaaaaaaaaaaaaaaaaaaaaaaaaaaaaaaaaaaaaaaaaagaauu

SEQ ID NO: 21784 - RNA, 1943 nt, Artificial Sequence; identical to SEQ ID NO: 21778
  mRNA product Design i-3 (hSL-A64-N5) comprising derived and/or modified sequence from LASV(Pinneo-NIG-1969;Clade I)__AIT17837__SP-IgE_NP(2-569) (opt4)

SEQ ID NO: 21785 - RNA, 1943 nt, Artificial Sequence
  mRNA product Design i-3 (hSL-A64-N5) comprising derived and/or modified sequence from LASV(ISTH0009-NIG-2011;Clade II)__AIT17405__SP-IgE_NP(2-569) (opt4)
aggagaaagcuuaccauggacuggaccuggauccuguuccugguggccgccgccaccagagugcacagcagcgugagcaaggaggugaagagcuuccuguggacccagagccugagaagagagcugagcggcuacugcagcaacaucaagcugcagguggugaaggacgcccaggcccugcugcacggccuggacuucagcgaggugagcaacgugcagagacugaugagaaagcagaagagagacgacagcgaccugaagagacugagagaccugaaccaggccgugaacaaccugguggagcugaagagcacccagcagaagagcauccugagagugggcacccugaccagcgacgaccugcugacccuggccgccgaccuggagaagcugaagagcaaggugaucagaaccgagagaccccugagcagcggcguguacaugggcaaccugagcacccagcagcuggagcagagaagagcccugcugaacaugaucggcauggugggcggcgcccagggcacccagcccggcagagacggcguggugagagugugggacgugaagaaccccgaccugcugaacaaccaguucggcaccaugcccagccugacccuggccugccugaccaagcagggccagguggaccugaacgacgccgugcuggcccugaccgaccugggccugaucuacaccgccaaguaccccaacagcagcgaccuggacagacugagccagagccaccccauccugaacaugguggacaucaagaagagcagccugaacaucagcggcuacaacuucagccugggcgccgccgugaaggccggcgccugcaugcuggacggcggcaacaugcuggagaccaucaaggugaccccccagaccauggacggcauccugaagagcauccugaaggugaagagaagccugggcauguucgugagcgacacccccggcgagagaaaccccuacgagaacauccuguacaagaucugccugagcggcgacggcuggcccuacaucgccagcagaaccagcaucgugggcagagccugggagaacaccaccguggaccuggagagcgacggcaagccccagaaggugggcagcgccggcagcaacaagagccugcagagcgccggcuuccccaccggccugaccuacagccagcugaugacccugaaggacagcaugaugcagcuggaccccagcgccaagaccuggaucgacaucgagggcagacccgaggaccccguggagaucgcccuguaccagcccaugagcggcugcuacauccacuucuucagagagcccaccgaccugaagcaguucaagcaggacgccaaguacagccacggcaucgacguggccgaccuguuccccgcccagcccggccugaccagcgccgugaucgaggcccugcccagaaacauggugcugaccugccagggcagcgacgacaucaagagacugcuggacagccagggcagaagagacaucaagcugaucgacaucgcccugagcaaggccgacagcagaagauucgagaacgccgugugggaccagugcaaggaccugugccacaugcacaccggcguggugguggagaagaagaagagaggcggcaaggaggagaucaccccccacugcgcccugauggacugcaucauguacgacgccgccgugagcggcggccugaacauccccgugcugagagccgugcugcccagagacaugguguucagaaccagcagccccaagguggugcugugaggacuaguuauaagacugacuagcccgaugggccucccaacgggcccuccuccccuccuugcaccgagauuaaucaaaggcucuuuucagagccaccaaaaaaaaaaaaaaaaaaaaaaaaaaaaaaaaaaaaaaaaaaaaaaaaaaaaaaaaaaaaaaaaagaauu

SEQ ID NO: 21786 - RNA, 1943 nt, Artificial Sequence
  mRNA product Design i-3 (hSL-A64-N5) comprising derived and/or modified sequence from LASV(ISTH2010-NIG-2012;Clade II)__AIT17483__SP-IgE_NP(2-569) (opt4)
aggagaaagcuuaccauggacuggaccuggauccuguuccugguggccgccgccaccagagugcacagcagcgccagcaaggaggugaagagcuuccuguggacccagagccugagaagagagcugagcggcuacugcagcaacaucaagcugcagguggugaaggacgcccaggcccugcugcacggccuggacuucagcgaggugagcaacgugcagagacugaugagaaagcagaagagagacgacagcgaccugaagagacugagagaccugaaccaggccgugaacaaccugguggagcugaagagcacccagcagaagagcauccugagagugggcacccugaccagcgacgaccugcugacccuggccgccgaccuggagaagcugaagagcaaggugaucagaaccgagagaccccugagcagcggcguguacaugggcaaccugagcacccagcagcuggagcagagaagagcccugcugaaccugaucggcauggugggcggcgcccagggcacccagcccggcagagacggcguggugagagugugggacgugaagaaccccgaccugcugaacaaccaguucggcaccaugcccagccugacccuggccugccugaccaagcagggccagguggaccugaacgacgccgugcuggcccugaccgaccugggccugaucuacaccgccaaguaccccaacagcagcgaccuggacagacugagccagagccaccccauccugaacaugguggacaccaagaagagcagccugaacaucagcggcuucaacuucagccugggcgccgccgugaaggccggcgccugcaugcuggacggcggcaacaugcuggagaccaucaaggugaccccccagaccauggacggcauccugaagagcauccugaaggugaagaagagccugggcauguucgugagcgacacccccggcgagagaaaccccuacgagaacauccuguacaagaucugccugagcggcgacggcuggcccuacaucgccagcagaaccagcaucgugggcagagccugggagaacaccaccguggaccuggagagcgacggcaagccccacaaggugggcaccgccggcagcaacaagagccugcagagcgccggcuuccccaccggccugaccuacagccagcugaugacccugaaggacagcaugaugcagcuggaccccagcgccaagaccuggaucgacaucgagggcagacccgaggaccccguggagaucgcccuguaccagcccaugagcggcugcuacauccacuucuucagagagcccaccgaccugaagcaguucaagcaggacgccaaguacagccacggcaucgacguggccgaccuguuccccgcccagcccggccugaccagcgccgugaucgaggcccugcccagaaacauggugcugaccugccagggcagcgacgacaucaagagacugcuggacagccagggcagaagagacaucaagcugaucgacaucgcccugagcaaggccgacagcagaagauucgagaacgccgugugggaccagugcaaggaccugugccacaugcacaccggcguggugguggagaagaagaagagaggcggcaaggaggagaucaccccccacugcgcccugauggacugcaucauguacgacgccgccgugagcggcggccugaacauccccgugcugagagccgugcugcccagagacaugguguucagaaccagcagccccaagguggugcugugaggacuaguuauaagacugacuagcccgaugggccucccaacgggcccuccuccccuccuugcaccgagauuaaucaaaggcucuuuucagagccaccaaaaaaaaaaaaaaaaaaaaaaaaaaaaaaaaaaaaaaaaaaaaaaaaaaaaaaaaaaaaaaaaagaauu

SEQ ID NO: 21787 - RNA, 1943 nt, Artificial Sequence
  mRNA product Design i-3 (hSL-A64-N5) comprising derived and/or modified sequence from LASV(Lassa virus/H.sapiens-wt/NGA/2015/ISTH_0543;Clade II)__AVO03640__SP-IgE_NP(2-569) (opt4)
aggagaaagcuuaccauggacuggaccuggauccuguuccugguggccgccgccaccagagugcacagcagcgccagcaaggaggugaagagcuuccuguggacccagagccugagaagagagcugagcggcuacugcagcaacaucaagcugcagguggugaaggacgcccaggcccugcugcacggccuggacuucagcgaggugagcaacgugcagagacugaugagaaagcagaagagagacgacagcgaccugaagagacugagagaccugaaccaggccgugaacaaccugguggagcugaagagcacccagcagaagagcauccugagagugggcacccugaccagcgacgaccugcugacccuggccgccgaccuggagaagcugaagagcaaggugaucagaaccgagagaccccugagcagcggcguguacaugggcaaccugagcacccagcagcuggagcagagaagagcccugcugaacaugaucggcauggugggcggcgcccagggcacccagcccggcagagacggcguggugagagugugggacgugaagaaccccgaccugcugaacaaccaguucggcaccaugcccagccugacccuggccugccugaccaagcagggccagguggaccugaacgacgccgugcuggcccugaccgaccugggccugaucuacaccgccaaguaccccaacagcagcgaccuggacagacugagccagagccaccccauccugaacaugguggacaccaagaagagcagccugaacaucagcggcuacaacuucagccugggcgccgccgugaaggccggcgccugcaugcuggacggcggcaacaugcuggagaccaucaaggugaccccccagaccauggacggcauccugaagagcauccugaaggugaagaagagccugggcauguucgugagcgacacccccggcgagagaaaccccuacgagaacauccuguacaagaucugccugagcggcgacggcuggcccuacaucgccagcagaaccagcaucgugggcagagccugggagaacaccaccguggaccuggagagcgacggcaagccccagaaggugggcagcgccggcagcaacaagagccugcagagcgccggcuuccccaccggccugaccuacagccagcugaugacccugaaggacagcaugaugcagcuggaccccagcgccaagaccuggaucgacaucgagggcagacccgaggaccccguggagaucgcccuguaccagcccaugagcggcugcuacauccacuucuucagagagcccaccgaccugaagcaguucaagcaggacgccaaguacagccacggcaucgacguggccgaccuguuccccgcccagcccggccugaccagcgccgugaucgaggcccugcccagaaacauggugcugaccugccagggcagcgacgacaucaagagacugcuggacagccagggcagaaaggacaucaagcugaucgacaucgcccugagcaaggccgacagcagaagauucgagaacgccgugugggaccagugcaaggaccugugccacaugcacaccggcguggugguggagaagaagaagagaggcggcaaggaggagaucaccccccacugcgcccugauggacugcaucauguacgacgccgccgugagcggcggccugaacauccccgugcugagagccgugcugcccagagacaugguguucagaaccagcagccccaagguggugcugugaggacuaguuauaagacugacuagcccgaugggccucccaacgggcccuccuccccuccuugcaccgagauuaaucaaaggcucuuuucagagccaccaaaaaaaaaaaaaaaaaaaaaaaaaaaaaaaaaaaaaaaaaaaaaaaaaaaaaaaaaaaaaaaaagaauu

SEQ ID NO: 21788 - RNA, 1943 nt, Artificial Sequence
  mRNA product Design i-3 (hSL-A64-N5) comprising derived and/or modified sequence from LASV(Lassa virus/H.sapiens-wt/NGA/2016/ISTH_0009;Clade II)__AVO03572__SP-IgE_NP(2-569) (opt4)
aggagaaagcuuaccauggacuggaccuggauccuguuccugguggccgccgccaccagagugcacagcagcgccagcaaggaggugaagagcuuccuguggacccagagccugagaagagagcugagcggcuacugcagcaacaucaagcugcagguggugaaggacgcccaggcccugcugcacggccuggacuucagcgaggugagcaacgugcagagacugaugagaaagcagaagagagacgacagcgaccugaagagacugagagaccugaaccaggccgugaacaaccugguggagcugaagagcacccagcagaagagcauccugagagugggcacccugaccagcgacgaccugcugacccuggccgccgaccuggagaagcugaagagcaaggugaucagaaccgagagaccccugagcagcggcguguacaugggcaaccugagcacccagcagcuggagcagagaagagcccugcugaacaugaucggcauggugggcggcgcccagggcacccagcccggcagagacggcguggugagagugugggacgugaagaaccccgaccugcugaacaaccaguucggcaccaugcccagccugacccuggccugccugaccaagcagggccagguggaccugaacgacgccgugcuggcccugaccgaccugggccugaucuacaccgccaaguaccccaacagcagcgaccuggacagacugagccagagccaccccauccugaacaugguggacaccaagaagagcagccugaacaucagcggcuacaacuucagccugggcgccgccgugaaggccggcgccugcaugcuggacggcggcaacaugcuggagaccaucaaggugaccccccagaccauggacggcauccugaagagcauccugaaggugaagaagagccugggcauguucgugagcgacacccccggcgagagaaaccccuacgagaacauccuguacaagaucugccugagcggcgacggcuggcccuacaucgccagcagaaccagcaucgugggcagagccugggagaacaccaccguggaccuggagagcgacggcaagccccagaaggugggcagcgccggcagcaacaagagccugcagagcgccggcuuccccaccggccugaccuacagccagcugaugacccugaaggacagcaugaugcagcuggaccccagcgccaagaccuggaucgacaucgagggcagacccgaggaccccguggagaucgcccuguaccagcccaugagcggcugcuacauccacuucuucagagagcccaccgaccugaagcaguucaagcaggacgccaaguacagccacggcaucgacguggccgaccuguuccccgcccagcccggccugaccagcgccgugaucgaggcccugcccagaaacauggugcugaccugccagggcagcgacgacaucaagagacugcuggacagccagggcagaagagacaucaagcugaucgacaucgcccugagcaaggccgacagcagaagauucgagaacgccgugugggaccagugcaaggaccugugccacaugcacaccggcguggugguggagaagaagaagagaggcggcaaggaggagaucaccccccacugcgcccugauggacugcaucauguacgacgccgccgugagcggcggccugaacauccccgugcugagagccgugcugcccagagacaugguguucagaaccagcagccccaagguggugcugugaggacuaguuauaagacugacuagcccgaugggccucccaacgggcccuccuccccuccuugcaccgagauuaaucaaaggcucuuuucagagccaccaaaaaaaaaaaaaaaaaaaaaaaaaaaaaaaaaaaaaaaaaaaaaaaaaaaaaaaaaaaaaaaaagaauu

SEQ ID NO: 21789 - RNA, 1943 nt, Artificial Sequence
  mRNA product Design i-3 (hSL-A64-N5) comprising derived and/or modified sequence from LASV(Lassa virus/H.sapiens-wt/NGA/2016/ISTH_0017;Clade II)__AVO03568__SP-IgE_NP(2-569) (opt4)
aggagaaagcuuaccauggacuggaccuggauccuguuccugguggccgccgccaccagagugcacagcagcgccagcaaggaggugaagagcuuccuguggacccagagccugagaagagagcugagcggcuacugcagcagcaucaagcugcagguggugaaggacgcccaggcccugcugcacggccuggacuucagcgaggugagcaacgugcagagacugaugagaaagcagaagagagacgacagcgaccugaagagacugagagaccugaaccaggccgugaacaaccugguggagcugaagagcacccagcagaagagcauccugagagugggcacccugaccagcgacgaccugcugacccuggccgccgaccuggagaagcugaagagcaaggugaucagaaccgagagaccccugagcagcggcguguacaugggcaaccugagcacccagcagcuggagcagagaagagcccugcugaacaugaucggcauggccggcggcgcccagggcacccagcccggcagagacggcguggugagagugugggacgugaagaaccccgaccugcugaacaaccaguucggcaccaugcccagccugacccuggccugccugaccaagcagggccagguggaccugaacgacgccgugcuggcccugaccgaccugggccugaucuacaccgccaaguaccccaacagcagcgaccuggacagacugagccagagccaccccauccugaacaugguggacaccaagaagagcagccugaacaucagcggcuacaacuucagccugggcgccgccgugaaggccggcgccugcaugcuggacggcggcaacaugcuggagaccaucaaggugaccccccagaccauggacggcauccugaagagcauccugaaggugaagagaagccugggcauguucgugagcgacgcccccggcgagagaaaccccuacgagaacauccuguacaagaucugccugagcggcgacggcuggcccuacaucgccagcagaaccagcaucgugggcagagccugggagaacaccaccguggaccuggagagcgacggcaagccccagaaggugggcgccaccggcagcaacaagagccugcagagcgccggcuuccccaccggccugaccuacagccagcugaugacccugaaggacagcaugaugcagcuggaccccagcgccaagaccuggaucgacaucgagggcagacccgaggaccccguggagguggcccuguaccagcccgugagcggcugcuacauccacuucuucagagagcccaccgaccugaagcaguucaagcaggacgccaaguacagccacggcaucgacguggccgaccuguuccccgcccagcccggccugaccagcgccgugaucgaggcccugcccagaaacauggugcugaccugccagggcagcgacgacaucaagaagcugcuggacagccagggcagaaaggacaucaagcugaucgacaucgcccugagcaaggccgacagcagaagauucgagaacgccgugugggaccagugcaaggaccugugccacaugcacaccggcguggugguggagaagaagaagagaggcggcaaggaggagaucaccccccacugcgcccugauggacugcaucauguacgacgccgccgugagcggcggccugaacauccccgugcugagagccgugcugcccagagacaugguguucagaaccagcagccccaagguggugcugugaggacuaguuauaagacugacuagcccgaugggccucccaacgggcccuccuccccuccuugcaccgagauuaaucaaaggcucuuuucagagccaccaaaaaaaaaaaaaaaaaaaaaaaaaaaaaaaaaaaaaaaaaaaaaaaaaaaaaaaaaaaaaaaaagaauu

SEQ ID NO: 21790 - RNA, 1943 nt, Artificial Sequence
  mRNA product Design i-3 (hSL-A64-N5) comprising derived and/or modified sequence from LASV(Lassa virus/H.sapiens-wt/NGA/2018/ISTH_0959;Clade II)__AVV65100__SP-IgE_NP(2-569) (opt4)
aggagaaagcuuaccauggacuggaccuggauccuguuccugguggccgccgccaccagagugcacagcagcgccagcaaggaggugaagagcuuccuguggacccagagccugagaagagagcugagcggcuacugcagcaacaucaagcugcagguggugaaggacgcccaggcccugcugcacggccuggacuucagcgaggugagcaacgugcagagacugaugagaaagcagaagagagacgacagcgaccugaagagacugagagaccugaaccaggccgugaacaaccugguggagcugaagagcacccagcagaagagcauccugagagugggcacccugaccagcgacgaccugcugacccuggccgccgaccuggagaagcugaagagcaaggugaucagaaccgagagaccccugagcagcggcguguacaugggcaaccugagcacccagcagcuggagcagagaagagcccugcugaaccugaucggcauggugggcggcgcccagggcacccagcccggcagagacggcguggugagagugugggacgugaagaaccccgaccugcugaacaaccaguucggcaccaugcccagccugacccuggccugccugaccaagcagggccagguggaccugaacgacguggugcuggcccugaccgaccugggccugaucuacaccgccaaguaccccaacagcagcgaccuggacagacugagccagagccaccccauccugaacaugguggacaccaagaagagcagccugaacaucagcggcuucaacuucagccugggcgccgccgugaaggccggcgccugcaugcuggacggcggcaacaugcuggagaccaucaaggugaccccccagaccauggacggcauccugaagagcauccugaaggugaagaagagccugggcauguucgugagcgacacccccggcgagagaaaccccuacgagaacauccuguacaagaucugccugagcggcgacggcuggcccuacaucgccagcagaaccagcaucgugggcagagccugggagaacaccaccguggaccuggagagcgacggcaagccccacaaggugggcaccgccggcagcaacaagagccugcagagcgccggcuuccccaccggccugaccuacagccagcugaugacccugaaggacagcaugaugcagcuggaccccagcgccaagaccuggaucgacaucgagggcagacccgaggaccccguggagaucgcccuguaccagcccaugagcggcugcuacauccacuucuucagagagcccaccgaccugaagcaguucaagcaggacgccaaguacagccacggcaucgacguggccgaccuguuccccgcccagcccggccugaccagcgccgugaucgaggcccugcccagaaacauggugcugaccugccagggcagcgacgacaucaagagacugcuggacagccagggcagaaaggacaucaagcugaucgacaucgcccugagcaagaccgacagcagaagauucgagaacgccgugugggaccagugcaaggaccugugccacaugcacaccggcguggugguggagaagaagaagagaggcggcaaggaggagaucaccccccacugcgcccugauggacugcaucauguacgacgccgccgugagcggcggccugaacauccccgugcugagagccgugcugcccagagacaugguguucagaaccagcagccccaagguggugcugugaggacuaguuauaagacugacuagcccgaugggccucccaacgggcccuccuccccuccuugcaccgagauuaaucaaaggcucuuuucagagccaccaaaaaaaaaaaaaaaaaaaaaaaaaaaaaaaaaaaaaaaaaaaaaaaaaaaaaaaaaaaaaaaaagaauu

SEQ ID NO: 21791 - RNA, 1943 nt, Artificial Sequence
  mRNA product Design i-3 (hSL-A64-N5) comprising derived and/or modified sequence from LASV(LASV003-NIG-2008;Clade II)__AIT17581__SP-IgE_NP(2-569) (opt4)
aggagaaagcuuaccauggacuggaccuggauccuguuccugguggccgccgccaccagagugcacagcagcgccagcaaggaggugaagagcuuccuguggacccagagccugagaagagagcugagcggcuacugcagcagcaucaagcugcagguggugaaggacgcccaggcccugcugcacggccuggacuucagcgaggugagcaacgugcagagacugaugagaaagcagaagagagacgacagcgaccugaagagacugagagaccugaaccaggccgugaacaaccugguggagcugaagagcacccagcagaagagcgugcugagagugggcacccugaccagcgacgaccugcugacccuggccgccgaccuggagaagcugaagagcaaggugaucagaaccgagagaccccugagcagcggcguguacaugggcaaccugagcgcccagcagcuggagcagagaagaacccugcugaacaugaucggcauggugggcggcgcccagggcacccagcccggcagagacggcguggugagagugugggacgugaagaaccccgaccugcugaacaaccaguucggcaccaugcccagccugacccuggccugccugaccaagcagggccagguggaccugaacgacguggugcuggcccugaccgaccugggccugaucuacaccgccaaguaccccaacagcagcgaccuggacagacugagccagagccaccccauccugagcaugguggacaccaagaagagcagccugaacaucagcggcuacaacuucagccugggcgccgccgugaaggccggcgccugcaugcuggacggcggcaacaugcuggagaccaucaaggugaccccccagaccauggacggcauccugaagagcauccugaaggugaagaagagccugggcauguucgugagcgacacccccggcgagagaaaccccuacgagaacauccuguacaagaucugccugagcggcgacggcuggcccuacaucgccagcagaaccagcaucgugggcagagccugggagaacaccaccguggaccuggagagcgacggcaagccccagaaggugggcaccgccggcagcaacaagagccugcagagcgccggcuuccccaccggccugaccuacagccagcugaugacccugaaggacagcaugaugcagcuggaccccagcgccaagaccuggaucgacaucgagggcagacccgaggaccccguggagaucgcccuguaccagcccaugagcggcugcuacauccacuucuucagagagcccaccgaccugaagcaguucaagcaggacgccaaguacagccacggcaucgacgugaccgaccuguuccccgcccagcccggccugaccagcgccgugaucgaggcccugcccagaaacauggugcugaccugccagggcagcgacgacaucaagagacugcuggacagccagggcagaagagacaucaagcugaucgacaucgcccugagcaaggccgacagcagaagauucgagaacgccgugugggaccagugcaaggaccugugccacaugcacaccggcguggugguggagaagaagaagagaggcggcaaggaggagaucaccccccacugcgcccugauggacugcaucauguacgacgccgccgugagcggcggccugaacauccccgugcugagagccgugcugcccagagacaugguguucagaaccagcagccccaagguggugcugugaggacuaguuauaagacugacuagcccgaugggccucccaacgggcccuccuccccuccuugcaccgagauuaaucaaaggcucuuuucagagccaccaaaaaaaaaaaaaaaaaaaaaaaaaaaaaaaaaaaaaaaaaaaaaaaaaaaaaaaaaaaaaaaaagaauu

SEQ ID NO: 21792 - RNA, 1943 nt, Artificial Sequence
  mRNA product Design i-3 (hSL-A64-N5) comprising derived and/or modified sequence from LASV(LASV035-NIG-2009;Clade II)__AIT17589__SP-IgE_NP(2-569) (opt4)
aggagaaagcuuaccauggacuggaccuggauccuguuccugguggccgccgccaccagagugcacagcagcgccagcaaggaggugaagagcuuccuguggacccagagccugagaagagagcugagcggcuacugcagcagcaucaagcugcagguggugaaggacgcccaggcccugcugcacggccuggacuucagcgaggugagcaacgugcagagacugaugagaaagcagaagagagacgacagcgaccugaagagacugagagaccugaaccaggccgugaacaaccugguggagcugaagagcacccagcagaagagcauccugagagugggcacccugaccagcgacgaccugcugacccuggccgccgaccuggagaagcugaagagcaaggugaucagaaccgagagaccccugagcagcggcguguacaugggcaaccugagcgcccagcagcuggagcagagaagagcccugcugaacaugaucggcauggugggcggcgcccagggcacccagcccggcagagacggcguggugagagugugggacgugaagaaccccgaccugcugaacaaccaguucggcaccaugcccagccugacccuggccugccugaccaagcagggccagguggaccugaacgacgccgugcuggcccugaccgaccugggccugaucuacaccgccaaguaccccaacagcagcgaccuggacagacugagccagagccaccccauccugaacaugguggacaccaagaagagcagccugaacaucagcggcuacaacuucagccugggcgccgccgugaaggccggcgccugcaugcuggacggcggcaacaugcuggagaccaucaaggugaccccccagaccauggacggcauccugaagagcauccugaaggugaagagaagccugggcauguucgugagcgacacccccggcgagagaaaccccuacgagaacauccuguacaagaucugccugagcggcgacggcuggcccuacaucgccagcagaaccagcaucgugggcagagccugggagaacaccaccguggaccuggagagcgacggcaagccccagaaggugggcaccaccggcagcaacaagagccugcagagcgccggcuuccccaccggccugaccuacagccagcugaugacccugaaggacagcaugaugcagcuggaccccagcgccaagaccuggaucgacaucgagggcagacccgaggaccccguggagaucgcccuguaccagcccaugagcggcugcuacauccacuucuucagagagcccaccgaccugaagcaguucaagcaggacgccaaguacagccacggcaucgacguggccgaccuguuccccgcccagcccggccugaccagcgccgugaucgaggcccugcccagaaacauggugcugaccugccagggcagcgacgacaucaagaagcugcuggacagccagggcagaagagacaucaagcugaucgacaucgcccugagcaaggccgacagcagaaaguucgagaacgccgugugggaccagugcaaggaccugugccacaugcacaccggcguggugguggagaagaagaagagaggcggcaaggaggagaucaccccccacugcgcccugauggacugcaucauguacgacgccgccgugagcggcggccugaacauccccgugcugagagccgugcugcccagagacaugguguucagaaccagcagccccaagguggugcugugaggacuaguuauaagacugacuagcccgaugggccucccaacgggcccuccuccccuccuugcaccgagauuaaucaaaggcucuuuucagagccaccaaaaaaaaaaaaaaaaaaaaaaaaaaaaaaaaaaaaaaaaaaaaaaaaaaaaaaaaaaaaaaaaagaauu

SEQ ID NO: 21793 - RNA, 1943 nt, Artificial Sequence
  mRNA product Design i-3 (hSL-A64-N5) comprising derived and/or modified sequence from LASV(LASV1000-NIG-2009;Clade II)__AIT17783__SP-IgE_NP(2-569) (opt4)
aggagaaagcuuaccauggacuggaccuggauccuguuccugguggccgccgccaccagagugcacagcagcgccagcaaggaggugaagagcuuccuguggacccagagccugagaagagagcugagcggcuacugcagcaacaucaagcugcagguggugaaggacgcccaggcccugcugcacggccuggacuucagcgaggugagcaacgugcagagacugaugagaaagcagaagagagacgacagcgaccugaagagacugagagaccugaaccaggccgugaacaaccugguggagcugaagagcacccagcagaagagcauccugagagugggcacccugaccagcgacgaccugcugacccuggccgccgaccuggagaagcugaagagcaaggugaucagaaccgagagaccccugagcagcggcguguacaugggcaaccugagcacccagcagcuggagcagagaagagcccugcugaacaugaucggcauggugggcggcgcccagggcacccagcccggcagagacggcguggugagagugugggacgugaagaaccccgaccugcugaacaaccaguucggcaccaugcccagccugacccuggccugccugaccaagcagggccagguggaccugaacgacguggugcuggcccugaccgaccugggccugaucuacaccgccaaguaccccaacagcagcgaccuggacagacugagccagagccaccccauccugaacaugguggacaccaagaagagcagccugaacaucagcggcuacaacuucagccugggcgccgccgugaaggccggcgccugcaugcuggacggcggcaacaugcuggagaccaucaaggugaccccccagaccauggacggcauccugaagagcauccugaaggugaagaagagccugggcauguucgugagcgacacccccggcgagagaaaccccuacgagaacauccuguacaagaucugccugagcggcgacggcuggcccuacaucgccagcagaaccagcaucgugggcagagccugggagaacaccaccguggaccuggagagcgacggcaagccccagaaggugggcaccgccggcagcaacaagagccugcagagcgccggcuuccccaccggccugaccuacagccagcugaugacccugaaggacagcaugaugcagcuggaccccagcgccaagaccuggaucgacaucgagggcagacccgaggaccccguggagaucgcccuguaccagcccgugagcggcugcuacauccacuucuucagagagcccaccgaccugaagcaguucaagcaggacgccaaguacagccacggcaucgacguggccgaccuguuccccgcccagcccggccugaccagcgccgugaucgaggcccugcccagaaacauggugcugaccugccagggcagcgacgacaucaagagacugcuggacagccagggcagaagagacaucaagcugaucgacaucgcccugagcaaggccgacagcagaagauucgagaacgccgugugggaccagugcaaggaccugugccacaugcacaccggcguggugguggagaagaagaagagaggcggcaaggaggagaucaccccccacugcgcccugauggacugcaucauguacgacgccgccgugagcggcggccugaacauccccgugcugagagccgugcugcccagagacaugguguucagaaccagcagccccaagguggugcugugaggacuaguuauaagacugacuagcccgaugggccucccaacgggcccuccuccccuccuugcaccgagauuaaucaaaggcucuuuucagagccaccaaaaaaaaaaaaaaaaaaaaaaaaaaaaaaaaaaaaaaaaaaaaaaaaaaaaaaaaaaaaaaaaagaauu

SEQ ID NO: 21794 - RNA, 1943 nt, Artificial Sequence
  mRNA product Design i-3 (hSL-A64-N5) comprising derived and/or modified sequence from LASV(LASV221-NIG-2010;Clade II)__AIT17625__SP-IgE_NP(2-569) (opt4)
aggagaaagcuuaccauggacuggaccuggauccuguuccugguggccgccgccaccagagugcacagcagcgccagcaaggaggugaagagcuuccuguggacccagagccugagaagagagcugagcggcuacugcagcagcaucaagcugcagguggugaaggacgcccaggcccugcugcacggccuggacuucagcgaggugagcaacgugcagagacugaugagaaagcagagaagagacgacagcgaccugaagagacugagagaccugaaccaggccgugaacaaccugguggagcugaagagcacccagcagaagagcauccugagagugggcacccugaccagcgacgaccugcugacccuggccgccgaccuggagaagcugaagagcaaggugaucagaaccgagagaccccugagcagcggcguguacaugggcaaccugagcacccagcagcuggagcagagaagagcccugcugaacaugaucggcauggugggcggcgcccagggcacccagcccggcagagacggcguggugagagugugggacgugaagaaccccgaccugcugaacaaccaguucggcaccaugcccagccugacccuggccugccugaccaagcagggccagguggaccugaacgacgccgugcuggcccugaccgaccugggccugaucuacaccgccaaguaccccaacagcagcgaccuggacagacugagccagagccaccccauccugaacaugguggacaccaagaagagcagccugaacaucagcggcuacaacuucagccugggcgccgccgugaaggccggcgccugcaugcuggacggcggcaacaugcuggagaccaucaaggugaccccccagaccguggacggcauccugaagagcauccugaaggugaagagaagccugggcauguucgugagcgacacccccggcgagagaaaccccuacgagaacauccuguacaagaucugccugagcggcgacggcuggcccuacaucgccagcagaaccagcaucgugggcagagccugggagaacaccaccguggaccuggagagcgacggcaagccccagaaggugggcaccgccggcagcaacaagagccugcagagcgccggcuuccccaccggccugaccuacagccagcugaugacccugaaggacagcaugaugcagcuggaccccagcgccaagaccuggaucgacaucgagggcagacccgaggaccccguggagaucgcccuguaccagcccaugagcggcugcuacauccacuucuucagagagcccaccgaccugaagcaguucaagcaggacgccaaguacagccacggcaucgacguggccgaccuguuccccgcccagcccggccugaccagcgccgugaucgaggcccugcccagaaacauggugcugaccugccagggcagcgacgacaucaagagacugcuggacagccagggcagaagagacaucaagcugaucgacaucgcccugagcaaggccgacagcagaaaguucgagaacgccgugugggaccagugcaaggaccugugccacaugcacaccggcguggugguggagaagaagaagagaggcggcaaggaggagaucaccccccacugcgcccugauggacugcaucauguacgacgccgccgugagcggcggccugaacauccccgugcugagagccgugcugcccagagacaugguguucagaaccagcagccccaagguggugcugugaggacuaguuauaagacugacuagcccgaugggccucccaacgggcccuccuccccuccuugcaccgagauuaaucaaaggcucuuuucagagccaccaaaaaaaaaaaaaaaaaaaaaaaaaaaaaaaaaaaaaaaaaaaaaaaaaaaaaaaaaaaaaaaaagaauu

SEQ ID NO: 21795 - RNA, 1943 nt, Artificial Sequence
  mRNA product Design i-3 (hSL-A64-N5) comprising derived and/or modified sequence from LASV(LASV237-NIG-2010;Clade II)__AIT17639__SP-IgE_NP(2-569) (opt4)
aggagaaagcuuaccauggacuggaccuggauccuguuccugguggccgccgccaccagagugcacagcagcgccagcaaggaggugaagagcuuccuguggacccagagccugagaagagagcugagcggcuacugcagcaacaucaagcugcagguggugaaggacgcccaggcccugcugcacggccuggacuucagcgaggugagcaacgugcagagacugaugagaaagcagaagagagacgacagcgaccugaagagacugagagaccugaaccaggccgugaacaaccugguggagcugaagagcacccagcagaagagcauccugagagugggcacccugaccagcgacgaccugcugacccuggccgccgaccuggagaagcugaagagcaaggugaucagaaccgagagaccccugagcagcggcguguacaugggcaaccugagcacccagcagcuggagcagagaagagcccugcugaacaugaucggcauggugggcggcgcccagggcacccagcccggcagagacggcguggugagagugugggacgugaagaaccccgaccugcugaacaaccaguucggcaccaugcccagccugacccuggccugccugaccaagcagggccagguggaccugaacgacgccgugcuggcccugaccgaccugggccugaucuacaccgccaaguaccccaacagcagcgaccuggacagacugagccagagccaccccauccugaacaugguggacaucaagaagagcagccugaacaucagcggcuacaacuucagccugggcgccgccgugaaggccggcgccugcaugcuggacggcggcaacaugcuggagaccaucaaggugaccccccagaccauggacggcauccugaagagcauccugaaggugaagagaagccugggcauguucgugagcgacacccccggcgagagaaaccccuacgagaacauccuguacaagaucugccugagcggcgacggcuggcccuacaucgccagcagaaccagcaucgugggcagagccugggagaacaccaccguggaccuggagagcgacggcaagccccagaaggugggcagcgccggcagcaacaagagccugcagagcgccggcuuccccaccggccugaccuacagccagcugaugacccugaaggacagcaugaugcagcuggaccccagcgccaagaccuggaucgacaucgagggcagacccgaggaccccguggagaucgcccuguaccagcccaugagcggcugcuacauccacuucuucagagagcccaccgaccugaagcaguucaagcaggacgccaaguacagccacggcaucgacguggccgaccuguuccccgcccagcccggccugaccagcgccgugaucgaggcccugcccagaaacauggugcugaccugccagggcagcgacgacaucaagagacugcuggacagccagggcagaagagacaucaagcugaucgacaucgcccugagcaaggccgacagcagaagauucgagaacgccgugugggaccagugcaaggaccugugccacaugcacaccggcguggugguggagaagaagaagagaggcggcaaggaggagaucaccccccacugcgcccugauggacugcaucauguacgacgccgccgugagcggcggccugaacauccccgugcugagagccgugcugcccagagacaugguguucagaaccagcagccccaagguggugcugugaggacuaguuauaagacugacuagcccgaugggccucccaacgggcccuccuccccuccuugcaccgagauuaaucaaaggcucuuuucagagccaccaaaaaaaaaaaaaaaaaaaaaaaaaaaaaaaaaaaaaaaaaaaaaaaaaaaaaaaaaaaaaaaaagaauu

SEQ ID NO: 21796 - RNA, 1943 nt, Artificial Sequence
  mRNA product Design i-3 (hSL-A64-N5) comprising derived and/or modified sequence from LASV(LASV253-NIG-2011;Clade II)__AIT17671__SP-IgE_NP(2-569) (opt4)
aggagaaagcuuaccauggacuggaccuggauccuguuccugguggccgccgccaccagagugcacagcagcgccagcaaggaggugaagagcuuccuguggacccagagccugagaagagagcugagcggcuacugcagcagcaucaagcugcagguggugaaggacgcccaggcccugcugcacggccuggacuucagcgaggugagcaacgugcagagacugaugagaaagcagaagagagacgacagcgaccugaagagacugagagaccugaaccaggccgugaacaaccugguggagcugaagagcacccagcagaagagcgugcugagagugggcacccugaccagcgacgaccugcugacccuggccgccgaccuggagaagcugaagagcaaggugaucagaaccgagagaccccugagcagcggcguguacaugggcaaccugagcacccagcagcuggagcagagaagagcccugcugaacaugaucggcauggugggcggcgcccagggcacccagcccggcagagacggcguggugagagugugggacgugaagaaccccgaccugcugaacaaccaguucggcaccaugcccagccugacccuggccugccugaccaagcagggccagguggaccugaacgacguggugcuggcccugaccgaccugggccugaucuacaccgccaaguaccccaacagcagcgaccuggacagacugagccagagccaccccauccugaacaugguggacaccaagaagagcagccugaacaucagcggcuacaacuucagccugggcgccgccgugaaggccggcgccugcaugcuggacggcggcaacaugcuggagaccaucaaggugaccccccagaccauggacggcauccugaagagcauccugaaggugaagaagagccugggcauguucgugagcgacacccccggcgagagaaaccccuacgagaacauccuguacaagaucugccugagcggcgacggcuggcccuacaucgccagcagaaccagcaucgugggcagagccugggagaacaccaccguggaccuggagagcgacggcaagccccagaaggugggcaccgccggcagcaacaagagccugcagagcgccggcuuccccaccggccugaccuacagccagcugaugacccugaaggacagcaugaugcagcuggaccccagcgccaagaccuggaucgacaucgagggcagacccgaggaccccguggagaucgcccuguaccagcccaugagcggcugcuacauccacuucuucagagagcccaccgaccugaagcaguucaagcaggacgccaaguacagccacggcaucgacgugaccgaccuguuccccgcccagcccggccugaccagcgccgugaucgaggcccugcccagaaacauggugcugaccugccagggcagcgacgacaucaagagacugcuggacagccagggcagaagagacaucaagcugaucgacaucgcccugagcaaggccgacagcagaagauucgagaacgccgugugggaccagugcaaggaccugugccacaugcacaccggcguggugguggagaagaagaagagaggcggcaaggaggagaucaccccccacugcgcccugauggacugcaucauguacgacgccgccgugagcggcggccugaacauccccgugcugagagccgugcugcccagagacaugguguucagaaccagcagccccaagguggugcugugaggacuaguuauaagacugacuagcccgaugggccucccaacgggcccuccuccccuccuugcaccgagauuaaucaaaggcucuuuucagagccaccaaaaaaaaaaaaaaaaaaaaaaaaaaaaaaaaaaaaaaaaaaaaaaaaaaaaaaaaaaaaaaaaagaauu

SEQ ID NO: 21797 - RNA, 1943 nt, Artificial Sequence
  mRNA product Design i-3 (hSL-A64-N5) comprising derived and/or modified sequence from LASV(LASV254-NIG-2011;Clade II)__AIT17675__SP-IgE_NP(2-569) (opt4)
aggagaaagcuuaccauggacuggaccuggauccuguuccugguggccgccgccaccagagugcacagcagcgccagcaaggaggugaagagcuuccuguggacccagagccugagaagagagcugagcggcuacugcagcagcaucaagcugcagguggugaaggacgcccaggcccugcugcacggccuggacuucagcgaggugagcaacgugcagagacugaugagaaagcagaagagagacgacagcgaccugaagagacugagagaccugaaccaggccgugaacaaccugguggagcugaagagcacccagcagaagagcgugcugagagugggcacccugaccagcgacgaccugcugacccuggccgccgaccuggagaagcugaagagcaaggugaucagaaccgagagaccccugagcagcggcguguacaugggcaaccugagcacccagcagcuggagcagagaagagcccugcugaacaugaucggcauggugggcggcgcccagggcacccagcccggcagagacggcguggugagagugugggacgugaagaaccccgaccugcugaacaaccaguucggcaccaugcccagccugacccuggccugccugaccaagcagggccagguggaccugaacgacgccgugcuggcccugaccgaccugggccugaucuacaccgccaaguaccccaacagcagcgaccuggacagacugagccagagccaccccauccugaacaugguggacaccaagaagagcagccugaacaucagcggcuacaacuucagccugggcgccgccgugaaggccggcgccugcaugcuggacggcggcaacaugcuggagaccaucaaggugaccccccagaccauggacggcauccugaagagcauccugaaggugaagaagagccugggcauguucgugagcgacacccccggcgagagaaaccccuacgagaacauccuguacaagaucugccugagcggcgacggcuggcccuacaucgccagcagaaccagcaucgugggcagagccugggagaacaccaucguggaccuggagagcgacggcaagccccagaaggugggcaccgccggcagcaacaagagccugcagagcgccggcuuccccaccggccugaccuacagccagcugaugacccugaaggacagcaugaugcagcuggaccccagcgccaagaccuggaucgacaucgagggcagacccgaggaccccguggagaucgcccuguaccagcccaugagcggcugcuacauccacuucuucagagagcccaccgaccugaagcaguucaagcaggacgccaaguacagccacggcaucgacguggccgaccuguuccccgcccagcccggccugaccagcgccgugaucgaggcccugcccagaaacauggugcugaccugccagggcagcgacgacaucaagagacugcuggacagccagggcagaagagacaucaagcugaucgacaucgcccugagcaaggccgacagcagaagauucgagaacgccgugugggaccagugcaaggaccugugccacaugcacaccggcguggugguggagaagaagaagagaggcggcaaggaggagaucaccccccacugcgcccugauggacugcaucauguacgacgccgccgugagcggcggccugaacauccccgugcugagagccgugcugcccagagacaugguguucagaaccagcagccccaagguggugcugugaggacuaguuauaagacugacuagcccgaugggccucccaacgggcccuccuccccuccuugcaccgagauuaaucaaaggcucuuuucagagccaccaaaaaaaaaaaaaaaaaaaaaaaaaaaaaaaaaaaaaaaaaaaaaaaaaaaaaaaaaaaaaaaaagaauu

SEQ ID NO: 21798 - RNA, 1943 nt, Artificial Sequence
  mRNA product Design i-3 (hSL-A64-N5) comprising derived and/or modified sequence from LASV(Nig08-04;Clade II)__ADU56611__SP-IgE_NP(2-569) (opt4)
aggagaaagcuuaccauggacuggaccuggauccuguuccugguggccgccgccaccagagugcacagcagcgccagcaaggaggugaagagcuuccuguggacccagagccugagaagagagcugagcggcuacugcagcaacaucaagcugcagguggugaaggacgcccaggcccugcugcacggccuggacuucagcgaggugagcaacgugcagagacugaugagaaagcagaagagagacgacggcgaccugaagagacugagagaccugaaccaggccgugaacaaccugguggagcugaagagcacccagcagaagagcgugcugagagugggcacccugaccagcgacgaccugcugacccuggccgccgaccuggagaagcugaagagcaaggugaucagaaccgagagaccccugagcagcggcguguacaugggcaaccugagcacccagcagcuggagcagagaaaggcccugcugagcaugaucggcauggugggcggcgcccagggcacccagcccggcagagacggcguggugagagugugggacgugaagaaccccgaccugcugaacaaccaguucggcaccaugcccagccugacccuggccugccugaccaagcagggccagguggaccugaacgacgccgugcuggcccugaccgaccugggccugaucuacaccgccaaguaccccaacagcagcgaccuggacagacugagccagagccaccccauccugaacaugguggacaccaagaagagcagccugaacaucagcggcuacaacuucagccugggcgccgccgugaaggccggcgccugcaugcuggacggcggcaacaugcuggagaccaucaaggugaccccccagaccauggacggcauccugaagagcauccugaaggugaagagaagccugggcauguucgugagcgacacccccggcgagagaaaccccuacgagaacauccuguacaagaucugccugagcggcgacggcuggcccuacaucgccagcagaaccagcaucgugggcagagccugggagaacaccaccguggaccuggagagcgacggcaagccccagaaggugggcaccgccggcagcaacaagagccugcagagcgccggcuuccccaccggccugaccuacagccagcugaugacccugaaggacagcaugaugcagcuggaccccagcgccaagaccuggaucgacaucgagggcagacccgaggaccccguggagaucgcccuguaccagcccaugagcggcugcuacauccacuucuucagagagcccaccgaccugaagcaguucaagcaggacgccaaguacagccacggcaucgacgugaccgaccuguucagcgcccagcccggccugaccagcgccgugaucgaggcccugcccagaaacauggugcugaccugccagggcagcgacgacaucaagaagcugcuggacagccagggcagaagagacaucaagcugaucgacaucagccugaacaaggccgacagcagaagauucgagaacgccgugugggaccagugcaaggaccugugccacaugcacaccggcguggugguggagaagaagaagagaggcggcaaggaggagaucaccccccacugcgcccugauggacugcaucauguucgacgccgccgugagcggcggccugaacauccccauccugagagccgugcugcccagagacaugguguucagaaccagcagccccaagguggugcugugaggacuaguuauaagacugacuagcccgaugggccucccaacgggcccuccuccccuccuugcaccgagauuaaucaaaggcucuuuucagagccaccaaaaaaaaaaaaaaaaaaaaaaaaaaaaaaaaaaaaaaaaaaaaaaaaaaaaaaaaaaaaaaaaagaauu

SEQ ID NO: 21799 - RNA, 1946 nt, Artificial Sequence
  mRNA product Design i-3 (hSL-A64-N5) comprising derived and/or modified sequence from LASV(GA391;Clade III)__AAA46284__SP-IgE_NP(2-570) (opt4)
aggagaaagcuuaccauggacuggaccuggauccuguuccugguggccgccgccaccagagugcacagcagcgccagcaaggaggugagaagcugccuguggacccagagccugagaagagagcugagcggcuacugcagcaacaucaagcugcagguggugaaggacgcccaggcccugcugcacggccuggacuucagcgaggugagcaacgugcagagacugaugagaaagcagaagagagacgacggcgaccugaagagacugagagaccugaaccaggccgugaacaaccugguggagcugaagagcacccagcagaagagcgugcugagagugggcacccugagcagcgacgaccugcugauccuggccgccgaccuggagaagcugaagagcaaggugaccagaaccgagagaccccugagcagcggcguguacaugggcaaccugagcagccagcagcuggaccagagaagagcccugcugaacaugaucggcaugaccggcgugagcggcggcggcaagggcgccagcaacggcaucgugagagugugggacgugaagaacgccgagcugcugaacaaccaguucggcaccaugcccagccugacccuggccugccugaccaagcagggccagguggaccugaacgacgccgugcaggcccugaccgaccugggccugaucuacaccgccaaguaccccaacagcagcgaccuggacagacugagccagagccaccccauccugaacaugaucgacaccaagaagagcagccugaacaucagcggcuacaacuucagccugggcgccgccgugaaggccggcgccugcaugcuggacggcggcaacaugcuggagaccaucaaggugagcccccagaccauggacggcauccugaagagcauccugaaggugaagaagagccugggcauguucgugagcgacacccccggcgagagaaaccccuacgagaacauccuguacaagaucugccugagcggcgacggcuggagcuacaucgccagcagaaccagcaucgugggcagagccugggagaacaccgugguggaccuggagcaggacaacaagccccagaagaucggcaacggcggcagcaacaagagccugcagagcgccggcuucgccgccggccugaucuacagccagcugaugacccugaaggacuucaagugcuucaaccugauccccaacgccaagaccuggauggacaucgagggcagacccgaggaccccguggagaucgcccuguaccagcccagcagcggcugcuacgugcacuucuucagagagcccaccgaccugaagcaguucaagcaggacgccaaguacagccacggcagagacgugaccgaccuguucgccgcccagcccggccugaccagcgccgugaucgaggcccugcccagaaacauggugaucaccugccagggcagcgaggacaucagaaagcugcuggagagccagggcagaagagacaucaagcugaucgacaucacccugagcaaggccgacagcagaaaguucgagaacgccgugugggaccaguucaaggaccugugccacaugcacaccggcguggugguggagaagaagaagagaggcggcaaggaggagaucaccccccacugcgcccugauggacugcaucauguucgacgccgccgugagcggcggccuggacgccaaggugcugagaguggugcugcccagagacaugguguucagaaccagcacccccaagguggugcugugaggacuaguuauaagacugacuagcccgaugggccucccaacgggcccuccuccccuccuugcaccgagauuaaucaaaggcucuuuucagagccaccaaaaaaaaaaaaaaaaaaaaaaaaaaaaaaaaaaaaaaaaaaaaaaaaaaaaaaaaaaaaaaaaagaauu

SEQ ID NO: 21800 - RNA, 1943 nt, Artificial Sequence
  mRNA product Design i-3 (hSL-A64-N5) comprising derived and/or modified sequence from LASV(Nig08-A19;Clade III)__ADU56619__SP-IgE_NP(2-569) (opt4)
aggagaaagcuuaccauggacuggaccuggauccuguuccugguggccgccgccaccagagugcacagcagcgccagcaaggaggugaagagcuuccuguggacccagagccugagaagagagcugagcggcuacugcagcaacaucaagcugcagguggugaaggacgcccaggcccugcugcacggccuggacuucagcgaggugagcaacgugcagagacugaugagaaagcagaagagagacgacggcgaccugaagagacugagagaccugaaccaggccgugaacaaccugguggagcugaagagcacccagcagaagagcgugcugagagugggcacccugagcagcgacgaccugcuggugcuggccgccgaccuggagaagcugaagagcaagguggugagaaccgagagaccccugagcagcggcaucuacaugggcaaccugagcagccagcagcuggaccagagaaaggcccugcugaacaugaucggcaugaccggcggcaacggcggcagaaacaccaccagcgacggcaucgugagagugugggacgugaagaacgccgagcugcugaacaaccaguucggcaccaugcccagccugacccuggccugccugaccaagcagggccagguggaccugaacgacgccgugcaggcccugaccgaccugggccugaucuacaccgccaaguaccccaacagcagcgaccuggacagacuggcccagagccaccccauccugaacaugaucgacaccaagaagagcagccugaacaucagcggcuacaacuucagccugggcgccgccgugaaggccggcgccugcaugcuggacggcggcaacaugcuggagaccaucaaggugagcccccagaccauggacggcauccugaagagcauccugaaggugaagagaagccugggcauguucaucagcgacacccccggcgagagaaaccccuacgagaacauccuguacaagaucugccugagcggcgacggcuggcccuacaucgccagcagaaccagcaucgugggcagagccugggagaacaccgugguggaccuggagagcgacaacaagccccagaagaccggcaacggcggcagcaacaagagccugcagagcgccggcuucgccgccggccugaccuacagccagcugaugacccugaaggacagcaugcugcagcuggaccccaacgccaagaccuggauggacaucgagggcagacccgaggaccccguggagaucgcccuguaccagcccagcagcggcugcuacauccacuucuucagagagcccaccgaccugaagcaguucaagcaggacgccaaguacagccacggcaucgacgugaccgaccuguucgccgcccagcccggccugaccagcgccgugaucgaggcccugcccagaaacauggugaucaccugccagggcagcgaggacaucagaaagcugcuggagagccagggcagaagagacaucaagcugaucgacaucagccugagcaagguggacagcagaaaguucgagaacgccgugugggaccaguucaaggaccugugccacaugcacaccggcaucgugguggagaagaagaagagaggcggcaaggaggagaucaccccccacugcgcccugauggacugcaucauguucgacgccgccgugagcggcggcguggacgccaaggugcugagagccgugcugcccagagacaugguguucagaaccagcacccccaagguggugcugugaggacuaguuauaagacugacuagcccgaugggccucccaacgggcccuccuccccuccuugcaccgagauuaaucaaaggcucuuuucagagccaccaaaaaaaaaaaaaaaaaaaaaaaaaaaaaaaaaaaaaaaaaaaaaaaaaaaaaaaaaaaaaaaaagaauu

SEQ ID NO: 21801 - RNA, 1943 nt, Artificial Sequence
  mRNA product Design i-3 (hSL-A64-N5) comprising derived and/or modified sequence from LASV(G1180-SLE-2010;Clade IV)__AIT17169__SP-IgE_NP(2-569) (opt4)
aggagaaagcuuaccauggacuggaccuggauccuguuccugguggccgccgccaccagagugcacagcagcgccagcaaggagaucaagagcuuccuguggacccagagccugagaagagagcugagcggcuacugcagcaacaucaagcugcagguggugaaggacgcccaggcccugcugcacggccuggacuucagcgaggugagcaacgugcagagacugaugagaaaggagagaagagacgacaacgaccugaagagacugagagaccugaaccaggccgugaacaaccugguggagcugaagagcacccagcagaagagcauccugagagugggcacccugaccagcgacgaccugcugauccuggccgccgaccuggagaagcugaagagcaaggugaucagaaccgagagaccccugagcgccggcguguacaugggcaaccugagcagccagcagcuggaccagagaagagcccugcugagcaugaucggcaugagcagcggcaaccagagagcccaggccggcagagacggcguggugagagugugggacgugaagaacguggagcugcugaacaaccaguucggcaccaugcccagccugacccuggccugccugaccaagcagggccagguggaccugaacgacgccgugcaggcccugaccgaccugggccugaucuacaccgccaaguaccccaacaccagcgaccuggacagacugacccagagccaccccauccugaacaugaucgacaccaagaagagcagccugaacaucagcggcuacaacuucagccugggcgccgccgugaaggccggcgccugcaugcuggacggcggcaacaugcuggagaccaucaaggugagcccccagaccauggacggcauccugaagagcauccugaaggugaagaaggcccugggcauguucaucagcgacacccccggcgagagaaaccccuacgagaacauccuguacaagaucugccugagcggcgacggcuggcccuacaucgccagcagaaccagcaucaccggcagagccugggagaacaccgugguggaccuggagagcgacggcaagccccagaaggccggcagcaacaacagcaacaagagccugcagagcgugggcuucaccgccggccugaccuacagccagcugaugacccugaaggacgccaugcugcagcuggaccccaacgccaagaccuggauggacaucgagggcagacccgaggaccccguggagaucgcccuguaccagcccagcagcggcugcuacauccacuucuucagagagcccaccgaccugaagcaguucaagcaggacgccaaguacagccacggcaucgacgugaccgaccuguucgccgcccagcccggccugaccagcgccgugaucgacgcccugcccagaaacauggugaucaccugccagggcagcgacgacaucagaaagcugcuggagagccagggcagaaaggacaucaagcugaucgacaucgcccugagcaagaccgacagcagaaaguacgagaacgccgugugggaccaguacaaggaccugugccacaugcacaccggcguggugguggagaagaagaagagaggcggcaaggaggagaucaccccccacugcgcccugauggacugcaucauguucgacgccgccgugagcggcggccugaacaccagcgugcugagagccgugcugcccagagacaugguguucagaaccagcacccccagaguggugcugugaggacuaguuauaagacugacuagcccgaugggccucccaacgggcccuccuccccuccuugcaccgagauuaaucaaaggcucuuuucagagccaccaaaaaaaaaaaaaaaaaaaaaaaaaaaaaaaaaaaaaaaaaaaaaaaaaaaaaaaaaaaaaaaaagaauu

SEQ ID NO: 21802 - RNA, 1943 nt, Artificial Sequence
  mRNA product Design i-3 (hSL-A64-N5) comprising derived and/or modified sequence from LASV(G1442-SLE-2011;Clade IV)__AIT17181__SP-IgE_NP(2-569) (opt4)
aggagaaagcuuaccauggacuggaccuggauccuguuccugguggccgccgccaccagagugcacagcagcgccagcaaggaggugaagagcuuccuguggacccagagccugagaagagagcugagcggcuacugcagcaacaucaagcugcagguggugaaggacgcccaggcccugcugcacggccuggacuucagcgaggugagcaacgugcagagacugaugagaaagcagagaagagacgacaacgaccugaagagacugagagaccugaaccaggccgugaacaaccugguggagcugaagagcacccagcagaagagcgugcugagagugggcacccugaccagcgacgaccugcuggugcuggccgccgaccuggagaagcugaagagcaaggugaucagaaccgagagaccccugagcgccggcguguacaugggcaaccugagcagccagcagcuggaccagagaagagcccugcugaacaugaucggcaugagcggcggcauccagggcaccagaaccggcagagacggcguggugagagugugggacgugaagaacgccgaccugcugaacaaccaguucggcaccaugcccagccugacccuggccugccugaccaagcagggccagguggaccugaacgacguggugcaggcccugaccgaccugggccugaucuacaccgccaaguaccccaacgccagcgaccuggacagacugacccagagccaccccauccugaacaugaucgacaccaagaagagcagccugaacaucagcggcuacaacuucagccugggcgccgccgugaaggccggcgccugcaugcuggacggcggcaacaugcuggagaccaucaaggugagcccccagaccauggacggcauccugaagagcauccugaaggugaagaagacccugggcauguucaucagcgacacccccggcgagagaaaccccuacgagaacauccuguacaagaucugccugagcggcgacggcuggcccuacaucgccagcagaaccagcaucaccggcagagccugggagaacaccgugguggaccuggagagcgacggcaagccccagaaggccggcagcaacaacagcaacaagagccugcagagcgccggcuucgccgccggccugaccuacagccagcugaugacccugaaggacgccaugcugcagcuggaccccaacgccaagaccuggauggacaucgagggcagacccgaggaccccguggagaucgcccuguaccagcccagcagcggcugcuacauccacuucuucagagagcccaccgaccugaagcaguucaagcaggacgccaaguacagccacggcaucgacgugaccgaccuguucgccgcccagcccggccugaccagcgccgugaucgaggcccugcccagaaacauggugaucaccugccagggcagcgacgacaucaagaagcugcuggagagccagggcagaaaggacaucaagcugaucgacaucgcccugagcaagaccgacagcagaaaguacgagaacgccgugugggaccaguacaaggaccugugccacaugcacaccggcguggugguggagaagaagaagagaggcggcaaggaggagaucaccccccacugcgcccugauggacugcaucauguucgacgccgccgugagcggcggccugaacacccuggugcugagagccgugcugcccagagacaugguguucagaaccagcacccccagaguggugcugugaggacuaguuauaagacugacuagcccgaugggccucccaacgggcccuccuccccuccuugcaccgagauuaaucaaaggcucuuuucagagccaccaaaaaaaaaaaaaaaaaaaaaaaaaaaaaaaaaaaaaaaaaaaaaaaaaaaaaaaaaaaaaaaaagaauu

SEQ ID NO: 21803 - RNA, 1943 nt, Artificial Sequence
  mRNA product Design i-3 (hSL-A64-N5) comprising derived and/or modified sequence from LASV(G3010-SLE-2013;Clade IV)__AIT17345__SP-IgE_NP(2-569) (opt4)
aggagaaagcuuaccauggacuggaccuggauccuguuccugguggccgccgccaccagagugcacagcagcgccagcaaggagaucaagagcuuccuguggacccagagccugagaagagagcugagcggcuacugcagcaacaucaagcugcagguggugaaggacgcccaggcccugcugcacggccuggacuucagcgaggugagcaacgugcagagacugaugagaaaggagagaagagacgacaacgaccugaagagacugagagaccugaaccaggccgugaacaaccugguggagcugaagagcacccagcagaagagcauccugagagugggcacccugaccagcgacgaccugcugauccuggccgccgaccuggagaagcugaagagcaaggugaccagaaccgagagaccccugagcgccggcguguacaugggcaaccugagcagccagcagcuggaccagagaagagcccugcugagcaugaucggcaugagcagcggcgugcagggcgccagagccggcagagacggcguggugagagugugggacgugaagaacgccgagcugcugaacaaccaguucggcaccaugcccagccugacccuggccugccugaccaagcagggccagguggaccugaacgacguggugcaggcccugaccgaccugggccugaucuacaccgccaaguaccccaacaccagcgaccuggacagacugacccagagccaccccauccugaacaugaucgacaccaagaagagcagccugaacaucagcggcuacaacuucagccugggcgccgccgugaaggccggcgccugcaugcuggacggcggcaacaugcuggagaccaucaaggugagcccccagaccauggacggcauccugaagagcauccugaaggugaagaaggcccugggcauguucaucagcgagacccccggcgagagaaaccccuacgagaacauccuguacaagaucugccugagcggcgacggcuggcccuacaucgccagcagaaccagcaucaccggcagagccugggagaacaccgugguggaccuggagagcgacggcaagccccagaaggccggcagcaacaacagcaacaagagccugcagagcgccggcuucaccgccggccugaccuacagccagcugaugacccugaaggacgccaugcugcagcuggaccccaacgccaagaccuggauggacaucgagggcagacccgaggaccccguggagguggcccuguaccagcccagcagcggcugcuacauccacuucuucagagagcccaccgaccugaagcaguucaagcaggacgccaaguacagccacggcaucgacgugaccgaccuguucgccgcccagcccggccugaccagcgccgugaucgacgcccugcccagaaacauggugaucaccugccagggcagcgacgacaucaagaagcugcuggagagccagggcagaaaggacaucaagcugaucgacaucgcccugagcaagaccgacagcagaaaguacgagaacgccgugugggaccaguacaaggaccugugccacaugcacaccggcguggugguggagaagaagaagagaggcggcaaggaggagaucaccccccacugcgcccugauggacugcaucauguucgacgccgccgugagcggcggccugaacaccagcgugcugagagccgugcugcccagagacaugguguucagaaccagcacccccagaguggugcugugaggacuaguuauaagacugacuagcccgaugggccucccaacgggcccuccuccccuccuugcaccgagauuaaucaaaggcucuuuucagagccaccaaaaaaaaaaaaaaaaaaaaaaaaaaaaaaaaaaaaaaaaaaaaaaaaaaaaaaaaaaaaaaaaagaauu

SEQ ID NO: 21804 - RNA, 1943 nt, Artificial Sequence
  mRNA product Design i-3 (hSL-A64-N5) comprising derived and/or modified sequence from LASV(G502-SLE-2009;Clade IV)__AIT17127__SP-IgE_NP(2-569) (opt4)
aggagaaagcuuaccauggacuggaccuggauccuguuccugguggccgccgccaccagagugcacagcagcgccagcaaggagaucaagagcuuccuguggacccagagccugagaagagagcugagcggcuacugcagcaacaucaagcugcagguggugaaggacgcccaggcccugcugcacggccuggacuucagcgaggugagcaacgugcagagacugaugagaaaggagagaagagacgacaacgaccugaagagacugagagaccugaaccaggccgugaacaaccugguggagcugaagagcacccagcagaagagcauccugagagugggcacccugaccagcgacgaccugcugauccuggccgccgaccuggagaagcugaagagcaaggugaucagaaccgagagaccccugagcgccggcguguacaugggcaaccugagcagccagcagcuggaccagagaagagcccugcugagcaugaucggcaugagcggcggcaaccagggcgugagagccggcaaggacggcguggugagagugugggacgugaagaacgccgagcugcugaacaaccaguucggcaccaugcccagccugacccuggccugccugaccaagcagggccagguggaccugaacgacgccgugcaggcccugaccgaccugggccugaucuacaccgccaaguaccccaacaccagcgaccuggacagacugacccagagccaccccauccugaacaugaucgacaccaagaagagcagccugaacaucagcggcuacaacuucagccugggcgccgccgugaaggccggcgccugcaugcuggacggcggcaacaugcuggagaccaucaaggugagcccccagaccauggacggcauccugaagagcauccugaaggugaagaaggcccugggcauguucaucagcgacacccccggcgagagaaaccccuacgagaacauccuguacaagaucugccugagcggcgacggcuggcccuacaucgccagcagaaccagcaucaccggcagagccugggagaacaccgugguggaccuggagagcgacggcaagccccagaaggccggcagcaacaacagcaacaagagccugcagagcgccggcuucaccgccggccugaccuacagccagcugaugacccugaaggacgccaugcugcagcuggaccccaacaccaagaccuggauggacaucgagggcagacccgaggaccccguggagaucgcccuguaccagcccagcagcggcugcuacauccacuucuucagagagcccaccgaccugaagcaguucaagcaggacgccaaguacagccacggcaucgacgugaccgaccuguucgccgcccagcccggccugaccagcgccgugaucgacgcccugcccagaaacauggugaucaccugccagggcagcgacgacaucagaaagcugcuggagagccagggcagaaaggacaucaagcugaucgacaucgcccugaacaagaccgacagcagaaaguacgagaacgccgugugggaccaguacaaggaccugugccacaugcacaccggcguggugguggagaagaagaagagaggcggcaaggaggagaucaccccccacugcgcccugauggacugcaucauguucgacgccgccgugagcggcggccugaacaccagcgugcugagagccgugcugcccagagacaugguguucagaaccagcacccccagaguggugcugugaggacuaguuauaagacugacuagcccgaugggccucccaacgggcccuccuccccuccuugcaccgagauuaaucaaaggcucuuuucagagccaccaaaaaaaaaaaaaaaaaaaaaaaaaaaaaaaaaaaaaaaaaaaaaaaaaaaaaaaaaaaaaaaaagaauu

SEQ ID NO: 21805 - RNA, 1943 nt, Artificial Sequence
  mRNA product Design i-3 (hSL-A64-N5) comprising derived and/or modified sequence from LASV(G733-SLE-2010;Clade IV)__AIT17155__SP-IgE_NP(2-569) (opt4)
aggagaaagcuuaccauggacuggaccuggauccuguuccugguggccgccgccaccagagugcacagcagcgccagcaaggagaucaagagcuuccuguggacccagagccugagaagagagcugagcggcuacugcagcaacaucaagcugcagguggugaaggacgcccaggcccugcugcacggccuggacuucagcgaggugagcaacgugcagagacugaugagaaaggagagaagagacgacaacgaccugaagagacugagagaccugaaccaggccgugaacaaccugguggagcugaagagcacccagcagaagagcgugcugagagugggcacccugaccagcgacgagcugcuggugcuggccgccgaccuggagaagcugaagagcaaggugaucagaaccgagagaccccugagcgccggcguguacaugggcaaccugagcagccagcagcuggaccagagaagagcccugcugagcaugaucggcaugagcggcggcaaccagggcgccagaaccggcagagacggcguggugagagugugggacgugaagaacgccgagcugcugaacaaccaguucggcaccaugcccagccugacccuggccugccugaccaagcagggccagguggaccugaacgacgccgugcaggcccugaccgaccugggccugaucuacaccgccaaguaccccaacaccagcgaccuggacagacugacccagagccaccccauccugaacaugaucgacaccaagaagagcagccugaacaucagcggcuacaacuucagccugggcgccgccgugaaggccggcgccugcaugcuggacggcggcaacaugcuggagaccaucaaggugagcccccagaccauggacggcauccugaagagcauccugaaggugaagaaggcccugggcauguucaucagcgacacccccggcgagagaaaccccuacgagaacauccuguacaagaucugccugagcggcgacggcuggcccuacaucgccagcagaaccagcaucaccggcagagccugggagaacaccgugguggaccuggagagcgacggcaagccccagaaggccggcagcaacaacagcaacaagagccugcagagcgccggcuucaccgccggccugaccuacagccagcugaugacccugaaggacgccaugcugcagcuggaccccaacgccaagaccuggauggacaucgagggcagacccgaggaccccguggagaucgcccuguaccagcccagcagcggcugcuacauccacuucuucagagagcccaccgaccugaagcaguucaagcaggacgccaaguacagccacggcaucgacgugaccgaccuguucgccgcccagcccggccugaccagcgccgugaucgacgcccugcccagaaacauggugaucaccugccagggcagcgacgacaucagaaagcugcuggagagccagggcagaaaggacaucaagcugaucgacaucgcccugagcaagaucgacagcagaaaguacgagaacgccgugugggaccaguacaaggaccugugccacaugcacaccggcguggugguggagaagaagaagagaggcggcaaggaggagaucaccccccacugcgcccugauggacugcaucauguucgacgccgccgugagcggcggccugaacagccuggugcugagagccgugcugcccagagacaugguguucagaaccagcacccccagaguggugcugugaggacuaguuauaagacugacuagcccgaugggccucccaacgggcccuccuccccuccuugcaccgagauuaaucaaaggcucuuuucagagccaccaaaaaaaaaaaaaaaaaaaaaaaaaaaaaaaaaaaaaaaaaaaaaaaaaaaaaaaaaaaaaaaaagaauu

SEQ ID NO: 21806 - RNA, 1943 nt, Artificial Sequence
  mRNA product Design i-3 (hSL-A64-N5) comprising derived and/or modified sequence from MOPV/LASV reassortant(IGS-1;Clade IV)__AFY05578__SP-IgE_NP(2-569) (opt4)
aggagaaagcuuaccauggacuggaccuggauccuguuccugguggccgccgccaccagagugcacagcagcgccagcaaggagaucaagagcuuccuguggacccagagccugagaagagagcugagcggcuacugcagcaacaucaagcugcagguggugaaggacgcccaggcccugcugcacggccuggacuucagcgaggugagcaacgugcagagacugaugagaaaggagagaagagacgacaacgaccugaagagacugagagaccugaaccaggccgugaacaaccugguggagcugaagagcacccagcagaagagcauccugagagugggcacccugaccagcgacgaccugcugauccuggccgccgaccuggagaagcugagaagcaaggugaucagaaccgagagaccccugagcgccggcguguacaugggcaaccugagcagccagcagcuggaccagagaagagcccugcugaacaugaucggcaugagcggcggcaaccagggcgccagagccggcagagacggcguggugagagugugggacgugaagaacgccgagcugcugagcaaccaguucggcaccaugcccagccugacccuggccugccugaccaagcagggccagguggaccugaacgacgccgugcaggcccugaccgaccugggccugaucuacaccgccaaguaccccaacaccagcgaccuggacagacugacccagagccaccccauccugaacaugaucgacaccaagaagagcagccugaacaucagcggcuacaacuucagccugggcgccgccgugaaggccggcgccugcaugcuggacggcggcaacaugcuggagaccaucaaggugagcccccagaccauggacggcauccugaagagcauccugaaggugaagaaggcccugggcauguucaucagcgacacccccggcgagagaaaccccuacgagaacauccuguacaagaucugccugagcggcgacggcuggcccuacaucgccagcagaaccagcaucaccggcagagccugggagaacaccgugguggaccuggagagcgacggcaagccccagaaggccgacagcaacaacagcagcaagagccugcagagcgccggcuucaccgccggccugaccuacagccagcugaugacccugaaggacgccaugcugcagcuggaccccaacgccaagaccuggauggacaucgagggcagacccgaggaccccguggagaucgcccuguaccagcccagcagcggcugcuacauccacuucuucagagagcccaccgaccugaagcaguucaagcaggacgccaaguacagccacggcaucgacgugaccgaccuguucgccacccagcccggccugaccagcgccgugaucgacgcccugcccagaaacauggugaucaccugccagggcagcgacgacaucagaaagcugcuggagagccagggcagaaaggacaucaagcugaucgacaucgaccugagcaagaccgacagcagaaaguacgagaacgccgugugggaccaguacaaggaccugugccacaugcacaccggcguggugguggagaagaagaagagaggcggcaaggaggagaucaccccccacugcgcccugauggacugcaucauguucgacgccgccgugagcggcggccugaacaccagcgugcugagagccgugcugcccagagacaugguguucagaaccagcacccccagaguggugcugugaggacuaguuauaagacugacuagcccgaugggccucccaacgggcccuccuccccuccuugcaccgagauuaaucaaaggcucuuuucagagccaccaaaaaaaaaaaaaaaaaaaaaaaaaaaaaaaaaaaaaaaaaaaaaaaaaaaaaaaaaaaaaaaaagaauu

SEQ ID NO: 21807 - RNA, 1943 nt, Artificial Sequence
  mRNA product Design i-3 (hSL-A64-N5) comprising derived and/or modified sequence from LASV(LM765-SLE-2012;Clade IV)__AIT17815__SP-IgE_NP(2-569) (opt4)
aggagaaagcuuaccauggacuggaccuggauccuguuccugguggccgccgccaccagagugcacagcagcgccagcaaggagaucaagagcuuccuguggacccagagccugagaagagagcugagcggcuacugcagcaacaucaagcugcagguggugaaggacgcccaggcccugcugcacggccuggacuucagcgaggugagcaacgugcagagacugaugagaaaggagagaagagacgacaacgaccugaagagacugagagaccugaaccaggccgugaacaaccugguggagcugaagagcacccagcagaagagcauccugagagugggcacccugaccagcgacgaccugcugauccuggccgccgaccuggagaagcugaagagcaaggugaccagaaccgagagaccccugagcgccggcguguacaugggcaaccugagcagccagcagcuggaccagagaagagcccugcuggacaugaucggcaugagcggcagcaaccagggcgccagagccggcagagacggcguggugagagugugggacgugaagaacgccgagcugcugaacaaccaguucggcaccaugcccagccugacccuggccugccugaccaagcagggccagguggaccugaacgacgccgugcaggcccugaccgaccugggccugaucuacaccgccaaguaccccaacaccagcgaccuggacagacugacccagagccaccccauccugaacaugaucgacaccaagaagagcagccugaacaucagcggcuacaacuucagccugggcgccgccgugaaggccggcgccugcaugcuggacggcggcaacaugcuggagaccaucaaggugagcccccagaccauggacggcauccugaagagcauccugaaggugaagaaggcccugggcauguucaucagcgacgcccccggcgagagaaaccccuacgagaacauccuguacaagaucugccugagcggcgacggcuggcccuacaucgccagcagaaccagcaucaccggcagagccugggagaacaccgugguggaccuggagagcgacggcaagccccagaaggccggcagcaacggcagcaacaagagccugcagagcgccggcuucaccgccggccugaccuacagccagcugaugacccugaaggacgccaugcugcagcuggaccccaacgccaagaccuggauggacaucgagggcagacccgaggaccccguggagaucgcccuguaccagcccagcagcggcugcuacauccacuucuucagagagcccaccgaccugaagcaguucaagcaggacgccaaguacagccacggcaucgacgugaccgaccuguucgccgcccagcccggccugaccagcgccgugaucgacgcccugcccagaaacauggugaucaccugccagggcagcgacgacaucagaaagcuguucgagagccagggcagaaaggacaucaagcugaucgacaucgcccugagcaagaccgacagcagaaaguacgagaacgccgugugggaccaguacaaggaccugugccacaugcacaccggcaucgugguggagaagaagaagagaggcggcaaggaggagaucaccccccacugcgcccugauggacugcaucauguucgacgccgccgugagcggcggccugaacaccagcgugcugagagccgugcugcccagagacaugguguucagaaccagcacccccagaguggugcugugaggacuaguuauaagacugacuagcccgaugggccucccaacgggcccuccuccccuccuugcaccgagauuaaucaaaggcucuuuucagagccaccaaaaaaaaaaaaaaaaaaaaaaaaaaaaaaaaaaaaaaaaaaaaaaaaaaaaaaaaaaaaaaaaagaauu

SEQ ID NO: 21808 - RNA, 1943 nt, Artificial Sequence
  mRNA product Design i-3 (hSL-A64-N5) comprising derived and/or modified sequence from LASV(LM776-SLE-2012;Clade IV)__AIT17825__SP-IgE_NP(2-569) (opt4)
aggagaaagcuuaccauggacuggaccuggauccuguuccugguggccgccgccaccagagugcacagcagcgccagcaaggagaucaagagcuuccuguggacccagagccugagaagagagcugagcagcuacugcagcaacaucaagcugcagguggugaaggacgcccaggcccugcugcacggccuggacuucagcgaggugagcaacgugcagagacugaugagaaaggagagaagagacgacaacgaccugaagagacugagagaccugaaccaggccgugaacaaccugguggagcugaagagcacccagcagaagagcauccugagagugggcacccugaccagcgacgaccugcugauccuggccgccgaccuggagaagcugaagagcaaggugaccagaaccgagagaccccugagcgccggcguguacaugggcaaccugagcagccagcagcuggaccagagaagagcccugcugagcaugaucggcaugagcggcagcaaccagggcgccagagccggcagagacggcguggugagagugugggacgugaagaacgccgagcugcugaacaaccaguucggcaccaugcccagccugacccuggccugccugaccaagcagggccagguggaccugaacgacgccgugcaggcccugaccgaccugggccugaucuacaccgccaaguaccccaacaccagcgaccuggacagacugacccagagccaccccauccugaacaugaucgacaccaagaagagcagccugaacaucagcggcuacaacuucagccugggcgccgccgugaaggccggcgccugcaugcuggacggcggcaacaugcuggagaccaucaaggugagcccccagaccauggacggcauccugaagagcauccugaaggugaagaaggcccugggcauguucaucagcgacacccccggcgagagaaaccccuacgagaacauccuguacaagaucugccugagcggcgacggcuggcccuacaucgccagcagaaccagcaucaccggcagagccugggagaacaccgugguggaccuggagagcgacggcaagccccagaaggccggcagcaacaacagcaacaagagccugcagagcgccggcuucaccgccggccugaccuacagccagcugaugacccugaaggacgccaugcugcagcuggaccccaacgccaagaccuggauggacaucgagggcagacccgaggaccccguggagguggcccuguaccagcccagcagcggcugcuacauccacuucuucagagagcccaccgaccugaagcaguucaagcaggacgccaaguacagccacggcaucgacgugaccgaccuguucgccgcccagcccggccugaccagcgccgugaucgacgcccugcccagaaacauggugaucaccugccagggcagcgacgacaucagaaagcugcuggagagccagggcagaaaggacaucaagcugaucgacaucgcccugagcaagaccgacagcagaaaguacgagaacgccgugugggaccaguacaaggaccugugccacaugcacaccggcguggugguggagaagaagaagagaggcggcaaggaggagaucaccccccacugcgcccugauggacugcaucauguucgacgccgccgugagcggcggccugaacaccagcgugcugagagccgugcugcccagagacaugguguucagaaccagcacccccagaguggugcugugaggacuaguuauaagacugacuagcccgaugggccucccaacgggcccuccuccccuccuugcaccgagauuaaucaaaggcucuuuucagagccaccaaaaaaaaaaaaaaaaaaaaaaaaaaaaaaaaaaaaaaaaaaaaaaaaaaaaaaaaaaaaaaaaagaauu

SEQ ID NO: 21809 - RNA, 1943 nt, Artificial Sequence
  mRNA product Design i-3 (hSL-A64-N5) comprising derived and/or modified sequence from LASV(Mad39;Clade IV)__ANH09723__SP-IgE_NP(2-569) (opt4)
aggagaaagcuuaccauggacuggaccuggauccuguuccugguggccgccgccaccagagugcacagcagcgccagcaaggagaucaagagcuuccuguggacccagagccugagaagagagcugagcggcuacugcagcaacaucaagcugcagguggugaaggacgcccaggcccugcugcacggccuggacuucagcgaggugagcaacgugcagagacugaugagaaagcagagaagagacgacaacgaccugaagagacugagagaccugaaccaggccgugaacaaccugguggagcugaagagcacccagcagaagagcgugcugagagugggcacccugaccagcgacgaccugcugacccuggccgccgaccuggagaagcugaagagcaaggugaccagaaccgagagaccccugaccgccggcguguacaugggcaaccugagcagccagcagcuggaccagagaagagcccugcugaacaugaucggcaugagcggcggcaaccagggcgccagaaccggcagagacggcguggugagagugugggacgugaagaacgccgagcugcugaacaaccaguucggcaccaugcccagccugacccuggccugccugaccaagcagggccagguggaccugaacgacguggugcaggcccugaccgaccugggccugaucuacaccgccaaguaccccaacaccagcgaccuggacagacugacccagagccaccccauccugaacaugaucgacaccaacaagagcagccugaacaucagcggcuacaacuucagccugggcgccgccgugaaggccggcgccugcaugcuggacggcggcaacaugcuggagaccaucaaggugagcccccagaccauggacggcauccugaagagcauccugaaggugaagaagagccugggcauguucaucagcgacacccccggcgagagaaaccccuacgagaacauccuguacaagaucugccugagcggcgacggcuggcccuacaucgccagcagaaccagcaucaccggcagagccugggagaacaccgugguggaccuggagagcggcggcaagccccagaaggccggcagcaacaacagcaacaagagccugcagagcgccggcuucgccgccggccugaccuacagccagcugaugacccugaaggacgccaugcugcagcuggaccccaacgccaagaccuggauggacaucgagggcagacccgaggaccccguggagaucgcccuguaccagcccaucagcggcugcuacauccacuucuucagagagcccaccgaccugaagcaguucaagcaggacgccaaguacagccacggcaucgacgugaccgaccuguucgccgcccagcccggccugaccagcgccgugaucgaggcccugcccagaaacauggugaucaccugccagggcagcgacgacaucagaaagcuguucgagagccagggcagaaaggacaucaagcugaucgacaucgcccugagcaagaccgacagcagaaaguacgagaacgccgugugggaccaguacaaggaccugugccacaugcacaccggcguggugguggagaagaagaagaagggcggcaaggaggagaucaccccccacugcgcccugauggacugcaucauguucgacgccgccgugagcggcggccugaacacccuggugcugagagccgugcugcccagagacaugguguucagaaccagcacccccaagguggugcugugaggacuaguuauaagacugacuagcccgaugggccucccaacgggcccuccuccccuccuugcaccgagauuaaucaaaggcucuuuucagagccaccaaaaaaaaaaaaaaaaaaaaaaaaaaaaaaaaaaaaaaaaaaaaaaaaaaaaaaaaaaaaaaaaagaauu

SEQ ID NO: 21810 - RNA, 1943 nt, Artificial Sequence
  mRNA product Design i-3 (hSL-A64-N5) comprising derived and/or modified sequence from LASV(Z0947-SLE-2011;Clade IV)__AIT17841__SP-IgE_NP(2-569) (opt4)
aggagaaagcuuaccauggacuggaccuggauccuguuccugguggccgccgccaccagagugcacagcagcgccagcaaggagaucaagagcuuccuguggacccagagccugagaagagagcugagcggcuacugcagcaacaucaagcugcagguggugaaggacgcccaggcccugcugcacggccuggacuucagcgaggugagcaacgugcagagacugaugagaaaggagagaagagacgacaacgaccugaagagacugagagaccugaaccaggccgugaacaaccugguggagcugaagagcacccagcagaagagcauccugagagugggcacccugaccagcgacgaccugcugauccuggccgccgaccuggagaagcugaagagcaaggugaccagaaccgagagaccccugagcgccggcguguacaugggcaaccugagcagccagcagcuggaccagagaagagcccugcugaacaugaucggcaugagcggcagcaaccagggcgccagaaccggcagagacggcguggugagagugugggacgugaagaacgccgagcugcugaacaaccaguucggcaccaugcccagccugacccuggccugccugaccaagcagggccagguggaccugaacgacgccgugcaggcccugaccgaccugggccugaucuacaccgccaaguaccccaacaccagcgaccuggacagacugacccagagccaccccauccugaacaugaucgacaccaagaagagcagccugaacaucagcggcuacaacuucagccugggcgccgccgugaaggccggcgccugcaugcuggacggcggcaacaugcuggagaccaucaaggugagcccccagaccauggacggcauccugaagagcauccugaaggugaagaaggcccugggcauguucaucagcgacgcccccggcgagagaaaccccuacgagaacauccuguacaagaucugccugagcggcgacggcuggcccuacaucgccagcagaaccagcaucaccggcagagccugggagaacaccgugguggaccuggagagcgacggcaagccccagaaggccggcagcaacggcagcaacaagagccugcagagcgccggcuucaccgccggccugaccuacagccagcugaugacccugaaggacgccaugcugcagcuggaccccaacgccaagaccuggauggacaucgagggcagacccgaggaccccguggagaucgcccuguaccagcccagcagcggcugcuacauccacuucuucagagagcccaccgaccugaagcaguucaagcaggacgccaaguacagccacggcaucgacgugaccgaccuguucgccgcccagcccggccugaccagcgccgugaucgacgcccugcccagaaacauggugaucaccugccagggcagcgacgacaucagaaagcuguucgagagccagggcagaaaggacaucaagcugaucgacaucgcccugagcaagaccgacagcagaaaguacgagaacgccgugugggaccaguacaaggaccugugccacaugcacaccggcaucgugguggagaagaagaagagaggcggcaaggaggagaucaccccccacugcgcccugauggacugcaucauguucgacgccgccgugagcggcggccugaacaccagcgugcugagagccgugcugcccagagacaugguguucagaaccagcacccccagaguggugcugugaggacuaguuauaagacugacuagcccgaugggccucccaacgggcccuccuccccuccuugcaccgagauuaaucaaaggcucuuuucagagccaccaaaaaaaaaaaaaaaaaaaaaaaaaaaaaaaaaaaaaaaaaaaaaaaaaaaaaaaaaaaaaaaaagaauu

SEQ ID NO: 21811 - RNA, 1943 nt, Artificial Sequence
  mRNA product Design i-3 (hSL-A64-N5) comprising derived and/or modified sequence from LASV(Josiah;Clade IV)__NP_694869__SP-IgE_NP(2-569) (opt5)
aggagaaagcuuaccauggacuggaccuggauccuguuccucguggccgcugccacaagaguccacagcagcgccuccaaggagaucaaaucuuuccuguggacccagagccucagacgggaacuguccggcuacugcucuaacauuaagcugcaaguggucaaagacgcucaggcccugcuccacgggcuggauuuuagcgagguuuccaaugugcagcgccuuaugagaaaggaacggcgcgacgauaacgaccugaaaagacuccgggaucugaaucaggcggugaacaaucuggucgagcucaagucuacacaacaaaagagcauccugcgcgugggaacgcuuaccuccgacgaucugcucauucuggcugccgaccuugaaaaacuuaagagcaaaguuaucagaacagagcggccccucucugccggcguguauauggggaaccuguccagccagcagcuggaucagcgcagagcucuccugaauaugauuggaaugucuggcgggaaccagggagcccgggcuggccgcgacggcgucgugagaguuugggaugugaagaaugccgagcuucugaacaaucaguucgggaccaugccuucccucacacuggcgugucuuaccaaacagggacaagucgaccugaacgaugccgugcaggcucucacagaccugggccugaucuacaccgccaaguauccgaauacgagcgaccucgaucggcugacccagucucaucccauccuuaacaugauugacacaaagaaauccagccugaauaucuccggguacaacuuuucucucggagcugccgugaaggcgggcgccugcaugcuggaugggggaaacaugcuugaaaccauuaaagucagcccucaaacaauggacggcauccugaaguccauucucaaaguuaagaaagcucugggcauguucaucagcgauacccccggggagcgcaauccuuaugaaaacauucuguacaagaucugucucucuggagacggcuggcccuauaucgccuccagaacgagcauuacagggcgggcuugggagaauaccgugguggaucuggagucugacggaaagccucagaaagccgauagcaacaauuccucuaagagccuucaguccgccggcuuuacagcugggcugaccuacagccagcucaugacccugaaagacgcgaugcugcaacuugauccgaacgccaagacauggauggacaucgaaggaagacccgaggacccugucgaaauugcucucuaccagcccucuuccggcugcuauauccacuucuuucgcgagccuacggaucugaaacaguucaagcaggacgccaaguacagccauggcauugaugugaccgaccuguuugccacacaacccgggcucaccucugcuguuaucgaugcccugccgcggaauauggugaucacaugucagggauccgacgauauuagaaaacuucuggaaagccagggccgcaaggacaucaaacucauugauaucgcgcuguccaagaccgacucucggaaauaugagaacgcugucugggaucaguacaaggaccugugccacaugcauacgggggugguuguggagaagaaaaagagaggaggcaaagaagagauuacaccucacugugcccuuauggauugcaucauguucgacgccgcugucagcgggggccucaauaccuccgugcugcgcgccguccugccccgggacaugguguuuagaaccucuacaccucgcguugugcucugaggacuaguuauaagacugacuagcccgaugggccucccaacgggcccuccuccccuccuugcaccgagauuaaucaaaggcucuuuucagagccaccaaaaaaaaaaaaaaaaaaaaaaaaaaaaaaaaaaaaaaaaaaaaaaaaaaaaaaaaaaaaaaaaagaauu

SEQ ID NO: 21812 - RNA, 1943 nt, Artificial Sequence
  mRNA product Design i-3 (hSL-A64-N5) comprising derived and/or modified sequence from LASV(LP;Clade I)__AAF86702__SP-IgE_NP(2-569) (opt5)
aggagaaagcuuaccauggacuggaccuggauccuguuccucguggccgcugccacaagaguccacagcagcaacuccaaggagaucaaaucuuuccuguggacccagagccucagacgggaacuguccggcuacugcucuaauauuaagcuccaaguggucaaagacgcccaggcucugcuccacgggcuggauuuuagcgagguuuccaacgugcagcgccuuaugagaaagcagaaacgggacgaugccgaccugaagcgccucagagaucugaaucaagcggugaacaaucuggucgaacucaagucuacacagcagaaaaacgugcugcggguuggaacgcuuagcuccgacgaucugaucacccucgcugccgaccuggagaaacuuaaaagcaaggugauucgcacagaaagaccccugucuuccggcgucuauauggggaaucucagcucucagcaacuggaucagcggcgcgcccugcucuccaugaucggaaugagcggcgggccucagggaaacagaaccggcggcgacggggugguucgggugugggaugucaaaaaugcugagcugcuuaacaaucaguucggaacaaugccgucucugacccucgccugucugacaaagcaaggccagguggaccuuaacgaugcugugcaggcccugaccgaccucgggcugauuuacacggcgaaguaucccaauuccagcgaccuggauaugcucacccaaucccauccuauccugggaauggucgacacaaagaagucuagccuuaacaucuccggcuacaauuuuagccugggggccgcuguuaaagccggagcuugcaugcucgauggcggcaacaugcuggagaccauuaaggugucuccccagacaauggacgggauccuuaaauccauucugaaggugaaacgcagccucggaauguucaucucugauaccccuggcgaaagaaaccccuaugagaauauucuguacaagaucugucugagcggggaaggauggccuuauauugccucccggacgucuaucacaggccgcgcgugggagaacacccucgucgaccuggagagcgauaauaagccgcccaaacuuaacuccgccgggagcaauaagucucugcaggcugccggacucaacgcuggccugacauacucccagcugaugacccuuaaagacugcaugcuccaacuggauccuagcucuaagaccuggaucgacauugaaggcagacccgaggauccuguggaaaucgcccuguuucagcccuccagcggguguuacauucacuucuuucgggagccgacagaccucaaacaguucaagcaggacgccaaguauucccauggaaucgauguuacggaccuguuuucuacccaaccuggccuuacaagcgcugugauugaagcgcugcccagaaauaugguccuuaccugccagggguccgaugacaucaaaaagcugcuggagucucagggacgccgggauaucaaacuuauugacaucagccucuccaaggccgauagcagaaaauucgagaacgcugugugggaccaguacaaggaucugugucacaugcauacaggcguuguggucgaaaagaaaaagcgcgggggcaaagaggaaauuaccccucacugcgcccugcucgacuguaucauguuugaugccgcuacgacaggaucucugaauauuaccacccuucgggccgugcugcccagagacauggucuuccgcacauccacccccaaggugguucucugaggacuaguuauaagacugacuagcccgaugggccucccaacgggcccuccuccccuccuugcaccgagauuaaucaaaggcucuuuucagagccaccaaaaaaaaaaaaaaaaaaaaaaaaaaaaaaaaaaaaaaaaaaaaaaaaaaaaaaaaaaaaaaaaagaauu

SEQ ID NO: 21813 - RNA, 1943 nt, Artificial Sequence
  mRNA product Design i-3 (hSL-A64-N5) comprising derived and/or modified sequence from LASV(803213;Clade II)__AAF86704__SP-IgE_NP(2-569) (opt5)
aggagaaagcuuaccauggacuggaccuggauccuguuccucguggccgcugccacaagaguccacagcagcgccuccaaggaggugaaaucuuuccuguggacccagagccucagacgggaacuguccggcuacugcucuaacaucaaacuucaagucguuaaggacgcucaggcccugcuccacgggcuggauuuuagcgaggugaauaacgugcagcgccuuaugagaaagcagaaacgggacgauggagaccugaagcgccucagagaucugaaucaagcggucaacaaucugguggaacucaaguccacacagcagaaaucuauucugcggguuggcacgcuuaccagcgacgaucugcucacacuggcugccgaccuugagaagcugaaauccaaggugauccgcaccgaaagaccccucagcucuggggucuauaugggaaaccuguccacacagcaacuggagcagcggcgcgcccuccugaauaugauuggcauggugggaggagcucagggcacccagccuggcagagaugggguugugcgggucugggacgugaaaaacccggaucuucugaauaaccaauucggaacaaugcccagccucacccuggccugucuuacgaagcagggccagguggaccugaaugaugcuguccucgcccugaccgaccuggggcucaucuacacagcgaaguauccuaacucuuccgaccuggaucgccuuagccaaucucaucccauucugaauaugguugacaccaaaaaguccagccucaacaucuccggauacaauuuuucucugggcgccgcugugaaagccggggcuugcaugcuugauggaggcaacaugcuggagacaaucaaggugaccccucagacgauggacggcauucucaaaagcauccugaaggucaaaagaucccuggggauguucgugagcgauacacccggagaacggaacccuuaugagaauauucucuacaagaucugucugucuggcgacggguggccguauauugccucccgcaccagcaucguugggagagcgugggaaaacacaaccguggaucuugagucugacggcaagccccagaaagucgggaccgccggaagcaauaagucccugcagucugcuggcuuuccuacaggccucacguacagccaacugaugacccugaaagauuccaugaugcagcuugaccccagcgccaagacauggauugauaucgaggggcggccugaagaccccguggagaucgcucucuaccagccgaugucuggaugcuauauucacuucuuuagagaaccuaccgaccugaaacaguucaagcaagaugccaaguacucccauggcaucgacguugccgaucuguuucccgcucagccugggcucacaagcgcggugauugaggcccugccccgcaacaugguccuuaccugucagggaucugacgauaucaaaaagcugcucgacucccagggccggagagauauuaaacugaucgacaucagccuguccaagguggauucucgcaaauucgaaaaugcugucugggaccaaugcaaggaucuuugucacaugcauacgggggugguuguggagaagaaaaagcggggcggaaaagaggaaauuacaccccacugcgcccucauggacuguaucauguuugaugccgcugucagcggcgggcugaacauuccugugcugagagccguucucccgcgcgacaugguguuccggaccuccucucccaaggucgugcugugaggacuaguuauaagacugacuagcccgaugggccucccaacgggcccuccuccccuccuugcaccgagauuaaucaaaggcucuuuucagagccaccaaaaaaaaaaaaaaaaaaaaaaaaaaaaaaaaaaaaaaaaaaaaaaaaaaaaaaaaaaaaaaaaagaauu

SEQ ID NO: 21814 - RNA, 1946 nt, Artificial Sequence
  mRNA product Design i-3 (hSL-A64-N5) comprising derived and/or modified sequence from LASV(GA391;Clade III)__CAA36646__SP-IgE_NP(2-570) (opt5)
aggagaaagcuuaccauggacuggaccuggauccuguuccucguggccgcugccacaagaguccacagcagcgccuccaaggaggugagaucuuuccuguggacccagagccuccggcgcgaacuguccggcuacugcucuaacaucaaacuucaagucguuaaggacgcucaggcccugcuccacgggcuggauuuuagcgagguguccaaugugcagagacuuaugcggaaacagaagcgcgacgauggagaccugaaaagacuccgggaucugaaccaagcggucaauaaccugguggaacucaagucuacacagcagaaaagcguucugcgcgugggcacgcuuuccagcgacgaucugcucauucuggcugccgaccuugagaaacugaagucuaaagucaccagaacagaacggccccucuccagcgggguguauaugggaaaucugucuucccagcaacuggaucagcgcagagcccuccugaacaugaucggcaugaccgggguuagcggaggcggcaagggggcuucugacggaauugugcgggucugggaugugaaaaaugccgagcuucugaacaaucaguucggcacaaugccuucccucacccuggcuugucuuacaaagcaggggcaaguggaccugaacgaugccguccaggcgcucaccgaccugggacugaucuacacggccaaguauccgaauagcuccgaccucgaucgccugucucagagccaucccauucuuaacaugaucgacaccaaaaaguccagccugaauaucucuggcuacaacuuuucccucggggcugccguuaaagcuggagccugcaugcuggauggcggcaauaugcuugagacaauuaaggugagcccucaaaccauggacgggauccugaaaucuauucucaaggugaaaaagagccugggaauguucgucuccgauacacccggcgaaagaaacccuuaugagaacauccuguacaagauuugucucucuggggacggauggcccuauaucgcgagccggaccuccauugugggccgcgccugggaaaauacgguuguggaucuggagcaggacaacaaaccucagaagaucgggaauggaggcagcaacaaaucucuucaguccgcuggcuuugccgcugggcugacauacagccaacucaugacccugaaggauuucaaaugcuuuaaucugaucccgaacgccaagacauggauggacauugagggaagacccgaagauccugucgagaucgcccuuuaccagcccucuuccggcuguuaugugcacuucuuucgggaaccuaccgaccucaagcaguucaaacaggacgcuaaguacagccaugggauugauguuaccgaccuguuugcggcccaacccggacugacauccgcugugaucgaggcccucccgagaaauauggucauuacgugccagggcucugaagauauccgcaaacugcuugagagccaggggcggagagacaucaagcugauugauaucacccucuccaaagccgacucucgcaaguucgagaacgcugugugggaucaguuuaaggaccugugucacaugcauacaggcgucgugguugaaaagaagaaacggggaggcaaggaggaaauuaccccucacugcgcccugauggauuguaucauguucgacgcggcugugagcgggggacuugaugccaaaguccucagagugguucugccccgcgacaugguguuccggacauccaccccuaaggucgugcugugaggacuaguuauaagacugacuagcccgaugggccucccaacgggcccuccuccccuccuugcaccgagauuaaucaaaggcucuuuucagagccaccaaaaaaaaaaaaaaaaaaaaaaaaaaaaaaaaaaaaaaaaaaaaaaaaaaaaaaaaaaaaaaaaagaauu

SEQ ID NO: 21815 - RNA, 1943 nt, Artificial Sequence
  mRNA product Design i-3 (hSL-A64-N5) comprising derived and/or modified sequence from LASV(AV;Clade V)__CCA30315__SP-IgE_NP(2-569) (opt5)
aggagaaagcuuaccauggacuggaccuggauccuguuccucguggccgcugccacaagaguccacagcagcgccuccaaggaggugaaaucuuuccuguggacccagagccucagacgggaacuguccggcuacugcucuaacaucaaacuucaagucguuaaggacgcucaggcccugcuccacgggcuggauuuuagcgagguguccaaugugcagcgccuuaugagaaagcagcggcgcgacgauucugaccugaaaagacuccgggaucugaaccaagcggucaauaaccugguggaacucaagagcacacagcagaaguccguucugcgcgugggaacgcuuagcucugacgaucugcucacccuggcugccgaccuugagaaacugaaguccaaagucacaagaaccgaacggccccucagcucuggcguguauauggggaaucuguccagccagcaacuggaucagcgcagagcccuccugaaccuuauuggaaugacaaauggcucucaggggucccaggcuggacgggacggcguugugcgcgucugggaugugaagaacgccgagcugcucaauaaccaauucggcaccaugccuagccugacacuugcuugucugaccaaacagggacagguggaccucaaugaugucguucaagcccugacggaccuggggcucaucuacaccgcgaaguauccgaacacauccgaccuggauagacuuacccagucucaucccauucugaauaugaucgacacaaagaaaagcucccucaacauuagcggcuacaauuuuucucugggggccgcugugaaggccggagcuugcaugcuugauggcgggaacaugcuggagaccaucaaaguguccccucagagcauggacggaauccucaagucuauucugaaagucaagcgggcccugggcauguucgugagcgauacgcccggcgaacgcaacccuuaugagaauauccucuacaaaauuugucuguccggggacggauggcccuauaucgcgucuagaacaagcauuguuggccgggccugggaaaacaccguggucgaucuugagacagacgggaagccucagaagaucggauccggcaauagcaacaaaucucugcaauccgcuggguuuagcgccggacucaccuacucucagcugaugacccugaaggaugcuaugcuucagcucgacccgaaugccaaaacauggauggauauugagggcagacccgaagacccuguggagguugcccuguaccagcccaucuccggcugcuauauccacuucuuucgcgaaccuacggaccugaagcaauucaaacaggaugcuaaguacagccaugggauugacaucgcggaucucuuugccgcucagcccggacugaccuccgccgugauugaggcccuuccgcggaacauggucaucacaugucagggcucugaagacauuaagaaacugcucgagagccaagggagaaaggauaucaaacugaucgacauugcucuguccaagaucgauucucgcaaauucgagaaugccgugugggaccaguauaaggaucuuugccacaugcauaccggagucgugguugaaaagaaaaagcggggcgggaaagaggaaauuacaccucacugugcgcucauggacugcaucauguuugaugcugccgugagcggcggacugaacacccugguccucagagccgugcugccccgcgacaugguuuuccggacguccacaccuagagugguccuuugaggacuaguuauaagacugacuagcccgaugggccucccaacgggcccuccuccccuccuugcaccgagauuaaucaaaggcucuuuucagagccaccaaaaaaaaaaaaaaaaaaaaaaaaaaaaaaaaaaaaaaaaaaaaaaaaaaaaaaaaaaaaaaaaagaauu

SEQ ID NO: 21816 - RNA, 1943 nt, Artificial Sequence
  mRNA product Design i-3 (hSL-A64-N5) comprising derived and/or modified sequence from LASV(Togo/2016/7082;Clade VI)__AMR44578__SP-IgE_NP(2-569) (opt5)
aggagaaagcuuaccauggacuggaccuggauccuguuccucguggccgcugccacaagaguccacagcagcaacuccaaggaggugaaaucuuuccuguggacccagagccucagacgggaacuguccggcuacugcucuaauaucaaacuucaagucguuaaagacgcccaggcucugcuccacgggcuggauuuuagcgagguguccaacgugcagcgccuuaugagaaagcagaaacgggacgauggagaccugaagcgccucagagaucugaaucaagccgucaacaaucugguggaacucaagucuguucagcagaaaagcauucugcgggugggcacacuuacguccgacgaucugcucacccuggcggcugaccuugagaagcugaaaagcaaggucacacgcaccgaaagaccccucucuuccgggguguauaugggaaaccugagcucucagcaacuggaucagcggcgcgcccuccuguccaugaucggcaugagcgggggaaaucagaacucucagccuaaaggcgacggcguugugagagucugggaugugaagaaugccgaccuucugaacaaucaauucgggacaaugccgucccucacccuggcuugucuuacaaagcagggacagguggaucugaacgacgccguccaagcucucaccgaccugggccugauuuacacggccaaauaucccaauagcuccgaucucgaccggcugucucagagccauccuauccuuaacaugauugauaccaagaaauccagccugaauaucucuggguacaacuuuucccucggagcggccaucaagacaggcgcuugcaugcuggacgggggaaacaugcuugagaccauuaaaguuacaccccagaccauggauggcauccucaagagcauucugaaagugaagcgcucucugggcauguucaucagcgacacgccuggggagagaaaucccuaugaaaacauucuguacaagaucugucucuccggagauggcuggccuuauauugccucucggacagcuaucaucgggcgcgccugggagaauaccguggucgaccuggaaagcgauuccaaaccgcagaagauuggaagcaacggcucuaauaaaucccuucaaagcgcgggguuugcccccggacugacauacucucagcucaugacccugaaggacuccaugcugcagcuugauccuaacgcuaaaaccuggaucgacauugagggcagacccgaggacccuguggaaguugcccucuuccagcccaucagcggcugcuacauucacuuuuuccgggagccgacagaucugaagcaauuuaagcaggacgcuaaauauucccaugggaucgaugugacggaccuguucgccgcccagccuggacucaccucugcugucaucgaagcgcugcccagaaauauggugcuuacaugucagggcagcgaugacauuaagaaacugcucgauucccaagggcgccgggacaucaagcugauugauguuucucugaacaaaaucgacagcagaaaguuugagaaugccgugugggaucaguacaaggaccuuugccacaugcauaccggagucguggucgaaaagaagaaaaagggcgggaaagaggagauuacaccucacugugcucuccuggauugcaucauguucgacgccgccguguccggcggacugaacgcuaccguucuccgcgccgugcugccccgggacauggucuuuagaacgagcucucccaaggugguucuuugaggacuaguuauaagacugacuagcccgaugggccucccaacgggcccuccuccccuccuugcaccgagauuaaucaaaggcucuuuucagagccaccaaaaaaaaaaaaaaaaaaaaaaaaaaaaaaaaaaaaaaaaaaaaaaaaaaaaaaaaaaaaaaaaagaauu

SEQ ID NO: 21817 - RNA, 1943 nt, Artificial Sequence
  mRNA product Design i-3 (hSL-A64-N5) comprising derived and/or modified sequence from LASV(KAK-428;Clade n.d. (VII))__ANH09741__SP-IgE_NP(2-569) (opt5)
aggagaaagcuuaccauggacuggaccuggauccuguuccucguggccgcugccacaagaguccacagcagcaacuccaaggaggugaaaucuuuccuguggacccagagccucagacgggaacuguccggcuacugcacaaauaucaaacuucaagucguuaaggacgcccaggcucugcuccacgggcuggauuuuucugaggugagcaacgugcagcgccuuaugagaaagcagaaacgggacgauaaugaccugaagcgccucagagaucugaaccaagccgucaauaaccugguggaacucaaguccguucagcagaaaucugugcugaaggucggaacgcuuaauagcgacgaucugcucacccuggcggcugaccuugagaaacugaaguccaaagugguucggacagaacgcccccucagcucuggcguguauauggggaaccuguccagccagcaacuggaucagagacgggcccuccugaauaugauuggaauggccggcgggucucagggaaaccagccuucccgcgacggcgucgugagagugugggaugucaagaaugcugaccuucugaacaaucaauucggcaccaugccgagccucacacuggccugucuuaccaagcaggggcagguugaucugaacgacguggugcucgcucugacagaccugggacucaucuacaccgccaaauaucccaauucuuccgaucuggaccggcuuagccaaaaccauccuguccugaacaugauugaugugaauaaguccucucucaacaucagcggcuacaauuuuucccugggggcggccguuaaagcuggagccugcaugcuugacggcgggaacaugcuggagacgauuaagaucagcccccagaccguggauggaauccucaaaucuauucugaaggucaaacgcgcucugggcauguucguguccgacacaccuggcgagagaaaucccuaugaaaacauccucuacaagguuugucugagcgggaauggauggccuuauauugccucucggaccagcaucgugggccgcgcgugggagaacacagucguggaucuugaauccaauaagaaccagccgaaagucgggaauaacggaucuaauaagaugcugcagagcuccggcuuugccaccgggcucacguacagccaacugaugacacugagagacucuaugcuucagcucgaucccaccgcuaaaacauggauugacaucgagggacggccugaggaucccguggaacuggcccuguuccagccuuccagcggcugcuacauucacuuuuucagagagcccaccgaccucaagcaguuuaaacaagacgcuaaguauucucauggcaucgauguuaacgaccuguucuccgcccagccggggcuuaccagcgccgugcuggaagcucucccucgcaauaugguccugacaugucagggauccgaugacauccggaagcugcuugauucucaggacagaaaagauauuaagcucaucgacauuagccuguccaaagcggaugcccgcaaguuugagaacgacgugugggaucaauucaaagaccugugccacaugcauacgggcaucguuguggaaaagaagaaaaagggagggaaacaggagaugacaccccacugugcucuccuggauugcauuauguuugacgccgccgucucuggcgggcuuaacgugccuacccugcgggcugugcuccccaccgacaugguuuucagaacaaucaccacgaaggucgugcugugaggacuaguuauaagacugacuagcccgaugggccucccaacgggcccuccuccccuccuugcaccgagauuaaucaaaggcucuuuucagagccaccaaaaaaaaaaaaaaaaaaaaaaaaaaaaaaaaaaaaaaaaaaaaaaaaaaaaaaaaaaaaaaaaagaauu

SEQ ID NO: 21818 - RNA, 1943 nt, Artificial Sequence; identical to SEQ ID NO: 21812
  mRNA product Design i-3 (hSL-A64-N5) comprising derived and/or modified sequence from LASV(Pinneo-NIG-1969;Clade I)__AIT17837__SP-IgE_NP(2-569) (opt5)

SEQ ID NO: 21819 - RNA, 1943 nt, Artificial Sequence
  mRNA product Design i-3 (hSL-A64-N5) comprising derived and/or modified sequence from LASV(ISTH0009-NIG-2011;Clade II)__AIT17405__SP-IgE_NP(2-569) (opt5)
aggagaaagcuuaccauggacuggaccuggauccuguuccucguggccgcugccacaagaguccacagcagcguguccaaggaggucaaaucuuuccuguggacccagagccucagacgggaacuguccggcuacugcucuaacaucaaacuucaaguugugaaggacgcccaggcucugcuccacgggcuggauuuuagcgagguguccaauguccagcgccuuaugagaaagcagaaacgggacgauucugaccugaagcgccucagagaucugaaccaagccgugaauaaccugguugaacucaagagcacacagcagaaauccauucugcgggugggaacgcuuaccagcgacgaucugcucacacuggcggcugaccuugagaagcugaaaucuaaggucauccgcaccgaaagaccccucuccagcggcguguauauggggaaucugucuacacagcaacuggagcagcggcgcgcccuccugaacaugauuggaaugguuggcggggcccagggaacccagccuggcagagauggcgugguccgggugugggacgugaaaaauccggaucuucugaacaaucaauucgggacaaugcccucccucacccuggcuugucuuacgaagcagggacaggucgaccugaacgaugccguucucgcucugaccgaccugggccucaucuacacagccaaguauccuaauagcucugaccuggaucgccuuucccaaagccaucccauucugaacaugguggacaucaaaaaguccucucucaauaucagcggguacaacuuuucccugggagcggccgugaaagcuggcgccugcaugcuugaugggggaaauaugcuggagaccauuaaggucacaccucagaccauggacggcauccucaaaagcauucugaaggugaaaagaucucugggcauguucguuuccgauacgcccggggaacggaacccuuaugagaacauccucuacaagauuugucugagcggagacggcuggccguauaucgcuucucgcacaagcauuguggggagagccugggaaaauaccacagucgaucuugaguccgacggaaagccccagaaagugggcucugcggggagcaacaagucccugcagagcgccggauuuccuaccggccucaccuacucucaacugaugacacugaaagauuccaugaugcagcuugaccccagcgcuaagacguggaucgauaucgagggccggccugaagaccccguugagauugcccucuaccagccgaugucugggugcuauauccacuucuuuagagaaccuaccgaccugaaacaguucaagcaagaugcuaaguacucccauggaauugacguggccgaucuguuucccgcccagccuggccucacaagcgcugucaucgaggcgcugccccgcaauauggugcuuaccugucagggguccgacgauauuaaacggcugcucgacucucagggaagacgcgauaucaagcugaucgacauugcccugagcaaagcugauucccggagauucgaaaacgccgucugggaccaaugcaaggaucuuugucacaugcauacaggcgugguuguggagaaaaagaagcgcgggggcaaagaggaaaucacgccccacugcgcccucauggacuguauuauguaugaugcugccgucucuggaggccugaauaucccugugcugcgggcgguucucccgagagacaugguguuucgcaccagcucccccaaggucgugcugugaggacuaguuauaagacugacuagcccgaugggccucccaacgggcccuccuccccuccuugcaccgagauuaaucaaaggcucuuuucagagccaccaaaaaaaaaaaaaaaaaaaaaaaaaaaaaaaaaaaaaaaaaaaaaaaaaaaaaaaaaaaaaaaaagaauu

SEQ ID NO: 21820 - RNA, 1943 nt, Artificial Sequence
  mRNA product Design i-3 (hSL-A64-N5) comprising derived and/or modified sequence from LASV(ISTH2010-NIG-2012;Clade II)__AIT17483__SP-IgE_NP(2-569) (opt5)
aggagaaagcuuaccauggacuggaccuggauccuguuccucguggccgcugccacaagaguccacagcagcgccuccaaggaggugaaaucuuuccuguggacccagagccucagacgggaacuguccggcuacugcucuaacaucaaacuucaagucguuaaggacgcucaggcccugcuccacgggcuggauuuuagcgagguguccaaugugcagcgccuuaugagaaagcagaaacgggacgauucugaccugaagcgccucagagaucugaaccaagcggucaauaaccugguggaacucaagagcacacagcagaaauccauucugcggguuggaacgcuuaccagcgacgaucugcucacacuggcugccgaccuugagaagcugaaaucuaaggugauccgcaccgaaagaccccucuccagcggcgucuauauggggaaucugucuacacagcaacuggagcagcggcgcgcccuccugaaccuuauuggaauggugggcggggcucagggaacccagccuggcagagauggcguugugcgggucugggacgugaaaaauccggaucugcucaacaaucaauucgggacaaugcccucccugacccuugccugucugacgaagcagggacagguggaccucaacgaugcuguccuggcccugaccgaccucggccugaucuacacagcgaaguauccuaauagcucugaccuugaucgccugucccaaagccaucccauucucaacaugguugacaccaaaaaguccucucugaauaucagcggguuuaacuucucccuuggagccgcugugaaagccggcgcuugcaugcuggaugggggaaauaugcucgagacaaucaaggugaccccucagacgauggacggcauucugaaaagcauccugaaggucaaaaagucucucggcauguuuguguccgauacacccggggaaagaaacccuuacgagaacauucuguauaagaucugucuuagcggagacggcuggccguacauugccucucggaccagcaucguugggcgcgcgugggaaaauacaaccguggaucuggaguccgacggaaaaccccacaaggucggcaccgccgggucuaacaaaagccuccaguccgcuggauucccuacaggccugacguauagccagcugaugacccuuaaggauucuaugaugcaacucgaccccuccgccaaaacauggauugauaucgagggcagaccugaagaccccguggagaucgcucuguaccagccgaugagcgggugcuacauucacuuuuuccgggaaccuaccgaccugaagcaguuuaagcaggaugccaaauauucucauggaaucgacguugccgaucucuuccccgcucaaccuggccugacauccgcggugauugaggcccuucccagaaauaugguccugaccugucaggggagcgacgauaucaagcgccuccuggacucccagggacggagagauauuaaacugaucgacaucgcucuuucuaaggccgauagccgccgguuugaaaacgccgugugggaccagugcaaagaucucugucauaugcacacgggcgucgugguugagaagaagaaaagagggggcaaggaggaaauuacaccccacugcgcucugauggacuguaucauguacgaugccgcgguguccggaggccugaauauuccuguccuccgcgcugugcugccgcgggacaugguuuucagaaccucuagccccaaagugguccuuugaggacuaguuauaagacugacuagcccgaugggccucccaacgggcccuccuccccuccuugcaccgagauuaaucaaaggcucuuuucagagccaccaaaaaaaaaaaaaaaaaaaaaaaaaaaaaaaaaaaaaaaaaaaaaaaaaaaaaaaaaaaaaaaaagaauu

SEQ ID NO: 21821 - RNA, 1943 nt, Artificial Sequence
  mRNA product Design i-3 (hSL-A64-N5) comprising derived and/or modified sequence from LASV(Lassa virus/H.sapiens-wt/NGA/2015/ISTH_0543;Clade II)__AVO03640__SP-IgE_NP(2-569) (opt5)
aggagaaagcuuaccauggacuggaccuggauccuguuccucguggccgcugccacaagaguccacagcagcgccuccaaggaggugaaaucuuuccuguggacccagagccucagacgggaacuguccggcuacugcucuaacaucaaacuucaagucguuaaggacgcucaggcccugcuccacgggcuggauuuuagcgagguguccaaugugcagcgccuuaugagaaagcagaaacgggacgauucugaccugaagcgccucagagaucugaaccaagcggucaauaaccugguggaacucaagagcacacagcagaaauccauucugcggguuggaacgcuuaccagcgacgaucugcucacacuggcugccgaccuugagaagcugaaaucuaaggugauccgcaccgaaagaccccucuccagcggcgucuauauggggaaucugucuacacagcaacuggagcagcggcgcgcccuccugaacaugauuggaauggugggcggggcucagggaacccagccuggcagagauggcguugugcgggucugggacgugaaaaauccggaucuucugaacaaucaauucgggacaaugcccucccucacccuggccugucuuacgaagcagggacagguggaccugaacgaugcuguccucgcccugaccgaccugggccucaucuacacagcgaaguauccuaauagcucugaccuggaucgccuuucccaaagccaucccauucugaacaugguugacaccaaaaaguccucucucaauaucagcggguacaacuuuucccugggagccgcugugaaagccggcgcuugcaugcuugaugggggaaauaugcuggagacaaucaaggugaccccucagacgauggacggcauucucaaaagcauccugaaggucaaaaagucucugggcauguucguguccgauacacccggggaaagaaacccuuaugagaacauucucuacaagaucugucugagcggagacggcuggccguauauugccucucggaccagcaucguugggcgcgcgugggaaaauacaaccguggaucuugaguccgacggaaaaccccagaaggucggcucugccgggagcaacaaaucccugcagagcgcuggauuuccuaccggccucacauacucucaacugaugacgcugaaggauuccaugaugcagcuugaccccagcgccaaaaccuggauugauaucgagggcagaccugaagaccccguggagaucgcucucuaccagccgaugucugggugcuauauucacuucuuucgggaaccuacagaccugaagcaguucaagcaagaugccaaauacucccauggaaucgacguugccgaucuguuucccgcucagccuggccucaccagcgcggugauugaggcccugcccagaaauaugguccuuacaugucagggguccgacgauaucaagcgccugcucgacucucagggacggaaagauauuaagcugaucgacaucgcucugagcaaagccgauuccagacgcuucgaaaacgccgugugggaccaaugcaaggaucuuugucacaugcauaccggcgucgugguugagaagaaaaagagagggggcaaagaggaaauuacgccccacugcgcucucauggacuguaucauguaugaugccgcggugucuggaggccugaauauuccuguccugcgggcugugcucccgcgcgacaugguuuuucggacaagcucccccaaggugguccugugaggacuaguuauaagacugacuagcccgaugggccucccaacgggcccuccuccccuccuugcaccgagauuaaucaaaggcucuuuucagagccaccaaaaaaaaaaaaaaaaaaaaaaaaaaaaaaaaaaaaaaaaaaaaaaaaaaaaaaaaaaaaaaaaagaauu

SEQ ID NO: 21822 - RNA, 1943 nt, Artificial Sequence
  mRNA product Design i-3 (hSL-A64-N5) comprising derived and/or modified sequence from LASV(Lassa virus/H.sapiens-wt/NGA/2016/ISTH_0009;Clade II)__AVO03572__SP-IgE_NP(2-569) (opt5)
aggagaaagcuuaccauggacuggaccuggauccuguuccucguggccgcugccacaagaguccacagcagcgccuccaaggaggugaaaucuuuccuguggacccagagccucagacgggaacuguccggcuacugcucuaacaucaaacuucaagucguuaaggacgcucaggcccugcuccacgggcuggauuuuagcgagguguccaaugugcagcgccuuaugagaaagcagaaacgggacgauucugaccugaagcgccucagagaucugaaccaagcggucaauaaccugguggaacucaagagcacacagcagaaauccauucugcggguuggaacgcuuaccagcgacgaucugcucacacuggcugccgaccuugagaagcugaaaucuaaggugauccgcaccgaaagaccccucuccagcggcgucuauauggggaaucugucuacacagcaacuggagcagcggcgcgcccuccugaacaugauuggaauggugggcggggcucagggaacccagccuggcagagauggcguugugcgggucugggacgugaaaaauccggaucuucugaacaaucaauucgggacaaugcccucccucacccuggccugucuuacgaagcagggacagguggaccugaacgaugcuguccucgcccugaccgaccugggccucaucuacacagcgaaguauccuaauagcucugaccuggaucgccuuucccaaagccaucccauucugaacaugguugacaccaaaaaguccucucucaauaucagcggguacaacuuuucccugggagccgcugugaaagccggcgcuugcaugcuugaugggggaaauaugcuggagacaaucaaggugaccccucagacgauggacggcauucucaaaagcauccugaaggucaaaaagucucugggcauguucguguccgauacacccggggaaagaaacccuuaugagaacauucucuacaagaucugucugagcggagacggcuggccguauauugccucucggaccagcaucguugggcgcgcgugggaaaauacaaccguggaucuugaguccgacggaaaaccccagaaggucggcucugccgggagcaacaaaucccugcagagcgcuggauuuccuaccggccucacauacucucaacugaugacgcugaaggauuccaugaugcagcuugaccccagcgccaaaaccuggauugauaucgagggcagaccugaagaccccguggagaucgcucucuaccagccgaugucugggugcuauauucacuucuuucgggaaccuacagaccugaagcaguucaagcaagaugccaaauacucccauggaaucgacguugccgaucuguuucccgcucagccuggccucaccagcgcggugauugaggcccugcccagaaauaugguccuuacaugucagggguccgacgauaucaagcgccugcucgacucucagggacggagagauauuaaacugaucgacaucgcucugagcaaggccgauucccgccgguucgaaaacgccgugugggaccaaugcaaagaucuuugucacaugcauaccggcgucgugguugagaagaagaaaagagggggcaaggaggaaauuacgccccacugcgcucucauggacuguaucauguaugaugccgcggugucuggaggccugaauauuccuguccugcgcgcugugcucccgcgggacaugguuuuuagaacaagcucccccaaagugguccugugaggacuaguuauaagacugacuagcccgaugggccucccaacgggcccuccuccccuccuugcaccgagauuaaucaaaggcucuuuucagagccaccaaaaaaaaaaaaaaaaaaaaaaaaaaaaaaaaaaaaaaaaaaaaaaaaaaaaaaaaaaaaaaaaagaauu

SEQ ID NO: 21823 - RNA, 1943 nt, Artificial Sequence
  mRNA product Design i-3 (hSL-A64-N5) comprising derived and/or modified sequence from LASV(Lassa virus/H.sapiens-wt/NGA/2016/ISTH_0017;Clade II)__AVO03568__SP-IgE_NP(2-569) (opt5)
aggagaaagcuuaccauggacuggaccuggauccuguuccucguggccgcugccacaagaguccacagcagcgccuccaaggaggugaaaucuuuccuguggacccagagccucagacgggaacuguccggcuacugcucuagcaucaaacuucaagucguuaaggacgcucaggcccugcuccacgggcuggauuuuuccgaggugucuaacgugcagcgccuuaugagaaagcagaaacgggacgauagcgaccugaagcgccucagagaucugaaucaagcggucaacaaucugguggaacucaaguccacacagcagaaaagcauucugcggguuggaacgcuuaccucugacgaucugcucacacuggcugccgaccuugagaagcugaaauccaaggugauccgcaccgaaagaccccucagcucuggcgucuauauggggaaccuguccacacagcaacuggagcagcggcgcgcccuccugaauaugauuggaauggcuggcggggcccagggaacccagccuggcagagauggcgugguucgggugugggacgucaaaaacccggaucuucugaauaaccaauucgggacaaugcccagccucacccuggcuugucuuacgaagcagggacagguggaccugaaugaugccgugcucgcgcugaccgaccugggccucaucuacacagccaaguauccuaacucuuccgaccuggaucgccuuagccaaucccaucccauucugaauauggucgacaccaaaaagucuagccucaacaucuccggguacaauuuuagccugggagcugccguuaaagcuggcgccugcaugcuugaugggggaaacaugcuggagacaaucaaggugaccccucagacgauggacggcauucucaaaucuauccugaaggugaaaagaucccugggcauguucgucagcgaugcgcccggggaacggaauccuuaugagaacauucucuacaagaucugucugucuggagacggcuggccguauauugccagccgcacauccaucguggggagagcuugggaaaacaccacaguugaucuugagucugacggaaagccccagaaagugggcgccaccgggagcaauaagucccugcagagcgcuggauuuccuaccggccucacauacucucaacugaugacgcugaaagauuccaugaugcagcuugaccccagcgccaagaccuggauugauaucgagggccggccugaagaccccgucgagguggcccucuaccagccgguuucugggugcuauauccacuucuuuagagaaccuacagaccugaaacaguucaagcaagaugcuaaguacucccauggaauugacguggcggaucuguuucccgcccagccuggccucaccagcgcugucaucgaggcccugccccgcaacauggugcuuacaugucagggguccgacgauauuaaaaagcugcucgacucucagggacggaaagauaucaagcugauugacaucgcccugagcaaagcugauuccagacgcuucgaaaaugccgucugggaccaaugcaaggaucuuugucacaugcauaccggcgugguuguggagaagaaaaagagagggggcaaagaggaaaucacgccccacugcgcgcucauggacuguauuauguaugaugcugccgucucuggaggccugaacaucccugugcugcgggccguucucccgcgcgacaugguguuucggacaagcucccccaaggucgugcugugaggacuaguuauaagacugacuagcccgaugggccucccaacgggcccuccuccccuccuugcaccgagauuaaucaaaggcucuuuucagagccaccaaaaaaaaaaaaaaaaaaaaaaaaaaaaaaaaaaaaaaaaaaaaaaaaaaaaaaaaaaaaaaaaagaauu

SEQ ID NO: 21824 - RNA, 1943 nt, Artificial Sequence
  mRNA product Design i-3 (hSL-A64-N5) comprising derived and/or modified sequence from LASV(Lassa virus/H.sapiens-wt/NGA/2018/ISTH_0959;Clade II)__AVV65100__SP-IgE_NP(2-569) (opt5)
aggagaaagcuuaccauggacuggaccuggauccuguuccucguggccgcugccacaagaguccacagcagcgccuccaaggaggugaaaucuuuccuguggacccagagccucagacgggaacuguccggcuacugcucuaacaucaaacuucaagucguuaaggacgcucaggcccugcuccacgggcuggauuuuagcgagguguccaaugugcagcgccuuaugagaaagcagaaacgggacgauucugaccugaagcgccucagagaucugaaccaagcggucaauaaccugguggaacucaagagcacccagcagaaauccauucugcggguuggaacgcuuaccagcgacgaucugcucacacuggcugccgaccuugagaagcugaaaucuaaggugauccgcaccgaaagaccccucuccagcggcgucuauauggggaaucugucuacacagcaacuggagcagcggcgcgcccuccugaaccuuauuggaauggugggcggggcucagggaacccagccuggcagagauggcguugugcgggucugggacgugaaaaauccggaucugcucaacaaucaauucgggacaaugcccucccugacccuugccugucugacgaagcagggacagguggaccucaacgaugucguucuggcucugaccgaccucggccugaucuacacagccaaguauccuaauagcucugaccuugaucgccugucccaaagccaucccauucucaacaugguggacaccaaaaaguccucucugaauaucagcggguuuaacuucucccuuggagcggccgugaaagcuggcgccugcaugcuggaugggggaaauaugcucgagacaaucaaggucaccccucagacgauggacggcauucugaaaagcauccugaaggugaaaaagucucucggcauguuuguuuccgauacacccggggaaagaaacccuuacgagaacauucuguauaagaucugucuuagcggagacggcuggccguacauugcuucucggaccagcaucguggggcgcgccugggaaaauacaaccgucgaucuggaguccgacggaaaaccccacaaggugggcaccgcggggucuaacaaaagccuccaguccgccggauucccuacaggccugacguauagccagcugaugacccuuaaggauucuaugaugcaacucgaccccuccgcuaaaacauggauugauaucgagggcagaccugaagaccccguugagaucgcccuguaccagccgaugagcgggugcuacauucacuuuuuccgggaaccuaccgaccugaagcaguuuaagcaggaugcuaaauauucucauggaaucgacguggccgaucucuuccccgcccaaccuggccugacauccgcugucauugaggcgcuucccagaaauauggugcugaccugucaggggagcgacgauaucaagcgccuccuggacucccagggacggaaagauauuaagcugaucgacaucgcccuuucuaaaacggauagcagacgcuuugaaaacgcugucugggaccagugcaaggaucucugucauaugcacacaggcgugguuguggagaagaaaaagagagggggcaaagaggaaauuacaccccacugcgcccugauggacuguaucauguacgaugccgcugucuccggaggccugaauauuccugugcuccgggccguucugccgcgcgacaugguguuccggaccucuagccccaaggucgugcuuugaggacuaguuauaagacugacuagcccgaugggccucccaacgggcccuccuccccuccuugcaccgagauuaaucaaaggcucuuuucagagccaccaaaaaaaaaaaaaaaaaaaaaaaaaaaaaaaaaaaaaaaaaaaaaaaaaaaaaaaaaaaaaaaaagaauu

SEQ ID NO: 21825 - RNA, 1943 nt, Artificial Sequence
  mRNA product Design i-3 (hSL-A64-N5) comprising derived and/or modified sequence from LASV(LASV003-NIG-2008;Clade II)__AIT17581__SP-IgE_NP(2-569) (opt5)
aggagaaagcuuaccauggacuggaccuggauccuguuccucguggccgcugccacaagaguccacagcagcgccuccaaggaggugaaaucuuuccuguggacccagagccucagacgggaacuguccggcuacugcucuagcaucaaacuucaagucguuaaggacgcucaggcccugcuccacgggcuggauuuuuccgaggugucuaacgugcagcgccuuaugagaaagcagaaacgggacgauagcgaccugaagcgccucagagaucugaaucaagcggucaacaaucugguggaacucaaguccacccagcagaaaagcguucugcgggugggaacgcuuaccucugacgaucugcucacacuggcugccgaccuugagaagcugaaauccaaggucauucgcaccgaaagaccccucagcucuggcguguauauggggaaccuguccgcccagcaacuggagcagcggcgcacacuccugaauaugaucggaaugguuggcggggcucagggaacccagccuggcagagauggcgugguccgggugugggacgugaaaaacccggaucuucugaauaaccaauucgggacaaugcccagccucacccuggccugucuuacgaagcagggacaggucgaccugaaugauguugugcucgcucugaccgaccugggccucauuuacacagccaaguauccuaacucuuccgaccuggaucgccuuagccaaucccaucccauccugucuaugguggacaccaaaaagagcucccucaauauuagcggguacaacuuuucucugggagcggccgucaaagcuggcgccugcaugcuugaugggggaaauaugcuggagacaaucaaggugaccccucagacgauggacggcauccucaaauccauucugaagguuaaaaagagccugggcauguucgugucugauacacccggggaaagaaacccuuaugagaauauccucuacaagauuugucugagcggagacggcuggccguauaucgcuucccggaccucuauugucgggcgcgccugggaaaacacaaccguggaucuugagagcgacggaaaaccccagaagguuggcaccgcgggguccaacaaaagccugcagucugccggauuuccuacaggccucacguacucccaacugaugacccugaaggauagcaugaugcagcuugaccccucugcuaaaacauggaucgauauugagggcagaccugaagaccccguggagaucgcccucuaccagccgauguccgggugcuauauccacuucuuucgggaaccuaccgaccugaagcaguucaagcaagaugcuaaauacagccauggaauugacgucacagaucuguuucccgcccagccuggccucaccuccgccgugaucgaggcucugcccagaaauaugguccuuacgugucaggggucugacgauauuaagcgccugcucgacagccagggacggagagauaucaaacugauugacaucgcgcuguccaaggccgauucucgccgguucgaaaacgcugugugggaccaaugcaaagaucuuugucacaugcauacaggcguuguggucgagaagaagaaaagagggggcaaggaggaaaucacaccccacugcgcccucauggacuguauuauguaugaugccgcugugagcggaggccugaauaucccuguucugcgcgccgugcucccgcgggacauggucuuuagaaccuccagccccaaaguggugcugugaggacuaguuauaagacugacuagcccgaugggccucccaacgggcccuccuccccuccuugcaccgagauuaaucaaaggcucuuuucagagccaccaaaaaaaaaaaaaaaaaaaaaaaaaaaaaaaaaaaaaaaaaaaaaaaaaaaaaaaaaaaaaaaaagaauu

SEQ ID NO: 21826 - RNA, 1943 nt, Artificial Sequence
  mRNA product Design i-3 (hSL-A64-N5) comprising derived and/or modified sequence from LASV(LASV035-NIG-2009;Clade II)__AIT17589__SP-IgE_NP(2-569) (opt5)
aggagaaagcuuaccauggacuggaccuggauccuguuccucguggccgcugccacaagaguccacagcagcgccuccaaggaggugaaaucuuuccuguggacccagagccucagacgggaacuguccggcuacugcucuagcaucaaacuucaagucguuaaagacgcucaggcccugcuccacgggcuggauuuuuccgaggugucuaacgugcagcgccuuaugagaaagcagaaacgggacgauagcgaccugaagcgccucagagaucugaaucaagcggucaacaaucugguggaacucaaguccacacagcagaaaagcauucugcggguuggaacgcuuaccucugacgaucugcucacacuggcugccgaccuugagaagcugaaauccaaggugauccgcaccgaaagaccccucagcucuggcgucuauauggggaaccuguccgcccagcaacuggagcagcggcgcgcucuccugaauaugauuggaauggugggcggggcccagggaacacagccuggcagagauggcguugugcgggucugggacgugaaaaacccggaucuucugaauaaccaauucgggaccaugcccagccucacacuggcuugucuuaccaagcagggacagguggaccugaaugaugccguccucgcgcugacggaccugggccucaucuacaccgccaaguauccuaacucuuccgaccuggaucgccuuagccaaucccaucccauucugaauaugguugacacaaagaagucuagccucaacaucuccggguacaauuuuagccugggagcugccgugaaagcuggcgccugcaugcuugaugggggaaacaugcuggagaccaucaaggugacaccucagaccauggacggcauucucaaaucuauccugaaggucaaaagaucccugggcauguucgugagcgauacgcccggggaacggaauccuuaugagaacauucucuacaagaucugucugucuggagacggcuggccguauauugcgagccgcacauccaucguugggagagccugggaaaacaccacaguggaucuugagucugacggaaagccccagaaagucggcaccaccgggagcaauaagucccugcagagcgcuggauuuccuacaggccucacguacucucaacugaugacccugaaagauuccaugaugcagcuugaccccagcgccaagacauggauugauaucgagggccggccugaagaccccguggagaucgcucucuaccagccgaugucugggugcuauauucacuucuuuagagaaccuaccgaccugaaacaguucaagcaagaugccaaguacucccauggaaucgacguugccgaucuguuucccgcucagccuggccucacaagcgcggugauugaggcccugccccgcaacaugguccuuaccugucagggguccgacgauaucaaaaagcugcucgacucucagggacggagagauauuaaacugaucgacaucgcucugagcaaggccgauucccgcaaauucgaaaaugccgugugggaccaaugcaaggaucuuugucacaugcauacgggcgucgugguugagaagaaaaagagagggggcaaagaggaaauuacaccccacugcgcucucauggacuguaucauguaugaugccgcggugucuggaggccugaacauuccuguccugcgggcugugcucccgcgcgacaugguuuuucggaccagcucccccaaggugguccugugaggacuaguuauaagacugacuagcccgaugggccucccaacgggcccuccuccccuccuugcaccgagauuaaucaaaggcucuuuucagagccaccaaaaaaaaaaaaaaaaaaaaaaaaaaaaaaaaaaaaaaaaaaaaaaaaaaaaaaaaaaaaaaaaagaauu

SEQ ID NO: 21827 - RNA, 1943 nt, Artificial Sequence
  mRNA product Design i-3 (hSL-A64-N5) comprising derived and/or modified sequence from LASV(LASV1000-NIG-2009;Clade II)__AIT17783__SP-IgE_NP(2-569) (opt5)
aggagaaagcuuaccauggacuggaccuggauccuguuccucguggccgcugccacaagaguccacagcagcgccuccaaggaggugaaaucuuuccuguggacccagagccucagacgggaacuguccggcuacugcucuaacaucaaacuucaagucguuaaggacgcucaggcccugcuccacgggcuggauuuuagcgagguguccaaugugcagcgccuuaugagaaagcagaaacgggacgauucugaccugaagcgccucagagaucugaaccaagcggucaauaaccugguggaacucaagagcacacagcagaaauccauucugcggguuggaacgcuuaccagcgacgaucugcucacacuggcugccgaccuugagaagcugaaaucuaaggugauccgcaccgaaagaccccucuccagcggcgucuauauggggaaucugucuacacagcaacuggagcagcggcgcgcccuccugaacaugauuggaauggugggcggggcucagggaacccagccuggcagagauggcguugugcgggucugggacgugaaaaauccggaucuucugaacaaucaauucgggacaaugcccucccucacccuggccugucuuacgaagcagggacagguggaccugaacgaugucguucucgcucugaccgaccugggccucaucuacacagccaaguauccuaauagcucugaccuggaucgccuuucccaaagccaucccauucugaacaugguggacaccaaaaaguccucucucaauaucagcggguacaacuuuucccugggagcggccgugaaagcuggcgccugcaugcuugaugggggaaauaugcuggagacaaucaaggucaccccucagacgauggacggcauucucaaaagcauccugaaggugaaaaagucucugggcauguucguuuccgauacacccggggaaagaaacccuuaugagaacauucucuacaagaucugucugagcggagacggcuggccguauauugcuucucggaccagcaucguggggcgcgccugggaaaauacaaccgucgaucuugaguccgacggaaaaccccagaaggugggcaccgcggggucuaacaaaagccugcaguccgccggauuuccuacaggccucacguacagccaacugaugacccugaaggauucuaugaugcagcuugaccccuccgcuaaaacauggauugauaucgagggcagaccugaagaccccguugagaucgcccucuaccagccggugagcgggugcuauauucacuucuuucgggaaccuaccgaccugaagcaguucaagcaagaugcuaaauacucucauggaaucgacgucgccgaucuguuucccgcccagccuggccucacauccgcugugauugaggcgcugcccagaaauaugguccuuaccugucaggggagcgacgauaucaagcgccugcucgacucccagggacggagagauauuaaacugaucgacaucgcccugucuaaggcugauagccgccgguucgaaaacgccgugugggaccaaugcaaagaucuuugucacaugcauacgggcguuguggucgagaagaagaaaagagggggcaaggaggaaauuacaccccacugcgcccucauggacuguaucauguaugaugcugccguguccggaggccugaauauuccuguucugcgcgcggugcucccgcgggacauggucuuuagaaccucuagccccaaaguggugcugugaggacuaguuauaagacugacuagcccgaugggccucccaacgggcccuccuccccuccuugcaccgagauuaaucaaaggcucuuuucagagccaccaaaaaaaaaaaaaaaaaaaaaaaaaaaaaaaaaaaaaaaaaaaaaaaaaaaaaaaaaaaaaaaaagaauu

SEQ ID NO: 21828 - RNA, 1943 nt, Artificial Sequence
  mRNA product Design i-3 (hSL-A64-N5) comprising derived and/or modified sequence from LASV(LASV221-NIG-2010;Clade II)__AIT17625__SP-IgE_NP(2-569) (opt5)
aggagaaagcuuaccauggacuggaccuggauccuguuccucguggccgcugccacaagaguccacagcagcgccuccaaggaggugaaaucuuuccuguggacccagagccucagacgggaacuguccggcuacugcucuagcaucaaacuucaagucguuaaggacgcucaggcccugcuccacgggcuggauuuuuccgaggugucuaacgugcagcgccuuaugagaaagcagcggcgcgacgauagcgaccugaaaagacuccgggaucugaaucaagcggucaacaaucugguggaacucaaguccacacagcaaaagagcauucugcgcguuggaacgcuuaccucugacgaucugcucacacuggcugccgaccuugagaaacugaaguccaaagugaucagaaccgaacggccccucagcucuggcgucuauauggggaaccuguccacacagcagcuggagcagcgcagagcccuccugaauaugauuggaauggugggcggggcucagggaacccagccuggccgggauggcguugugcgcgucugggacgugaagaacccggaucuucugaauaaccaauucgggacaaugcccagccucacccuggccugucuuacgaaacagggacagguggaccugaaugaugcuguccucgcccugaccgaccugggccucaucuacacagcgaaguauccuaacucuuccgaccuggauagacuuagccaaucccaucccauucugaauaugguugacaccaagaaaucuagccucaacaucuccggguacaauuuuagccugggagccgcugugaaggccggcgcuugcaugcuugaugggggaaacaugcuggagacaaucaaagugaccccucagacggucgacggcauucucaagucuauccugaaagugaagcggucccugggcauguucguuagcgauacacccggggaacgcaauccuuaugagaacauucucuacaaaaucugucugucuggagacggcuggccguauauugccagcagaaccuccaucguggggcgggcgugggaaaacacaaccgucgaucuugagucugacggaaagccccagaaggugggcaccgccgggagcaauaaaucccugcagagcgcuggauuuccuacaggccucacguacucucaacugaugacccugaaggauuccaugaugcagcuugaccccagcgccaaaacauggauugauaucgagggcagaccugaagaccccguugagaucgcucucuaccagccgaugucugggugcuauauucacuucuuucgcgaaccuaccgaccugaagcaguucaaacaagaugccaaguacucccauggaaucgacguggccgaucuguuucccgcucagccuggccucacaagcgcggucauugaggcccugccccggaacauggugcuuaccugucagggguccgacgauaucaagagacugcucgacucucagggacgccgggauauuaaacugaucgacaucgcucugagcaaggccgauuccagaaaauucgaaaaugccgucugggaccaaugcaaggaucuuugucacaugcauacgggcgugguuguggagaaaaagaagcgcgggggcaaagaggaaauuacaccccacugcgcucucauggacuguaucauguaugaugccgcggucucuggaggccugaacauuccugugcugcgggcuguucucccgagagacaugguguuucgcaccagcucccccaaggucgugcugugaggacuaguuauaagacugacuagcccgaugggccucccaacgggcccuccuccccuccuugcaccgagauuaaucaaaggcucuuuucagagccaccaaaaaaaaaaaaaaaaaaaaaaaaaaaaaaaaaaaaaaaaaaaaaaaaaaaaaaaaaaaaaaaaagaauu

SEQ ID NO: 21829 - RNA, 1943 nt, Artificial Sequence
  mRNA product Design i-3 (hSL-A64-N5) comprising derived and/or modified sequence from LASV(LASV237-NIG-2010;Clade II)__AIT17639__SP-IgE_NP(2-569) (opt5)
aggagaaagcuuaccauggacuggaccuggauccuguuccucguggccgcugccacaagaguccacagcagcgccuccaaggaggugaaaucuuuccuguggacccagagccucagacgggaacuguccggcuacugcucuaacaucaaacuucaagucguuaaggacgcucaggcccugcuccacgggcuggauuuuagcgagguguccaaugugcagcgccuuaugagaaagcagaaacgggacgauucugaccugaagcgccucagagaucugaaccaagcggucaauaaccugguggaacucaagagcacacagcagaaauccauucugcggguuggaacgcuuaccagcgacgaucugcucacacuggcugccgaccuugagaagcugaaaucuaaggugauccgcaccgaaagaccccucuccagcggcgucuauauggggaaucugucuacacagcaacuggagcagcggcgcgcccuccugaacaugauuggaauggugggcggggcucagggaacccagccuggcagagauggcguugugcgggucugggacgugaaaaauccggaucuucugaacaaucaauucgggacaaugcccucccucacccuggccugucuuacgaagcagggacagguggaccugaacgaugcuguccucgcccugaccgaccugggccucaucuacacagcgaaguauccuaauagcucugaccuggaucgccuuucccaaagccaucccauucugaacaugguugacaucaaaaaguccucucucaauaucagcggguacaacuuuucccugggagccgcugugaaagccggcgcuugcaugcuugaugggggaaauaugcuggagaccauuaaggugacaccucagaccauggacggcauccucaaaagcauucugaaggucaaaagaucucugggcauguucguguccgauacgcccggggaacggaacccuuaugagaacauccucuacaagauuugucugagcggagacggcuggccguauaucgccucucgcacaagcauuguugggagagcgugggaaaauaccacaguggaucuugaguccgacggaaagccccagaaagucggcucugccgggagcaacaagucccugcagagcgcuggauuuccuaccggccucaccuacucucaacugaugacacugaaagauuccaugaugcagcuugaccccagcgccaagacguggaucgauaucgagggccggccugaagaccccguggagauugcucucuaccagccgaugucugggugcuauauccacuucuuuagagaaccuaccgaccugaaacaguucaagcaagaugccaaguacucccauggaauugacguugccgaucuguuucccgcucagccuggccucacaagcgcggugaucgaggcccugccccgcaauaugguccuuaccugucagggguccgacgauauuaaacggcugcucgacucucagggaagacgcgauaucaagcugaucgacauugcucugagcaaagccgauucccggagauucgaaaacgccgugugggaccaaugcaaggaucuuugucacaugcauacaggcgucgugguugagaaaaagaagcgcgggggcaaagaggaaaucacgccccacugcgcucucauggacuguauuauguaugaugccgcggugucuggaggccugaauaucccuguccugcgggcugugcucccgagagacaugguuuuucgcaccagcucccccaaggugguccugugaggacuaguuauaagacugacuagcccgaugggccucccaacgggcccuccuccccuccuugcaccgagauuaaucaaaggcucuuuucagagccaccaaaaaaaaaaaaaaaaaaaaaaaaaaaaaaaaaaaaaaaaaaaaaaaaaaaaaaaaaaaaaaaaagaauu

SEQ ID NO: 21830 - RNA, 1943 nt, Artificial Sequence
  mRNA product Design i-3 (hSL-A64-N5) comprising derived and/or modified sequence from LASV(LASV253-NIG-2011;Clade II)__AIT17671__SP-IgE_NP(2-569) (opt5)
aggagaaagcuuaccauggacuggaccuggauccuguuccucguggccgcugccacaagaguccacagcagcgccuccaaggaggugaaaucuuuccuguggacccagagccucagacgggaacuguccggcuacugcucuagcaucaaacuucaagucguuaaggacgcucaggcccugcuccacgggcuggauuuuuccgaggugucuaacgugcagcgccuuaugagaaagcagaaacgggacgauagcgaccugaagcgccucagagaucugaaucaagcggucaacaaucugguggaacucaaguccacccagcagaaaagcguucugcgggugggaacgcuuaccucugacgaucugcucacacuggcugccgaccuugagaagcugaaauccaaggucauucgcaccgaaagaccccucagcucuggcguguauauggggaaccuguccacacagcaacuggagcagcggcgcgcccuccugaauaugaucggaaugguuggcggggcucagggaacccagccuggcagagauggcgugguccgggugugggacgugaaaaacccggaucuucugaauaaccaauucgggacaaugcccagccucacccuggccugucuuacgaagcagggacaggucgaccugaaugauguugugcucgcucugaccgaccugggccucauuuacacagccaaguauccuaacucuuccgaccuggaucgccuuagccaaucccaucccauccugaauaugguggacaccaaaaagucuagccucaacauuuccggguacaauuuuagccugggagcggccgucaaagcuggcgccugcaugcuugaugggggaaacaugcuggagacaaucaaggugaccccucagacgauggacggcauccucaaaucuauucugaagguuaaaaagucccugggcauguucgugagcgauacacccggggaaagaaauccuuaugagaacauccucuacaagauuugucugucuggagacggcuggccguauaucgcuagccggaccuccauugucgggcgcgccugggaaaacacaaccguggaucuugagucugacggaaaaccccagaagguuggcaccgcggggagcaauaaaucccugcagagcgccggauuuccuacaggccucacguacucucaacugaugacccugaaggauuccaugaugcagcuugaccccagcgcuaaaacauggaucgauauugagggcagaccugaagaccccguggagaucgcccucuaccagccgaugucugggugcuauauccacuucuuucgggaaccuaccgaccugaagcaguucaagcaagaugcuaaauacucccauggaauugacgucacagaucuguuucccgcccagccuggccucaccagcgccgugaucgaggcucugcccagaaacaugguccuuacgugucagggguccgacgauauuaagcgccugcucgacucucagggacggagagauaucaaacugauugacaucgcgcugagcaaggccgauucccgccgguucgaaaaugcugugugggaccaaugcaaagaucuuugucacaugcauacaggcguuguggucgagaagaagaaaagagggggcaaggaggaaaucacaccccacugcgcccucauggacuguauuauguaugaugccgcugugucuggaggccugaacaucccuguucugcgcgccgugcucccgcgggacauggucuuuagaaccagcucccccaaaguggugcugugaggacuaguuauaagacugacuagcccgaugggccucccaacgggcccuccuccccuccuugcaccgagauuaaucaaaggcucuuuucagagccaccaaaaaaaaaaaaaaaaaaaaaaaaaaaaaaaaaaaaaaaaaaaaaaaaaaaaaaaaaaaaaaaaagaauu

SEQ ID NO: 21831 - RNA, 1943 nt, Artificial Sequence
  mRNA product Design i-3 (hSL-A64-N5) comprising derived and/or modified sequence from LASV(LASV254-NIG-2011;Clade II)__AIT17675__SP-IgE_NP(2-569) (opt5)
aggagaaagcuuaccauggacuggaccuggauccuguuccucguggccgcugccacaagaguccacagcagcgccuccaaggaggugaaaucuuuccuguggacccagagccucagacgggaacuguccggcuacugcucuagcaucaaacuucaagucguuaaggacgcucaggcccugcuccacgggcuggauuuuuccgaggugucuaacgugcagcgccuuaugagaaagcagaaacgggacgauagcgaccugaagcgccucagagaucugaaucaagcggucaacaaucugguggaacucaaguccacacagcagaaaagcguucugcgggugggaacgcuuaccucugacgaucugcucacacuggcugccgaccuugagaagcugaaauccaaggucauucgcaccgaaagaccccucagcucuggcguguauauggggaaccuguccacacagcaacuggagcagcggcgcgcccuccugaauaugaucggaaugguuggcggggcucagggaacccagccuggcagagauggcgugguccgggugugggacgugaaaaacccggaucuucugaauaaccaauucgggacaaugcccagccucacccuggccugucuuacgaagcagggacaggucgaccugaaugaugcuguucucgcccugaccgaccugggccucauuuacacagcgaaguauccuaacucuuccgaccuggaucgccuuagccaaucccaucccauccugaauaugguggacaccaaaaagucuagccucaacauuuccggguacaauuuuagccugggagccgcugugaaagccggcgcuugcaugcuugaugggggaaacaugcuggagacaaucaaggucaccccucagacgauggacggcauccucaaaucuauucugaaggugaaaaagucccugggcauguucguuagcgauacacccggggaaagaaauccuuaugagaacauccucuacaagauuugucugucuggagacggcuggccguauaucgccagccggaccuccauuguggggcgcgcgugggaaaacacaaucgucgaucuugagucugacggaaaaccccagaaggugggcaccgccgggagcaauaaaucccugcagagcgcuggauuuccuaccggccucacauacucucaacugaugacgcugaaggauuccaugaugcagcuugaccccagcgccaaaaccuggauugauaucgagggcagaccugaagaccccguugagaucgcucucuaccagccgaugucugggugcuauauucacuucuuucgggaaccuacagaccugaagcaguucaagcaagaugccaaauacucccauggaaucgacguggccgaucuguuucccgcucagccuggccucaccagcgcggucauugaggcccugcccagaaacauggugcuuacaugucagggguccgacgauaucaagcgccugcucgacucucagggacggagagauauuaaacugaucgacaucgcucugagcaaggccgauucccgccgguucgaaaaugccgucugggaccaaugcaaagaucuuugucacaugcauaccggcgugguuguggagaagaagaaaagagggggcaaggaggaaauuacgccccacugcgcucucauggacuguaucauguaugaugccgcggucucuggaggccugaacauuccugugcugcgcgcuguucucccgcgggacaugguguuuagaacaagcucccccaaagucgugcugugaggacuaguuauaagacugacuagcccgaugggccucccaacgggcccuccuccccuccuugcaccgagauuaaucaaaggcucuuuucagagccaccaaaaaaaaaaaaaaaaaaaaaaaaaaaaaaaaaaaaaaaaaaaaaaaaaaaaaaaaaaaaaaaaagaauu

SEQ ID NO: 21832 - RNA, 1943 nt, Artificial Sequence
  mRNA product Design i-3 (hSL-A64-N5) comprising derived and/or modified sequence from LASV(Nig08-04;Clade II)__ADU56611__SP-IgE_NP(2-569) (opt5)
aggagaaagcuuaccauggacuggaccuggauccuguuccucguggccgcugccacaagaguccacagcagcgccuccaaggaggugaaaucuuuccuguggacccagagccucagacgggaacuguccggcuacugcucuaacaucaaacuucaagucguuaaggacgcucaggcccugcuccacgggcuggauuuuagcgagguguccaaugugcagcgccuuaugagaaagcagaaacgggacgauggagaccugaagcgccucagagaucugaaccaagcggucaauaaccugguggaacucaagucuacccagcagaaaagcguucugcgggugggcacgcuuaccuccgacgaucugcucacacuggcugccgaccuugagaagcugaaaagcaaggucauucgcaccgaaagaccccucucuuccgggguguauaugggaaaucugagcacacagcaacuggagcagcggaaagcccuccugucuaugaucggcaugguugggggagcucagggcacccagccuggccgcgaugggguggucagagugugggacgugaagaacccggaucuucugaauaaccaauucggaacaaugcccucccucacccuggccugucuuacgaagcagggccaggucgaccugaaugaugcuguucucgcccugaccgaccuggggcucauuuacacagcgaaauauccuaacagcucugaccuggaucggcuuucccaaagccaucccauccugaauaugguggacaccaagaaauccucucucaacauuagcggauacaauuuuucccugggcgccgcugugaaggccggggcuugcaugcuugauggaggcaacaugcuggagacaaucaaagucaccccucagacgauggacggcauccucaagagcauucugaaagugaagcgcucucuggggauguucguuuccgauacacccggagaaagaaauccuuaugagaacauccucuacaagauuugucugagcggcgacggguggccguauaucgccucucggaccagcauugugggacgcgcgugggaaaacacaaccgucgaucuugaguccgacggcaaaccccagaagguggggaccgccggaucuaauaaaagccugcaguccgcuggcuuuccuacaggccucacguacagccaacugaugacccugaaggauucuaugaugcagcuugaccccuccgccaaaacauggaucgauauugaggggagaccugaagaccccguugagaucgcucucuaccagccgaugagcggaugcuauauccacuucuuucgggaaccuaccgaccugaagcaguucaagcaagaugccaaauacucucauggcauugacgugacagaucuguuuuccgcccagcccgggcucaccagcgcugucaucgaggcgcugccuagaaacauggugcuuacgugucagggauccgacgauauuaagaaacugcucgacucucagggccgccgggauaucaagcugauugacaucagccugaauaaagccgauuccagacgcuucgaaaacgcugucugggaccaaugcaaggaucuuugucacaugcauacaggggugguuguggagaagaaaaagcggggcggaaaagaggaaaucacaccccacugcgcccucauggacuguauuauguuugaugccgcugucucuggcgggcugaauauccccauucugagagccgugcucccucgcgacaugguuuuccggaccagcuccccgaaggugguccugugaggacuaguuauaagacugacuagcccgaugggccucccaacgggcccuccuccccuccuugcaccgagauuaaucaaaggcucuuuucagagccaccaaaaaaaaaaaaaaaaaaaaaaaaaaaaaaaaaaaaaaaaaaaaaaaaaaaaaaaaaaaaaaaaagaauu

SEQ ID NO: 21833 - RNA, 1946 nt, Artificial Sequence
  mRNA product Design i-3 (hSL-A64-N5) comprising derived and/or modified sequence from LASV(GA391;Clade III)__AAA46284__SP-IgE_NP(2-570) (opt5)
aggagaaagcuuaccauggacuggaccuggauccuguuccucguggccgcugccacaagaguccacagcagcgccuccaaggaggugagaucuugccuguggacccagagccuccggcgcgaacuguccggcuacuguucuaacaucaaacuucaagucguuaaggacgcucaggcccugcuccacgggcuggauuucagcgagguguccaaugugcagagacuuaugcggaaacagaagcgcgacgauggagaccugaaaagacuccgggaucugaaccaagcggucaauaaccugguggaacucaagucuacacagcagaaaagcguucugcgcgugggcacgcuuuccagcgacgaucugcucauucuggcugccgaccuugagaaacugaagucuaaagucaccagaacagaacggccccucuccagcgggguguauaugggaaaucugucuucccagcaacuggaucagcgcagagcccuccugaacaugaucggcaugaccgggguuagcggaggcggcaagggggcuucuaauggaauugugcgggucugggacgugaaaaacgccgagcuucugaauaaccaguuuggcacaaugccuucccucacccuggcuugccuuacaaagcaggggcaaguggaucugaaugacgccguccaggcgcucaccgaucugggacugaucuacacggccaaguauccgaacagcuccgaccucgaccgccugucucagagccaucccauucuuaauaugaucgauaccaaaaaguccagccugaacaucucuggcuacaauuucucccucggggcugccguuaaagcuggagccuguaugcuggacggcggcaacaugcuugagacaauuaaggugagcccucaaaccauggaugggauccugaaaucuauucucaaggugaaaaagagccugggaauguuugucuccgacacacccggcgaaagaaacccuuaugagaauauccuguacaagauuugccucucuggggauggauggagcuauaucgcgucccggaccagcauugugggccgcgccugggaaaacacgguuguggaccuggagcaggauaauaaaccccagaagaucgggaacggaggcucuaauaaaucccuucagagcgcuggcuucgccgcugggcugaucuacucucaacucaugacacugaaggacuuuaaauguuucaaccugauuccuaaugccaagaccuggauggauaucgagggaagaccggaagaccccgucgagauugcccuuuaccagccuuccagcggcugcuaugugcacuuuuuccgggaacccacagaucucaagcaguuuaaacaggacgcuaaguacucccaugggagagacguuaccgaucuguucgcggcccaaccuggacugaccucugcugugaucgaggcccucccccgcaacauggucauuacaugucagggcagcgaagacauccggaaacugcuugagucccaggggagacgcgauaucaagcugauugacaucacgcucucuaaagccgauagccggaaguuugagaaugcugugugggaccaguucaaggaucugugccacaugcauaccggcgucgugguugaaaagaagaaaagaggaggcaaggaggaaauuacaccgcacugugcccugauggacugcaucauguuugaugcggcuguguccgggggacuugacgccaaaguccuccgcgugguucugccucgggauaugguguucagaaccagcacacccaaggucgugcugugaggacuaguuauaagacugacuagcccgaugggccucccaacgggcccuccuccccuccuugcaccgagauuaaucaaaggcucuuuucagagccaccaaaaaaaaaaaaaaaaaaaaaaaaaaaaaaaaaaaaaaaaaaaaaaaaaaaaaaaaaaaaaaaaagaauu

SEQ ID NO: 21834 - RNA, 1943 nt, Artificial Sequence
  mRNA product Design i-3 (hSL-A64-N5) comprising derived and/or modified sequence from LASV(Nig08-A19;Clade III)__ADU56619__SP-IgE_NP(2-569) (opt5)
aggagaaagcuuaccauggacuggaccuggauccuguuccucguggccgcugccacaagaguccacagcagcgccuccaaggaggugaaaucuuuccuguggacccagagccucagacgggaacuguccggcuacugcucuaacaucaaacuucaagucguuaaggacgcucaggcccugcuccacgggcuggauuuuagcgagguguccaaugugcagcgccuuaugagaaagcagaaacgggacgauggagaccugaagcgccucagagaucugaaccaagcggucaauaaccugguggaacucaagucuacacagcagaaaagcguucugcgggugggcacgcuuuccagcgacgaucugcucguccuggcugccgaccuugagaagcugaaaucuaaggugguucgcaccgaaagaccccucuccagcgggauuuauaugggaaaucugucuucccagcaacuggaucagcggaaagcccuccugaacaugaucggcaugacagggggaaauggcggccgcaacaccacaagcgacgggauugugagagucugggaugugaagaaugcugagcuucugaacaaucaguucggaaccaugccuucucucacacuggccugucuuaccaagcagggccaaguggaccugaacgaugcuguccaggcccucacggaccuggggcugaucuacaccgcgaaauaucccaauuccagcgaccucgaucggcuggcccagucccauccgauucuuaacaugaucgacacaaagaaaucuagccugaauaucuccggauacaacuuuagccucggcgcugccguuaaggcuggggccugcaugcuggauggaggcaacaugcuugagaccauuaaagugucuccucaaacaauggacggcauccugaaguccauucucaaagugaagcgcagccuggggauguucaucucugauacccccggagaaagaaauccuuaugagaacauucuguacaagaucugucucagcggcgacggguggcccuauauugcgucccggacgucuaucgucggacgcgccugggaaaauacagugguugaucuggagagcgacaacaaaccucagaagaccggcaaugggggauccaacaaaagccuucagucugcuggcuuugccgcuggccugacauacucccagcucaugacccugaaggauagcaugcugcaacuugacccgaaugccaaaaccuggauggauaucgaggggagacccgaagacccuguggagauugcccucuaccagcccucuuccggaugcuauauccacuucuuucgggaaccuacagaccugaagcaguucaagcaggaugcuaaauacagccauggcauugacgucacggaucuguuugcggcccaacccgggcucaccuccgcugugaucgaggcccugccgagaaacaugguuauuacaugucagggaucugaagacauccgcaaacuucuggagagccagggccggagagauaucaagcucauugacaucucccugucuaagguggauagccgcaaauucgagaaugccgucugggaccaguuuaaggaucugugccacaugcauaccgggauuguggucgaaaagaaaaagcggggcggaaaagaggaaaucacaccucacugugcucuuauggacugcauuauguucgaugccgcgguguccggcgggguugacgcuaaggugcucagagccguccugccccgcgauaugguguuucggaccagcacgccuaaaguugugcugugaggacuaguuauaagacugacuagcccgaugggccucccaacgggcccuccuccccuccuugcaccgagauuaaucaaaggcucuuuucagagccaccaaaaaaaaaaaaaaaaaaaaaaaaaaaaaaaaaaaaaaaaaaaaaaaaaaaaaaaaaaaaaaaaagaauu

SEQ ID NO: 21835 - RNA, 1943 nt, Artificial Sequence
  mRNA product Design i-3 (hSL-A64-N5) comprising derived and/or modified sequence from LASV(G1180-SLE-2010;Clade IV)__AIT17169__SP-IgE_NP(2-569) (opt5)
aggagaaagcuuaccauggacuggaccuggauccuguuccucguggccgcugccacaagaguccacagcagcgccuccaaggagaucaaaucuuuccuguggacccagagccucagacgggaacuguccggcuacugcucuaacauuaagcugcaaguggucaaagacgcucaggcccugcuccacgggcuggauuuuagcgagguuuccaaugugcagcgccuuaugagaaaggaacggcgcgacgauaacgaccugaaaagacuccgggaucugaaucaggcggugaacaaucuggucgagcucaagucuacacaacaaaagagcauccugcgcgugggaacgcuuaccuccgacgaucugcucauucuggcugccgaccuugaaaaacuuaagagcaaaguuaucagaacagagcggccccucucugccggcguguauauggggaaccuguccagccagcagcuggaucagcgcagagcucuccugucuaugauuggaauguccagcggcaaucagcgggcccaggcugggcgcgacggagucgugagaguuugggaugugaagaacgucgagcuucugaauaaccaguucggcaccaugccuucucucacacuggccugucuuaccaaacaaggccagguggaccugaaugaugcggugcaggcccucacagaccuggggcugaucuacaccgcuaaguauccgaacacguccgaccucgaucggcugacccaaagccaucccauccuuaauaugauugacacaaagaaauccucucugaacaucagcggauacaauuuuucccucggcgccgcugucaaggccggggcgugcaugcuggauggaggcaacaugcuugaaaccauuaaaguuagcccucagacaauggacgggauccugaagucuauucucaaagugaagaaagcccugggaauguucaucuccgauacccccggcgagcgcaacccuuaugaaaauauucuguacaagaucugucucagcggcgacggguggcccuauaucgcuucuagaacgagcauuacaggacgggccugggagaacaccguggucgaucuggaguccgacggcaagccucagaaagcugggucuaauaacagcaauaagucccuucagagcgugggauuuacagccggccugaccuacucucaacucaugacccugaaagaugccaugcugcagcuugacccgaacgcuaagacauggauggauaucgaagggagacccgaggacccuguugaaauugcgcucuaccagcccuccagcggaugcuauauccacuucuuucgcgagccuacggaccugaaacaguucaagcaagaugccaaguacucucauggcauugacgugaccgaucuguuugcugcccagcccggccucacauccgccgucaucgacgcucugccgcggaauauggugaucaccugucaggggagcgaugacauuagaaaacuucuggaaucccagggacgcaaggauaucaaacucauugacaucgcccugucuaagacagauagccggaaauaugagaacgcgguuugggaccaauacaaggaucugugccacaugcauaccggcguggucguggagaagaaaaagagagggggaaaagaagagauuacgccucacugugcucuuauggacugcaucauguucgaugccgccgucuccggcgggcucaauacaucugugcugcgcgcuguucugccccgggacaugguguuuagaaccagcaccccucgcgucgugcucugaggacuaguuauaagacugacuagcccgaugggccucccaacgggcccuccuccccuccuugcaccgagauuaaucaaaggcucuuuucagagccaccaaaaaaaaaaaaaaaaaaaaaaaaaaaaaaaaaaaaaaaaaaaaaaaaaaaaaaaaaaaaaaaaagaauu

SEQ ID NO: 21836 - RNA, 1943 nt, Artificial Sequence
  mRNA product Design i-3 (hSL-A64-N5) comprising derived and/or modified sequence from LASV(G1442-SLE-2011;Clade IV)__AIT17181__SP-IgE_NP(2-569) (opt5)
aggagaaagcuuaccauggacuggaccuggauccuguuccucguggccgcugccacaagaguccacagcagcgccuccaaggaggugaaaucuuuccuguggacccagagccucagacgggaacuguccggcuacugcucuaacaucaaacuucaagucguuaaggacgcucaggcccugcuccacgggcuggauuuuagcgagguguccaaugugcagcgccuuaugagaaagcagcggcgcgacgauaacgaccugaaaagacuccgggaucugaaucaagcggucaacaaucugguggaacucaagucuacacagcaaaagagcguucugcgcgugggaacgcuuaccuccgacgaucugcucguccuggcugccgaccuugagaaacuuaagagcaaagugauuagaacagaacggccccucucugccggcguuuauauggggaaccuguccagccagcagcuggaucagcgcagagcucuccugaauaugaucggaaugucuggcgggauucagggaacccggacaggccgcgacggcguggucagagugugggaugugaagaacgccgaccuucugaauaaccaguucgggaccaugccuucccucacacuggcuugucuuaccaaacaaggacaggucgaucugaaugacguugugcaggcccucacggaccugggccugaucuacaccgcgaaguauccgaacgccagcgaucucgaccggcugacacaaucucaucccauucuuaauaugaucgauaccaagaaauccagccugaacaucuccggguacaauuuuucucucggagcugccgugaaggcuggcgccugcaugcuggacgggggaaacaugcuugagacaauuaaagucagcccucagaccauggauggcauccugaaguccauucucaaagugaagaaaacgcugggcauguucaucagcgacacacccggggagcgcaacccuuaugaaaauauucuguacaagaucugucucucuggagauggcuggcccuauauugcguccagaaccagcaucacagggcgggccugggagaacaccguuguggaccuggaaucugauggaaagccucagaaagcuggcagcaauaacuccaauaagucucuucagagcgccggguuugcugccggacugaccuacucccaacucaugacacugaaagacgccaugcugcagcuugauccgaacgcuaagacguggauggacaucgagggcagacccgaggacccugucgaaauugcgcucuaccagcccagcucuggcugcuauauccacuucuuucgcgagccuaccgaucugaaacaguucaagcaagacgccaaguacucccaugggauugaugugacagaccuguuugcugcccagcccggacucaccagcgccguuaucgaagcucugccgcggaauauggugauuacaugucagggcucugaugacaucaaaaagcugcuggagucccaggggagaaaagauaucaagcucauugacaucgcccugagcaaaaccgauucccgcaaguaugaaaacgcggucugggaccaauacaaggaucugugccacaugcauacgggaguggucguggagaaaaagaaacggggcgggaaggaggaaauuacaccucacugugcucuuauggacugcaucauguucgaugccgccguuucuggcggacucaauacccuggugcugagagcuguccucccccgcgacaugguguuucggaccagcacaccuagaguugugcugugaggacuaguuauaagacugacuagcccgaugggccucccaacgggcccuccuccccuccuugcaccgagauuaaucaaaggcucuuuucagagccaccaaaaaaaaaaaaaaaaaaaaaaaaaaaaaaaaaaaaaaaaaaaaaaaaaaaaaaaaaaaaaaaaagaauu

SEQ ID NO: 21837 - RNA, 1943 nt, Artificial Sequence
  mRNA product Design i-3 (hSL-A64-N5) comprising derived and/or modified sequence from LASV(G3010-SLE-2013;Clade IV)__AIT17345__SP-IgE_NP(2-569) (opt5)
aggagaaagcuuaccauggacuggaccuggauccuguuccucguggccgcugccacaagaguccacagcagcgccuccaaggagaucaaaucuuuccuguggacccagagccucagacgggaacuguccggcuacugcucuaacauuaaacuucaaguggucaaagacgcucaggcccugcuccacgggcuggauuuuagcgagguuuccaaugugcagcgccuuaugagaaaggaacggcgcgacgauaacgaccugaaaagacuccgggaucugaaucaggcggugaacaaucuggucgagcucaagucuacacaacaaaagagcauccugcgcgugggaacgcuuaccuccgacgaucugcucauucuggcugccgaccuugaaaaacuuaagagcaaaguuacaagaaccgagcggccccucucugccggcguguauauggggaaccuguccagccagcagcuggaucagcgcagagcucuccugucuaugaucggaauguccagcggcguccagggggcccgggcuggacgcgacggcgugguuagagugugggaugucaagaaugccgagcuucugaacaaucaguucggcacaaugccuucucucacccuggcgugucuuacaaaacaggggcaaguggaccugaacgaugugguccaggcccucaccgaccugggacugauuuacacggcuaaguauccgaauaccuccgaccucgaucggcugacacagagccaucccauccuuaacaugaucgacaccaagaaauccucucugaauauuagcggcuacaacuuuucccucggggccgcuguuaaggccggagcgugcaugcuggauggcgggaauaugcuugaaacaaucaaagugagcccucaaaccauggacggcauucugaagucuauccucaaagugaagaaagcccugggaauguucauuuccgagacgcccggcgaacgcaacccuuaugagaacauccuguacaagauuugucucagcggggauggauggcccuauaucgcuucuagaacaagcaucaccggccgggccugggagaauacagucguggaccuggaauccgaugggaagccucagaaagcuggaucuaacaauagcaacaagucccuucagagcgccggcuuuaccgccgggcugaccuacucucagcucaugacacugaaagacgcuaugcugcaacuugauccgaaugcgaagacguggauggacauugagggaagacccgaagauccuguugagguggcccucuaccagcccuccagcggcugcuauauccacuucuuucgcgaaccuaccgaccugaaacaguucaagcaggacgcuaaguacucucauggcauugaugucacagaccuguuugccgcccaacccgggcucaccuccgcugugaucgaugcccugccgcggaacaugguuauuacaugucagggaagcgacgauaucaaaaagcugcuggagucccagggcagaaaagacaucaagcucauugauaucgcgcugucuaaaaccgacagccgcaaguaugagaaugcugugugggaucaguacaaggaccugugccacaugcauacgggggucguggucgaaaagaagaaacggggaggcaaggaggaaauuacaccucacugugcccuuauggauugcaucauguucgacgccgcuguguccgggggccucaacaccucuguucugagagccgugcugccccgcgauauggucuuucggaccagcacaccuagagugguucucugaggacuaguuauaagacugacuagcccgaugggccucccaacgggcccuccuccccuccuugcaccgagauuaaucaaaggcucuuuucagagccaccaaaaaaaaaaaaaaaaaaaaaaaaaaaaaaaaaaaaaaaaaaaaaaaaaaaaaaaaaaaaaaaaagaauu

SEQ ID NO: 21838 - RNA, 1943 nt, Artificial Sequence
  mRNA product Design i-3 (hSL-A64-N5) comprising derived and/or modified sequence from LASV(G502-SLE-2009;Clade IV)__AIT17127__SP-IgE_NP(2-569) (opt5)
aggagaaagcuuaccauggacuggaccuggauccuguuccucguggccgcugccacaagaguccacagcagcgccuccaaggagaucaaaucuuuccuguggacccagagccucagacgggaacuguccggcuacugcucuaacauuaagcugcaaguggucaaagacgcucaggcccugcuccacgggcuggauuuuagcgagguuuccaaugugcagcgccuuaugagaaaggaacggcgcgacgauaacgaccugaaaagacuccgggaucugaaucaggcggugaacaaucuggucgagcucaagucuacacaacaaaagagcauccugcgcgugggaacgcuuaccuccgacgaucugcucauucuggcugccgaccuugaaaaacuuaagagcaaaguuaucagaacagagcggccccucucugccggcguguauauggggaaccuguccagccagcagcuggaucagcgcagagcucuccugucuaugauuggaauguccggcgggaaucagggaguccgggccggcaaggacggcgugguucgcgugugggaugucaaaaacgcugagcuucugaauaaccaguucgggaccaugccuagccucacacuggccugucuuaccaagcagggacaaguggaccugaaugaugcggugcaggcccucacagaccugggccugaucuacaccgcuaaguauccgaacacgucugaccucgauagacugacccagucccaucccauccuuaauaugauugacaccaaaaagagcucccugaacaucucuggguacaauuuuagccucggagccgcugucaaagccggcgcgugcaugcuggaugggggaaacaugcuugaaacaauuaagguuuccccucaaacaauggacggcauccugaaaagcauucucaaggugaaaaaggcccugggcauguucaucucugauacccccggggagcggaacccuuaugaaaauauucuguacaagaucugucucuccggagacggcuggcccuauaucgcuagccgcacgucuauuacagggagagccugggagaacaccguggucgaucuggagagcgacggaaaaccucagaaggcuggcuccaauaacucuaauaaaagccuucaguccgccggguuuacagccggacugaccuacagccagcucaugacccugaaggaugcuaugcugcaacuugacccgaacacaaaaacguggauggauaucgaaggccggcccgaggacccuguggaaauugcgcucuaccagcccucuuccggcugcuauauccacuucuuuagagagccuaccgaccugaagcaguucaagcaggaugccaaauacagccaugggauugacguuacagaucuguuugcugcccaacccggacucaccucugccgugaucgacgcucugccgcgcaauauggucaucacaugucagggcuccgaugacauucggaaacuucuggaaagccaggggagaaaggauaucaagcucauugacaucgcccugaacaaaaccgauucccgcaaguaugagaaugcggugugggaccaguacaaggaucugugccacaugcauacgggaguuguggucgagaaaaagaaacggggcgggaaggaagagauuacaccucacugugcucuuauggacugcaucauguucgaugccgccgugucuggcggacucaacaccagcguccugagagcugugcugccccgcgacaugguuuuucggaccuccacaccuagagugguccucugaggacuaguuauaagacugacuagcccgaugggccucccaacgggcccuccuccccuccuugcaccgagauuaaucaaaggcucuuuucagagccaccaaaaaaaaaaaaaaaaaaaaaaaaaaaaaaaaaaaaaaaaaaaaaaaaaaaaaaaaaaaaaaaaagaauu

SEQ ID NO: 21839 - RNA, 1943 nt, Artificial Sequence
  mRNA product Design i-3 (hSL-A64-N5) comprising derived and/or modified sequence from LASV(G733-SLE-2010;Clade IV)__AIT17155__SP-IgE_NP(2-569) (opt5)
aggagaaagcuuaccauggacuggaccuggauccuguuccucguggccgcugccacaagaguccacagcagcgccuccaaggagaucaaaucuuuccuguggacccagagccucagacgggaacuguccggcuacugcucuaacauuaagcugcaaguggucaaagacgcucaggcccugcuccacgggcuggauuuuagcgagguuuccaaugugcagcgccuuaugagaaaggaacggcgcgacgauaacgaccugaaaagacuccgggaucugaaucaggcggugaacaaucuggucgagcucaagucuacacaacaaaagagcgugcugcgcguuggaacgcuuaccuccgacgaacugcucgugcuggcugccgaucuugagaaacuuaagagcaaagucaucagaacagagcggccccucucugccggcguguauauggggaaccuguccagccagcagcuggaccagcgcagagcucuccugucuaugauuggaauguccggcgggaaucagggagcccggaccggccgcgauggcguugugagagucugggacgugaagaacgcugaacuucugaauaaccaguucgggacaaugccuagccucacccuggccugucuuacaaaacagggacaaguggaucugaaugacgcgguccaggcccucaccgaucugggccugaucuacacggcuaaguauccgaacaccucugaccucgaccggcugacacagucccaucccauucuuaauaugaucgauaccaagaaaagcucccugaacaucucuggguacaauuuuagccucggagccgcuguuaaggccggcgcgugcaugcuggacgggggaaacaugcuugagacaauuaaaguguccccucaaaccauggauggcauccucaagagcauucugaaagugaagaaagcccugggcauguucaucucugacacgcccggggaacgcaacccuuaugagaauauucuguacaagaucugucucuccggagauggcuggcccuauauugcuagcagaacaucuaucaccgggcgggccugggagaacacagucguggaccuggaaagcgauggaaagccucagaaagcuggcuccaauaacucuaauaagagccuucaguccgccggguuuaccgccggacugaccuacagccagcucaugacacugaaagacgcuaugcugcaacuugauccgaacgcgaagacguggauggacaucgagggcagacccgaagauccuguugagauugcccucuaccagcccucuuccggcugcuauauccacuucuuucgcgaaccuaccgaccugaaacaguucaagcaggacgcuaaguacagccaugggauugaugugacagaccuguuugccgcccaacccggacucaccucugcugucaucgaugcccugccgcggaauauggugauuacaugucagggcuccgacgauaucagaaaacuucuggagagccaggggcgcaaggacaucaaacucauugauaucgcgcuguccaagauugacucucggaaauaugagaacgcuguuugggaucaguacaaggaccugugccacaugcauaccggaguggucguggaaaagaaaaagagaggcgggaaagaggaaaucacgccucacugugcccuuauggauugcauuauguucgacgccgcugucagcggcggacucaauucccuggugcugcgcgccguucucccccgggauaugguguuuagaacaucuaccccucgcgucgugcugugaggacuaguuauaagacugacuagcccgaugggccucccaacgggcccuccuccccuccuugcaccgagauuaaucaaaggcucuuuucagagccaccaaaaaaaaaaaaaaaaaaaaaaaaaaaaaaaaaaaaaaaaaaaaaaaaaaaaaaaaaaaaaaaaagaauu

SEQ ID NO: 21840 - RNA, 1943 nt, Artificial Sequence
  mRNA product Design i-3 (hSL-A64-N5) comprising derived and/or modified sequence from MOPV/LASV reassortant(IGS-1;Clade IV)__AFY05578__SP-IgE_NP(2-569) (opt5)
aggagaaagcuuaccauggacuggaccuggauccuguuccucguggccgcugccacaagaguccacagcagcgccuccaaggagaucaaaucuuuccuguggacccagagccucagacgggaacuguccggcuacugcucuaacauuaaacuucaaguggucaaggacgcucaggcccugcuccacgggcuggauuuuagcgagguuuccaaugugcagcgccuuaugagaaaggaacggcgcgacgauaacgaccugaaaagacuccgggaucugaaucaggcggugaacaaucuggucgagcucaagucuacacaacaaaagagcauccugcgcgugggaacgcuuaccuccgacgaucugcucauucuggcugccgaccuugaaaaacugagaagcaagguuauccggacagagcgcccccucucugccggcguguauauggggaaccuguccagccagcagcuggaucagagacgggcucuccugaauaugauuggaaugucuggcgggaaccagggagcccgcgcuggcagagacggcgucgugcggguuugggaugugaaaaaugccgagcuucuguccaaccaguucgggaccaugccuagccucacacuggcgugucuuaccaagcagggacaagucgaccugaaugaugccgugcaggcucucacagaccugggccugaucuacaccgccaaauauccgaacacgucugaccucgaucgccugacccagucccaucccauccuuaauaugauugacacaaagaaaagcucccugaacaucucuggguacaauuuuagccucggagcugccgugaaggcgggcgccugcaugcuggaugggggaaacaugcuugaaaccauuaaggucuccccucaaacaauggacggcauccugaaaagcauucucaagguuaaaaaggcucugggcauguucaucucugauacccccggggagagaaacccuuaugaaaauauucuguacaaaaucugucucuccggagacggcuggcccuauaucgccagccggacgucuauuacagggagagcuugggagaacaccgugguggaucuggagagcgacggaaagccucagaaggccgauuccaauaacucuagcaaaucccuucagagcgccggcuuuacagcugggcugaccuacucucagcucaugacccugaaggacgcgaugcugcaacuugauccgaaugccaaaacauggauggacaucgaaggacgccccgaggacccugucgaaauugcucucuaccagcccuccagcggcugcuauauccacuucuuucgggagccuacggaucugaagcaguucaaacaggacgccaaguacucucauggcauugaugugaccgaccuguuugccacacaacccgggcucaccuccgcuguuaucgaugcccugccgagaaacauggugaucacaugucagggaagcgacgauauucgcaaacuucuggaaucccagggccggaaggacaucaagcucauugauaucgaccugucuaaaaccgauagcagaaaguaugagaaugcggucugggaccaguacaaagaucugugccacaugcauacgggggugguuguggagaagaagaaacgcggaggcaaggaagagauuacaccucacugugcucuuauggacugcaucauguucgacgccgccgucuccgggggccucaacaccucugugcugcgggcuguccugcccagagauaugguguuucgcaccagcacaccucggguugugcucugaggacuaguuauaagacugacuagcccgaugggccucccaacgggcccuccuccccuccuugcaccgagauuaaucaaaggcucuuuucagagccaccaaaaaaaaaaaaaaaaaaaaaaaaaaaaaaaaaaaaaaaaaaaaaaaaaaaaaaaaaaaaaaaaagaauu

SEQ ID NO: 21841 - RNA, 1943 nt, Artificial Sequence
  mRNA product Design i-3 (hSL-A64-N5) comprising derived and/or modified sequence from LASV(LM765-SLE-2012;Clade IV)__AIT17815__SP-IgE_NP(2-569) (opt5)
aggagaaagcuuaccauggacuggaccuggauccuguuccucguggccgcugccacaagaguccacagcagcgccuccaaggagaucaaaucuuuccuguggacccagagccucagacgggaacuguccggcuacugcucuaacauuaagcugcaaguggucaaagacgcucaggcccugcuccacgggcuggauuuuagcgagguuuccaaugugcagcgccuuaugagaaaggaacggcgcgacgauaacgaccugaaaagacuccgggaucugaaucaggcggugaacaaucuggucgagcucaagucuacacaacaaaagagcauccugcgcgugggaacgcuuaccuccgacgaucugcucauucuggcugccgaccuugaaaaacuuaagagcaaaguuacaagaaccgagcggccccucucugccggcguguauauggggaaccuguccagccagcagcuggaucagcgcagagcucuccuggacaugaucggaaugucuggcuccaaucagggggcccgggcuggacgcgauggcgucgugagaguuugggacgugaagaacgccgagcuucugaauaaccaguucggcacaaugccuagccucacccuggcgugucuuacaaaacaggggcaagucgaucugaaugacgccgugcaggcucucaccgaccugggacugauuuacacggccaaguauccgaacaccucugaucucgaccggcugacacagucccaucccauccuuaauaugaucgauaccaagaaaagcucccugaacauuucuggcuacaauuuuagccucggggcugccgugaaggcgggagccugcaugcuggacggcgggaacaugcuugaaacaaucaaagucuccccucaaaccauggauggcauucucaagagcauccugaaaguuaagaaagcucugggaauguucauuucugacgcccccggcgagcgcaacccuuaugaaaauauccuguacaagauuugucucuccggggauggauggcccuauaucgcuagcagaacgucuaucacaggccgggccugggagaacaccgugguggaccuggagagcgaugggaagccucagaaagccggauccaauggcucuaacaagagccuucaguccgcuggguuuacagcgggacugaccuacagccagcucaugacccugaaagacgccaugcugcaacuugauccgaaugcuaagacauggauggacauugaaggcagacccgaggacccugucgaaaucgcccucuaccagcccucuuccggcugcuauauucacuucuuucgcgagccuacggaucugaaacaguucaagcaggacgccaaguacagccaugggaucgaugugaccgaccuguuugcugcccaacccggacucacaucugcgguuauugaugcucugccgcggaacauggugaucaccugucagggcuccgacgauaucagaaaacuuuucgaaagccaggggcgcaaggacauuaaacugaucgauauugcccucuccaagacagacucucggaaauaugagaaugccgucugggaucaguacaaggaccugugccacaugcauaccggaaucgugguugagaagaaaaagagaggcgggaaagaagagauuacgccucacugugcucugauggauugcaucauguuugacgccgcugugagcggcggacuuaacacauccguccuccgcgccgugcugccccgggacauggucuucagaaccucuaccccucgcgugguucugugaggacuaguuauaagacugacuagcccgaugggccucccaacgggcccuccuccccuccuugcaccgagauuaaucaaaggcucuuuucagagccaccaaaaaaaaaaaaaaaaaaaaaaaaaaaaaaaaaaaaaaaaaaaaaaaaaaaaaaaaaaaaaaaaagaauu

SEQ ID NO: 21842 - RNA, 1943 nt, Artificial Sequence
  mRNA product Design i-3 (hSL-A64-N5) comprising derived and/or modified sequence from LASV(LM776-SLE-2012;Clade IV)__AIT17825__SP-IgE_NP(2-569) (opt5)
aggagaaagcuuaccauggacuggaccuggauccuguuccucguggccgcugccacaagaguccacagcagcgccuccaaggagaucaaaucuuuccuguggacccagagccucagacgggaacuguccucuuacugcagcaacauuaaacuucaaguggucaaggacgcucaggcccugcuccacggccuggauuuuuccgagguuucuaaugugcagcgccuuaugagaaaggaacggcgcgacgauaacgaccugaaaagacuccgggaucugaaucaggcggugaacaaucuggucgagcucaagagcacacaacagaaguccauccugcgcguggggacgcuuaccagcgacgaucugcucauucuggcugccgaccuugaaaaacugaagucuaaaguuacaagaaccgagcggccccucuccgccggaguguauaugggcaaccugagcucucagcagcuggaucaacgcagagcucuccuguccaugaucgggaugagcggaucuaaucagggcgcccgggcugggcgcgacggagucgugagaguuugggaugugaagaacgccgagcuucugaauaaccaguucggcacaaugccuucccucacccuggcgugucuuacaaaacagggccaagucgaccugaaugaugccgugcaggcucucaccgaccuggggcugauuuacacggccaaguauccgaacaccagcgaccucgaucggcugacacagucccaucccauccuuaauaugaucgacaccaagaaaucuagccugaacauuuccggauacaauuuuagccucggcgcugccgugaaggcgggggccugcaugcuggauggaggcaacaugcuugaaacaaucaaagucucuccucaaaccauggacgggauucugaaguccauccucaaaguuaagaaagcucugggaauguucauuagcgauacgcccggcgagcgcaacccuuaugaaaauauccuguacaagauuugucucucuggcgacggguggcccuauaucgccagcagaacauccaucaccggacgggcuugggagaacacagugguggaucuggagucugacggcaagccucagaaagccgggagcaauaacuccaauaagagccuucagucugccggauuuaccgcuggccugaccuacucccagcucaugacacugaaagaugcgaugcugcaacuugacccgaacgccaagacguggauggauauugaagggagacccgaggacccugucgaaguggcucucuaccagcccagcucuggaugcuauauccacuucuuucgcgagccuaccgaccugaaacaguucaagcaggaugccaaguacucccauggcauugacguuacagaucuguuugccgcucaacccggccucaccagcgccgugaucgacgcgcugccgcggaauauggucauuacaugucagggguccgaugacaucagaaaacuucuggaaucucagggacgcaaggauaucaaacucauugacaucgcucugagcaagaccgauucccggaaauaugagaacgccgugugggaccaguacaaggaucugugccacaugcauacgggcguuguggucgagaagaaaaagagagggggaaaagaagagauuacaccucacugugcccuuauggacugcaucauguucgaugcugccgugucuggcgggcucaauaccagcguccugcgcgcugugcugccccgggacaugguuuuuagaaccuccacaccucgcgugguccucugaggacuaguuauaagacugacuagcccgaugggccucccaacgggcccuccuccccuccuugcaccgagauuaaucaaaggcucuuuucagagccaccaaaaaaaaaaaaaaaaaaaaaaaaaaaaaaaaaaaaaaaaaaaaaaaaaaaaaaaaaaaaaaaaagaauu

SEQ ID NO: 21843 - RNA, 1943 nt, Artificial Sequence
  mRNA product Design i-3 (hSL-A64-N5) comprising derived and/or modified sequence from LASV(Mad39;Clade IV)__ANH09723__SP-IgE_NP(2-569) (opt5)
aggagaaagcuuaccauggacuggaccuggauccuguuccucguggccgcugccacaagaguccacagcagcgccuccaaggagaucaaaucuuuccuguggacccagagccucagacgggaacuguccggcuacugcucuaacauuaagcugcaaguggucaaagacgcucaggcccugcuccacgggcuggauuuuagcgagguuuccaaugugcagcgccuuaugagaaagcagcggcgcgacgauaacgaccugaaaagacuccgggaucugaaucaagcggugaacaaucuggucgaacucaagucuacacagcaaaagagcgugcugcgcguuggaacgcuuaccuccgacgaucugcucacacuggcugccgaccuugagaaacuuaagagcaaagugaccagaacagaacggccccucaccgccggcgucuauauggggaaccugucuucccagcagcuggaucagcgcagagcucuccugaauaugaucggaaugagcggcgggaaccagggagcccggacaggccgcgacggcgugguuagagugugggaugucaagaaugcugagcuucugaacaaucaguucgggaccaugccuucucucacgcuggccugucuuaccaaacaaggacagguggaccugaacgaugugguccaggcgcucacagaccugggccugauuuacaccgccaaguauccgaauacauccgaccucgaucggcugacccaaagccaucccauccuuaacaugauugacacgaauaagucuucccugaacaucagcggguacaacuuuucccucggagcugccguuaaagcuggcgccugcaugcuggaugggggaaauaugcuugagacaaucaaggugucuccucagaccauggacggcauucugaaaagcauccucaaggugaaaaagucccugggcauguucauuagcgauacacccggggaacgcaacccuuaugagaauauccuguacaaaauuugucucucuggagacggcuggcccuauaucgcguccagaaccagcauuaccgggcgggccugggaaaacacagucguggaucuggagucuggaggcaagccucagaaggcugggagcaauaacuccaauaaaucucuucagagcgccggauuugcugccggccugacguacucccaacucaugacccugaaggacgccaugcugcagcuugauccgaacgcuaaaacauggauggacaucgagggcagacccgaagauccuguugagaucgcgcucuaccagcccauuagcgggugcuauauccacuucuuucgcgaaccuaccgaccugaagcaguucaaacaagacgccaaguacucucauggaauugaugugacagaccuguuugcugcccagcccggccucaccuccgccgucaucgaggcucugccgcggaauauggugauuacgugucaggggagcgaugacaucagaaaacuuuucgaaucucagggacgcaaggauaucaagcugauugacaucgcccucuccaaaacagauagccggaaguaugagaacgcgguuugggaccaauacaaagaucugugccacaugcauaccggcguggucguggagaagaagaaaaagggcgggaaagaagagauuaccccucacugugcucugauggacugcaucauguuugaugccgccgucuccggaggccuuaauacacucgugcugagagcuguucugccccgcgacaugguguuccggaccucuacaccuaaggucgugcucugaggacuaguuauaagacugacuagcccgaugggccucccaacgggcccuccuccccuccuugcaccgagauuaaucaaaggcucuuuucagagccaccaaaaaaaaaaaaaaaaaaaaaaaaaaaaaaaaaaaaaaaaaaaaaaaaaaaaaaaaaaaaaaaaagaauu

SEQ ID NO: 21844 - RNA, 1943 nt, Artificial Sequence
  mRNA product Design i-3 (hSL-A64-N5) comprising derived and/or modified sequence from LASV(Z0947-SLE-2011;Clade IV)__AIT17841__SP-IgE_NP(2-569) (opt5)
aggagaaagcuuaccauggacuggaccuggauccuguuccucguggccgcugccacaagaguccacagcagcgccuccaaggagaucaaaucuuuccuguggacccagagccucagacgggaacuguccggcuacugcucuaacauuaagcugcaaguggucaaagacgcucaggcccugcuccacgggcuggauuuuagcgagguuuccaaugugcagcgccuuaugagaaaggaacggcgcgacgauaacgaccugaaaagacuccgggaucugaaucaggcggugaacaaucuggucgagcucaagucuacacaacaaaagagcauccugcgcgugggaacgcuuaccuccgacgaucugcucauucuggcugccgaccuugaaaaacuuaagagcaaaguuacaagaaccgagcggccccucucugccggcguguauauggggaaccuguccagccagcagcuggaucagcgcagagcucuccugaauaugaucggaaugucuggcuccaaccagggggcccggacaggacgcgacggcgucgugagaguuugggaugugaagaaugcugagcuucugaacaaucaguucggcaccaugccuagccucacacuggccugucuuaccaaacaggggcaagucgaccugaacgaugcggugcaggcccucacggaccugggacugauuuacaccgcuaaguauccgaauacaucugaccucgaucggcugacccagucccaucccauccuuaacaugaucgacacaaagaaaagcucccugaauauuucuggcuacaacuuuagccucggggccgcugugaaggccggagcgugcaugcuggauggcgggaacaugcuugaaaccaucaaagucuccccucaaacgauggacggcauucucaagagcauccugaaaguuaagaaagcccugggaauguucauuucugaugcucccggcgagcgcaauccuuaugaaaacauccuguacaagauuugucucuccggggacggauggcccuauaucgccagcagaacaucuaucaccggccgggcuugggagaauacagugguggaucuggagagcgacgggaagccucagaaagccggauccaacggcucuaauaagagccuucaguccgccggguuuaccgcuggacugaccuacagccagcucaugacacugaaagaugcgaugcugcaacuugacccgaacgccaagacguggauggauauugaaggcagacccgaggacccugucgaaaucgcucucuaccagcccucuuccggcugcuauauucacuucuuucgcgagccuaccgaccugaaacaguucaagcaggaugccaaguacagccaugggaucgacgugacagaucuguuugccgcucaacccggacucaccucugccguuauugacgcgcugccgcggaauauggugaucacaugucagggcuccgaugacaucagaaaacuuuucgaaagccaggggcgcaaggauauuaaacugaucgacauugcucucuccaagaccgauucucggaaauaugagaacgccgucugggaccaguacaaggaucugugccacaugcauacgggaaucgugguugagaagaaaaagagaggcgggaaagaagagauuacaccucacugugcccugauggacugcaucauguuugaugcugccgugagcggcggacuuaauaccuccguccuccgcgcugugcugccccgggacauggucuucagaaccucuacaccucgcgugguucugugaggacuaguuauaagacugacuagcccgaugggccucccaacgggcccuccuccccuccuugcaccgagauuaaucaaaggcucuuuucagagccaccaaaaaaaaaaaaaaaaaaaaaaaaaaaaaaaaaaaaaaaaaaaaaaaaaaaaaaaaaaaaaaaaagaauu

SEQ ID NO: 21845 - RNA, 1974 nt, Artificial Sequence
  mRNA product Design i-3 (hSL-A100) comprising derived and/or modified sequence from LASV(Josiah;Clade IV)__NP_694869__SP-IgE_NP(2-569) (opt1)
aggagaaagcuuaccauggacuggaccuggauccuguuccucguggccgccgcgacccgcguccacagcagcgccuccaaggagaucaagagcuuccuguggacccagucccuccgccgggagcugagcggcuacugcuccaacaucaagcuccagguggucaaggacgcccaggcgcugcugcacgggcuggacuucagcgagguguccaacgugcagcgccucaugcggaaggagcgccgggacgacaacgaccugaagcgccugcgggaccucaaccaggccgucaacaaccugguggagcucaagagcacccagcagaaguccauccugcgcgugggcacccugaccagcgacgaccugcucauccuggccgccgaccuggagaagcucaaguccaaggucauccggaccgagcgcccccugagcgccgggguguacaugggcaaccuguccagccagcagcucgaccagcggcgcgcgcugcugaacaugaucgggauguccggcggcaaccagggggcccgggccggccgcgacggggugguccgggugugggacgugaagaacgccgagcuccugaacaaccaguucggcaccaugccgagccugacgcucgcgugccugaccaagcaggggcaggucgaccugaacgacgccgugcaggcccucaccgaccugggccugaucuacaccgccaaguaccccaacacguccgaccucgaccgccugacccagagccaccccauccugaacaugaucgacaccaagaaguccagccucaacaucagcggcuacaacuucucccugggggccgcggugaaggccggcgccugcaugcuggacgggggcaacaugcucgagaccaucaaggucagcccccagacgauggacggcauccugaaguccauccugaaggugaagaaggcccucgggauguucaucagcgacaccccgggcgagcggaaccccuacgagaacauccuguacaagaucugccuguccggggacggcuggcccuacaucgccagccgcaccuccaucaccgggcgggcgugggagaacacgguggucgaccucgagagcgacggcaagccccagaaggccgacuccaacaacagcuccaagagccugcaguccgccggcuucaccgccgggcugaccuacagccagcucaugacccugaaggacgccaugcugcagcuggacccgaacgcgaagacguggauggacaucgagggccgccccgaggaccccguggagaucgcccucuaccagcccuccagcgggugcuacauccacuucuuccgggagccgaccgaccugaagcaguucaagcaggacgccaaguacucccacggcaucgacgugaccgaccuguucgccacccagcccgggcucacgagcgccgucaucgacgcgcugccccgcaacauggugaucacgugccagggcuccgacgacauccgcaagcugcucgagagccagggccggaaggacaucaagcugaucgacaucgcccugagcaagaccgacucccgcaaguacgagaacgccgugugggaccaguacaaggaccucugccacaugcacaccggggucguggucgagaagaagaagcggggcgggaaggaggagaucaccccgcacugcgcccugauggacugcaucauguucgacgcggccgugagcggcgggcugaacaccuccgugcuccgcgccguccugccccgggacaugguguuccgcaccagcacgccccgggugguccugugaggacuaguuauaagacugacuagcccgaugggccucccaacgggcccuccuccccuccuugcaccgagauuaaucaaaggcucuuuucagagccaccaaaaaaaaaaaaaaaaaaaaaaaaaaaaaaaaaaaaaaaaaaaaaaaaaaaaaaaaaaaaaaaaaaaaaaaaaaaaaaaaaaaaaaaaaaaaaaaaaaaaa

SEQ ID NO: 21846 - RNA, 1974 nt, Artificial Sequence
  mRNA product Design i-3 (hSL-A100) comprising derived and/or modified sequence from LASV(LP;Clade I)__AAF86702__SP-IgE_NP(2-569) (opt1)
aggagaaagcuuaccauggacuggaccuggauccuguuccucguggccgccgcgacccgcguccacagcagcaacuccaaggagaucaagagcuuccuguggacccagucccuccgccgggagcugagcggcuacugcuccaacaucaagcuccagguggucaaggacgcccaggcccugcugcacgggcuggacuucagcgagguguccaacgugcagcgccucaugcggaagcagaagcgcgacgacgcggaccugaagcggcugcgcgaccucaaccaggccgucaacaaccugguggagcucaagagcacccagcagaagaacgugcugcgggucggcacgcuguccagcgacgaccugaucacccucgccgccgaccuggagaagcugaaguccaaggugauccgcaccgagcggccccucagcuccgggguguacaugggcaaccugagcucccagcagcuggaccagcgccgggcccuccugagcaugaucgggauguccggcggcccgcaggggaaccgcaccggcggggacggcgucgugcgggugugggacgucaagaacgcggagcugcucaacaaccaguucgggacgaugcccagccugacccuggccugccucaccaagcagggccagguggaccugaacgacgccgugcaggcccugaccgaccucggccugaucuacacggcgaaguaccccaacuccagcgaccuggacaugcucacccagagccaccccauccuggggauggucgacaccaagaaguccagccugaacaucuccggcuacaacuucagccucggggccgccgugaaggccggcgccugcaugcuggacggcgggaacaugcuggagaccaucaagguguccccgcagacgauggacggcauccucaagagcauccugaaggucaagcgcucccuggggauguucaucagcgacacccccggcgagcggaaccccuacgagaacauccucuacaagaucugccuguccggggagggcuggcccuacaucgcgagccgcaccuccaucaccggccgggccugggagaacacgcugguggaccucgagagcgacaacaagccgcccaagcugaacuccgccgggagcaacaagucccugcaggccgccggccucaacgcggggcugaccuacagccagcugaugacccugaaggacugcaugcuccagcuggaccccuccagcaagaccuggaucgacaucgagggccgccccgaggacccgguggagaucgcccuguuccagcccuccagcgggugcuacauccacuucuuccgggagcccacggaccucaagcaguucaagcaggacgccaaguacagccacggcaucgacgucaccgaccuguucuccacccagcccggccugaccagcgccgugaucgaggcccucccgcgcaacauggugcugacgugccagggguccgacgacaucaagaagcugcucgagagccagggccggcgcgacaucaagcugaucgacaucucccugagcaaggcggacucccgcaaguucgagaacgccgucugggaccaguacaaggaccucugccacaugcacaccgggguggucguggagaagaagaagcggggcgggaaggaggagaucacgccccacugcgcccugcuggacugcaucauguucgacgccgccaccaccggcagccucaacaucaccacccugcgcgcggugcugccccgggacauggucuuccgcaccuccacgcccaagguggugcucugaggacuaguuauaagacugacuagcccgaugggccucccaacgggcccuccuccccuccuugcaccgagauuaaucaaaggcucuuuucagagccaccaaaaaaaaaaaaaaaaaaaaaaaaaaaaaaaaaaaaaaaaaaaaaaaaaaaaaaaaaaaaaaaaaaaaaaaaaaaaaaaaaaaaaaaaaaaaaaaaaaaaa

SEQ ID NO: 21847 - RNA, 1974 nt, Artificial Sequence
  mRNA product Design i-3 (hSL-A100) comprising derived and/or modified sequence from LASV(803213;Clade II)__AAF86704__SP-IgE_NP(2-569) (opt1)
aggagaaagcuuaccauggacuggaccuggauccuguuccucguggccgccgcgacccgcguccacagcagcgccuccaaggaggugaaguccuuccuguggacccagagccuccgccgggagcugagcggcuacugcuccaacaucaagcugcaggucgugaaggacgcccaggcgcuccugcacgggcuggacuucagcgaggugaacaacguccagcgccucaugcggaagcagaagcgcgacgacggcgaccugaagcggcugcgcgaccucaaccaggccgugaacaaccugguggagcugaaguccacccagcagaaguccauccuccgggucgggacgcugaccagcgacgaccugcucacccuggccgccgaccuggagaagcucaagagcaaggugauccgcaccgagcggccccuguccagcggcguguacauggggaaccuguccacgcagcagcucgagcagcgccgggcccugcugaacaugaucggcauggucggcggggcgcagggcacccagccggggcgcgacggcguggugcgggucugggacgugaagaaccccgaccuccugaacaaccaguucgggaccaugcccagccugacccucgccugccugacgaagcagggccagguggaccugaacgacgccguccucgcccugaccgaccugggccucaucuacaccgcgaaguaccccaacuccagcgaccuggaccgccugucccagagccacccgauccucaacaugguggacaccaagaaguccagccugaacaucagcggguacaacuucucccugggcgccgccgugaaggccggggccugcaugcucgacggcggcaacaugcuggagacgaucaaggucacgccccagaccauggacgggauccucaagagcauccugaaggugaagcggucccugggcauguucgugagcgacacccccggggagcgcaaccccuacgagaacauccuguacaagaucugccucuccggcgacggguggccguacaucgcgagccggaccuccaucgucggccgcgccugggagaacaccaccguggaccuggagagcgacggcaagccccagaagguggggaccgccggcuccaacaagagccugcaguccgccggguuccccacgggccucaccuacagccagcugaugacccugaaggacuccaugaugcagcuggaccccagcgccaagaccuggaucgacaucgaggggcggccggaggaccccgucgagaucgcgcucuaccagcccauguccggcugcuacauccacuucuuccgcgagcccacggaccugaagcaguucaagcaggacgccaaguacagccacggcaucgacguggccgaccuguucccggcccagcccgggcucaccuccgccgucaucgaggcgcugccccggaacauggugcugaccugccagggcagcgacgacaucaagaagcuccuggacucccaggggcgccgcgacaucaagcugaucgacaucagccucagcaagguggacucccggaaguucgagaacgccgucugggaccagugcaaggaccugugccacaugcacaccggcgugguggucgagaagaagaagcgcgggggcaaggaggagaucacgccccacugcgcccugauggacugcaucauguucgacgccgccgugagcggcgggcucaacaucccggugcugcgggcgguccugccccgcgacaugguguuccggaccuccagccccaaggugguccucugaggacuaguuauaagacugacuagcccgaugggccucccaacgggcccuccuccccuccuugcaccgagauuaaucaaaggcucuuuucagagccaccaaaaaaaaaaaaaaaaaaaaaaaaaaaaaaaaaaaaaaaaaaaaaaaaaaaaaaaaaaaaaaaaaaaaaaaaaaaaaaaaaaaaaaaaaaaaaaaaaaaaa

SEQ ID NO: 21848 - RNA, 1977 nt, Artificial Sequence
  mRNA product Design i-3 (hSL-A100) comprising derived and/or modified sequence from LASV(GA391;Clade III)__CAA36646__SP-IgE_NP(2-570) (opt1)
aggagaaagcuuaccauggacuggaccuggauccuguuccucguggccgccgcgacccgcguccacagcagcgccuccaaggaggugcgcagcuuccuguggacccagucccuccggcgcgagcugagcggcuacugcuccaacaucaagcugcaggucgugaaggacgcccaggcgcuccugcacgggcuggacuucagcgagguguccaacguccagcggcucaugcgcaagcagaagcgggacgacggcgaccugaagcgccugcgggaccucaaccaggccgugaacaaccugguggagcucaagagcacccagcagaaguccguccugcgcguggggacccugagcuccgacgaccugcucauccuggccgccgaccuggagaagcucaagagcaaggugacccggaccgagcgcccccuguccagcggcgucuacauggggaaccuguccagccagcagcucgaccagcggcgcgcccugcugaacaugaucggcaugaccggcguguccgggggcgggaagggcgcgagcgacgggaucgugcgggucugggacgugaagaacgccgagcuccugaacaaccaguucggcacgaugccgucccugacccucgccugccugaccaagcagggccagguggaccugaacgacgccguccaggcgcucaccgaccuggggcugaucuacacggccaaguaccccaacagcagcgaccucgaccgccugucccagagccaccccauccugaacaugaucgacaccaagaaguccagccucaacaucuccggcuacaacuucagccugggggccgccgugaaggccggcgcgugcaugcuggacggcgggaacaugcucgagaccaucaaggugagcccccagaccauggacggcauccucaaguccauccugaaggucaagaagucccuggggauguucgugagcgacacgccgggcgagcggaaccccuacgagaacauccuguacaagaucugccuguccggggacggcuggcccuacaucgccagccgcaccuccaucgugggccgggccugggagaacaccgucguggaccucgagcaggacaacaagccccagaagaucgggaacggcgggagcaacaagucccugcagagcgccggcuucgccgcggggcugaccuacucccagcucaugacgcugaaggacuucaagugcuucaaccugaucccgaacgccaagaccuggauggacaucgagggccgccccgaggaccccguggagaucgcccuguaccagcccagcuccggcugcuacguccacuucuuccgggagccgaccgaccucaagcaguucaagcaggacgccaaguacagccacgggaucgacgugaccgaccuguucgccgcgcagcccggccugacgagcgccgucaucgaggcccucccccgcaacauggugaucacgugccagggguccgaggacauccggaagcugcuggagagccagggccgccgcgacaucaagcucaucgacaucacccuguccaaggccgacagccggaaguucgagaacgccgugugggaccaguucaaggaccugugccacaugcacaccggggucgugguggagaagaagaagcgcggcggcaaggaggagaucacgccccacugcgcgcucauggacugcaucauguucgacgccgccgucuccgggggccuggacgccaaggugcugcgggugguccucccgcgcgacaugguguuccggaccagcacccccaaggugguccugugaggacuaguuauaagacugacuagcccgaugggccucccaacgggcccuccuccccuccuugcaccgagauuaaucaaaggcucuuuucagagccaccaaaaaaaaaaaaaaaaaaaaaaaaaaaaaaaaaaaaaaaaaaaaaaaaaaaaaaaaaaaaaaaaaaaaaaaaaaaaaaaaaaaaaaaaaaaaaaaaaaaaa

SEQ ID NO: 21849 - RNA, 1974 nt, Artificial Sequence
  mRNA product Design i-3 (hSL-A100) comprising derived and/or modified sequence from LASV(AV;Clade V)__CCA30315__SP-IgE_NP(2-569) (opt1)
aggagaaagcuuaccauggacuggaccuggauccuguuccucguggccgccgcgacccgcguccacagcagcgccuccaaggaggugaaguccuuccuguggacccagagccuccgccgggagcugagcggcuacugcuccaacaucaagcugcaggucgugaaggacgcccaggcgcuccugcacgggcuggacuucagcgagguguccaacguccagcgccucaugcggaagcagcgccgggacgacagcgaccugaagcgccugcgggaccucaaccaggccgugaacaaccugguggagcugaaguccacccagcagaaguccguccuccgcgugggcacgcugagcagcgacgaccugcucacccuggccgccgaccuggagaagcucaaguccaaggugacccggaccgagcgcccccugagcuccggggucuacaugggcaaccugagcucccagcagcucgaccagcggcgcgcccugcugaaccucaucgggaugacgaacggcagccagggcucccaggcggggcgggacggcguggugcgcgucugggacgugaagaacgccgagcugcugaacaaccaguucgggaccaugccgagccucacccuggccugccugaccaagcagggccagguggaccucaacgacgucgugcaggcccugacggaccuggggcucaucuacaccgcgaaguaccccaacaccagcgaccuggaccggcugacccagucccaccccauccucaacaugaucgacacgaagaaguccagccugaacaucagcggcuacaacuucucccugggcgccgccgugaaggccggggccugcaugcucgacggcgggaacaugcuggagaccaucaaggucagcccccaguccauggacggcauccucaagagcauccugaaggugaagcgcgcgcugggcauguucguguccgacaccccgggggagcggaaccccuacgagaacauccuguacaagaucugccucagcggcgacggguggcccuacaucgccucccgcaccagcaucgucggccgggccugggagaacacggugguggaccuggagaccgacgggaagccccagaagaucggcuccggcaacagcaacaagucccugcagagcgccggguucuccgccggccucaccuacagccagcugaugacccugaaggacgcgaugcugcagcucgacccgaacgccaagacguggauggacaucgaggggcgccccgaggaccccgucgagguggcccuguaccagcccaucuccggcugcuacauccacuucuuccgggagccgaccgaccugaagcaguucaagcaggacgccaaguacagccacgggaucgacaucgccgaccucuucgcggcccagcccggccugaccagcgccgucaucgaggcccugccccgcaacauggugaucacgugccagggcuccgaggacaucaagaagcuccuggagagccaggggcgcaaggacaucaagcugaucgacaucgcccucuccaagaucgacagccggaaguucgagaacgcggugugggaccaguacaaggaccugugccacaugcacaccggcgucgugguggagaagaagaagcgcgggggcaaggaggagaucaccccgcacugcgcccugauggacugcaucauguucgacgccgccgucuccgggggccucaacacccuggugcugcgggcggugcucccccgcgacauggucuuccggaccagcacgccccgcguggugcugugaggacuaguuauaagacugacuagcccgaugggccucccaacgggcccuccuccccuccuugcaccgagauuaaucaaaggcucuuuucagagccaccaaaaaaaaaaaaaaaaaaaaaaaaaaaaaaaaaaaaaaaaaaaaaaaaaaaaaaaaaaaaaaaaaaaaaaaaaaaaaaaaaaaaaaaaaaaaaaaaaaaaa

SEQ ID NO: 21850 - RNA, 1974 nt, Artificial Sequence
  mRNA product Design i-3 (hSL-A100) comprising derived and/or modified sequence from LASV(Togo/2016/7082;Clade VI)__AMR44578__SP-IgE_NP(2-569) (opt1)
aggagaaagcuuaccauggacuggaccuggauccuguuccucguggccgccgcgacccgcguccacagcagcaacuccaaggaggugaaguccuuccuguggacccagagccuccgccgggagcugagcggcuacugcuccaacaucaagcugcaggucgugaaggacgcccaggcccuccugcacgggcuggacuucagcgagguguccaacguccagcgccucaugcggaagcagaagcgcgacgacggcgaccugaagcggcugcgcgaccucaaccaggcggugaacaaccugguggagcucaagagcguccagcagaaguccauccugcggguggggacccugaccagcgacgaccugcucacccuggccgccgaccuggagaagcucaaguccaaggugacccgcaccgagcggccccugagcuccggcgucuacauggggaaccugagcucccagcagcucgaccagcgccgggcccugcugagcaugaucggcauguccggcgggaaccagaacagccagccgaagggcgacgggguggugcgcgucugggacgugaagaacgccgaccuccugaacaaccaguucggcacgaugcccucccugacccucgcgugccugaccaagcagggccagguggaccugaacgacgccguccaggcccucaccgaccuggggcugaucuacacggccaaguaccccaacagcagcgaccucgaccggcugucccagagccaccccauccugaacaugaucgacaccaagaaguccagccucaacaucuccggcuacaacuucagccugggggcggccaucaagaccggcgccugcaugcuggacgggggcaacaugcucgagaccaucaaggugacgccgcagaccauggacggcauccugaaguccauccugaaggugaagcgcagccucgggauguucaucuccgacacccccggcgagcggaaccccuacgagaacauccuguacaagaucugccugagcggggacggcuggcccuacaucgccucccgcaccgccaucaucgggcgggcgugggagaacacggucguggaccucgagagcgacuccaagccgcagaagaucggcagcaacggcuccaacaagagccugcaguccgccggguucgcccccggccugaccuacagccagcucaugacccugaaggacuccaugcugcagcuggaccccaacgccaagaccuggaucgacaucgaggggcgccccgaggacccgguggaggucgcccucuuccagcccaucagcggcugcuacauccacuucuuccgggagcccacggaccugaagcaguucaagcaggacgcgaaguacagccacgggaucgacgugaccgaccuguucgccgcccagcccggccucaccuccgccgugaucgaggcccugccgcgcaacaugguccugaccugccagggcagcgacgacaucaagaagcuccuggacucccaggggcggcgcgacaucaagcugaucgacgugagccucaacaagaucgacucccgcaaguucgagaacgcggucugggaccaguacaaggaccugugccacaugcacacgggcgugguggucgagaagaagaagaagggcgggaaggaggagaucacgccccacugcgcccugcucgacugcaucauguucgacgccgccgugagcgggggccugaacgccaccgugcugcgggcgguccucccccgcgacaugguguuccggaccuccagccccaaggugguccugugaggacuaguuauaagacugacuagcccgaugggccucccaacgggcccuccuccccuccuugcaccgagauuaaucaaaggcucuuuucagagccaccaaaaaaaaaaaaaaaaaaaaaaaaaaaaaaaaaaaaaaaaaaaaaaaaaaaaaaaaaaaaaaaaaaaaaaaaaaaaaaaaaaaaaaaaaaaaaaaaaaaaa

SEQ ID NO: 21851 - RNA, 1974 nt, Artificial Sequence
  mRNA product Design i-3 (hSL-A100) comprising derived and/or modified sequence from LASV(KAK-428;Clade n.d. (VII))__ANH09741__SP-IgE_NP(2-569) (opt1)
aggagaaagcuuaccauggacuggaccuggauccuguuccucguggccgccgcgacccgcguccacagcagcaacuccaaggaggugaaguccuuccuguggacccagagccuccgccgggagcugagcggcuacugcaccaacaucaagcugcaggucgugaaggacgcccaggcccuccugcacgggcuggacuucuccgaggugagcaacguccagcgccucaugcggaagcagaagcgcgacgacaacgaccugaagcggcugcgcgaccucaaccaggcggugaacaaccugguggagcugaaguccguccagcagaaguccgugcucaaggugggcacgcugaacagcgacgaccugcucacccuggccgccgaccuggagaagcucaagagcaaggucgugcggaccgagcgcccccuguccagcgggguguacaugggcaaccuguccagccagcagcucgaccagcggcgcgcccugcugaacaugaucgggauggccggcggcucccaggggaaccagccgagccgggacggcgucgugcgcgugugggacgucaagaacgcggaccuccugaacaaccaguucgggaccaugcccucccugacgcucgccugccugaccaagcagggccagguggaccugaacgacgugguccucgcccugaccgaccuggggcucaucuacaccgccaaguaccccaacagcuccgaccuggaccggcugagccagaaccaccccgugcucaacaugaucgacgugaacaagagcucccugaacaucagcggcuacaacuucucccugggcgcggccgucaaggccggggccugcaugcucgacggcgggaacaugcuggagacgaucaagaucagcccgcagaccguggacggcauccugaaguccauccucaaggugaagcgcgcccugggcauguucgucagcgacacccccggggagcggaaccccuacgagaacauccuguacaaggugugccucuccggcaacggguggcccuacaucgcgagccgcaccuccaucgucggccgggccugggagaacacggugguggaccuggagagcaacaagaaccagccgaaggucgggaacaacggcuccaacaagaugcugcagagcuccggcuucgccaccgggcucaccuacagccagcugaugacccugcgcgacuccaugcugcagcucgaccccacggccaagaccuggaucgacaucgagggccggcccgaggaccccguggagcuggcccuguuccagccgagcuccgggugcuacauccacuucuuccgcgagcccaccgaccucaagcaguucaagcaggacgcgaaguacagccacggcaucgacgugaacgaccuguucuccgcccagcccgggcugaccagcgccguccucgaggcccugccccggaacauggugcugacgugccagggcagcgacgacauccgcaagcuccuggacucccaggaccgcaaggacaucaagcugaucgacaucagccucuccaaggccgacgcgcggaaguucgagaacgacgugugggaccaguucaaggaccugugccacaugcacaccggcaucgucguggagaagaagaagaagggcgggaagcaggagaugaccccgcacugcgcccugcucgacugcaucauguucgacgccgccgugagcgggggccugaacguccccacccugcgcgccgugcuccccacggacaugguguuccggaccaucaccaccaaggucgugcugugaggacuaguuauaagacugacuagcccgaugggccucccaacgggcccuccuccccuccuugcaccgagauuaaucaaaggcucuuuucagagccaccaaaaaaaaaaaaaaaaaaaaaaaaaaaaaaaaaaaaaaaaaaaaaaaaaaaaaaaaaaaaaaaaaaaaaaaaaaaaaaaaaaaaaaaaaaaaaaaaaaaaa

SEQ ID NO: 21852 - RNA, 1974 nt, Artificial Sequence; identical to SEQ ID NO: 21846
  mRNA product Design i-3 (hSL-A100) comprising derived and/or modified sequence from LASV(Pinneo-NIG-1969;Clade I)__AIT17837__SP-IgE_NP(2-569) (opt1)

SEQ ID NO: 21853 - RNA, 1974 nt, Artificial Sequence
  mRNA product Design i-3 (hSL-A100) comprising derived and/or modified sequence from LASV(ISTH0009-NIG-2011;Clade II)__AIT17405__SP-IgE_NP(2-569) (opt1)
aggagaaagcuuaccauggacuggaccuggauccuguuccucguggccgccgcgacccgcguccacagcagcguguccaaggaggucaagagcuuccuguggacccagucccuccgccgggagcugagcggcuacugcuccaacaucaagcuccagguggugaaggacgcccaggcccugcugcacgggcuggacuucagcgaggucuccaacgugcagcgccucaugcggaagcagaagcgcgacgacagcgaccugaagcggcugcgcgaccucaaccaggcggugaacaaccuggucgagcugaaguccacccagcagaaguccauccuccgggugggcacccugaccagcgacgaccugcucacccuggccgccgaccuggagaagcucaagagcaaggugauccgcaccgagcggccccuguccagcggggucuacaugggcaaccuguccacgcagcagcucgagcagcgccgggcccugcugaacaugaucgggauggugggcggcgcccaggggacccagccgggccgcgacggggugguccgggugugggacgugaagaaccccgaccuccugaacaaccaguucggcaccaugcccagccugacccucgcgugccugacgaagcaggggcaggucgaccugaacgacgccgugcucgcccugaccgaccugggccucaucuacaccgccaaguaccccaacuccagcgaccuggaccgccugucccagagccacccgauccucaacaugguggacaucaagaaguccagccugaacaucagcggcuacaacuucucccugggggcggccgucaaggccggcgccugcaugcucgacgggggcaacaugcuggagaccaucaaggugacgccccagaccauggacggcauccucaagagcauccugaaggugaagcggucccuggggauguucgucagcgacacccccggcgagcgcaaccccuacgagaacauccuguacaagaucugccucuccggggacggcuggccguacaucgccagccggaccuccaucguggggcgcgcgugggagaacacgaccguggaccuggagagcgacggcaagccccagaaggucggcuccgccgggagcaacaagucccugcagagcgccggcuuccccaccgggcucaccuacucccagcugaugacgcugaaggacagcaugaugcagcuggaccccuccgccaagaccuggaucgacaucgagggccggccggaggaccccguggagaucgcccucuaccagcccaugagcgggugcuacauccacuucuuccgcgagcccaccgaccugaagcaguucaagcaggacgcgaaguacucccacggcaucgacgucgccgaccuguucccggcccagcccggccucaccagcgccgugaucgaggcccugccccggaacauggugcugacgugccaggggagcgacgacaucaagcgccuccuggacucccagggccgccgggacaucaagcugaucgacaucgcgcucagcaaggccgacucccgccgguucgagaacgccgucugggaccagugcaaggaccugugccacaugcacaccggggugguggucgagaagaagaagcgcggcgggaaggaggagaucacgccccacugcgcccugauggacugcaucauguacgacgccgcggugagcggcggccucaacaucccggugcugcgggccguccugccccgcgacaugguguuccggaccuccagccccaaggugguccucugaggacuaguuauaagacugacuagcccgaugggccucccaacgggcccuccuccccuccuugcaccgagauuaaucaaaggcucuuuucagagccaccaaaaaaaaaaaaaaaaaaaaaaaaaaaaaaaaaaaaaaaaaaaaaaaaaaaaaaaaaaaaaaaaaaaaaaaaaaaaaaaaaaaaaaaaaaaaaaaaaaaaa

SEQ ID NO: 21854 - RNA, 1974 nt, Artificial Sequence
  mRNA product Design i-3 (hSL-A100) comprising derived and/or modified sequence from LASV(ISTH2010-NIG-2012;Clade II)__AIT17483__SP-IgE_NP(2-569) (opt1)
aggagaaagcuuaccauggacuggaccuggauccuguuccucguggccgccgcgacccgcguccacagcagcgccuccaaggaggugaaguccuuccuguggacccagagccuccgccgggagcugagcggcuacugcuccaacaucaagcugcaggucgugaaggacgcccaggcgcuccugcacgggcuggacuucagcgagguguccaacguccagcgccucaugcggaagcagaagcgcgacgacagcgaccugaagcggcugcgcgaccucaaccaggccgugaacaaccugguggagcugaaguccacccagcagaaguccauccuccgggucggcacgcugaccagcgacgaccugcucacccuggccgccgaccuggagaagcucaagagcaaggugauccgcaccgagcggccccuguccagcgggguguacaugggcaaccuguccacgcagcagcucgagcagcgccgggcccugcugaaccucaucgggauggucggcggcgcgcaggggacccagccgggccgcgacgggguggugcgggucugggacgugaagaaccccgaccugcugaacaaccaguucggcaccaugcccagccucacccuggccugccugacgaagcagggccagguggaccucaacgacgccguccuggcccugaccgaccucgggcugaucuacaccgcgaaguaccccaacuccagcgaccuggaccgccucucccagagccacccgauccugaacaugguggacaccaagaaguccagccugaacaucagcggcuucaacuucucccucggggccgccgugaaggccggcgccugcaugcuggacgggggcaacaugcuggagacgaucaaggucacgccccagaccauggacggcauccucaagagcauccugaaggugaagaagucccuggggauguucgugagcgacacccccggcgagcggaaccccuacgagaacauccucuacaagaucugccuguccggggacggcuggccguacaucgcgagccgcaccuccaucgucgggcgggccugggagaacaccaccguggaccuggagagcgacggcaagccccacaaggugggcaccgccggguccaacaagagccuccaguccgccggcuuccccacggggcugaccuacagccagcugaugacccugaaggacuccaugaugcagcucgaccccagcgccaagaccuggaucgacaucgagggccgcccggaggaccccgucgagaucgcgcuguaccagcccauguccgggugcuacauccacuucuuccgggagcccacggaccugaagcaguucaagcaggacgccaaguacagccacggcaucgacguggccgaccucuucccggcccagcccggccugaccuccgccgucaucgaggcgcugccccgcaacauggugcugaccugccaggggagcgacgacaucaagcggcuccuggacagccagggccgccgcgacaucaagcucaucgacaucgcccuguccaaggccgacagccggcgcuucgagaacgccgugugggaccagugcaaggaccugugccacaugcacaccggggucgugguggagaagaagaagcggggcgggaaggaggagaucacgccccacugcgcccucauggacugcaucauguacgacgcggccgucuccggcggccugaacaucccggugcugcgcgccgugcucccccgggacauggucuuccgcaccagcucccccaagguggugcugugaggacuaguuauaagacugacuagcccgaugggccucccaacgggcccuccuccccuccuugcaccgagauuaaucaaaggcucuuuucagagccaccaaaaaaaaaaaaaaaaaaaaaaaaaaaaaaaaaaaaaaaaaaaaaaaaaaaaaaaaaaaaaaaaaaaaaaaaaaaaaaaaaaaaaaaaaaaaaaaaaaaaa

SEQ ID NO: 21855 - RNA, 1974 nt, Artificial Sequence
  mRNA product Design i-3 (hSL-A100) comprising derived and/or modified sequence from LASV(Lassa virus/H.sapiens-wt/NGA/2015/ISTH_0543;Clade II)__AVO03640__SP-IgE_NP(2-569) (opt1)
aggagaaagcuuaccauggacuggaccuggauccuguuccucguggccgccgcgacccgcguccacagcagcgccuccaaggaggugaaguccuuccuguggacccagagccuccgccgggagcugagcggcuacugcuccaacaucaagcugcaggucgugaaggacgcccaggcgcuccugcacgggcuggacuucagcgagguguccaacguccagcgccucaugcggaagcagaagcgcgacgacagcgaccugaagcggcugcgcgaccucaaccaggccgugaacaaccugguggagcugaaguccacccagcagaaguccauccuccgggucggcacgcugaccagcgacgaccugcucacccuggccgccgaccuggagaagcucaagagcaaggugauccgcaccgagcggccccuguccagcgggguguacaugggcaaccuguccacgcagcagcucgagcagcgccgggcccugcugaacaugaucgggauggucggcggcgcgcaggggacccagccgggccgcgacgggguggugcgggucugggacgugaagaaccccgaccuccugaacaaccaguucggcaccaugcccagccugacccucgccugccugacgaagcagggccagguggaccugaacgacgccguccucgcccugaccgaccuggggcucaucuacaccgcgaaguaccccaacuccagcgaccuggaccgccugucccagagccacccgauccucaacaugguggacaccaagaaguccagccugaacaucagcggcuacaacuucucccugggggccgccgugaaggccggcgccugcaugcucgacgggggcaacaugcuggagacgaucaaggucacgccccagaccauggacggcauccucaagagcauccugaaggugaagaagucccuggggauguucgugagcgacacccccggcgagcggaaccccuacgagaacauccuguacaagaucugccucuccggggacggcuggccguacaucgcgagccgcaccuccaucgucgggcgggccugggagaacaccaccguggaccuggagagcgacggcaagccccagaaggugggcuccgccgggagcaacaagucccugcagagcgccggcuuccccaccgggcucacguacucccagcugaugacccugaaggacagcaugaugcagcuggaccccuccgccaagaccuggaucgacaucgagggccgcccggaggaccccgucgagaucgcgcucuaccagcccaugagcgggugcuacauccacuucuuccgggagcccaccgaccugaagcaguucaagcaggacgccaaguacucccacggcaucgacguggccgaccuguucccggcccagcccggccucacgagcgccgucaucgaggcgcugccccgcaacauggugcugaccugccaggggagcgacgacaucaagcggcuccuggacucccagggccgcaaggacaucaagcugaucgacaucgcccucagcaaggccgacucccgccgguucgagaacgccgugugggaccagugcaaggaccugugccacaugcacaccggggucgugguggagaagaagaagcgcggcgggaaggaggagaucacgccccacugcgcccugauggacugcaucauguacgacgcggccgucagcggcggccucaacaucccggugcugcgggccgugcugccccgcgacauggucuuccggaccuccagccccaagguggugcucugaggacuaguuauaagacugacuagcccgaugggccucccaacgggcccuccuccccuccuugcaccgagauuaaucaaaggcucuuuucagagccaccaaaaaaaaaaaaaaaaaaaaaaaaaaaaaaaaaaaaaaaaaaaaaaaaaaaaaaaaaaaaaaaaaaaaaaaaaaaaaaaaaaaaaaaaaaaaaaaaaaaaa

SEQ ID NO: 21856 - RNA, 1974 nt, Artificial Sequence
  mRNA product Design i-3 (hSL-A100) comprising derived and/or modified sequence from LASV(Lassa virus/H.sapiens-wt/NGA/2016/ISTH_0009;Clade II)__AVO03572__SP-IgE_NP(2-569) (opt1)
aggagaaagcuuaccauggacuggaccuggauccuguuccucguggccgccgcgacccgcguccacagcagcgccuccaaggaggugaaguccuuccuguggacccagagccuccgccgggagcugagcggcuacugcuccaacaucaagcugcaggucgugaaggacgcccaggcgcuccugcacgggcuggacuucagcgagguguccaacguccagcgccucaugcggaagcagaagcgcgacgacagcgaccugaagcggcugcgcgaccucaaccaggccgugaacaaccugguggagcugaaguccacccagcagaaguccauccuccgggucggcacgcugaccagcgacgaccugcucacccuggccgccgaccuggagaagcucaagagcaaggugauccgcaccgagcggccccuguccagcgggguguacaugggcaaccuguccacgcagcagcucgagcagcgccgggcccugcugaacaugaucgggauggucggcggcgcgcaggggacccagccgggccgcgacgggguggugcgggucugggacgugaagaaccccgaccuccugaacaaccaguucggcaccaugcccagccugacccucgccugccugacgaagcagggccagguggaccugaacgacgccguccucgcccugaccgaccuggggcucaucuacaccgcgaaguaccccaacuccagcgaccuggaccgccugucccagagccacccgauccucaacaugguggacaccaagaaguccagccugaacaucagcggcuacaacuucucccugggggccgccgugaaggccggcgccugcaugcucgacgggggcaacaugcuggagacgaucaaggucacgccccagaccauggacggcauccucaagagcauccugaaggugaagaagucccuggggauguucgugagcgacacccccggcgagcggaaccccuacgagaacauccuguacaagaucugccucuccggggacggcuggccguacaucgcgagccgcaccuccaucgucgggcgggccugggagaacaccaccguggaccuggagagcgacggcaagccccagaaggugggcuccgccgggagcaacaagucccugcagagcgccggcuuccccaccgggcucacguacucccagcugaugacccugaaggacagcaugaugcagcuggaccccuccgccaagaccuggaucgacaucgagggccgcccggaggaccccgucgagaucgcgcucuaccagcccaugagcgggugcuacauccacuucuuccgggagcccaccgaccugaagcaguucaagcaggacgccaaguacucccacggcaucgacguggccgaccuguucccggcccagcccggccucacgagcgccgucaucgaggcgcugccccgcaacauggugcugaccugccaggggagcgacgacaucaagcggcuccuggacucccagggccgccgcgacaucaagcugaucgacaucgcccucagcaaggccgacucccggcgcuucgagaacgccgugugggaccagugcaaggaccugugccacaugcacaccggggucgugguggagaagaagaagcggggcgggaaggaggagaucacgccccacugcgcccugauggacugcaucauguacgacgcggccgucagcggcggccucaacaucccggugcugcgcgccgugcugccccgggacauggucuuccgcaccuccagccccaagguggugcucugaggacuaguuauaagacugacuagcccgaugggccucccaacgggcccuccuccccuccuugcaccgagauuaaucaaaggcucuuuucagagccaccaaaaaaaaaaaaaaaaaaaaaaaaaaaaaaaaaaaaaaaaaaaaaaaaaaaaaaaaaaaaaaaaaaaaaaaaaaaaaaaaaaaaaaaaaaaaaaaaaaaaa

SEQ ID NO: 21857 - RNA, 1974 nt, Artificial Sequence
  mRNA product Design i-3 (hSL-A100) comprising derived and/or modified sequence from LASV(Lassa virus/H.sapiens-wt/NGA/2016/ISTH_0017;Clade II)__AVO03568__SP-IgE_NP(2-569) (opt1)
aggagaaagcuuaccauggacuggaccuggauccuguuccucguggccgccgcgacccgcguccacagcagcgccuccaaggaggugaaguccuuccuguggacccagagccuccgccgggagcugagcggcuacugcuccagcaucaagcugcaggucgugaaggacgcccaggcgcuccugcacgggcuggacuucuccgaggugagcaacguccagcgccucaugcggaagcagaagcgcgacgacuccgaccugaagcggcugcgcgaccucaaccaggccgugaacaaccugguggagcucaagagcacccagcagaaguccauccugcgggucggcacgcugaccagcgacgaccugcucacccuggccgccgaccuggagaagcucaaguccaaggugauccgcaccgagcggccccugagcuccgggguguacaugggcaaccugagcacgcagcagcucgagcagcgccgggcccugcugaacaugaucgggauggcgggcggcgcccaggggacccagccgggccgcgacggggucgugcgggugugggacgucaagaaccccgaccuccugaacaaccaguucggcaccaugcccucccugacccucgccugccugacgaagcagggccagguggaccugaacgacgccgugcucgcgcugaccgaccuggggcucaucuacaccgccaaguaccccaacagcuccgaccuggaccgccugagccagagccacccgauccucaacauggucgacaccaagaaguccagccugaacaucuccggcuacaacuucagccugggggccgccgugaaggccggcgcgugcaugcucgacgggggcaacaugcuggagacgaucaaggugacgccccagaccauggacggcauccugaaguccauccucaaggucaagcggagccuggggauguucguguccgacgcccccggcgagcgcaaccccuacgagaacauccuguacaagaucugccucagcggggacggcuggccguacaucgccucccggaccagcaucguggggcgcgccugggagaacaccaccgucgaccuggaguccgacggcaagccccagaaggugggcgccaccgggagcaacaagucccugcagagcgcgggcuuccccaccgggcucacguacucccagcugaugacccugaaggacagcaugaugcagcuggaccccuccgccaagaccuggaucgacaucgagggccggccggaggaccccguggaggucgcccucuaccagcccgugagcgggugcuacauccacuucuuccgcgagcccaccgaccugaagcaguucaagcaggacgccaaguacucccacggcaucgacgucgccgaccuguucccggcgcagcccggccucacgagcgccgugaucgaggcccugccccggaacauggugcugaccugccaggggagcgacgacaucaagaagcuccuggacucccagggccgcaaggacaucaagcugaucgacaucgcccucagcaaggccgacucccgccgguucgagaacgcggucugggaccagugcaaggaccugugccacaugcacaccggggugguggucgagaagaagaagcgcggcgggaaggaggagaucacgccccacugcgcccugauggacugcaucauguacgacgccgccgugagcggcggccucaacaucccggugcugcgggcgguccugccccgcgacaugguguuccggaccuccagccccaaggugguccucugaggacuaguuauaagacugacuagcccgaugggccucccaacgggcccuccuccccuccuugcaccgagauuaaucaaaggcucuuuucagagccaccaaaaaaaaaaaaaaaaaaaaaaaaaaaaaaaaaaaaaaaaaaaaaaaaaaaaaaaaaaaaaaaaaaaaaaaaaaaaaaaaaaaaaaaaaaaaaaaaaaaaa

SEQ ID NO: 21858 - RNA, 1974 nt, Artificial Sequence
  mRNA product Design i-3 (hSL-A100) comprising derived and/or modified sequence from LASV(Lassa virus/H.sapiens-wt/NGA/2018/ISTH_0959;Clade II)__AVV65100__SP-IgE_NP(2-569) (opt1)
aggagaaagcuuaccauggacuggaccuggauccuguuccucguggccgccgcgacccgcguccacagcagcgccuccaaggaggugaaguccuuccuguggacccagagccuccgccgggagcugagcggcuacugcuccaacaucaagcugcaggucgugaaggacgcccaggcgcuccugcacgggcuggacuucagcgagguguccaacguccagcgccucaugcggaagcagaagcgcgacgacagcgaccugaagcggcugcgcgaccucaaccaggccgugaacaaccugguggagcugaaguccacccagcagaaguccauccuccgggucggcacccugaccagcgacgaccugcucacccuggccgccgaccuggagaagcucaagagcaaggugauccgcaccgagcggccccuguccagcgggguguacaugggcaaccuguccacgcagcagcucgagcagcgccgggcccugcugaaccucaucgggauggucggcggcgcgcaggggacccagccgggccgcgacgggguggugcgggucugggacgugaagaaccccgaccugcugaacaaccaguucggcaccaugcccagccucacccuggccugccugacgaagcagggccagguggaccucaacgacgucgugcuggcccugaccgaccucgggcugaucuacaccgccaaguaccccaacuccagcgaccuggaccgccucucccagagccacccgauccugaacaugguggacaccaagaaguccagccugaacaucagcggcuucaacuucucccucggggcggccgucaaggccggcgccugcaugcuggacgggggcaacaugcuggagacgaucaaggugacgccccagaccauggacggcauccucaagagcauccugaaggugaagaagucccuggggauguucgucagcgacacccccggcgagcggaaccccuacgagaacauccucuacaagaucugccuguccggggacggcuggccguacaucgccagccgcaccuccaucguggggcgggcgugggagaacaccaccguggaccuggagagcgacggcaagccccacaaggucggcaccgccggguccaacaagagccuccaguccgccggcuuccccacggggcugaccuacagccagcugaugacccugaaggacuccaugaugcagcucgaccccagcgccaagaccuggaucgacaucgagggccgcccggaggaccccguggagaucgcccuguaccagcccauguccgggugcuacauccacuucuuccgggagcccacggaccugaagcaguucaagcaggacgcgaaguacagccacggcaucgacgucgccgaccucuucccggcccagcccggccugaccuccgccgugaucgaggcccugccccgcaacauggugcugaccugccaggggagcgacgacaucaagcggcuccuggacagccagggccgcaaggacaucaagcucaucgacaucgcgcuguccaagaccgacagccgccgguucgagaacgccgucugggaccagugcaaggaccugugccacaugcacacgggggugguggucgagaagaagaagcgcggcgggaaggaggagaucacgccccacugcgcccucauggacugcaucauguacgacgccgccguguccggcggccugaacaucccggugcugcgggcgguccucccccgcgacaugguguuccggaccagcucccccaaggugguccugugaggacuaguuauaagacugacuagcccgaugggccucccaacgggcccuccuccccuccuugcaccgagauuaaucaaaggcucuuuucagagccaccaaaaaaaaaaaaaaaaaaaaaaaaaaaaaaaaaaaaaaaaaaaaaaaaaaaaaaaaaaaaaaaaaaaaaaaaaaaaaaaaaaaaaaaaaaaaaaaaaaaaa

SEQ ID NO: 21859 - RNA, 1974 nt, Artificial Sequence
  mRNA product Design i-3 (hSL-A100) comprising derived and/or modified sequence from LASV(LASV003-NIG-2008;Clade II)__AIT17581__SP-IgE_NP(2-569) (opt1)
aggagaaagcuuaccauggacuggaccuggauccuguuccucguggccgccgcgacccgcguccacagcagcgccuccaaggaggugaaguccuuccuguggacccagagccuccgccgggagcugagcggcuacugcuccagcaucaagcugcaggucgugaaggacgcccaggcgcuccugcacgggcuggacuucuccgaggugagcaacguccagcgccucaugcggaagcagaagcgcgacgacuccgaccugaagcggcugcgcgaccucaaccaggccgugaacaaccugguggagcucaagagcacccagcagaaguccguccugcgggugggcacccugaccagcgacgaccugcucacccuggccgccgaccuggagaagcucaaguccaaggugauccgcaccgagcggccccugagcuccggggucuacaugggcaaccugagcgcccagcagcucgagcagcgccggacgcugcugaacaugaucgggauggugggcggcgcgcaggggacccagccgggccgcgacggggugguccgggugugggacgugaagaaccccgaccuccugaacaaccaguucggcaccaugcccucccugacccucgccugccugacgaagcaggggcaggucgaccugaacgacguggugcucgcccugaccgaccugggccucaucuacaccgccaaguaccccaacagcuccgaccuggaccgccugagccagagccacccgauccucuccauggucgacaccaagaaguccagccugaacaucagcggcuacaacuucucccugggggcggccgugaaggccggcgccugcaugcucgacgggggcaacaugcuggagacgaucaaggugacgccccagaccauggacggcauccucaagagcauccugaaggucaagaagucccuggggauguucgugagcgacacccccggcgagcggaaccccuacgagaacauccuguacaagaucugccucuccggggacggcuggccguacaucgccagccgcaccuccaucguggggcgggcgugggagaacaccaccgucgaccuggagagcgacggcaagccccagaaggugggcaccgccggguccaacaagagccugcaguccgccggcuuccccacggggcucaccuacagccagcugaugacccugaaggacuccaugaugcagcuggaccccagcgccaagaccuggaucgacaucgagggccgcccggaggaccccgucgagaucgcccucuaccagcccauguccgggugcuacauccacuucuuccgggagcccacggaccugaagcaguucaagcaggacgcgaaguacagccacggcaucgacgugaccgaccuguucccggcccagcccggccucaccagcgccgugaucgaggcccugccccgcaacaugguccugaccugccagggguccgacgacaucaagcggcuccuggacagccagggccgccgcgacaucaagcugaucgacaucgcccucuccaaggcggacagccggcgcuucgagaacgccgugugggaccagugcaaggaccugugccacaugcacacggggguggucguggagaagaagaagcggggcgggaaggaggagaucacgccccacugcgcccugauggacugcaucauguacgacgccgccguguccggcggccucaacaucccgguccugcgcgcggugcugccccgggacaugguguuccgcaccagcucccccaaggucgugcucugaggacuaguuauaagacugacuagcccgaugggccucccaacgggcccuccuccccuccuugcaccgagauuaaucaaaggcucuuuucagagccaccaaaaaaaaaaaaaaaaaaaaaaaaaaaaaaaaaaaaaaaaaaaaaaaaaaaaaaaaaaaaaaaaaaaaaaaaaaaaaaaaaaaaaaaaaaaaaaaaaaaaa

SEQ ID NO: 21860 - RNA, 1974 nt, Artificial Sequence
  mRNA product Design i-3 (hSL-A100) comprising derived and/or modified sequence from LASV(LASV035-NIG-2009;Clade II)__AIT17589__SP-IgE_NP(2-569) (opt1)
aggagaaagcuuaccauggacuggaccuggauccuguuccucguggccgccgcgacccgcguccacagcagcgccuccaaggaggugaaguccuuccuguggacccagagccuccgccgggagcugagcggcuacugcuccagcaucaagcugcaggucgugaaggacgcccaggcgcuccugcacgggcuggacuucuccgaggugagcaacguccagcgccucaugcggaagcagaagcgcgacgacuccgaccugaagcggcugcgcgaccucaaccaggccgugaacaaccugguggagcucaagagcacccagcagaaguccauccugcgggucggcacgcugaccagcgacgaccugcucacccuggccgccgaccuggagaagcucaaguccaaggugauccgcaccgagcggccccugagcuccgggguguacaugggcaaccugagcgcccagcagcucgagcagcgccgggcgcugcugaacaugaucgggauggucggcggcgcccaggggacgcagccgggccgcgacgggguggugcgggucugggacgugaagaaccccgaccuccugaacaaccaguucggcaccaugcccucccugacccucgccugccugaccaagcagggccagguggaccugaacgacgccguccucgcgcugacggaccuggggcucaucuacaccgccaaguaccccaacagcuccgaccuggaccgccugagccagagccacccgauccucaacaugguggacaccaagaaguccagccugaacaucuccggcuacaacuucagccugggggccgccgugaaggccggcgcgugcaugcucgacgggggcaacaugcuggagaccaucaaggucacgccccagaccauggacggcauccugaaguccauccucaaggugaagcggagccuggggauguucguguccgacacccccggcgagcgcaaccccuacgagaacauccuguacaagaucugccucagcggggacggcuggccguacaucgccucccggaccagcaucgucgggcgcgccugggagaacacgaccguggaccuggaguccgacggcaagccccagaaggugggcaccaccgggagcaacaagucccugcagagcgccggcuuccccacggggcucaccuacucccagcugaugacccugaaggacagcaugaugcagcuggaccccuccgccaagaccuggaucgacaucgagggccggccggaggaccccgucgagaucgcgcucuaccagcccaugagcgggugcuacauccacuucuuccgcgagcccacggaccugaagcaguucaagcaggacgccaaguacucccacggcaucgacguggccgaccuguucccggcccagcccggccucaccagcgccgucaucgaggcgcugccccggaacauggugcugaccugccaggggagcgacgacaucaagaagcuccuggacucccagggccgccgcgacaucaagcugaucgacaucgcccucagcaaggccgacucccggaaguucgagaacgccgugugggaccagugcaaggaccugugccacaugcacaccggggucgugguggagaagaagaagcgcggcgggaaggaggagaucacgccccacugcgcccugauggacugcaucauguacgacgcggccgucagcggcggccucaacaucccggugcugcgggccgugcugccccgcgacauggucuuccggaccuccagccccaagguggugcucugaggacuaguuauaagacugacuagcccgaugggccucccaacgggcccuccuccccuccuugcaccgagauuaaucaaaggcucuuuucagagccaccaaaaaaaaaaaaaaaaaaaaaaaaaaaaaaaaaaaaaaaaaaaaaaaaaaaaaaaaaaaaaaaaaaaaaaaaaaaaaaaaaaaaaaaaaaaaaaaaaaaaa

SEQ ID NO: 21861 - RNA, 1974 nt, Artificial Sequence
  mRNA product Design i-3 (hSL-A100) comprising derived and/or modified sequence from LASV(LASV1000-NIG-2009;Clade II)__AIT17783__SP-IgE_NP(2-569) (opt1)
aggagaaagcuuaccauggacuggaccuggauccuguuccucguggccgccgcgacccgcguccacagcagcgccuccaaggaggugaaguccuuccuguggacccagagccuccgccgggagcugagcggcuacugcuccaacaucaagcugcaggucgugaaggacgcccaggcgcuccugcacgggcuggacuucagcgagguguccaacguccagcgccucaugcggaagcagaagcgcgacgacagcgaccugaagcggcugcgcgaccucaaccaggccgugaacaaccugguggagcugaaguccacccagcagaaguccauccuccgggucggcacgcugaccagcgacgaccugcucacccuggccgccgaccuggagaagcucaagagcaaggugauccgcaccgagcggccccuguccagcgggguguacaugggcaaccuguccacgcagcagcucgagcagcgccgggcccugcugaacaugaucgggauggucggcggcgcgcaggggacccagccgggccgcgacgggguggugcgggucugggacgugaagaaccccgaccuccugaacaaccaguucggcaccaugcccagccugacccucgccugccugacgaagcagggccagguggaccugaacgacgucgugcucgcccugaccgaccuggggcucaucuacaccgccaaguaccccaacuccagcgaccuggaccgccugucccagagccacccgauccucaacaugguggacaccaagaaguccagccugaacaucagcggcuacaacuucucccugggggcggccgucaaggccggcgccugcaugcucgacgggggcaacaugcuggagacgaucaaggugacgccccagaccauggacggcauccucaagagcauccugaaggugaagaagucccuggggauguucgucagcgacacccccggcgagcggaaccccuacgagaacauccuguacaagaucugccucuccggggacggcuggccguacaucgccagccgcaccuccaucguggggcgggcgugggagaacaccaccguggaccuggagagcgacggcaagccccagaaggucggcaccgccggguccaacaagagccugcaguccgccggcuuccccacggggcucaccuacagccagcugaugacccugaaggacuccaugaugcagcuggaccccagcgccaagaccuggaucgacaucgagggccgcccggaggaccccguggagaucgcccucuaccagcccgucuccgggugcuacauccacuucuuccgggagcccacggaccugaagcaguucaagcaggacgcgaaguacagccacggcaucgacguggccgaccuguucccggcccagcccggccucaccuccgccgugaucgaggcccugccccgcaacaugguccugaccugccaggggagcgacgacaucaagcggcuccuggacagccagggccgccgcgacaucaagcugaucgacaucgcgcucuccaaggccgacagccggcgcuucgagaacgccgugugggaccagugcaaggaccugugccacaugcacaccgggguggucguggagaagaagaagcggggcgggaaggaggagaucacgccccacugcgcccugauggacugcaucauguacgacgccgcgguguccggcggccucaacaucccgguccugcgcgccgugcugccccgggacaugguguuccgcaccagcucccccaaggucgugcucugaggacuaguuauaagacugacuagcccgaugggccucccaacgggcccuccuccccuccuugcaccgagauuaaucaaaggcucuuuucagagccaccaaaaaaaaaaaaaaaaaaaaaaaaaaaaaaaaaaaaaaaaaaaaaaaaaaaaaaaaaaaaaaaaaaaaaaaaaaaaaaaaaaaaaaaaaaaaaaaaaaaaa

SEQ ID NO: 21862 - RNA, 1974 nt, Artificial Sequence
  mRNA product Design i-3 (hSL-A100) comprising derived and/or modified sequence from LASV(LASV221-NIG-2010;Clade II)__AIT17625__SP-IgE_NP(2-569) (opt1)
aggagaaagcuuaccauggacuggaccuggauccuguuccucguggccgccgcgacccgcguccacagcagcgccuccaaggaggugaaguccuuccuguggacccagagccuccgccgggagcugagcggcuacugcuccagcaucaagcugcaggucgugaaggacgcccaggcgcuccugcacgggcuggacuucuccgaggugagcaacguccagcgccucaugcggaagcagcgccgggacgacuccgaccugaagcgccugcgggaccucaaccaggccgugaacaaccugguggagcucaagagcacccagcagaaguccauccugcgcgucggcacgcugaccagcgacgaccugcucacccuggccgccgaccuggagaagcucaaguccaaggugauccggaccgagcgcccccugagcuccgggguguacaugggcaaccugagcacgcagcagcucgagcagcggcgcgcccugcugaacaugaucgggauggucggcggcgcgcaggggacccagccgggccgggacgggguggugcgcgucugggacgugaagaaccccgaccuccugaacaaccaguucggcaccaugcccucccugacccucgccugccugacgaagcagggccagguggaccugaacgacgccguccucgcccugaccgaccuggggcucaucuacaccgcgaaguaccccaacagcuccgaccuggaccggcugagccagagccacccgauccucaacaugguggacaccaagaaguccagccugaacaucuccggcuacaacuucagccugggggccgccgugaaggccggcgccugcaugcucgacgggggcaacaugcuggagacgaucaaggucacgccccagaccguggacggcauccugaaguccauccucaaggugaagcgcagccuggggauguucgucuccgacacccccggcgagcggaaccccuacgagaacauccuguacaagaucugccucagcggggacggcuggccguacaucgcgucccgcaccagcaucguggggcgggccugggagaacaccaccguggaccuggaguccgacggcaagccccagaaggucggcaccgccgggagcaacaagucccugcagagcgccggcuuccccacggggcucaccuacucccagcugaugacccugaaggacagcaugaugcagcuggaccccuccgccaagaccuggaucgacaucgagggccgcccggaggaccccguggagaucgcgcucuaccagcccaugagcgggugcuacauccacuucuuccgggagcccacggaccugaagcaguucaagcaggacgccaaguacucccacggcaucgacgucgccgaccuguucccggcccagcccggccucaccagcgccgugaucgaggcgcugccccgcaacauggugcugaccugccaggggagcgacgacaucaagcgccuccuggacucccagggccggcgcgacaucaagcugaucgacaucgcccucagcaaggccgacucccggaaguucgagaacgccgucugggaccagugcaaggaccugugccacaugcacaccggggugguggucgagaagaagaagcgcggcgggaaggaggagaucacgccccacugcgcccugauggacugcaucauguacgacgcggccgugagcggcggccucaacaucccggugcugcgggccguccugccccgcgacaugguguuccggaccuccagccccaaggugguccucugaggacuaguuauaagacugacuagcccgaugggccucccaacgggcccuccuccccuccuugcaccgagauuaaucaaaggcucuuuucagagccaccaaaaaaaaaaaaaaaaaaaaaaaaaaaaaaaaaaaaaaaaaaaaaaaaaaaaaaaaaaaaaaaaaaaaaaaaaaaaaaaaaaaaaaaaaaaaaaaaaaaaa

SEQ ID NO: 21863 - RNA, 1974 nt, Artificial Sequence
  mRNA product Design i-3 (hSL-A100) comprising derived and/or modified sequence from LASV(LASV237-NIG-2010;Clade II)__AIT17639__SP-IgE_NP(2-569) (opt1)
aggagaaagcuuaccauggacuggaccuggauccuguuccucguggccgccgcgacccgcguccacagcagcgccuccaaggaggugaaguccuuccuguggacccagagccuccgccgggagcugagcggcuacugcuccaacaucaagcugcaggucgugaaggacgcccaggcgcuccugcacgggcuggacuucagcgagguguccaacguccagcgccucaugcggaagcagaagcgcgacgacagcgaccugaagcggcugcgcgaccucaaccaggccgugaacaaccugguggagcugaaguccacccagcagaaguccauccuccgggucggcacccugaccagcgacgaccugcucacccuggccgccgaccuggagaagcucaagagcaaggugauccgcaccgagcggccccuguccagcgggguguacaugggcaaccuguccacgcagcagcucgagcagcgccgggcccugcugaacaugaucgggauggucggcggcgcgcaggggacccagccgggccgcgacgggguggugcgggucugggacgugaagaaccccgaccuccugaacaaccaguucggcaccaugcccagccugacccucgccugccugacgaagcagggccagguggaccugaacgacgccguccucgcccugaccgaccuggggcucaucuacaccgcgaaguaccccaacuccagcgaccuggaccgccugucccagagccacccgauccucaacaugguggacaucaagaaguccagccugaacaucagcggcuacaacuucucccugggggccgccgugaaggccggcgccugcaugcucgacgggggcaacaugcuggagaccaucaaggucacgccccagaccauggacggcauccucaagagcauccugaaggugaagcggucccuggggauguucgugagcgacacccccggcgagcgcaaccccuacgagaacauccuguacaagaucugccucuccggggacggcuggccguacaucgcgagccggaccuccaucgucgggcgcgccugggagaacacgaccguggaccuggagagcgacggcaagccccagaaggugggcuccgccgggagcaacaagucccugcagagcgccggcuuccccaccgggcucaccuacucccagcugaugacgcugaaggacagcaugaugcagcuggaccccuccgccaagaccuggaucgacaucgagggccggccggaggaccccgucgagaucgcgcucuaccagcccaugagcgggugcuacauccacuucuuccgcgagcccaccgaccugaagcaguucaagcaggacgccaaguacucccacggcaucgacguggccgaccuguucccggcccagcccggccucaccagcgccgucaucgaggcgcugccccggaacauggugcugacgugccaggggagcgacgacaucaagcgccuccuggacucccagggccgccgggacaucaagcugaucgacaucgcccucagcaaggccgacucccgccgguucgagaacgccgugugggaccagugcaaggaccugugccacaugcacaccggggucgugguggagaagaagaagcgcggcgggaaggaggagaucacgccccacugcgcccugauggacugcaucauguacgacgcggccgucagcggcggccucaacaucccggugcugcgggccgugcugccccgcgacauggucuuccggaccuccagccccaagguggugcucugaggacuaguuauaagacugacuagcccgaugggccucccaacgggcccuccuccccuccuugcaccgagauuaaucaaaggcucuuuucagagccaccaaaaaaaaaaaaaaaaaaaaaaaaaaaaaaaaaaaaaaaaaaaaaaaaaaaaaaaaaaaaaaaaaaaaaaaaaaaaaaaaaaaaaaaaaaaaaaaaaaaaa

SEQ ID NO: 21864 - RNA, 1974 nt, Artificial Sequence
  mRNA product Design i-3 (hSL-A100) comprising derived and/or modified sequence from LASV(LASV253-NIG-2011;Clade II)__AIT17671__SP-IgE_NP(2-569) (opt1)
aggagaaagcuuaccauggacuggaccuggauccuguuccucguggccgccgcgacccgcguccacagcagcgccuccaaggaggugaaguccuuccuguggacccagagccuccgccgggagcugagcggcuacugcuccagcaucaagcugcaggucgugaaggacgcccaggcgcuccugcacgggcuggacuucuccgaggugagcaacguccagcgccucaugcggaagcagaagcgcgacgacuccgaccugaagcggcugcgcgaccucaaccaggccgugaacaaccugguggagcucaagagcacccagcagaaguccguccugcgggugggcacccugaccagcgacgaccugcucacccuggccgccgaccuggagaagcucaaguccaaggugauccgcaccgagcggccccugagcuccggggucuacaugggcaaccugagcacgcagcagcucgagcagcgccgggcccugcugaacaugaucgggauggugggcggcgcgcaggggacccagccgggccgcgacggggugguccgggugugggacgugaagaaccccgaccuccugaacaaccaguucggcaccaugcccucccugacccucgccugccugacgaagcaggggcaggucgaccugaacgacguggugcucgcccugaccgaccugggccucaucuacaccgccaaguaccccaacagcuccgaccuggaccgccugagccagagccacccgauccucaacauggucgacaccaagaaguccagccugaacaucuccggcuacaacuucagccugggggcggccgugaaggccggcgccugcaugcucgacgggggcaacaugcuggagacgaucaaggugacgccccagaccauggacggcauccugaaguccauccucaaggucaagaagucccuggggauguucgugagcgacacccccggcgagcggaaccccuacgagaacauccuguacaagaucugccucagcggggacggcuggccguacaucgccucccgcaccagcaucguggggcgggcgugggagaacaccaccgucgaccuggaguccgacggcaagccccagaaggugggcaccgccgggagcaacaagucccugcagagcgccggcuuccccacggggcucaccuacucccagcugaugacccugaaggacagcaugaugcagcuggaccccuccgccaagaccuggaucgacaucgagggccgcccggaggaccccgucgagaucgcccucuaccagcccaugagcgggugcuacauccacuucuuccgggagcccacggaccugaagcaguucaagcaggacgcgaaguacucccacggcaucgacgugaccgaccuguucccggcccagcccggccucaccagcgccgugaucgaggcccugccccgcaacaugguccugaccugccaggggagcgacgacaucaagcggcuccuggacucccagggccgccgcgacaucaagcugaucgacaucgcccucagcaaggcggacucccggcgcuucgagaacgccgugugggaccagugcaaggaccugugccacaugcacacggggguggucguggagaagaagaagcggggcgggaaggaggagaucacgccccacugcgcccugauggacugcaucauguacgacgccgccgugagcggcggccucaacaucccgguccugcgcgcggugcugccccgggacaugguguuccgcaccuccagccccaaggucgugcucugaggacuaguuauaagacugacuagcccgaugggccucccaacgggcccuccuccccuccuugcaccgagauuaaucaaaggcucuuuucagagccaccaaaaaaaaaaaaaaaaaaaaaaaaaaaaaaaaaaaaaaaaaaaaaaaaaaaaaaaaaaaaaaaaaaaaaaaaaaaaaaaaaaaaaaaaaaaaaaaaaaaaa

SEQ ID NO: 21865 - RNA, 1974 nt, Artificial Sequence
  mRNA product Design i-3 (hSL-A100) comprising derived and/or modified sequence from LASV(LASV254-NIG-2011;Clade II)__AIT17675__SP-IgE_NP(2-569) (opt1)
aggagaaagcuuaccauggacuggaccuggauccuguuccucguggccgccgcgacccgcguccacagcagcgccuccaaggaggugaaguccuuccuguggacccagagccuccgccgggagcugagcggcuacugcuccagcaucaagcugcaggucgugaaggacgcccaggcgcuccugcacgggcuggacuucuccgaggugagcaacguccagcgccucaugcggaagcagaagcgcgacgacuccgaccugaagcggcugcgcgaccucaaccaggccgugaacaaccugguggagcucaagagcacccagcagaaguccguccugcgggugggcacgcugaccagcgacgaccugcucacccuggccgccgaccuggagaagcucaaguccaaggugauccgcaccgagcggccccugagcuccggggucuacaugggcaaccugagcacgcagcagcucgagcagcgccgggcccugcugaacaugaucgggauggugggcggcgcgcaggggacccagccgggccgcgacggggugguccgggugugggacgugaagaaccccgaccuccugaacaaccaguucggcaccaugcccucccugacccucgccugccugacgaagcaggggcaggucgaccugaacgacgccgugcucgcccugaccgaccugggccucaucuacaccgcgaaguaccccaacagcuccgaccuggaccgccugagccagagccacccgauccucaacaugguggacaccaagaaguccagccugaacaucuccggcuacaacuucagccugggggccgccgucaaggccggcgccugcaugcucgacgggggcaacaugcuggagacgaucaaggugacgccccagaccauggacggcauccugaaguccauccucaaggugaagaagucccuggggauguucgucagcgacacccccggcgagcggaaccccuacgagaacauccuguacaagaucugccucagcggggacggcuggccguacaucgcgucccgcaccagcaucguggggcgggccugggagaacaccaucguggaccuggaguccgacggcaagccccagaaggucggcaccgccgggagcaacaagucccugcagagcgccggcuuccccaccgggcucacguacucccagcugaugacccugaaggacagcaugaugcagcuggaccccuccgccaagaccuggaucgacaucgagggccgcccggaggaccccguggagaucgcgcucuaccagcccaugagcgggugcuacauccacuucuuccgggagcccaccgaccugaagcaguucaagcaggacgccaaguacucccacggcaucgacgucgccgaccuguucccggcccagcccggccucacgagcgccgugaucgaggcgcugccccgcaacauggugcugaccugccaggggagcgacgacaucaagcggcuccuggacucccagggccgccgcgacaucaagcugaucgacaucgcccucagcaaggccgacucccggcgcuucgagaacgccgucugggaccagugcaaggaccugugccacaugcacaccggggugguggucgagaagaagaagcggggcgggaaggaggagaucacgccccacugcgcccugauggacugcaucauguacgacgcggccgugagcggcggccucaacaucccggugcugcgcgccguccugccccgggacaugguguuccgcaccuccagccccaaggugguccucugaggacuaguuauaagacugacuagcccgaugggccucccaacgggcccuccuccccuccuugcaccgagauuaaucaaaggcucuuuucagagccaccaaaaaaaaaaaaaaaaaaaaaaaaaaaaaaaaaaaaaaaaaaaaaaaaaaaaaaaaaaaaaaaaaaaaaaaaaaaaaaaaaaaaaaaaaaaaaaaaaaaaa

SEQ ID NO: 21866 - RNA, 1974 nt, Artificial Sequence
  mRNA product Design i-3 (hSL-A100) comprising derived and/or modified sequence from LASV(Nig08-04;Clade II)__ADU56611__SP-IgE_NP(2-569) (opt1)
aggagaaagcuuaccauggacuggaccuggauccuguuccucguggccgccgcgacccgcguccacagcagcgccuccaaggaggugaaguccuuccuguggacccagagccuccgccgggagcugagcggcuacugcuccaacaucaagcugcaggucgugaaggacgcccaggcgcuccugcacgggcuggacuucagcgagguguccaacguccagcgccucaugcggaagcagaagcgcgacgacggcgaccugaagcggcugcgcgaccucaaccaggccgugaacaaccugguggagcucaagagcacccagcagaaguccguccugcggguggggacccugaccagcgacgaccugcucacccuggccgccgaccuggagaagcucaaguccaaggugauccgcaccgagcggccccugagcuccggcgucuacauggggaaccugagcacgcagcagcucgagcagcgcaaggcccugcuguccaugaucggcauggugggcggggcgcagggcacccagccggggcgggacggcgugguccgcgugugggacgugaagaaccccgaccuccugaacaaccaguucgggaccaugcccagccugacccucgccugccugacgaagcagggccaggucgaccugaacgacgccgugcucgcccugaccgaccugggccucaucuacaccgcgaaguaccccaacuccagcgaccuggaccggcugucccagagccacccgauccucaacaugguggacaccaagaaguccagccugaacaucagcggguacaacuucucccugggcgccgccgucaaggccggggccugcaugcucgacggcggcaacaugcuggagacgaucaaggugacgccccagaccauggacgggauccucaagagcauccugaaggugaagcgcucccugggcauguucgucagcgacacccccggggagcggaaccccuacgagaacauccuguacaagaucugccucuccggcgacggguggccguacaucgcgagccgcaccuccaucgugggccgggccugggagaacaccaccguggaccuggagagcgacggcaagccccagaaggucgggaccgccggcuccaacaagagccugcaguccgccggguuccccacgggccucaccuacagccagcugaugacccugaaggacuccaugaugcagcuggaccccagcgccaagaccuggaucgacaucgaggggcgcccggaggaccccguggagaucgcgcucuaccagcccauguccggcugcuacauccacuucuuccgggagcccacggaccugaagcaguucaagcaggacgccaaguacagccacggcaucgacgucaccgaccuguucuccgcccagccggggcucaccagcgccgugaucgaggcccugccccgcaacauggugcugaccugccagggcagcgacgacaucaagaagcuccuggacucccaggggcggcgcgacaucaagcugaucgacaucagccucaacaaggcggacucccgccgguucgagaacgccgucugggaccagugcaaggaccugugccacaugcacacgggcgugguggucgagaagaagaagcgcgggggcaaggaggagaucacgccccacugcgcccugauggacugcaucauguucgacgccgccgugagcggcgggcucaacauccccauccugcgggcggugcugccgcgcgacauggucuuccggaccuccagccccaagguggugcucugaggacuaguuauaagacugacuagcccgaugggccucccaacgggcccuccuccccuccuugcaccgagauuaaucaaaggcucuuuucagagccaccaaaaaaaaaaaaaaaaaaaaaaaaaaaaaaaaaaaaaaaaaaaaaaaaaaaaaaaaaaaaaaaaaaaaaaaaaaaaaaaaaaaaaaaaaaaaaaaaaaaaa

SEQ ID NO: 21867 - RNA, 1977 nt, Artificial Sequence
  mRNA product Design i-3 (hSL-A100) comprising derived and/or modified sequence from LASV(GA391;Clade III)__AAA46284__SP-IgE_NP(2-570) (opt1)
aggagaaagcuuaccauggacuggaccuggauccuguuccucguggccgccgcgacccgcguccacagcagcgccuccaaggaggugcgcagcugccuguggacccagucccuccggcgcgagcugagcggcuacugcuccaacaucaagcugcaggucgugaaggacgcccaggcgcuccugcacgggcuggacuucagcgagguguccaacguccagcggcucaugcgcaagcagaagcgggacgacggcgaccugaagcgccugcgggaccucaaccaggccgugaacaaccugguggagcugaaguccacccagcagaaguccguccuccgcguggggacgcugagcuccgacgaccugcucauccuggccgccgaccuggagaagcucaagagcaaggugacccggaccgagcgcccccuguccagcggcgucuacauggggaaccuguccagccagcagcucgaccagcggcgcgcccugcugaacaugaucggcaugaccggcguguccgggggcgggaagggcgcgagcaacgggaucgugcgggucugggacgugaagaacgccgagcuccugaacaaccaguucggcacgaugccgucccugacccucgccugccugaccaagcagggccagguggaccugaacgacgccguccaggcgcucaccgaccuggggcugaucuacacggccaaguaccccaacagcagcgaccucgaccgccugucccagagccaccccauccugaacaugaucgacaccaagaaguccagccucaacaucuccggcuacaacuucagccugggggccgccgugaaggccggcgcgugcaugcuggacggcgggaacaugcucgagaccaucaaggugagcccccagaccauggacggcauccucaagagcauccugaaggucaagaagucccuggggauguucgugagcgacacgccgggcgagcggaaccccuacgagaacauccuguacaagaucugccuguccggggacggcuggagcuacaucgccucccgcaccagcaucgugggccgggccugggagaacaccgucguggaccucgagcaggacaacaagccccagaagaucgggaacggcggguccaacaagagccugcaguccgccggcuucgccgcggggcugaucuacagccagcucaugacccugaaggacuucaagugcuucaaccugauccccaacgccaagacguggauggacaucgagggccgcccggaggaccccguggagaucgcccuguaccagcccuccagcggcugcuacguccacuucuuccgggagcccaccgaccucaagcaguucaagcaggacgccaaguacagccacgggcgcgacgugaccgaccuguucgccgcgcagccgggccugaccuccgccgucaucgaggcccucccccggaacauggugaucacgugccaggggagcgaggacauccgcaagcugcuggagucccagggccgccgggacaucaagcucaucgacaucacccugagcaaggccgacucccgcaaguucgagaacgccgugugggaccaguucaaggaccugugccacaugcacaccggggucgugguggagaagaagaagcggggcggcaaggaggagaucacgccccacugcgcgcucauggacugcaucauguucgacgccgccgucagcgggggccuggacgccaaggugcugcgcgugguccucccccgggacaugguguuccgcaccuccaccccgaaggugguccugugaggacuaguuauaagacugacuagcccgaugggccucccaacgggcccuccuccccuccuugcaccgagauuaaucaaaggcucuuuucagagccaccaaaaaaaaaaaaaaaaaaaaaaaaaaaaaaaaaaaaaaaaaaaaaaaaaaaaaaaaaaaaaaaaaaaaaaaaaaaaaaaaaaaaaaaaaaaaaaaaaaaaa

SEQ ID NO: 21868 - RNA, 1974 nt, Artificial Sequence
  mRNA product Design i-3 (hSL-A100) comprising derived and/or modified sequence from LASV(Nig08-A19;Clade III)__ADU56619__SP-IgE_NP(2-569) (opt1)
aggagaaagcuuaccauggacuggaccuggauccuguuccucguggccgccgcgacccgcguccacagcagcgccuccaaggaggugaaguccuuccuguggacccagucccuccgccgggagcugagcggcuacugcuccaacaucaagcugcaggucgugaaggacgcccaggcgcuccugcacgggcuggacuucagcgagguguccaacguccagcgccucaugcggaagcagaagcgcgacgacggcgaccugaagcggcugcgcgaccucaaccaggccgugaacaaccugguggagcucaagagcacccagcagaaguccguccugcggguggggacccugagcuccgacgaccugcucgugcuggccgccgaccuggagaagcucaagagcaaggucgugcgcaccgagcggccccuguccagcggcaucuacauggggaaccuguccagccagcagcucgaccagcgcaaggcccugcugaacaugaucggcaugaccggcgggaacggcgggcggaacaccacguccgacggcaucgugcgcgucugggacgugaagaacgcggagcuccugaacaaccaguucgggaccaugccgagccugacccucgccugccugaccaagcagggccagguggaccugaacgacgccguccaggcccucacggaccugggccugaucuacaccgcgaaguaccccaacuccagcgaccucgaccggcuggcccagagccaccccauccugaacaugaucgacaccaagaaguccagccucaacaucuccggguacaacuucagccugggcgccgccgugaaggccggggcgugcaugcuggacggcggcaacaugcucgagaccaucaaggugagcccccagacgauggacgggauccucaagagcauccugaaggucaagcgcucccugggcauguucaucagcgacaccccgggggagcggaaccccuacgagaacauccuguacaagaucugccuguccggcgacggguggcccuacaucgccagccgcaccuccaucgugggccgggccugggagaacaccguggucgaccucgagagcgacaacaagccccagaagacgggcaacgggggcuccaacaagagccugcaguccgccggguucgccgcgggccugaccuacagccagcucaugacccugaaggacuccaugcugcagcuggacccgaacgccaagaccuggauggacaucgaggggcgccccgaggaccccguggagaucgcccucuaccagcccagcuccggcugcuacauccacuucuuccgggagccgacggaccugaagcaguucaagcaggacgccaaguacagccacggcaucgacgugaccgaccuguucgccgcgcagcccgggcucaccagcgccgucaucgaggcccugccccgcaacauggugaucacgugccagggcuccgaggacauccggaagcugcucgagagccaggggcgccgcgacaucaagcugaucgacaucucccugagcaaggucgacucccggaaguucgagaacgccgugugggaccaguucaaggaccucugccacaugcacaccggcaucguggucgagaagaagaagcgcgggggcaaggaggagaucacgccccacugcgcccugauggacugcaucauguucgacgcggccgugagcggcgggguggacgccaagguccugcgggccgugcucccgcgcgacaugguguuccggaccuccacccccaaggucgugcugugaggacuaguuauaagacugacuagcccgaugggccucccaacgggcccuccuccccuccuugcaccgagauuaaucaaaggcucuuuucagagccaccaaaaaaaaaaaaaaaaaaaaaaaaaaaaaaaaaaaaaaaaaaaaaaaaaaaaaaaaaaaaaaaaaaaaaaaaaaaaaaaaaaaaaaaaaaaaaaaaaaaaa

SEQ ID NO: 21869 - RNA, 1974 nt, Artificial Sequence
  mRNA product Design i-3 (hSL-A100) comprising derived and/or modified sequence from LASV(G1180-SLE-2010;Clade IV)__AIT17169__SP-IgE_NP(2-569) (opt1)
aggagaaagcuuaccauggacuggaccuggauccuguuccucguggccgccgcgacccgcguccacagcagcgccuccaaggagaucaagagcuuccuguggacccagucccuccgccgggagcugagcggcuacugcuccaacaucaagcuccagguggucaaggacgcccaggcgcugcugcacgggcuggacuucagcgagguguccaacgugcagcgccucaugcggaaggagcgccgggacgacaacgaccugaagcgccugcgggaccucaaccaggccgucaacaaccugguggagcucaagagcacccagcagaaguccauccugcgcgugggcacccugaccagcgacgaccugcucauccuggccgccgaccuggagaagcucaaguccaaggucauccggaccgagcgcccccugagcgccgggguguacaugggcaaccuguccagccagcagcucgaccagcggcgcgcgcugcuguccaugaucgggaugagcuccggcaaccagcgggcccaggccggccgcgacggggugguccgggugugggacgugaagaacgucgagcuccugaacaaccaguucggcaccaugccgagccugacgcucgccugccugaccaagcagggccagguggaccugaacgacgcggugcaggcccucaccgaccuggggcugaucuacaccgccaaguaccccaacacguccgaccucgaccgccugacccagagccaccccauccugaacaugaucgacaccaagaaguccagccucaacaucagcggguacaacuucucccugggcgccgccgucaaggcgggcgccugcaugcuggacgggggcaacaugcucgagaccaucaaggugagcccccagacgauggacgggauccugaaguccauccugaaggugaagaaggcccucggcauguucaucagcgacaccccgggcgagcggaaccccuacgagaacauccuguacaagaucugccuguccggggacggcuggcccuacaucgccagccgcaccuccaucaccgggcgggccugggagaacacggucguggaccucgagagcgacggcaagccccagaaggcgggguccaacaacagcaacaagucccugcagagcgugggcuucaccgccggccugaccuacucccagcucaugacccugaaggacgccaugcugcagcuggacccgaacgccaagacguggauggacaucgaggggcgccccgaggaccccgucgagaucgcccucuaccagcccagcuccggcugcuacauccacuucuuccgggagccgaccgaccugaagcaguucaagcaggacgcgaaguacagccacgggaucgacgugaccgaccuguucgccgcccagcccggccucaccuccgccgugaucgacgcccugccccgcaacauggucaucacgugccaggggagcgacgacauccgcaagcugcucgagagccagggccggaaggacaucaagcugaucgacaucgcgcuguccaagaccgacagccgcaaguacgagaacgccgugugggaccaguacaaggaccucugccacaugcacaccggcgucgugguggagaagaagaagcgcgggggcaaggaggagaucacgccccacugcgcccugauggacugcaucauguucgacgccgcggucuccgggggccugaacaccagcgugcuccgggccgugcugccgcgggacauggucuuccgcaccuccacgccccggguggugcugugaggacuaguuauaagacugacuagcccgaugggccucccaacgggcccuccuccccuccuugcaccgagauuaaucaaaggcucuuuucagagccaccaaaaaaaaaaaaaaaaaaaaaaaaaaaaaaaaaaaaaaaaaaaaaaaaaaaaaaaaaaaaaaaaaaaaaaaaaaaaaaaaaaaaaaaaaaaaaaaaaaaaa

SEQ ID NO: 21870 - RNA, 1974 nt, Artificial Sequence
  mRNA product Design i-3 (hSL-A100) comprising derived and/or modified sequence from LASV(G1442-SLE-2011;Clade IV)__AIT17181__SP-IgE_NP(2-569) (opt1)
aggagaaagcuuaccauggacuggaccuggauccuguuccucguggccgccgcgacccgcguccacagcagcgccuccaaggaggugaaguccuuccuguggacccagagccuccgccgggagcugagcggcuacugcuccaacaucaagcugcaggucgugaaggacgcccaggcgcuccugcacgggcuggacuucagcgagguguccaacguccagcgccucaugcggaagcagcgccgggacgacaacgaccugaagcgccugcgggaccucaaccaggccgugaacaaccugguggagcucaagagcacccagcagaaguccguccugcgcgugggcacccugaccagcgacgaccugcucgugcuggccgccgaccuggagaagcucaaguccaaggucauccggaccgagcgcccccugagcgccgggguguacaugggcaaccuguccagccagcagcucgaccagcggcgcgcgcugcugaacaugaucgggauguccggcggcauccaggggacccggacgggccgcgacggggugguccgggugugggacgugaagaacgccgaccuccugaacaaccaguucggcaccaugccgagccugacccucgccugccugaccaagcaggggcaggucgaccugaacgacguggugcaggcccucacggaccugggccugaucuacaccgcgaaguaccccaacgccuccgaccucgaccgccugacccagagccaccccauccugaacaugaucgacaccaagaaguccagccucaacaucagcggcuacaacuucucccugggggccgccgucaaggccggcgcgugcaugcuggacgggggcaacaugcucgagacgaucaaggugagcccccagaccauggacggcauccugaaguccauccugaaggugaagaagacccucgggauguucaucagcgacaccccgggcgagcggaaccccuacgagaacauccuguacaagaucugccuguccggggacggcuggcccuacaucgccagccgcacguccaucaccgggcgggccugggagaacaccgucguggaccucgagagcgacggcaagccccagaaggccggcuccaacaacagcaacaagucccugcagagcgccggguucgcggccggccugaccuacucccagcucaugacgcugaaggacgccaugcugcagcuggacccgaacgccaagaccuggauggacaucgaggggcgccccgaggaccccguggagaucgcccucuaccagcccagcuccggcugcuacauccacuucuuccgggagccgaccgaccugaagcaguucaagcaggacgcgaaguacagccacgggaucgacgucaccgaccuguucgccgcccagcccggccucacguccgccgugaucgaggcccugccccgcaacauggucaucacgugccagggcagcgacgacaucaagaagcugcucgagucccaggggcgcaaggacaucaagcugaucgacaucgcgcugagcaagaccgacagccggaaguacgagaacgccgugugggaccaguacaaggaccucugccacaugcacaccggcguggucguggagaagaagaagcgcgggggcaaggaggagaucaccccgcacugcgcccugauggacugcaucauguucgacgccgcgguguccgggggccugaacacccucguccugcgggccgugcugccccgcgacaugguguuccggaccagcacgccccgcgucgugcucugaggacuaguuauaagacugacuagcccgaugggccucccaacgggcccuccuccccuccuugcaccgagauuaaucaaaggcucuuuucagagccaccaaaaaaaaaaaaaaaaaaaaaaaaaaaaaaaaaaaaaaaaaaaaaaaaaaaaaaaaaaaaaaaaaaaaaaaaaaaaaaaaaaaaaaaaaaaaaaaaaaaaa

SEQ ID NO: 21871 - RNA, 1974 nt, Artificial Sequence
  mRNA product Design i-3 (hSL-A100) comprising derived and/or modified sequence from LASV(G3010-SLE-2013;Clade IV)__AIT17345__SP-IgE_NP(2-569) (opt1)
aggagaaagcuuaccauggacuggaccuggauccuguuccucguggccgccgcgacccgcguccacagcagcgccuccaaggagaucaagagcuuccuguggacccagucccuccgccgggagcugagcggcuacugcuccaacaucaagcuccagguggucaaggacgcccaggcgcugcugcacgggcuggacuucagcgagguguccaacgugcagcgccucaugcggaaggagcgccgggacgacaacgaccugaagcgccugcgggaccucaaccaggccgucaacaaccugguggagcucaagagcacccagcagaaguccauccugcgcgugggcacccugaccagcgacgaccugcucauccuggccgccgaccuggagaagcucaaguccaaggucacccggaccgagcgcccccugagcgccgggguguacaugggcaaccuguccagccagcagcucgaccagcggcgcgcgcugcuguccaugaucgggaugagcuccggcgugcagggcgcccgggccgggcgcgacggcgucgugcgggugugggacgucaagaacgccgagcuccugaacaaccaguucgggacgaugccgagccugacccucgcgugccugaccaagcagggccagguggaccugaacgacgugguccaggcccucaccgaccuggggcugaucuacacggccaaguaccccaacaccuccgaccucgaccgccugacccagagccaccccauccugaacaugaucgacaccaagaaguccagccucaacaucagcggcuacaacuucucccugggcgccgccgugaaggcgggggccugcaugcuggacggcgggaacaugcucgagacgaucaaggugagcccccagaccauggacggcauccugaaguccauccugaaggucaagaaggcccucggcauguucaucagcgagaccccgggggagcggaaccccuacgagaacauccuguacaagaucugccuguccggcgacggguggcccuacaucgccagccgcaccuccaucacgggccgggccugggagaacaccgugguggaccucgagagcgacgggaagccccagaaggcgggcuccaacaacagcaacaagucccugcagagcgccggcuucaccgccgggcugaccuacucccagcucaugacgcugaaggacgccaugcugcagcuggacccgaacgccaagaccuggauggacaucgagggccgccccgaggaccccgucgagguggcgcucuaccagcccagcuccgggugcuacauccacuucuuccgggagccgaccgaccugaagcaguucaagcaggacgccaaguacagccacggcaucgacgugaccgaccuguucgccgcccagcccgggcucacguccgccgucaucgacgcgcugccccgcaacauggugaucacgugccagggcagcgacgacaucaagaagcugcucgagagccagggccgcaaggacaucaagcugaucgacaucgcccuguccaagaccgacagccggaaguacgagaacgccgucugggaccaguacaaggaccucugccacaugcacaccggggugguggucgagaagaagaagcgcggcgggaaggaggagaucaccccgcacugcgcccugauggacugcaucauguucgacgcggccguguccggcgggcugaacaccagcgugcuccgggccguccugccccgcgacaugguguuccggaccuccacgccccgcgugguccugugaggacuaguuauaagacugacuagcccgaugggccucccaacgggcccuccuccccuccuugcaccgagauuaaucaaaggcucuuuucagagccaccaaaaaaaaaaaaaaaaaaaaaaaaaaaaaaaaaaaaaaaaaaaaaaaaaaaaaaaaaaaaaaaaaaaaaaaaaaaaaaaaaaaaaaaaaaaaaaaaaaaaa

SEQ ID NO: 21872 - RNA, 1974 nt, Artificial Sequence
  mRNA product Design i-3 (hSL-A100) comprising derived and/or modified sequence from LASV(G502-SLE-2009;Clade IV)__AIT17127__SP-IgE_NP(2-569) (opt1)
aggagaaagcuuaccauggacuggaccuggauccuguuccucguggccgccgcgacccgcguccacagcagcgccuccaaggagaucaagagcuuccuguggacccagucccuccgccgggagcugagcggcuacugcuccaacaucaagcuccagguggucaaggacgcccaggcgcugcugcacgggcuggacuucagcgagguguccaacgugcagcgccucaugcggaaggagcgccgggacgacaacgaccugaagcgccugcgggaccucaaccaggccgucaacaaccugguggagcucaagagcacccagcagaaguccauccugcgcgugggcacccugaccagcgacgaccugcucauccuggccgccgaccuggagaagcucaaguccaaggucauccggaccgagcgcccccugagcgccgggguguacaugggcaaccuguccagccagcagcucgaccagcggcgcgcgcugcuguccaugaucgggaugagcggcggcaaccagggggugcgggccggcaaggacggggucgugcgcgugugggacgucaagaacgccgagcuccugaacaaccaguucggcaccaugccgucccugacgcucgccugccugaccaagcagggccagguggaccugaacgacgcggugcaggcccucaccgaccuggggcugaucuacaccgccaaguaccccaacacgagcgaccucgaccggcugacccagucccaccccauccugaacaugaucgacaccaagaaguccagccucaacaucuccggcuacaacuucagccugggggccgccgucaaggcgggcgccugcaugcuggacgggggcaacaugcucgagaccaucaaggugagcccccagacgauggacggcauccucaagagcauccugaaggugaagaaggcccuggggauguucaucuccgacaccccgggcgagcgcaaccccuacgagaacauccuguacaagaucugccugagcggggacggcuggcccuacaucgccucccggaccagcaucaccgggcgcgccugggagaacacggucguggaccucgaguccgacggcaagccccagaaggcgggcagcaacaacuccaacaagagccugcaguccgccggguucaccgccggccugaccuacagccagcucaugacccugaaggacgccaugcugcagcuggacccgaacacgaagaccuggauggacaucgaggggcggcccgaggaccccguggagaucgcccucuaccagcccuccagcggcugcuacauccacuucuuccgcgagccgaccgaccugaagcaguucaagcaggacgcgaaguacucccacgggaucgacgucaccgaccuguucgccgcccagcccggccucacgagcgccgugaucgacgcccugccccggaacauggugaucacgugccagggcuccgacgacauccgcaagcugcucgagagccaggggcgcaaggacaucaagcugaucgacaucgcgcugaacaagaccgacagccggaaguacgagaacgccgucugggaccaguacaaggaccucugccacaugcacaccggcguggucguggagaagaagaagcgcgggggcaaggaggagaucaccccgcacugcgcccugauggacugcaucauguucgacgccgcgguguccgggggccugaacaccagcguccuccgggccgugcugccccgcgacaugguguuccggaccuccacgccccgcgucgugcugugaggacuaguuauaagacugacuagcccgaugggccucccaacgggcccuccuccccuccuugcaccgagauuaaucaaaggcucuuuucagagccaccaaaaaaaaaaaaaaaaaaaaaaaaaaaaaaaaaaaaaaaaaaaaaaaaaaaaaaaaaaaaaaaaaaaaaaaaaaaaaaaaaaaaaaaaaaaaaaaaaaaaa

SEQ ID NO: 21873 - RNA, 1974 nt, Artificial Sequence
  mRNA product Design i-3 (hSL-A100) comprising derived and/or modified sequence from LASV(G733-SLE-2010;Clade IV)__AIT17155__SP-IgE_NP(2-569) (opt1)
aggagaaagcuuaccauggacuggaccuggauccuguuccucguggccgccgcgacccgcguccacagcagcgccuccaaggagaucaagagcuuccuguggacccagucccuccgccgggagcugagcggcuacugcuccaacaucaagcuccagguggucaaggacgcccaggcgcugcugcacgggcuggacuucagcgagguguccaacgugcagcgccucaugcggaaggagcgccgggacgacaacgaccugaagcgccugcgggaccucaaccaggccgucaacaaccugguggagcucaagagcacccagcagaaguccgugcugcgcgucggcacccugaccagcgacgagcugcucgugcuggccgccgaccuggagaagcucaaguccaaggugauccggaccgagcgcccccugagcgccggggucuacaugggcaaccuguccagccagcagcucgaccagcggcgcgcgcugcuguccaugaucgggaugagcggcggcaaccagggggcccggaccggccgcgacgggguggugcgggucugggacgugaagaacgccgagcuccugaacaaccaguucggcaccaugccgucccugacccucgccugccugaccaagcagggccagguggaccugaacgacgcgguccaggcccucaccgaccuggggcugaucuacacggccaaguaccccaacaccagcgaccucgaccgccugacccagucccaccccauccugaacaugaucgacaccaagaaguccagccucaacaucuccggcuacaacuucagccugggggccgccgugaaggcgggcgccugcaugcuggacgggggcaacaugcucgagacgaucaaggugagcccccagaccauggacggcauccucaagagcauccugaaggucaagaaggcccuggggauguucaucuccgacaccccgggcgagcggaaccccuacgagaacauccuguacaagaucugccugagcggggacggcuggcccuacaucgccucccgcaccagcaucacggggcgggccugggagaacaccgugguggaccucgaguccgacggcaagccccagaaggcgggcagcaacaacuccaacaagagccugcaguccgccggguucaccgccggccugaccuacagccagcucaugacgcugaaggacgccaugcugcagcuggacccgaacgccaagaccuggauggacaucgaggggcgccccgaggaccccgucgagaucgcgcucuaccagcccuccagcggcugcuacauccacuucuuccgggagccgaccgaccugaagcaguucaagcaggacgccaaguacucccacgggaucgacgugaccgaccuguucgccgcccagcccggccucacgagcgccgugaucgacgcgcugccccgcaacauggucaucacgugccagggcuccgacgacauccgcaagcugcucgagagccaggggcggaaggacaucaagcugaucgacaucgcccugagcaagaucgacucccgcaaguacgagaacgccgugugggaccaguacaaggaccucugccacaugcacaccggcgucgugguggagaagaagaagcgcgggggcaaggaggagaucacgccccacugcgcccugauggacugcaucauguucgacgcggccgucagcgggggccugaacucccucgugcugcgggccgugcugccgcgggacauggucuuccgcaccagcacgccccggguggugcucugaggacuaguuauaagacugacuagcccgaugggccucccaacgggcccuccuccccuccuugcaccgagauuaaucaaaggcucuuuucagagccaccaaaaaaaaaaaaaaaaaaaaaaaaaaaaaaaaaaaaaaaaaaaaaaaaaaaaaaaaaaaaaaaaaaaaaaaaaaaaaaaaaaaaaaaaaaaaaaaaaaaaa

SEQ ID NO: 21874 - RNA, 1974 nt, Artificial Sequence
  mRNA product Design i-3 (hSL-A100) comprising derived and/or modified sequence from MOPV/LASV reassortant(IGS-1;Clade IV)__AFY05578__SP-IgE_NP(2-569) (opt1)
aggagaaagcuuaccauggacuggaccuggauccuguuccucguggccgccgcgacccgcguccacagcagcgccuccaaggagaucaagagcuuccuguggacccagucccuccgccgggagcugagcggcuacugcuccaacaucaagcuccagguggucaaggacgcccaggcgcugcugcacgggcuggacuucagcgagguguccaacgugcagcgccucaugcggaaggagcgccgggacgacaacgaccugaagcgccugcgggaccucaaccaggccgucaacaaccugguggagcucaagagcacccagcagaaguccauccugcgcgugggcacccugaccagcgacgaccugcucauccuggccgccgaccuggagaagcuccgguccaaggucauccgcaccgagcggccccugagcgccgggguguacaugggcaaccuguccagccagcagcucgaccagcgccgggcgcugcugaacaugaucgggauguccggcggcaaccagggggcccgcgccggccgggacggggugguccgcgugugggacgugaagaacgccgagcuccugagcaaccaguucggcaccaugccgucccugacgcucgcgugccugaccaagcaggggcaggucgaccugaacgacgccgugcaggcccucaccgaccugggccugaucuacaccgccaaguaccccaacacgagcgaccucgaccggcugacccagucccaccccauccugaacaugaucgacaccaagaaguccagccucaacaucuccggcuacaacuucagccugggggccgcggugaaggccggcgccugcaugcuggacgggggcaacaugcucgagaccaucaaggucagcccccagacgauggacggcauccucaagagcauccugaaggugaagaaggcccuggggauguucaucuccgacaccccgggcgagcgcaaccccuacgagaacauccuguacaagaucugccugagcggggacggcuggcccuacaucgccucccggaccagcaucaccgggcgcgcgugggagaacacgguggucgaccucgaguccgacggcaagccccagaaggccgacagcaacaacuccagcaagucccugcagagcgccggcuucaccgccgggcugaccuacucccagcucaugacccugaaggacgccaugcugcagcuggacccgaacgcgaagacguggauggacaucgagggccggcccgaggaccccguggagaucgcccucuaccagcccagcuccgggugcuacauccacuucuuccgcgagccgaccgaccugaagcaguucaagcaggacgccaaguacagccacggcaucgacgugaccgaccuguucgccacccagcccgggcucacguccgccgucaucgacgcgcugccccgcaacauggugaucacgugccagggcagcgacgacauccggaagcugcucgagagccagggccgcaaggacaucaagcugaucgacaucgaccuguccaagaccgacagccggaaguacgagaacgccgugugggaccaguacaaggaccucugccacaugcacaccggggucguggucgagaagaagaagcgcggcgggaaggaggagaucaccccgcacugcgcccugauggacugcaucauguucgacgccgcgguguccggcgggcugaacaccagcgugcuccgggccguccugccccgcgacaugguguuccggaccuccacgccccgcgugguccugugaggacuaguuauaagacugacuagcccgaugggccucccaacgggcccuccuccccuccuugcaccgagauuaaucaaaggcucuuuucagagccaccaaaaaaaaaaaaaaaaaaaaaaaaaaaaaaaaaaaaaaaaaaaaaaaaaaaaaaaaaaaaaaaaaaaaaaaaaaaaaaaaaaaaaaaaaaaaaaaaaaaaa

SEQ ID NO: 21875 - RNA, 1974 nt, Artificial Sequence
  mRNA product Design i-3 (hSL-A100) comprising derived and/or modified sequence from LASV(LM765-SLE-2012;Clade IV)__AIT17815__SP-IgE_NP(2-569) (opt1)
aggagaaagcuuaccauggacuggaccuggauccuguuccucguggccgccgcgacccgcguccacagcagcgccuccaaggagaucaagagcuuccuguggacccagucccuccgccgggagcugagcggcuacugcuccaacaucaagcuccagguggucaaggacgcccaggcgcugcugcacgggcuggacuucagcgagguguccaacgugcagcgccucaugcggaaggagcgccgggacgacaacgaccugaagcgccugcgggaccucaaccaggccgucaacaaccugguggagcucaagagcacccagcagaaguccauccugcgcgugggcacccugaccagcgacgaccugcucauccuggccgccgaccuggagaagcucaaguccaaggucacccggaccgagcgcccccugagcgccgggguguacaugggcaaccuguccagccagcagcucgaccagcggcgcgcgcugcuggacaugaucgggauguccggcagcaaccagggcgcccgggccgggcgcgacggcgugguccgggugugggacgugaagaacgccgagcuccugaacaaccaguucgggacgaugccgucccugacccucgcgugccugaccaagcagggccaggucgaccugaacgacgccgugcaggcccucaccgaccuggggcugaucuacacggccaaguaccccaacaccagcgaccucgaccgccugacccagucccaccccauccugaacaugaucgacaccaagaaguccagccucaacaucuccggcuacaacuucagccugggcgccgcggugaaggccggggccugcaugcuggacggcgggaacaugcucgagacgaucaaggucagcccccagaccauggacggcauccucaagagcauccugaaggugaagaaggcccugggcauguucaucuccgacgccccgggggagcggaaccccuacgagaacauccuguacaagaucugccugagcggcgacggguggcccuacaucgcgucccgcaccagcaucaccggccgggccugggagaacacgguggucgaccucgaguccgacgggaagccccagaaggccggcagcaacggcuccaacaagagccugcaguccgccggguucaccgccggccugaccuacagccagcucaugacccugaaggacgcgaugcugcagcuggacccgaacgccaagacguggauggacaucgaggggcgccccgaggaccccguggagaucgcccucuaccagcccuccagcggcugcuacauccacuucuuccgggagccgaccgaccugaagcaguucaagcaggacgccaaguacucccacgggaucgacgugaccgaccuguucgccgcgcagcccggccucaccagcgccgucaucgacgcccugccccgcaacauggugaucacgugccagggcuccgacgacauccgcaagcuguucgagagccaggggcggaaggacaucaagcucaucgacaucgcccugagcaagaccgacucccgcaaguacgagaacgcggugugggaccaguacaaggaccugugccacaugcacaccggcaucgucguggagaagaagaagcgcgggggcaaggaggagaucacgccccacugcgcccucauggacugcaucauguucgacgccgccgucagcgggggccugaacaccuccgugcugcgggccgugcucccgcgggacauggucuuccgcaccagcacgccccggguggugcugugaggacuaguuauaagacugacuagcccgaugggccucccaacgggcccuccuccccuccuugcaccgagauuaaucaaaggcucuuuucagagccaccaaaaaaaaaaaaaaaaaaaaaaaaaaaaaaaaaaaaaaaaaaaaaaaaaaaaaaaaaaaaaaaaaaaaaaaaaaaaaaaaaaaaaaaaaaaaaaaaaaaaa

SEQ ID NO: 21876 - RNA, 1974 nt, Artificial Sequence
  mRNA product Design i-3 (hSL-A100) comprising derived and/or modified sequence from LASV(LM776-SLE-2012;Clade IV)__AIT17825__SP-IgE_NP(2-569) (opt1)
aggagaaagcuuaccauggacuggaccuggauccuguuccucguggccgccgcgacccgcguccacagcagcgccuccaaggagaucaagagcuuccuguggacccagucccuccgccgggagcugagcuccuacugcagcaacaucaagcuccagguggucaaggacgcccaggcgcugcugcacggccuggacuucuccgaggugagcaacgugcagcgccucaugcggaaggagcgccgggacgacaacgaccugaagcgccugcgggaccucaaccaggccgucaacaaccugguggagcugaaguccacccagcagaaguccauccuccgcguggggacccugaccuccgacgaccugcucauccuggccgccgaccuggagaagcucaagagcaaggucacccggaccgagcgcccccuguccgccggcguguacauggggaaccugagcucccagcagcucgaccagcggcgcgcgcugcugagcaugaucggcauguccgggagcaaccagggcgcccgggccggccgcgacggggugguccgggugugggacgugaagaacgccgagcuccugaacaaccaguucggcacgaugccgucccugacccucgcgugccugaccaagcaggggcaggucgaccugaacgacgccgugcaggcccucaccgaccugggccugaucuacacggccaaguaccccaacaccagcgaccucgaccgccugacccagagccaccccauccugaacaugaucgacaccaagaaguccagccucaacaucuccggguacaacuucagccugggcgccgcggugaaggccggcgccugcaugcuggacgggggcaacaugcucgagacgaucaaggucagcccccagaccauggacgggauccucaagagcauccugaaggugaagaaggcccugggcauguucaucuccgacaccccgggcgagcggaaccccuacgagaacauccuguacaagaucugccugagcggggacggcuggcccuacaucgccucccgcaccagcaucacggggcgggcgugggagaacaccguggucgaccucgaguccgacggcaagccccagaaggccgggagcaacaacuccaacaagagccugcaguccgccggcuucaccgccggccugaccuacagccagcucaugacgcugaaggacgccaugcugcagcuggacccgaacgcgaagaccuggauggacaucgaggggcgccccgaggaccccguggagguggcccucuaccagcccuccagcggcugcuacauccacuucuuccgggagccgaccgaccugaagcaguucaagcaggacgccaaguacucccacgggaucgacgucaccgaccuguucgccgcccagcccggccucacgagcgcggugaucgacgcccugccccgcaacauggugaucacgugccaggggagcgacgacauccgcaagcugcucgagucccagggccggaaggacaucaagcugaucgacaucgcccugagcaagaccgacucccgcaaguacgagaacgccgucugggaccaguacaaggaccucugccacaugcacaccggcguggucguggagaagaagaagcgcgggggcaaggaggagaucaccccgcacugcgcgcugauggacugcaucauguucgacgccgccgugagcgggggccugaacaccuccguccuccgggccgugcugccccgggacaugguguuccgcaccagcacgccccgggucgugcugugaggacuaguuauaagacugacuagcccgaugggccucccaacgggcccuccuccccuccuugcaccgagauuaaucaaaggcucuuuucagagccaccaaaaaaaaaaaaaaaaaaaaaaaaaaaaaaaaaaaaaaaaaaaaaaaaaaaaaaaaaaaaaaaaaaaaaaaaaaaaaaaaaaaaaaaaaaaaaaaaaaaaa

SEQ ID NO: 21877 - RNA, 1974 nt, Artificial Sequence
  mRNA product Design i-3 (hSL-A100) comprising derived and/or modified sequence from LASV(Mad39;Clade IV)__ANH09723__SP-IgE_NP(2-569) (opt1)
aggagaaagcuuaccauggacuggaccuggauccuguuccucguggccgccgcgacccgcguccacagcagcgccuccaaggagaucaagagcuuccuguggacccagucccuccgccgggagcugagcggcuacugcuccaacaucaagcuccagguggucaaggacgcccaggcgcugcugcacgggcuggacuucagcgagguguccaacgugcagcgccucaugcggaagcagcgccgggacgacaacgaccugaagcgccugcgggaccucaaccaggccgucaacaaccugguggagcugaaguccacccagcagaaguccgugcuccgcgucggcacgcugaccagcgacgaccugcucacccuggccgccgaccuggagaagcucaaguccaaggugacccggacggagcgcccccugaccgccgggguguacaugggcaaccugagcucccagcagcucgaccagcggcgcgcgcugcugaacaugaucgggaugagcggcggcaaccagggggcccggaccggccgcgacggggucgugcgggugugggacgucaagaacgccgagcuccugaacaaccaguucggcaccaugccgucccugacgcucgccugccugaccaagcagggccagguggaccugaacgacgugguccaggcgcucaccgaccuggggcugaucuacaccgccaaguaccccaacacgagcgaccucgaccgccugacccagucccaccccauccugaacaugaucgacaccaacaagagcucccucaacaucagcggcuacaacuucagccugggggccgccgugaaggccggcgcgugcaugcuggacgggggcaacaugcucgagaccaucaaggugagcccccagacgauggacggcauccucaagagcauccugaaggucaagaagucccuggggauguucaucagcgacaccccgggcgagcggaaccccuacgagaacauccuguacaagaucugccuguccggggacggcuggcccuacaucgccagccgcaccuccaucaccgggcgggccugggagaacacggugguggaccucgagagcggcggcaagccccagaaggccggguccaacaacagcaacaagucccugcagagcgccggcuucgcggccgggcugaccuacucccagcucaugacccugaaggacgccaugcugcagcuggacccgaacgccaagaccuggauggacaucgagggccgccccgaggaccccgucgagaucgcccucuaccagcccaucagcgggugcuacauccacuucuuccgggagccgacggaccugaagcaguucaagcaggacgcgaaguacucccacggcaucgacgugaccgaccuguucgccgcccagcccggccucaccagcgccgugaucgaggcccugccccgcaacauggucaucacgugccagggguccgacgacauccgcaagcuguucgagagccagggccggaaggacaucaagcucaucgacaucgcgcuguccaagaccgacagccgcaaguacgagaacgccgugugggaccaguacaaggaccugugccacaugcacaccggggucgugguggagaagaagaagaagggcgggaaggaggagaucacgccccacugcgcccucauggacugcaucauguucgacgccgcggucagcggcggccugaacacccuggugcuccgggccgugcugccgcgcgacauggucuuccggaccuccacccccaagguggugcugugaggacuaguuauaagacugacuagcccgaugggccucccaacgggcccuccuccccuccuugcaccgagauuaaucaaaggcucuuuucagagccaccaaaaaaaaaaaaaaaaaaaaaaaaaaaaaaaaaaaaaaaaaaaaaaaaaaaaaaaaaaaaaaaaaaaaaaaaaaaaaaaaaaaaaaaaaaaaaaaaaaaaa

SEQ ID NO: 21878 - RNA, 1974 nt, Artificial Sequence
  mRNA product Design i-3 (hSL-A100) comprising derived and/or modified sequence from LASV(Z0947-SLE-2011;Clade IV)__AIT17841__SP-IgE_NP(2-569) (opt1)
aggagaaagcuuaccauggacuggaccuggauccuguuccucguggccgccgcgacccgcguccacagcagcgccuccaaggagaucaagagcuuccuguggacccagucccuccgccgggagcugagcggcuacugcuccaacaucaagcuccagguggucaaggacgcccaggcgcugcugcacgggcuggacuucagcgagguguccaacgugcagcgccucaugcggaaggagcgccgggacgacaacgaccugaagcgccugcgggaccucaaccaggccgucaacaaccugguggagcucaagagcacccagcagaaguccauccugcgcgugggcacccugaccagcgacgaccugcucauccuggccgccgaccuggagaagcucaaguccaaggucacccggaccgagcgcccccugagcgccgggguguacaugggcaaccuguccagccagcagcucgaccagcggcgcgcgcugcugaacaugaucgggauguccggcagcaaccagggcgcccggacggggcgcgacggcgugguccgggugugggacgugaagaacgccgagcuccugaacaaccaguucgggaccaugccgucccugacccucgccugccugaccaagcagggccaggucgaccugaacgacgcggugcaggcccucacggaccuggggcugaucuacaccgccaaguaccccaacaccagcgaccucgaccgccugacccagucccaccccauccugaacaugaucgacacgaagaaguccagccucaacaucuccggcuacaacuucagccugggcgccgccgugaaggcgggggccugcaugcuggacggcgggaacaugcucgagaccaucaaggucagcccccagaccauggacggcauccucaagagcauccugaaggugaagaaggcccugggcauguucaucuccgacgccccgggggagcggaaccccuacgagaacauccuguacaagaucugccugagcggcgacggguggcccuacaucgccucccgcaccagcaucacgggccgggcgugggagaacaccguggucgaccucgaguccgacgggaagccccagaaggccggcagcaacggcuccaacaagagccugcaguccgccggguucaccgccggccugaccuacagccagcucaugacgcugaaggacgccaugcugcagcuggacccgaacgcgaagaccuggauggacaucgaggggcgccccgaggaccccguggagaucgcccucuaccagcccuccagcggcugcuacauccacuucuuccgggagccgaccgaccugaagcaguucaagcaggacgccaaguacucccacgggaucgacgugaccgaccuguucgccgcccagcccggccucacgagcgcggucaucgacgcccugccccgcaacauggugaucacgugccagggcuccgacgacauccgcaagcuguucgagagccaggggcggaaggacaucaagcucaucgacaucgcccugagcaagaccgacucccgcaaguacgagaacgccgugugggaccaguacaaggaccugugccacaugcacaccggcaucgucguggagaagaagaagcgcgggggcaaggaggagaucaccccgcacugcgcgcucauggacugcaucauguucgacgccgccgucagcgggggccugaacaccuccgugcugcgggccgugcucccccgggacauggucuuccgcaccagcacgccccggguggugcugugaggacuaguuauaagacugacuagcccgaugggccucccaacgggcccuccuccccuccuugcaccgagauuaaucaaaggcucuuuucagagccaccaaaaaaaaaaaaaaaaaaaaaaaaaaaaaaaaaaaaaaaaaaaaaaaaaaaaaaaaaaaaaaaaaaaaaaaaaaaaaaaaaaaaaaaaaaaaaaaaaaaaa

SEQ ID NO: 21879 - RNA, 1974 nt, Artificial Sequence
  mRNA product Design i-3 (hSL-A100) comprising derived and/or modified sequence from LASV(Josiah;Clade IV)__NP_694869__SP-IgE_NP(2-569) (opt4)
aggagaaagcuuaccauggacuggaccuggauccuguuccugguggccgccgccaccagagugcacagcagcgccagcaaggagaucaagagcuuccuguggacccagagccugagaagagagcugagcggcuacugcagcaacaucaagcugcagguggugaaggacgcccaggcccugcugcacggccuggacuucagcgaggugagcaacgugcagagacugaugagaaaggagagaagagacgacaacgaccugaagagacugagagaccugaaccaggccgugaacaaccugguggagcugaagagcacccagcagaagagcauccugagagugggcacccugaccagcgacgaccugcugauccuggccgccgaccuggagaagcugaagagcaaggugaucagaaccgagagaccccugagcgccggcguguacaugggcaaccugagcagccagcagcuggaccagagaagagcccugcugaacaugaucggcaugagcggcggcaaccagggcgccagagccggcagagacggcguggugagagugugggacgugaagaacgccgagcugcugaacaaccaguucggcaccaugcccagccugacccuggccugccugaccaagcagggccagguggaccugaacgacgccgugcaggcccugaccgaccugggccugaucuacaccgccaaguaccccaacaccagcgaccuggacagacugacccagagccaccccauccugaacaugaucgacaccaagaagagcagccugaacaucagcggcuacaacuucagccugggcgccgccgugaaggccggcgccugcaugcuggacggcggcaacaugcuggagaccaucaaggugagcccccagaccauggacggcauccugaagagcauccugaaggugaagaaggcccugggcauguucaucagcgacacccccggcgagagaaaccccuacgagaacauccuguacaagaucugccugagcggcgacggcuggcccuacaucgccagcagaaccagcaucaccggcagagccugggagaacaccgugguggaccuggagagcgacggcaagccccagaaggccgacagcaacaacagcagcaagagccugcagagcgccggcuucaccgccggccugaccuacagccagcugaugacccugaaggacgccaugcugcagcuggaccccaacgccaagaccuggauggacaucgagggcagacccgaggaccccguggagaucgcccuguaccagcccagcagcggcugcuacauccacuucuucagagagcccaccgaccugaagcaguucaagcaggacgccaaguacagccacggcaucgacgugaccgaccuguucgccacccagcccggccugaccagcgccgugaucgacgcccugcccagaaacauggugaucaccugccagggcagcgacgacaucagaaagcugcuggagagccagggcagaaaggacaucaagcugaucgacaucgcccugagcaagaccgacagcagaaaguacgagaacgccgugugggaccaguacaaggaccugugccacaugcacaccggcguggugguggagaagaagaagagaggcggcaaggaggagaucaccccccacugcgcccugauggacugcaucauguucgacgccgccgugagcggcggccugaacaccagcgugcugagagccgugcugcccagagacaugguguucagaaccagcacccccagaguggugcugugaggacuaguuauaagacugacuagcccgaugggccucccaacgggcccuccuccccuccuugcaccgagauuaaucaaaggcucuuuucagagccaccaaaaaaaaaaaaaaaaaaaaaaaaaaaaaaaaaaaaaaaaaaaaaaaaaaaaaaaaaaaaaaaaaaaaaaaaaaaaaaaaaaaaaaaaaaaaaaaaaaaaa

SEQ ID NO: 21880 - RNA, 1974 nt, Artificial Sequence
  mRNA product Design i-3 (hSL-A100) comprising derived and/or modified sequence from LASV(LP;Clade I)__AAF86702__SP-IgE_NP(2-569) (opt4)
aggagaaagcuuaccauggacuggaccuggauccuguuccugguggccgccgccaccagagugcacagcagcaacagcaaggagaucaagagcuuccuguggacccagagccugagaagagagcugagcggcuacugcagcaacaucaagcugcagguggugaaggacgcccaggcccugcugcacggccuggacuucagcgaggugagcaacgugcagagacugaugagaaagcagaagagagacgacgccgaccugaagagacugagagaccugaaccaggccgugaacaaccugguggagcugaagagcacccagcagaagaacgugcugagagugggcacccugagcagcgacgaccugaucacccuggccgccgaccuggagaagcugaagagcaaggugaucagaaccgagagaccccugagcagcggcguguacaugggcaaccugagcagccagcagcuggaccagagaagagcccugcugagcaugaucggcaugagcggcggcccccagggcaacagaaccggcggcgacggcguggugagagugugggacgugaagaacgccgagcugcugaacaaccaguucggcaccaugcccagccugacccuggccugccugaccaagcagggccagguggaccugaacgacgccgugcaggcccugaccgaccugggccugaucuacaccgccaaguaccccaacagcagcgaccuggacaugcugacccagagccaccccauccugggcaugguggacaccaagaagagcagccugaacaucagcggcuacaacuucagccugggcgccgccgugaaggccggcgccugcaugcuggacggcggcaacaugcuggagaccaucaaggugagcccccagaccauggacggcauccugaagagcauccugaaggugaagagaagccugggcauguucaucagcgacacccccggcgagagaaaccccuacgagaacauccuguacaagaucugccugagcggcgagggcuggcccuacaucgccagcagaaccagcaucaccggcagagccugggagaacacccugguggaccuggagagcgacaacaagccccccaagcugaacagcgccggcagcaacaagagccugcaggccgccggccugaacgccggccugaccuacagccagcugaugacccugaaggacugcaugcugcagcuggaccccagcagcaagaccuggaucgacaucgagggcagacccgaggaccccguggagaucgcccuguuccagcccagcagcggcugcuacauccacuucuucagagagcccaccgaccugaagcaguucaagcaggacgccaaguacagccacggcaucgacgugaccgaccuguucagcacccagcccggccugaccagcgccgugaucgaggcccugcccagaaacauggugcugaccugccagggcagcgacgacaucaagaagcugcuggagagccagggcagaagagacaucaagcugaucgacaucagccugagcaaggccgacagcagaaaguucgagaacgccgugugggaccaguacaaggaccugugccacaugcacaccggcguggugguggagaagaagaagagaggcggcaaggaggagaucaccccccacugcgcccugcuggacugcaucauguucgacgccgccaccaccggcagccugaacaucaccacccugagagccgugcugcccagagacaugguguucagaaccagcacccccaagguggugcugugaggacuaguuauaagacugacuagcccgaugggccucccaacgggcccuccuccccuccuugcaccgagauuaaucaaaggcucuuuucagagccaccaaaaaaaaaaaaaaaaaaaaaaaaaaaaaaaaaaaaaaaaaaaaaaaaaaaaaaaaaaaaaaaaaaaaaaaaaaaaaaaaaaaaaaaaaaaaaaaaaaaaa

SEQ ID NO: 21881 - RNA, 1974 nt, Artificial Sequence
  mRNA product Design i-3 (hSL-A100) comprising derived and/or modified sequence from LASV(803213;Clade II)__AAF86704__SP-IgE_NP(2-569) (opt4)
aggagaaagcuuaccauggacuggaccuggauccuguuccugguggccgccgccaccagagugcacagcagcgccagcaaggaggugaagagcuuccuguggacccagagccugagaagagagcugagcggcuacugcagcaacaucaagcugcagguggugaaggacgcccaggcccugcugcacggccuggacuucagcgaggugaacaacgugcagagacugaugagaaagcagaagagagacgacggcgaccugaagagacugagagaccugaaccaggccgugaacaaccugguggagcugaagagcacccagcagaagagcauccugagagugggcacccugaccagcgacgaccugcugacccuggccgccgaccuggagaagcugaagagcaaggugaucagaaccgagagaccccugagcagcggcguguacaugggcaaccugagcacccagcagcuggagcagagaagagcccugcugaacaugaucggcauggugggcggcgcccagggcacccagcccggcagagacggcguggugagagugugggacgugaagaaccccgaccugcugaacaaccaguucggcaccaugcccagccugacccuggccugccugaccaagcagggccagguggaccugaacgacgccgugcuggcccugaccgaccugggccugaucuacaccgccaaguaccccaacagcagcgaccuggacagacugagccagagccaccccauccugaacaugguggacaccaagaagagcagccugaacaucagcggcuacaacuucagccugggcgccgccgugaaggccggcgccugcaugcuggacggcggcaacaugcuggagaccaucaaggugaccccccagaccauggacggcauccugaagagcauccugaaggugaagagaagccugggcauguucgugagcgacacccccggcgagagaaaccccuacgagaacauccuguacaagaucugccugagcggcgacggcuggcccuacaucgccagcagaaccagcaucgugggcagagccugggagaacaccaccguggaccuggagagcgacggcaagccccagaaggugggcaccgccggcagcaacaagagccugcagagcgccggcuuccccaccggccugaccuacagccagcugaugacccugaaggacagcaugaugcagcuggaccccagcgccaagaccuggaucgacaucgagggcagacccgaggaccccguggagaucgcccuguaccagcccaugagcggcugcuacauccacuucuucagagagcccaccgaccugaagcaguucaagcaggacgccaaguacagccacggcaucgacguggccgaccuguuccccgcccagcccggccugaccagcgccgugaucgaggcccugcccagaaacauggugcugaccugccagggcagcgacgacaucaagaagcugcuggacagccagggcagaagagacaucaagcugaucgacaucagccugagcaagguggacagcagaaaguucgagaacgccgugugggaccagugcaaggaccugugccacaugcacaccggcguggugguggagaagaagaagagaggcggcaaggaggagaucaccccccacugcgcccugauggacugcaucauguucgacgccgccgugagcggcggccugaacauccccgugcugagagccgugcugcccagagacaugguguucagaaccagcagccccaagguggugcugugaggacuaguuauaagacugacuagcccgaugggccucccaacgggcccuccuccccuccuugcaccgagauuaaucaaaggcucuuuucagagccaccaaaaaaaaaaaaaaaaaaaaaaaaaaaaaaaaaaaaaaaaaaaaaaaaaaaaaaaaaaaaaaaaaaaaaaaaaaaaaaaaaaaaaaaaaaaaaaaaaaaaa

SEQ ID NO: 21882 - RNA, 1977 nt, Artificial Sequence
  mRNA product Design i-3 (hSL-A100) comprising derived and/or modified sequence from LASV(GA391;Clade III)__CAA36646__SP-IgE_NP(2-570) (opt4)
aggagaaagcuuaccauggacuggaccuggauccuguuccugguggccgccgccaccagagugcacagcagcgccagcaaggaggugagaagcuuccuguggacccagagccugagaagagagcugagcggcuacugcagcaacaucaagcugcagguggugaaggacgcccaggcccugcugcacggccuggacuucagcgaggugagcaacgugcagagacugaugagaaagcagaagagagacgacggcgaccugaagagacugagagaccugaaccaggccgugaacaaccugguggagcugaagagcacccagcagaagagcgugcugagagugggcacccugagcagcgacgaccugcugauccuggccgccgaccuggagaagcugaagagcaaggugaccagaaccgagagaccccugagcagcggcguguacaugggcaaccugagcagccagcagcuggaccagagaagagcccugcugaacaugaucggcaugaccggcgugagcggcggcggcaagggcgccagcgacggcaucgugagagugugggacgugaagaacgccgagcugcugaacaaccaguucggcaccaugcccagccugacccuggccugccugaccaagcagggccagguggaccugaacgacgccgugcaggcccugaccgaccugggccugaucuacaccgccaaguaccccaacagcagcgaccuggacagacugagccagagccaccccauccugaacaugaucgacaccaagaagagcagccugaacaucagcggcuacaacuucagccugggcgccgccgugaaggccggcgccugcaugcuggacggcggcaacaugcuggagaccaucaaggugagcccccagaccauggacggcauccugaagagcauccugaaggugaagaagagccugggcauguucgugagcgacacccccggcgagagaaaccccuacgagaacauccuguacaagaucugccugagcggcgacggcuggcccuacaucgccagcagaaccagcaucgugggcagagccugggagaacaccgugguggaccuggagcaggacaacaagccccagaagaucggcaacggcggcagcaacaagagccugcagagcgccggcuucgccgccggccugaccuacagccagcugaugacccugaaggacuucaagugcuucaaccugauccccaacgccaagaccuggauggacaucgagggcagacccgaggaccccguggagaucgcccuguaccagcccagcagcggcugcuacgugcacuucuucagagagcccaccgaccugaagcaguucaagcaggacgccaaguacagccacggcaucgacgugaccgaccuguucgccgcccagcccggccugaccagcgccgugaucgaggcccugcccagaaacauggugaucaccugccagggcagcgaggacaucagaaagcugcuggagagccagggcagaagagacaucaagcugaucgacaucacccugagcaaggccgacagcagaaaguucgagaacgccgugugggaccaguucaaggaccugugccacaugcacaccggcguggugguggagaagaagaagagaggcggcaaggaggagaucaccccccacugcgcccugauggacugcaucauguucgacgccgccgugagcggcggccuggacgccaaggugcugagaguggugcugcccagagacaugguguucagaaccagcacccccaagguggugcugugaggacuaguuauaagacugacuagcccgaugggccucccaacgggcccuccuccccuccuugcaccgagauuaaucaaaggcucuuuucagagccaccaaaaaaaaaaaaaaaaaaaaaaaaaaaaaaaaaaaaaaaaaaaaaaaaaaaaaaaaaaaaaaaaaaaaaaaaaaaaaaaaaaaaaaaaaaaaaaaaaaaaa

SEQ ID NO: 21883 - RNA, 1974 nt, Artificial Sequence
  mRNA product Design i-3 (hSL-A100) comprising derived and/or modified sequence from LASV(AV;Clade V)__CCA30315__SP-IgE_NP(2-569) (opt4)
aggagaaagcuuaccauggacuggaccuggauccuguuccugguggccgccgccaccagagugcacagcagcgccagcaaggaggugaagagcuuccuguggacccagagccugagaagagagcugagcggcuacugcagcaacaucaagcugcagguggugaaggacgcccaggcccugcugcacggccuggacuucagcgaggugagcaacgugcagagacugaugagaaagcagagaagagacgacagcgaccugaagagacugagagaccugaaccaggccgugaacaaccugguggagcugaagagcacccagcagaagagcgugcugagagugggcacccugagcagcgacgaccugcugacccuggccgccgaccuggagaagcugaagagcaaggugaccagaaccgagagaccccugagcagcggcguguacaugggcaaccugagcagccagcagcuggaccagagaagagcccugcugaaccugaucggcaugaccaacggcagccagggcagccaggccggcagagacggcguggugagagugugggacgugaagaacgccgagcugcugaacaaccaguucggcaccaugcccagccugacccuggccugccugaccaagcagggccagguggaccugaacgacguggugcaggcccugaccgaccugggccugaucuacaccgccaaguaccccaacaccagcgaccuggacagacugacccagagccaccccauccugaacaugaucgacaccaagaagagcagccugaacaucagcggcuacaacuucagccugggcgccgccgugaaggccggcgccugcaugcuggacggcggcaacaugcuggagaccaucaaggugagcccccagagcauggacggcauccugaagagcauccugaaggugaagagagcccugggcauguucgugagcgacacccccggcgagagaaaccccuacgagaacauccuguacaagaucugccugagcggcgacggcuggcccuacaucgccagcagaaccagcaucgugggcagagccugggagaacaccgugguggaccuggagaccgacggcaagccccagaagaucggcagcggcaacagcaacaagagccugcagagcgccggcuucagcgccggccugaccuacagccagcugaugacccugaaggacgccaugcugcagcuggaccccaacgccaagaccuggauggacaucgagggcagacccgaggaccccguggagguggcccuguaccagcccaucagcggcugcuacauccacuucuucagagagcccaccgaccugaagcaguucaagcaggacgccaaguacagccacggcaucgacaucgccgaccuguucgccgcccagcccggccugaccagcgccgugaucgaggcccugcccagaaacauggugaucaccugccagggcagcgaggacaucaagaagcugcuggagagccagggcagaaaggacaucaagcugaucgacaucgcccugagcaagaucgacagcagaaaguucgagaacgccgugugggaccaguacaaggaccugugccacaugcacaccggcguggugguggagaagaagaagagaggcggcaaggaggagaucaccccccacugcgcccugauggacugcaucauguucgacgccgccgugagcggcggccugaacacccuggugcugagagccgugcugcccagagacaugguguucagaaccagcacccccagaguggugcugugaggacuaguuauaagacugacuagcccgaugggccucccaacgggcccuccuccccuccuugcaccgagauuaaucaaaggcucuuuucagagccaccaaaaaaaaaaaaaaaaaaaaaaaaaaaaaaaaaaaaaaaaaaaaaaaaaaaaaaaaaaaaaaaaaaaaaaaaaaaaaaaaaaaaaaaaaaaaaaaaaaaaa

SEQ ID NO: 21884 - RNA, 1974 nt, Artificial Sequence
  mRNA product Design i-3 (hSL-A100) comprising derived and/or modified sequence from LASV(Togo/2016/7082;Clade VI)__AMR44578__SP-IgE_NP(2-569) (opt4)
aggagaaagcuuaccauggacuggaccuggauccuguuccugguggccgccgccaccagagugcacagcagcaacagcaaggaggugaagagcuuccuguggacccagagccugagaagagagcugagcggcuacugcagcaacaucaagcugcagguggugaaggacgcccaggcccugcugcacggccuggacuucagcgaggugagcaacgugcagagacugaugagaaagcagaagagagacgacggcgaccugaagagacugagagaccugaaccaggccgugaacaaccugguggagcugaagagcgugcagcagaagagcauccugagagugggcacccugaccagcgacgaccugcugacccuggccgccgaccuggagaagcugaagagcaaggugaccagaaccgagagaccccugagcagcggcguguacaugggcaaccugagcagccagcagcuggaccagagaagagcccugcugagcaugaucggcaugagcggcggcaaccagaacagccagcccaagggcgacggcguggugagagugugggacgugaagaacgccgaccugcugaacaaccaguucggcaccaugcccagccugacccuggccugccugaccaagcagggccagguggaccugaacgacgccgugcaggcccugaccgaccugggccugaucuacaccgccaaguaccccaacagcagcgaccuggacagacugagccagagccaccccauccugaacaugaucgacaccaagaagagcagccugaacaucagcggcuacaacuucagccugggcgccgccaucaagaccggcgccugcaugcuggacggcggcaacaugcuggagaccaucaaggugaccccccagaccauggacggcauccugaagagcauccugaaggugaagagaagccugggcauguucaucagcgacacccccggcgagagaaaccccuacgagaacauccuguacaagaucugccugagcggcgacggcuggcccuacaucgccagcagaaccgccaucaucggcagagccugggagaacaccgugguggaccuggagagcgacagcaagccccagaagaucggcagcaacggcagcaacaagagccugcagagcgccggcuucgcccccggccugaccuacagccagcugaugacccugaaggacagcaugcugcagcuggaccccaacgccaagaccuggaucgacaucgagggcagacccgaggaccccguggagguggcccuguuccagcccaucagcggcugcuacauccacuucuucagagagcccaccgaccugaagcaguucaagcaggacgccaaguacagccacggcaucgacgugaccgaccuguucgccgcccagcccggccugaccagcgccgugaucgaggcccugcccagaaacauggugcugaccugccagggcagcgacgacaucaagaagcugcuggacagccagggcagaagagacaucaagcugaucgacgugagccugaacaagaucgacagcagaaaguucgagaacgccgugugggaccaguacaaggaccugugccacaugcacaccggcguggugguggagaagaagaagaagggcggcaaggaggagaucaccccccacugcgcccugcuggacugcaucauguucgacgccgccgugagcggcggccugaacgccaccgugcugagagccgugcugcccagagacaugguguucagaaccagcagccccaagguggugcugugaggacuaguuauaagacugacuagcccgaugggccucccaacgggcccuccuccccuccuugcaccgagauuaaucaaaggcucuuuucagagccaccaaaaaaaaaaaaaaaaaaaaaaaaaaaaaaaaaaaaaaaaaaaaaaaaaaaaaaaaaaaaaaaaaaaaaaaaaaaaaaaaaaaaaaaaaaaaaaaaaaaaa

SEQ ID NO: 21885 - RNA, 1974 nt, Artificial Sequence
  mRNA product Design i-3 (hSL-A100) comprising derived and/or modified sequence from LASV(KAK-428;Clade n.d. (VII))__ANH09741__SP-IgE_NP(2-569) (opt4)
aggagaaagcuuaccauggacuggaccuggauccuguuccugguggccgccgccaccagagugcacagcagcaacagcaaggaggugaagagcuuccuguggacccagagccugagaagagagcugagcggcuacugcaccaacaucaagcugcagguggugaaggacgcccaggcccugcugcacggccuggacuucagcgaggugagcaacgugcagagacugaugagaaagcagaagagagacgacaacgaccugaagagacugagagaccugaaccaggccgugaacaaccugguggagcugaagagcgugcagcagaagagcgugcugaaggugggcacccugaacagcgacgaccugcugacccuggccgccgaccuggagaagcugaagagcaagguggugagaaccgagagaccccugagcagcggcguguacaugggcaaccugagcagccagcagcuggaccagagaagagcccugcugaacaugaucggcauggccggcggcagccagggcaaccagcccagcagagacggcguggugagagugugggacgugaagaacgccgaccugcugaacaaccaguucggcaccaugcccagccugacccuggccugccugaccaagcagggccagguggaccugaacgacguggugcuggcccugaccgaccugggccugaucuacaccgccaaguaccccaacagcagcgaccuggacagacugagccagaaccaccccgugcugaacaugaucgacgugaacaagagcagccugaacaucagcggcuacaacuucagccugggcgccgccgugaaggccggcgccugcaugcuggacggcggcaacaugcuggagaccaucaagaucagcccccagaccguggacggcauccugaagagcauccugaaggugaagagagcccugggcauguucgugagcgacacccccggcgagagaaaccccuacgagaacauccuguacaaggugugccugagcggcaacggcuggcccuacaucgccagcagaaccagcaucgugggcagagccugggagaacaccgugguggaccuggagagcaacaagaaccagcccaaggugggcaacaacggcagcaacaagaugcugcagagcagcggcuucgccaccggccugaccuacagccagcugaugacccugagagacagcaugcugcagcuggaccccaccgccaagaccuggaucgacaucgagggcagacccgaggaccccguggagcuggcccuguuccagcccagcagcggcugcuacauccacuucuucagagagcccaccgaccugaagcaguucaagcaggacgccaaguacagccacggcaucgacgugaacgaccuguucagcgcccagcccggccugaccagcgccgugcuggaggcccugcccagaaacauggugcugaccugccagggcagcgacgacaucagaaagcugcuggacagccaggacagaaaggacaucaagcugaucgacaucagccugagcaaggccgacgccagaaaguucgagaacgacgugugggaccaguucaaggaccugugccacaugcacaccggcaucgugguggagaagaagaagaagggcggcaagcaggagaugaccccccacugcgcccugcuggacugcaucauguucgacgccgccgugagcggcggccugaacgugcccacccugagagccgugcugcccaccgacaugguguucagaaccaucaccaccaagguggugcugugaggacuaguuauaagacugacuagcccgaugggccucccaacgggcccuccuccccuccuugcaccgagauuaaucaaaggcucuuuucagagccaccaaaaaaaaaaaaaaaaaaaaaaaaaaaaaaaaaaaaaaaaaaaaaaaaaaaaaaaaaaaaaaaaaaaaaaaaaaaaaaaaaaaaaaaaaaaaaaaaaaaaa

SEQ ID NO: 21886 - RNA, 1974 nt, Artificial Sequence; identical to SEQ ID NO: 21880
  mRNA product Design i-3 (hSL-A100) comprising derived and/or modified sequence from LASV(Pinneo-NIG-1969;Clade I)__AIT17837__SP-IgE_NP(2-569) (opt4)

SEQ ID NO: 21887 - RNA, 1974 nt, Artificial Sequence
  mRNA product Design i-3 (hSL-A100) comprising derived and/or modified sequence from LASV(ISTH0009-NIG-2011;Clade II)__AIT17405__SP-IgE_NP(2-569) (opt4)
aggagaaagcuuaccauggacuggaccuggauccuguuccugguggccgccgccaccagagugcacagcagcgugagcaaggaggugaagagcuuccuguggacccagagccugagaagagagcugagcggcuacugcagcaacaucaagcugcagguggugaaggacgcccaggcccugcugcacggccuggacuucagcgaggugagcaacgugcagagacugaugagaaagcagaagagagacgacagcgaccugaagagacugagagaccugaaccaggccgugaacaaccugguggagcugaagagcacccagcagaagagcauccugagagugggcacccugaccagcgacgaccugcugacccuggccgccgaccuggagaagcugaagagcaaggugaucagaaccgagagaccccugagcagcggcguguacaugggcaaccugagcacccagcagcuggagcagagaagagcccugcugaacaugaucggcauggugggcggcgcccagggcacccagcccggcagagacggcguggugagagugugggacgugaagaaccccgaccugcugaacaaccaguucggcaccaugcccagccugacccuggccugccugaccaagcagggccagguggaccugaacgacgccgugcuggcccugaccgaccugggccugaucuacaccgccaaguaccccaacagcagcgaccuggacagacugagccagagccaccccauccugaacaugguggacaucaagaagagcagccugaacaucagcggcuacaacuucagccugggcgccgccgugaaggccggcgccugcaugcuggacggcggcaacaugcuggagaccaucaaggugaccccccagaccauggacggcauccugaagagcauccugaaggugaagagaagccugggcauguucgugagcgacacccccggcgagagaaaccccuacgagaacauccuguacaagaucugccugagcggcgacggcuggcccuacaucgccagcagaaccagcaucgugggcagagccugggagaacaccaccguggaccuggagagcgacggcaagccccagaaggugggcagcgccggcagcaacaagagccugcagagcgccggcuuccccaccggccugaccuacagccagcugaugacccugaaggacagcaugaugcagcuggaccccagcgccaagaccuggaucgacaucgagggcagacccgaggaccccguggagaucgcccuguaccagcccaugagcggcugcuacauccacuucuucagagagcccaccgaccugaagcaguucaagcaggacgccaaguacagccacggcaucgacguggccgaccuguuccccgcccagcccggccugaccagcgccgugaucgaggcccugcccagaaacauggugcugaccugccagggcagcgacgacaucaagagacugcuggacagccagggcagaagagacaucaagcugaucgacaucgcccugagcaaggccgacagcagaagauucgagaacgccgugugggaccagugcaaggaccugugccacaugcacaccggcguggugguggagaagaagaagagaggcggcaaggaggagaucaccccccacugcgcccugauggacugcaucauguacgacgccgccgugagcggcggccugaacauccccgugcugagagccgugcugcccagagacaugguguucagaaccagcagccccaagguggugcugugaggacuaguuauaagacugacuagcccgaugggccucccaacgggcccuccuccccuccuugcaccgagauuaaucaaaggcucuuuucagagccaccaaaaaaaaaaaaaaaaaaaaaaaaaaaaaaaaaaaaaaaaaaaaaaaaaaaaaaaaaaaaaaaaaaaaaaaaaaaaaaaaaaaaaaaaaaaaaaaaaaaaa

SEQ ID NO: 21888 - RNA, 1974 nt, Artificial Sequence
  mRNA product Design i-3 (hSL-A100) comprising derived and/or modified sequence from LASV(ISTH2010-NIG-2012;Clade II)__AIT17483__SP-IgE_NP(2-569) (opt4)
aggagaaagcuuaccauggacuggaccuggauccuguuccugguggccgccgccaccagagugcacagcagcgccagcaaggaggugaagagcuuccuguggacccagagccugagaagagagcugagcggcuacugcagcaacaucaagcugcagguggugaaggacgcccaggcccugcugcacggccuggacuucagcgaggugagcaacgugcagagacugaugagaaagcagaagagagacgacagcgaccugaagagacugagagaccugaaccaggccgugaacaaccugguggagcugaagagcacccagcagaagagcauccugagagugggcacccugaccagcgacgaccugcugacccuggccgccgaccuggagaagcugaagagcaaggugaucagaaccgagagaccccugagcagcggcguguacaugggcaaccugagcacccagcagcuggagcagagaagagcccugcugaaccugaucggcauggugggcggcgcccagggcacccagcccggcagagacggcguggugagagugugggacgugaagaaccccgaccugcugaacaaccaguucggcaccaugcccagccugacccuggccugccugaccaagcagggccagguggaccugaacgacgccgugcuggcccugaccgaccugggccugaucuacaccgccaaguaccccaacagcagcgaccuggacagacugagccagagccaccccauccugaacaugguggacaccaagaagagcagccugaacaucagcggcuucaacuucagccugggcgccgccgugaaggccggcgccugcaugcuggacggcggcaacaugcuggagaccaucaaggugaccccccagaccauggacggcauccugaagagcauccugaaggugaagaagagccugggcauguucgugagcgacacccccggcgagagaaaccccuacgagaacauccuguacaagaucugccugagcggcgacggcuggcccuacaucgccagcagaaccagcaucgugggcagagccugggagaacaccaccguggaccuggagagcgacggcaagccccacaaggugggcaccgccggcagcaacaagagccugcagagcgccggcuuccccaccggccugaccuacagccagcugaugacccugaaggacagcaugaugcagcuggaccccagcgccaagaccuggaucgacaucgagggcagacccgaggaccccguggagaucgcccuguaccagcccaugagcggcugcuacauccacuucuucagagagcccaccgaccugaagcaguucaagcaggacgccaaguacagccacggcaucgacguggccgaccuguuccccgcccagcccggccugaccagcgccgugaucgaggcccugcccagaaacauggugcugaccugccagggcagcgacgacaucaagagacugcuggacagccagggcagaagagacaucaagcugaucgacaucgcccugagcaaggccgacagcagaagauucgagaacgccgugugggaccagugcaaggaccugugccacaugcacaccggcguggugguggagaagaagaagagaggcggcaaggaggagaucaccccccacugcgcccugauggacugcaucauguacgacgccgccgugagcggcggccugaacauccccgugcugagagccgugcugcccagagacaugguguucagaaccagcagccccaagguggugcugugaggacuaguuauaagacugacuagcccgaugggccucccaacgggcccuccuccccuccuugcaccgagauuaaucaaaggcucuuuucagagccaccaaaaaaaaaaaaaaaaaaaaaaaaaaaaaaaaaaaaaaaaaaaaaaaaaaaaaaaaaaaaaaaaaaaaaaaaaaaaaaaaaaaaaaaaaaaaaaaaaaaaa

SEQ ID NO: 21889 - RNA, 1974 nt, Artificial Sequence
  mRNA product Design i-3 (hSL-A100) comprising derived and/or modified sequence from LASV(Lassa virus/H.sapiens-wt/NGA/2015/ISTH_0543;Clade II)__AVO03640__SP-IgE_NP(2-569) (opt4)
aggagaaagcuuaccauggacuggaccuggauccuguuccugguggccgccgccaccagagugcacagcagcgccagcaaggaggugaagagcuuccuguggacccagagccugagaagagagcugagcggcuacugcagcaacaucaagcugcagguggugaaggacgcccaggcccugcugcacggccuggacuucagcgaggugagcaacgugcagagacugaugagaaagcagaagagagacgacagcgaccugaagagacugagagaccugaaccaggccgugaacaaccugguggagcugaagagcacccagcagaagagcauccugagagugggcacccugaccagcgacgaccugcugacccuggccgccgaccuggagaagcugaagagcaaggugaucagaaccgagagaccccugagcagcggcguguacaugggcaaccugagcacccagcagcuggagcagagaagagcccugcugaacaugaucggcauggugggcggcgcccagggcacccagcccggcagagacggcguggugagagugugggacgugaagaaccccgaccugcugaacaaccaguucggcaccaugcccagccugacccuggccugccugaccaagcagggccagguggaccugaacgacgccgugcuggcccugaccgaccugggccugaucuacaccgccaaguaccccaacagcagcgaccuggacagacugagccagagccaccccauccugaacaugguggacaccaagaagagcagccugaacaucagcggcuacaacuucagccugggcgccgccgugaaggccggcgccugcaugcuggacggcggcaacaugcuggagaccaucaaggugaccccccagaccauggacggcauccugaagagcauccugaaggugaagaagagccugggcauguucgugagcgacacccccggcgagagaaaccccuacgagaacauccuguacaagaucugccugagcggcgacggcuggcccuacaucgccagcagaaccagcaucgugggcagagccugggagaacaccaccguggaccuggagagcgacggcaagccccagaaggugggcagcgccggcagcaacaagagccugcagagcgccggcuuccccaccggccugaccuacagccagcugaugacccugaaggacagcaugaugcagcuggaccccagcgccaagaccuggaucgacaucgagggcagacccgaggaccccguggagaucgcccuguaccagcccaugagcggcugcuacauccacuucuucagagagcccaccgaccugaagcaguucaagcaggacgccaaguacagccacggcaucgacguggccgaccuguuccccgcccagcccggccugaccagcgccgugaucgaggcccugcccagaaacauggugcugaccugccagggcagcgacgacaucaagagacugcuggacagccagggcagaaaggacaucaagcugaucgacaucgcccugagcaaggccgacagcagaagauucgagaacgccgugugggaccagugcaaggaccugugccacaugcacaccggcguggugguggagaagaagaagagaggcggcaaggaggagaucaccccccacugcgcccugauggacugcaucauguacgacgccgccgugagcggcggccugaacauccccgugcugagagccgugcugcccagagacaugguguucagaaccagcagccccaagguggugcugugaggacuaguuauaagacugacuagcccgaugggccucccaacgggcccuccuccccuccuugcaccgagauuaaucaaaggcucuuuucagagccaccaaaaaaaaaaaaaaaaaaaaaaaaaaaaaaaaaaaaaaaaaaaaaaaaaaaaaaaaaaaaaaaaaaaaaaaaaaaaaaaaaaaaaaaaaaaaaaaaaaaaa

SEQ ID NO: 21890 - RNA, 1974 nt, Artificial Sequence
  mRNA product Design i-3 (hSL-A100) comprising derived and/or modified sequence from LASV(Lassa virus/H.sapiens-wt/NGA/2016/ISTH_0009;Clade II)__AVO03572__SP-IgE_NP(2-569) (opt4)
aggagaaagcuuaccauggacuggaccuggauccuguuccugguggccgccgccaccagagugcacagcagcgccagcaaggaggugaagagcuuccuguggacccagagccugagaagagagcugagcggcuacugcagcaacaucaagcugcagguggugaaggacgcccaggcccugcugcacggccuggacuucagcgaggugagcaacgugcagagacugaugagaaagcagaagagagacgacagcgaccugaagagacugagagaccugaaccaggccgugaacaaccugguggagcugaagagcacccagcagaagagcauccugagagugggcacccugaccagcgacgaccugcugacccuggccgccgaccuggagaagcugaagagcaaggugaucagaaccgagagaccccugagcagcggcguguacaugggcaaccugagcacccagcagcuggagcagagaagagcccugcugaacaugaucggcauggugggcggcgcccagggcacccagcccggcagagacggcguggugagagugugggacgugaagaaccccgaccugcugaacaaccaguucggcaccaugcccagccugacccuggccugccugaccaagcagggccagguggaccugaacgacgccgugcuggcccugaccgaccugggccugaucuacaccgccaaguaccccaacagcagcgaccuggacagacugagccagagccaccccauccugaacaugguggacaccaagaagagcagccugaacaucagcggcuacaacuucagccugggcgccgccgugaaggccggcgccugcaugcuggacggcggcaacaugcuggagaccaucaaggugaccccccagaccauggacggcauccugaagagcauccugaaggugaagaagagccugggcauguucgugagcgacacccccggcgagagaaaccccuacgagaacauccuguacaagaucugccugagcggcgacggcuggcccuacaucgccagcagaaccagcaucgugggcagagccugggagaacaccaccguggaccuggagagcgacggcaagccccagaaggugggcagcgccggcagcaacaagagccugcagagcgccggcuuccccaccggccugaccuacagccagcugaugacccugaaggacagcaugaugcagcuggaccccagcgccaagaccuggaucgacaucgagggcagacccgaggaccccguggagaucgcccuguaccagcccaugagcggcugcuacauccacuucuucagagagcccaccgaccugaagcaguucaagcaggacgccaaguacagccacggcaucgacguggccgaccuguuccccgcccagcccggccugaccagcgccgugaucgaggcccugcccagaaacauggugcugaccugccagggcagcgacgacaucaagagacugcuggacagccagggcagaagagacaucaagcugaucgacaucgcccugagcaaggccgacagcagaagauucgagaacgccgugugggaccagugcaaggaccugugccacaugcacaccggcguggugguggagaagaagaagagaggcggcaaggaggagaucaccccccacugcgcccugauggacugcaucauguacgacgccgccgugagcggcggccugaacauccccgugcugagagccgugcugcccagagacaugguguucagaaccagcagccccaagguggugcugugaggacuaguuauaagacugacuagcccgaugggccucccaacgggcccuccuccccuccuugcaccgagauuaaucaaaggcucuuuucagagccaccaaaaaaaaaaaaaaaaaaaaaaaaaaaaaaaaaaaaaaaaaaaaaaaaaaaaaaaaaaaaaaaaaaaaaaaaaaaaaaaaaaaaaaaaaaaaaaaaaaaaa

SEQ ID NO: 21891 - RNA, 1974 nt, Artificial Sequence
  mRNA product Design i-3 (hSL-A100) comprising derived and/or modified sequence from LASV(Lassa virus/H.sapiens-wt/NGA/2016/ISTH_0017;Clade II)__AVO03568__SP-IgE_NP(2-569) (opt4)
aggagaaagcuuaccauggacuggaccuggauccuguuccugguggccgccgccaccagagugcacagcagcgccagcaaggaggugaagagcuuccuguggacccagagccugagaagagagcugagcggcuacugcagcagcaucaagcugcagguggugaaggacgcccaggcccugcugcacggccuggacuucagcgaggugagcaacgugcagagacugaugagaaagcagaagagagacgacagcgaccugaagagacugagagaccugaaccaggccgugaacaaccugguggagcugaagagcacccagcagaagagcauccugagagugggcacccugaccagcgacgaccugcugacccuggccgccgaccuggagaagcugaagagcaaggugaucagaaccgagagaccccugagcagcggcguguacaugggcaaccugagcacccagcagcuggagcagagaagagcccugcugaacaugaucggcauggccggcggcgcccagggcacccagcccggcagagacggcguggugagagugugggacgugaagaaccccgaccugcugaacaaccaguucggcaccaugcccagccugacccuggccugccugaccaagcagggccagguggaccugaacgacgccgugcuggcccugaccgaccugggccugaucuacaccgccaaguaccccaacagcagcgaccuggacagacugagccagagccaccccauccugaacaugguggacaccaagaagagcagccugaacaucagcggcuacaacuucagccugggcgccgccgugaaggccggcgccugcaugcuggacggcggcaacaugcuggagaccaucaaggugaccccccagaccauggacggcauccugaagagcauccugaaggugaagagaagccugggcauguucgugagcgacgcccccggcgagagaaaccccuacgagaacauccuguacaagaucugccugagcggcgacggcuggcccuacaucgccagcagaaccagcaucgugggcagagccugggagaacaccaccguggaccuggagagcgacggcaagccccagaaggugggcgccaccggcagcaacaagagccugcagagcgccggcuuccccaccggccugaccuacagccagcugaugacccugaaggacagcaugaugcagcuggaccccagcgccaagaccuggaucgacaucgagggcagacccgaggaccccguggagguggcccuguaccagcccgugagcggcugcuacauccacuucuucagagagcccaccgaccugaagcaguucaagcaggacgccaaguacagccacggcaucgacguggccgaccuguuccccgcccagcccggccugaccagcgccgugaucgaggcccugcccagaaacauggugcugaccugccagggcagcgacgacaucaagaagcugcuggacagccagggcagaaaggacaucaagcugaucgacaucgcccugagcaaggccgacagcagaagauucgagaacgccgugugggaccagugcaaggaccugugccacaugcacaccggcguggugguggagaagaagaagagaggcggcaaggaggagaucaccccccacugcgcccugauggacugcaucauguacgacgccgccgugagcggcggccugaacauccccgugcugagagccgugcugcccagagacaugguguucagaaccagcagccccaagguggugcugugaggacuaguuauaagacugacuagcccgaugggccucccaacgggcccuccuccccuccuugcaccgagauuaaucaaaggcucuuuucagagccaccaaaaaaaaaaaaaaaaaaaaaaaaaaaaaaaaaaaaaaaaaaaaaaaaaaaaaaaaaaaaaaaaaaaaaaaaaaaaaaaaaaaaaaaaaaaaaaaaaaaaa

SEQ ID NO: 21892 - RNA, 1974 nt, Artificial Sequence
  mRNA product Design i-3 (hSL-A100) comprising derived and/or modified sequence from LASV(Lassa virus/H.sapiens-wt/NGA/2018/ISTH_0959;Clade II)__AVV65100__SP-IgE_NP(2-569) (opt4)
aggagaaagcuuaccauggacuggaccuggauccuguuccugguggccgccgccaccagagugcacagcagcgccagcaaggaggugaagagcuuccuguggacccagagccugagaagagagcugagcggcuacugcagcaacaucaagcugcagguggugaaggacgcccaggcccugcugcacggccuggacuucagcgaggugagcaacgugcagagacugaugagaaagcagaagagagacgacagcgaccugaagagacugagagaccugaaccaggccgugaacaaccugguggagcugaagagcacccagcagaagagcauccugagagugggcacccugaccagcgacgaccugcugacccuggccgccgaccuggagaagcugaagagcaaggugaucagaaccgagagaccccugagcagcggcguguacaugggcaaccugagcacccagcagcuggagcagagaagagcccugcugaaccugaucggcauggugggcggcgcccagggcacccagcccggcagagacggcguggugagagugugggacgugaagaaccccgaccugcugaacaaccaguucggcaccaugcccagccugacccuggccugccugaccaagcagggccagguggaccugaacgacguggugcuggcccugaccgaccugggccugaucuacaccgccaaguaccccaacagcagcgaccuggacagacugagccagagccaccccauccugaacaugguggacaccaagaagagcagccugaacaucagcggcuucaacuucagccugggcgccgccgugaaggccggcgccugcaugcuggacggcggcaacaugcuggagaccaucaaggugaccccccagaccauggacggcauccugaagagcauccugaaggugaagaagagccugggcauguucgugagcgacacccccggcgagagaaaccccuacgagaacauccuguacaagaucugccugagcggcgacggcuggcccuacaucgccagcagaaccagcaucgugggcagagccugggagaacaccaccguggaccuggagagcgacggcaagccccacaaggugggcaccgccggcagcaacaagagccugcagagcgccggcuuccccaccggccugaccuacagccagcugaugacccugaaggacagcaugaugcagcuggaccccagcgccaagaccuggaucgacaucgagggcagacccgaggaccccguggagaucgcccuguaccagcccaugagcggcugcuacauccacuucuucagagagcccaccgaccugaagcaguucaagcaggacgccaaguacagccacggcaucgacguggccgaccuguuccccgcccagcccggccugaccagcgccgugaucgaggcccugcccagaaacauggugcugaccugccagggcagcgacgacaucaagagacugcuggacagccagggcagaaaggacaucaagcugaucgacaucgcccugagcaagaccgacagcagaagauucgagaacgccgugugggaccagugcaaggaccugugccacaugcacaccggcguggugguggagaagaagaagagaggcggcaaggaggagaucaccccccacugcgcccugauggacugcaucauguacgacgccgccgugagcggcggccugaacauccccgugcugagagccgugcugcccagagacaugguguucagaaccagcagccccaagguggugcugugaggacuaguuauaagacugacuagcccgaugggccucccaacgggcccuccuccccuccuugcaccgagauuaaucaaaggcucuuuucagagccaccaaaaaaaaaaaaaaaaaaaaaaaaaaaaaaaaaaaaaaaaaaaaaaaaaaaaaaaaaaaaaaaaaaaaaaaaaaaaaaaaaaaaaaaaaaaaaaaaaaaaa

SEQ ID NO: 21893 - RNA, 1974 nt, Artificial Sequence
  mRNA product Design i-3 (hSL-A100) comprising derived and/or modified sequence from LASV(LASV003-NIG-2008;Clade II)__AIT17581__SP-IgE_NP(2-569) (opt4)
aggagaaagcuuaccauggacuggaccuggauccuguuccugguggccgccgccaccagagugcacagcagcgccagcaaggaggugaagagcuuccuguggacccagagccugagaagagagcugagcggcuacugcagcagcaucaagcugcagguggugaaggacgcccaggcccugcugcacggccuggacuucagcgaggugagcaacgugcagagacugaugagaaagcagaagagagacgacagcgaccugaagagacugagagaccugaaccaggccgugaacaaccugguggagcugaagagcacccagcagaagagcgugcugagagugggcacccugaccagcgacgaccugcugacccuggccgccgaccuggagaagcugaagagcaaggugaucagaaccgagagaccccugagcagcggcguguacaugggcaaccugagcgcccagcagcuggagcagagaagaacccugcugaacaugaucggcauggugggcggcgcccagggcacccagcccggcagagacggcguggugagagugugggacgugaagaaccccgaccugcugaacaaccaguucggcaccaugcccagccugacccuggccugccugaccaagcagggccagguggaccugaacgacguggugcuggcccugaccgaccugggccugaucuacaccgccaaguaccccaacagcagcgaccuggacagacugagccagagccaccccauccugagcaugguggacaccaagaagagcagccugaacaucagcggcuacaacuucagccugggcgccgccgugaaggccggcgccugcaugcuggacggcggcaacaugcuggagaccaucaaggugaccccccagaccauggacggcauccugaagagcauccugaaggugaagaagagccugggcauguucgugagcgacacccccggcgagagaaaccccuacgagaacauccuguacaagaucugccugagcggcgacggcuggcccuacaucgccagcagaaccagcaucgugggcagagccugggagaacaccaccguggaccuggagagcgacggcaagccccagaaggugggcaccgccggcagcaacaagagccugcagagcgccggcuuccccaccggccugaccuacagccagcugaugacccugaaggacagcaugaugcagcuggaccccagcgccaagaccuggaucgacaucgagggcagacccgaggaccccguggagaucgcccuguaccagcccaugagcggcugcuacauccacuucuucagagagcccaccgaccugaagcaguucaagcaggacgccaaguacagccacggcaucgacgugaccgaccuguuccccgcccagcccggccugaccagcgccgugaucgaggcccugcccagaaacauggugcugaccugccagggcagcgacgacaucaagagacugcuggacagccagggcagaagagacaucaagcugaucgacaucgcccugagcaaggccgacagcagaagauucgagaacgccgugugggaccagugcaaggaccugugccacaugcacaccggcguggugguggagaagaagaagagaggcggcaaggaggagaucaccccccacugcgcccugauggacugcaucauguacgacgccgccgugagcggcggccugaacauccccgugcugagagccgugcugcccagagacaugguguucagaaccagcagccccaagguggugcugugaggacuaguuauaagacugacuagcccgaugggccucccaacgggcccuccuccccuccuugcaccgagauuaaucaaaggcucuuuucagagccaccaaaaaaaaaaaaaaaaaaaaaaaaaaaaaaaaaaaaaaaaaaaaaaaaaaaaaaaaaaaaaaaaaaaaaaaaaaaaaaaaaaaaaaaaaaaaaaaaaaaaa

SEQ ID NO: 21894 - RNA, 1974 nt, Artificial Sequence
  mRNA product Design i-3 (hSL-A100) comprising derived and/or modified sequence from LASV(LASV035-NIG-2009;Clade II)__AIT17589__SP-IgE_NP(2-569) (opt4)
aggagaaagcuuaccauggacuggaccuggauccuguuccugguggccgccgccaccagagugcacagcagcgccagcaaggaggugaagagcuuccuguggacccagagccugagaagagagcugagcggcuacugcagcagcaucaagcugcagguggugaaggacgcccaggcccugcugcacggccuggacuucagcgaggugagcaacgugcagagacugaugagaaagcagaagagagacgacagcgaccugaagagacugagagaccugaaccaggccgugaacaaccugguggagcugaagagcacccagcagaagagcauccugagagugggcacccugaccagcgacgaccugcugacccuggccgccgaccuggagaagcugaagagcaaggugaucagaaccgagagaccccugagcagcggcguguacaugggcaaccugagcgcccagcagcuggagcagagaagagcccugcugaacaugaucggcauggugggcggcgcccagggcacccagcccggcagagacggcguggugagagugugggacgugaagaaccccgaccugcugaacaaccaguucggcaccaugcccagccugacccuggccugccugaccaagcagggccagguggaccugaacgacgccgugcuggcccugaccgaccugggccugaucuacaccgccaaguaccccaacagcagcgaccuggacagacugagccagagccaccccauccugaacaugguggacaccaagaagagcagccugaacaucagcggcuacaacuucagccugggcgccgccgugaaggccggcgccugcaugcuggacggcggcaacaugcuggagaccaucaaggugaccccccagaccauggacggcauccugaagagcauccugaaggugaagagaagccugggcauguucgugagcgacacccccggcgagagaaaccccuacgagaacauccuguacaagaucugccugagcggcgacggcuggcccuacaucgccagcagaaccagcaucgugggcagagccugggagaacaccaccguggaccuggagagcgacggcaagccccagaaggugggcaccaccggcagcaacaagagccugcagagcgccggcuuccccaccggccugaccuacagccagcugaugacccugaaggacagcaugaugcagcuggaccccagcgccaagaccuggaucgacaucgagggcagacccgaggaccccguggagaucgcccuguaccagcccaugagcggcugcuacauccacuucuucagagagcccaccgaccugaagcaguucaagcaggacgccaaguacagccacggcaucgacguggccgaccuguuccccgcccagcccggccugaccagcgccgugaucgaggcccugcccagaaacauggugcugaccugccagggcagcgacgacaucaagaagcugcuggacagccagggcagaagagacaucaagcugaucgacaucgcccugagcaaggccgacagcagaaaguucgagaacgccgugugggaccagugcaaggaccugugccacaugcacaccggcguggugguggagaagaagaagagaggcggcaaggaggagaucaccccccacugcgcccugauggacugcaucauguacgacgccgccgugagcggcggccugaacauccccgugcugagagccgugcugcccagagacaugguguucagaaccagcagccccaagguggugcugugaggacuaguuauaagacugacuagcccgaugggccucccaacgggcccuccuccccuccuugcaccgagauuaaucaaaggcucuuuucagagccaccaaaaaaaaaaaaaaaaaaaaaaaaaaaaaaaaaaaaaaaaaaaaaaaaaaaaaaaaaaaaaaaaaaaaaaaaaaaaaaaaaaaaaaaaaaaaaaaaaaaaa

SEQ ID NO: 21895 - RNA, 1974 nt, Artificial Sequence
  mRNA product Design i-3 (hSL-A100) comprising derived and/or modified sequence from LASV(LASV1000-NIG-2009;Clade II)__AIT17783__SP-IgE_NP(2-569) (opt4)
aggagaaagcuuaccauggacuggaccuggauccuguuccugguggccgccgccaccagagugcacagcagcgccagcaaggaggugaagagcuuccuguggacccagagccugagaagagagcugagcggcuacugcagcaacaucaagcugcagguggugaaggacgcccaggcccugcugcacggccuggacuucagcgaggugagcaacgugcagagacugaugagaaagcagaagagagacgacagcgaccugaagagacugagagaccugaaccaggccgugaacaaccugguggagcugaagagcacccagcagaagagcauccugagagugggcacccugaccagcgacgaccugcugacccuggccgccgaccuggagaagcugaagagcaaggugaucagaaccgagagaccccugagcagcggcguguacaugggcaaccugagcacccagcagcuggagcagagaagagcccugcugaacaugaucggcauggugggcggcgcccagggcacccagcccggcagagacggcguggugagagugugggacgugaagaaccccgaccugcugaacaaccaguucggcaccaugcccagccugacccuggccugccugaccaagcagggccagguggaccugaacgacguggugcuggcccugaccgaccugggccugaucuacaccgccaaguaccccaacagcagcgaccuggacagacugagccagagccaccccauccugaacaugguggacaccaagaagagcagccugaacaucagcggcuacaacuucagccugggcgccgccgugaaggccggcgccugcaugcuggacggcggcaacaugcuggagaccaucaaggugaccccccagaccauggacggcauccugaagagcauccugaaggugaagaagagccugggcauguucgugagcgacacccccggcgagagaaaccccuacgagaacauccuguacaagaucugccugagcggcgacggcuggcccuacaucgccagcagaaccagcaucgugggcagagccugggagaacaccaccguggaccuggagagcgacggcaagccccagaaggugggcaccgccggcagcaacaagagccugcagagcgccggcuuccccaccggccugaccuacagccagcugaugacccugaaggacagcaugaugcagcuggaccccagcgccaagaccuggaucgacaucgagggcagacccgaggaccccguggagaucgcccuguaccagcccgugagcggcugcuacauccacuucuucagagagcccaccgaccugaagcaguucaagcaggacgccaaguacagccacggcaucgacguggccgaccuguuccccgcccagcccggccugaccagcgccgugaucgaggcccugcccagaaacauggugcugaccugccagggcagcgacgacaucaagagacugcuggacagccagggcagaagagacaucaagcugaucgacaucgcccugagcaaggccgacagcagaagauucgagaacgccgugugggaccagugcaaggaccugugccacaugcacaccggcguggugguggagaagaagaagagaggcggcaaggaggagaucaccccccacugcgcccugauggacugcaucauguacgacgccgccgugagcggcggccugaacauccccgugcugagagccgugcugcccagagacaugguguucagaaccagcagccccaagguggugcugugaggacuaguuauaagacugacuagcccgaugggccucccaacgggcccuccuccccuccuugcaccgagauuaaucaaaggcucuuuucagagccaccaaaaaaaaaaaaaaaaaaaaaaaaaaaaaaaaaaaaaaaaaaaaaaaaaaaaaaaaaaaaaaaaaaaaaaaaaaaaaaaaaaaaaaaaaaaaaaaaaaaaa

SEQ ID NO: 21896 - RNA, 1974 nt, Artificial Sequence
  mRNA product Design i-3 (hSL-A100) comprising derived and/or modified sequence from LASV(LASV221-NIG-2010;Clade II)__AIT17625__SP-IgE_NP(2-569) (opt4)
aggagaaagcuuaccauggacuggaccuggauccuguuccugguggccgccgccaccagagugcacagcagcgccagcaaggaggugaagagcuuccuguggacccagagccugagaagagagcugagcggcuacugcagcagcaucaagcugcagguggugaaggacgcccaggcccugcugcacggccuggacuucagcgaggugagcaacgugcagagacugaugagaaagcagagaagagacgacagcgaccugaagagacugagagaccugaaccaggccgugaacaaccugguggagcugaagagcacccagcagaagagcauccugagagugggcacccugaccagcgacgaccugcugacccuggccgccgaccuggagaagcugaagagcaaggugaucagaaccgagagaccccugagcagcggcguguacaugggcaaccugagcacccagcagcuggagcagagaagagcccugcugaacaugaucggcauggugggcggcgcccagggcacccagcccggcagagacggcguggugagagugugggacgugaagaaccccgaccugcugaacaaccaguucggcaccaugcccagccugacccuggccugccugaccaagcagggccagguggaccugaacgacgccgugcuggcccugaccgaccugggccugaucuacaccgccaaguaccccaacagcagcgaccuggacagacugagccagagccaccccauccugaacaugguggacaccaagaagagcagccugaacaucagcggcuacaacuucagccugggcgccgccgugaaggccggcgccugcaugcuggacggcggcaacaugcuggagaccaucaaggugaccccccagaccguggacggcauccugaagagcauccugaaggugaagagaagccugggcauguucgugagcgacacccccggcgagagaaaccccuacgagaacauccuguacaagaucugccugagcggcgacggcuggcccuacaucgccagcagaaccagcaucgugggcagagccugggagaacaccaccguggaccuggagagcgacggcaagccccagaaggugggcaccgccggcagcaacaagagccugcagagcgccggcuuccccaccggccugaccuacagccagcugaugacccugaaggacagcaugaugcagcuggaccccagcgccaagaccuggaucgacaucgagggcagacccgaggaccccguggagaucgcccuguaccagcccaugagcggcugcuacauccacuucuucagagagcccaccgaccugaagcaguucaagcaggacgccaaguacagccacggcaucgacguggccgaccuguuccccgcccagcccggccugaccagcgccgugaucgaggcccugcccagaaacauggugcugaccugccagggcagcgacgacaucaagagacugcuggacagccagggcagaagagacaucaagcugaucgacaucgcccugagcaaggccgacagcagaaaguucgagaacgccgugugggaccagugcaaggaccugugccacaugcacaccggcguggugguggagaagaagaagagaggcggcaaggaggagaucaccccccacugcgcccugauggacugcaucauguacgacgccgccgugagcggcggccugaacauccccgugcugagagccgugcugcccagagacaugguguucagaaccagcagccccaagguggugcugugaggacuaguuauaagacugacuagcccgaugggccucccaacgggcccuccuccccuccuugcaccgagauuaaucaaaggcucuuuucagagccaccaaaaaaaaaaaaaaaaaaaaaaaaaaaaaaaaaaaaaaaaaaaaaaaaaaaaaaaaaaaaaaaaaaaaaaaaaaaaaaaaaaaaaaaaaaaaaaaaaaaaa

SEQ ID NO: 21897 - RNA, 1974 nt, Artificial Sequence
  mRNA product Design i-3 (hSL-A100) comprising derived and/or modified sequence from LASV(LASV237-NIG-2010;Clade II)__AIT17639__SP-IgE_NP(2-569) (opt4)
aggagaaagcuuaccauggacuggaccuggauccuguuccugguggccgccgccaccagagugcacagcagcgccagcaaggaggugaagagcuuccuguggacccagagccugagaagagagcugagcggcuacugcagcaacaucaagcugcagguggugaaggacgcccaggcccugcugcacggccuggacuucagcgaggugagcaacgugcagagacugaugagaaagcagaagagagacgacagcgaccugaagagacugagagaccugaaccaggccgugaacaaccugguggagcugaagagcacccagcagaagagcauccugagagugggcacccugaccagcgacgaccugcugacccuggccgccgaccuggagaagcugaagagcaaggugaucagaaccgagagaccccugagcagcggcguguacaugggcaaccugagcacccagcagcuggagcagagaagagcccugcugaacaugaucggcauggugggcggcgcccagggcacccagcccggcagagacggcguggugagagugugggacgugaagaaccccgaccugcugaacaaccaguucggcaccaugcccagccugacccuggccugccugaccaagcagggccagguggaccugaacgacgccgugcuggcccugaccgaccugggccugaucuacaccgccaaguaccccaacagcagcgaccuggacagacugagccagagccaccccauccugaacaugguggacaucaagaagagcagccugaacaucagcggcuacaacuucagccugggcgccgccgugaaggccggcgccugcaugcuggacggcggcaacaugcuggagaccaucaaggugaccccccagaccauggacggcauccugaagagcauccugaaggugaagagaagccugggcauguucgugagcgacacccccggcgagagaaaccccuacgagaacauccuguacaagaucugccugagcggcgacggcuggcccuacaucgccagcagaaccagcaucgugggcagagccugggagaacaccaccguggaccuggagagcgacggcaagccccagaaggugggcagcgccggcagcaacaagagccugcagagcgccggcuuccccaccggccugaccuacagccagcugaugacccugaaggacagcaugaugcagcuggaccccagcgccaagaccuggaucgacaucgagggcagacccgaggaccccguggagaucgcccuguaccagcccaugagcggcugcuacauccacuucuucagagagcccaccgaccugaagcaguucaagcaggacgccaaguacagccacggcaucgacguggccgaccuguuccccgcccagcccggccugaccagcgccgugaucgaggcccugcccagaaacauggugcugaccugccagggcagcgacgacaucaagagacugcuggacagccagggcagaagagacaucaagcugaucgacaucgcccugagcaaggccgacagcagaagauucgagaacgccgugugggaccagugcaaggaccugugccacaugcacaccggcguggugguggagaagaagaagagaggcggcaaggaggagaucaccccccacugcgcccugauggacugcaucauguacgacgccgccgugagcggcggccugaacauccccgugcugagagccgugcugcccagagacaugguguucagaaccagcagccccaagguggugcugugaggacuaguuauaagacugacuagcccgaugggccucccaacgggcccuccuccccuccuugcaccgagauuaaucaaaggcucuuuucagagccaccaaaaaaaaaaaaaaaaaaaaaaaaaaaaaaaaaaaaaaaaaaaaaaaaaaaaaaaaaaaaaaaaaaaaaaaaaaaaaaaaaaaaaaaaaaaaaaaaaaaaa

SEQ ID NO: 21898 - RNA, 1974 nt, Artificial Sequence
  mRNA product Design i-3 (hSL-A100) comprising derived and/or modified sequence from LASV(LASV253-NIG-2011;Clade II)__AIT17671__SP-IgE_NP(2-569) (opt4)
aggagaaagcuuaccauggacuggaccuggauccuguuccugguggccgccgccaccagagugcacagcagcgccagcaaggaggugaagagcuuccuguggacccagagccugagaagagagcugagcggcuacugcagcagcaucaagcugcagguggugaaggacgcccaggcccugcugcacggccuggacuucagcgaggugagcaacgugcagagacugaugagaaagcagaagagagacgacagcgaccugaagagacugagagaccugaaccaggccgugaacaaccugguggagcugaagagcacccagcagaagagcgugcugagagugggcacccugaccagcgacgaccugcugacccuggccgccgaccuggagaagcugaagagcaaggugaucagaaccgagagaccccugagcagcggcguguacaugggcaaccugagcacccagcagcuggagcagagaagagcccugcugaacaugaucggcauggugggcggcgcccagggcacccagcccggcagagacggcguggugagagugugggacgugaagaaccccgaccugcugaacaaccaguucggcaccaugcccagccugacccuggccugccugaccaagcagggccagguggaccugaacgacguggugcuggcccugaccgaccugggccugaucuacaccgccaaguaccccaacagcagcgaccuggacagacugagccagagccaccccauccugaacaugguggacaccaagaagagcagccugaacaucagcggcuacaacuucagccugggcgccgccgugaaggccggcgccugcaugcuggacggcggcaacaugcuggagaccaucaaggugaccccccagaccauggacggcauccugaagagcauccugaaggugaagaagagccugggcauguucgugagcgacacccccggcgagagaaaccccuacgagaacauccuguacaagaucugccugagcggcgacggcuggcccuacaucgccagcagaaccagcaucgugggcagagccugggagaacaccaccguggaccuggagagcgacggcaagccccagaaggugggcaccgccggcagcaacaagagccugcagagcgccggcuuccccaccggccugaccuacagccagcugaugacccugaaggacagcaugaugcagcuggaccccagcgccaagaccuggaucgacaucgagggcagacccgaggaccccguggagaucgcccuguaccagcccaugagcggcugcuacauccacuucuucagagagcccaccgaccugaagcaguucaagcaggacgccaaguacagccacggcaucgacgugaccgaccuguuccccgcccagcccggccugaccagcgccgugaucgaggcccugcccagaaacauggugcugaccugccagggcagcgacgacaucaagagacugcuggacagccagggcagaagagacaucaagcugaucgacaucgcccugagcaaggccgacagcagaagauucgagaacgccgugugggaccagugcaaggaccugugccacaugcacaccggcguggugguggagaagaagaagagaggcggcaaggaggagaucaccccccacugcgcccugauggacugcaucauguacgacgccgccgugagcggcggccugaacauccccgugcugagagccgugcugcccagagacaugguguucagaaccagcagccccaagguggugcugugaggacuaguuauaagacugacuagcccgaugggccucccaacgggcccuccuccccuccuugcaccgagauuaaucaaaggcucuuuucagagccaccaaaaaaaaaaaaaaaaaaaaaaaaaaaaaaaaaaaaaaaaaaaaaaaaaaaaaaaaaaaaaaaaaaaaaaaaaaaaaaaaaaaaaaaaaaaaaaaaaaaaa

SEQ ID NO: 21899 - RNA, 1974 nt, Artificial Sequence
  mRNA product Design i-3 (hSL-A100) comprising derived and/or modified sequence from LASV(LASV254-NIG-2011;Clade II)__AIT17675__SP-IgE_NP(2-569) (opt4)
aggagaaagcuuaccauggacuggaccuggauccuguuccugguggccgccgccaccagagugcacagcagcgccagcaaggaggugaagagcuuccuguggacccagagccugagaagagagcugagcggcuacugcagcagcaucaagcugcagguggugaaggacgcccaggcccugcugcacggccuggacuucagcgaggugagcaacgugcagagacugaugagaaagcagaagagagacgacagcgaccugaagagacugagagaccugaaccaggccgugaacaaccugguggagcugaagagcacccagcagaagagcgugcugagagugggcacccugaccagcgacgaccugcugacccuggccgccgaccuggagaagcugaagagcaaggugaucagaaccgagagaccccugagcagcggcguguacaugggcaaccugagcacccagcagcuggagcagagaagagcccugcugaacaugaucggcauggugggcggcgcccagggcacccagcccggcagagacggcguggugagagugugggacgugaagaaccccgaccugcugaacaaccaguucggcaccaugcccagccugacccuggccugccugaccaagcagggccagguggaccugaacgacgccgugcuggcccugaccgaccugggccugaucuacaccgccaaguaccccaacagcagcgaccuggacagacugagccagagccaccccauccugaacaugguggacaccaagaagagcagccugaacaucagcggcuacaacuucagccugggcgccgccgugaaggccggcgccugcaugcuggacggcggcaacaugcuggagaccaucaaggugaccccccagaccauggacggcauccugaagagcauccugaaggugaagaagagccugggcauguucgugagcgacacccccggcgagagaaaccccuacgagaacauccuguacaagaucugccugagcggcgacggcuggcccuacaucgccagcagaaccagcaucgugggcagagccugggagaacaccaucguggaccuggagagcgacggcaagccccagaaggugggcaccgccggcagcaacaagagccugcagagcgccggcuuccccaccggccugaccuacagccagcugaugacccugaaggacagcaugaugcagcuggaccccagcgccaagaccuggaucgacaucgagggcagacccgaggaccccguggagaucgcccuguaccagcccaugagcggcugcuacauccacuucuucagagagcccaccgaccugaagcaguucaagcaggacgccaaguacagccacggcaucgacguggccgaccuguuccccgcccagcccggccugaccagcgccgugaucgaggcccugcccagaaacauggugcugaccugccagggcagcgacgacaucaagagacugcuggacagccagggcagaagagacaucaagcugaucgacaucgcccugagcaaggccgacagcagaagauucgagaacgccgugugggaccagugcaaggaccugugccacaugcacaccggcguggugguggagaagaagaagagaggcggcaaggaggagaucaccccccacugcgcccugauggacugcaucauguacgacgccgccgugagcggcggccugaacauccccgugcugagagccgugcugcccagagacaugguguucagaaccagcagccccaagguggugcugugaggacuaguuauaagacugacuagcccgaugggccucccaacgggcccuccuccccuccuugcaccgagauuaaucaaaggcucuuuucagagccaccaaaaaaaaaaaaaaaaaaaaaaaaaaaaaaaaaaaaaaaaaaaaaaaaaaaaaaaaaaaaaaaaaaaaaaaaaaaaaaaaaaaaaaaaaaaaaaaaaaaaa

SEQ ID NO: 21900 - RNA, 1974 nt, Artificial Sequence
  mRNA product Design i-3 (hSL-A100) comprising derived and/or modified sequence from LASV(Nig08-04;Clade II)__ADU56611__SP-IgE_NP(2-569) (opt4)
aggagaaagcuuaccauggacuggaccuggauccuguuccugguggccgccgccaccagagugcacagcagcgccagcaaggaggugaagagcuuccuguggacccagagccugagaagagagcugagcggcuacugcagcaacaucaagcugcagguggugaaggacgcccaggcccugcugcacggccuggacuucagcgaggugagcaacgugcagagacugaugagaaagcagaagagagacgacggcgaccugaagagacugagagaccugaaccaggccgugaacaaccugguggagcugaagagcacccagcagaagagcgugcugagagugggcacccugaccagcgacgaccugcugacccuggccgccgaccuggagaagcugaagagcaaggugaucagaaccgagagaccccugagcagcggcguguacaugggcaaccugagcacccagcagcuggagcagagaaaggcccugcugagcaugaucggcauggugggcggcgcccagggcacccagcccggcagagacggcguggugagagugugggacgugaagaaccccgaccugcugaacaaccaguucggcaccaugcccagccugacccuggccugccugaccaagcagggccagguggaccugaacgacgccgugcuggcccugaccgaccugggccugaucuacaccgccaaguaccccaacagcagcgaccuggacagacugagccagagccaccccauccugaacaugguggacaccaagaagagcagccugaacaucagcggcuacaacuucagccugggcgccgccgugaaggccggcgccugcaugcuggacggcggcaacaugcuggagaccaucaaggugaccccccagaccauggacggcauccugaagagcauccugaaggugaagagaagccugggcauguucgugagcgacacccccggcgagagaaaccccuacgagaacauccuguacaagaucugccugagcggcgacggcuggcccuacaucgccagcagaaccagcaucgugggcagagccugggagaacaccaccguggaccuggagagcgacggcaagccccagaaggugggcaccgccggcagcaacaagagccugcagagcgccggcuuccccaccggccugaccuacagccagcugaugacccugaaggacagcaugaugcagcuggaccccagcgccaagaccuggaucgacaucgagggcagacccgaggaccccguggagaucgcccuguaccagcccaugagcggcugcuacauccacuucuucagagagcccaccgaccugaagcaguucaagcaggacgccaaguacagccacggcaucgacgugaccgaccuguucagcgcccagcccggccugaccagcgccgugaucgaggcccugcccagaaacauggugcugaccugccagggcagcgacgacaucaagaagcugcuggacagccagggcagaagagacaucaagcugaucgacaucagccugaacaaggccgacagcagaagauucgagaacgccgugugggaccagugcaaggaccugugccacaugcacaccggcguggugguggagaagaagaagagaggcggcaaggaggagaucaccccccacugcgcccugauggacugcaucauguucgacgccgccgugagcggcggccugaacauccccauccugagagccgugcugcccagagacaugguguucagaaccagcagccccaagguggugcugugaggacuaguuauaagacugacuagcccgaugggccucccaacgggcccuccuccccuccuugcaccgagauuaaucaaaggcucuuuucagagccaccaaaaaaaaaaaaaaaaaaaaaaaaaaaaaaaaaaaaaaaaaaaaaaaaaaaaaaaaaaaaaaaaaaaaaaaaaaaaaaaaaaaaaaaaaaaaaaaaaaaaa

SEQ ID NO: 21901 - RNA, 1977 nt, Artificial Sequence
  mRNA product Design i-3 (hSL-A100) comprising derived and/or modified sequence from LASV(GA391;Clade III)__AAA46284__SP-IgE_NP(2-570) (opt4)
aggagaaagcuuaccauggacuggaccuggauccuguuccugguggccgccgccaccagagugcacagcagcgccagcaaggaggugagaagcugccuguggacccagagccugagaagagagcugagcggcuacugcagcaacaucaagcugcagguggugaaggacgcccaggcccugcugcacggccuggacuucagcgaggugagcaacgugcagagacugaugagaaagcagaagagagacgacggcgaccugaagagacugagagaccugaaccaggccgugaacaaccugguggagcugaagagcacccagcagaagagcgugcugagagugggcacccugagcagcgacgaccugcugauccuggccgccgaccuggagaagcugaagagcaaggugaccagaaccgagagaccccugagcagcggcguguacaugggcaaccugagcagccagcagcuggaccagagaagagcccugcugaacaugaucggcaugaccggcgugagcggcggcggcaagggcgccagcaacggcaucgugagagugugggacgugaagaacgccgagcugcugaacaaccaguucggcaccaugcccagccugacccuggccugccugaccaagcagggccagguggaccugaacgacgccgugcaggcccugaccgaccugggccugaucuacaccgccaaguaccccaacagcagcgaccuggacagacugagccagagccaccccauccugaacaugaucgacaccaagaagagcagccugaacaucagcggcuacaacuucagccugggcgccgccgugaaggccggcgccugcaugcuggacggcggcaacaugcuggagaccaucaaggugagcccccagaccauggacggcauccugaagagcauccugaaggugaagaagagccugggcauguucgugagcgacacccccggcgagagaaaccccuacgagaacauccuguacaagaucugccugagcggcgacggcuggagcuacaucgccagcagaaccagcaucgugggcagagccugggagaacaccgugguggaccuggagcaggacaacaagccccagaagaucggcaacggcggcagcaacaagagccugcagagcgccggcuucgccgccggccugaucuacagccagcugaugacccugaaggacuucaagugcuucaaccugauccccaacgccaagaccuggauggacaucgagggcagacccgaggaccccguggagaucgcccuguaccagcccagcagcggcugcuacgugcacuucuucagagagcccaccgaccugaagcaguucaagcaggacgccaaguacagccacggcagagacgugaccgaccuguucgccgcccagcccggccugaccagcgccgugaucgaggcccugcccagaaacauggugaucaccugccagggcagcgaggacaucagaaagcugcuggagagccagggcagaagagacaucaagcugaucgacaucacccugagcaaggccgacagcagaaaguucgagaacgccgugugggaccaguucaaggaccugugccacaugcacaccggcguggugguggagaagaagaagagaggcggcaaggaggagaucaccccccacugcgcccugauggacugcaucauguucgacgccgccgugagcggcggccuggacgccaaggugcugagaguggugcugcccagagacaugguguucagaaccagcacccccaagguggugcugugaggacuaguuauaagacugacuagcccgaugggccucccaacgggcccuccuccccuccuugcaccgagauuaaucaaaggcucuuuucagagccaccaaaaaaaaaaaaaaaaaaaaaaaaaaaaaaaaaaaaaaaaaaaaaaaaaaaaaaaaaaaaaaaaaaaaaaaaaaaaaaaaaaaaaaaaaaaaaaaaaaaaa

SEQ ID NO: 21902 - RNA, 1974 nt, Artificial Sequence
  mRNA product Design i-3 (hSL-A100) comprising derived and/or modified sequence from LASV(Nig08-A19;Clade III)__ADU56619__SP-IgE_NP(2-569) (opt4)
aggagaaagcuuaccauggacuggaccuggauccuguuccugguggccgccgccaccagagugcacagcagcgccagcaaggaggugaagagcuuccuguggacccagagccugagaagagagcugagcggcuacugcagcaacaucaagcugcagguggugaaggacgcccaggcccugcugcacggccuggacuucagcgaggugagcaacgugcagagacugaugagaaagcagaagagagacgacggcgaccugaagagacugagagaccugaaccaggccgugaacaaccugguggagcugaagagcacccagcagaagagcgugcugagagugggcacccugagcagcgacgaccugcuggugcuggccgccgaccuggagaagcugaagagcaagguggugagaaccgagagaccccugagcagcggcaucuacaugggcaaccugagcagccagcagcuggaccagagaaaggcccugcugaacaugaucggcaugaccggcggcaacggcggcagaaacaccaccagcgacggcaucgugagagugugggacgugaagaacgccgagcugcugaacaaccaguucggcaccaugcccagccugacccuggccugccugaccaagcagggccagguggaccugaacgacgccgugcaggcccugaccgaccugggccugaucuacaccgccaaguaccccaacagcagcgaccuggacagacuggcccagagccaccccauccugaacaugaucgacaccaagaagagcagccugaacaucagcggcuacaacuucagccugggcgccgccgugaaggccggcgccugcaugcuggacggcggcaacaugcuggagaccaucaaggugagcccccagaccauggacggcauccugaagagcauccugaaggugaagagaagccugggcauguucaucagcgacacccccggcgagagaaaccccuacgagaacauccuguacaagaucugccugagcggcgacggcuggcccuacaucgccagcagaaccagcaucgugggcagagccugggagaacaccgugguggaccuggagagcgacaacaagccccagaagaccggcaacggcggcagcaacaagagccugcagagcgccggcuucgccgccggccugaccuacagccagcugaugacccugaaggacagcaugcugcagcuggaccccaacgccaagaccuggauggacaucgagggcagacccgaggaccccguggagaucgcccuguaccagcccagcagcggcugcuacauccacuucuucagagagcccaccgaccugaagcaguucaagcaggacgccaaguacagccacggcaucgacgugaccgaccuguucgccgcccagcccggccugaccagcgccgugaucgaggcccugcccagaaacauggugaucaccugccagggcagcgaggacaucagaaagcugcuggagagccagggcagaagagacaucaagcugaucgacaucagccugagcaagguggacagcagaaaguucgagaacgccgugugggaccaguucaaggaccugugccacaugcacaccggcaucgugguggagaagaagaagagaggcggcaaggaggagaucaccccccacugcgcccugauggacugcaucauguucgacgccgccgugagcggcggcguggacgccaaggugcugagagccgugcugcccagagacaugguguucagaaccagcacccccaagguggugcugugaggacuaguuauaagacugacuagcccgaugggccucccaacgggcccuccuccccuccuugcaccgagauuaaucaaaggcucuuuucagagccaccaaaaaaaaaaaaaaaaaaaaaaaaaaaaaaaaaaaaaaaaaaaaaaaaaaaaaaaaaaaaaaaaaaaaaaaaaaaaaaaaaaaaaaaaaaaaaaaaaaaaa

SEQ ID NO: 21903 - RNA, 1974 nt, Artificial Sequence
  mRNA product Design i-3 (hSL-A100) comprising derived and/or modified sequence from LASV(G1180-SLE-2010;Clade IV)__AIT17169__SP-IgE_NP(2-569) (opt4)
aggagaaagcuuaccauggacuggaccuggauccuguuccugguggccgccgccaccagagugcacagcagcgccagcaaggagaucaagagcuuccuguggacccagagccugagaagagagcugagcggcuacugcagcaacaucaagcugcagguggugaaggacgcccaggcccugcugcacggccuggacuucagcgaggugagcaacgugcagagacugaugagaaaggagagaagagacgacaacgaccugaagagacugagagaccugaaccaggccgugaacaaccugguggagcugaagagcacccagcagaagagcauccugagagugggcacccugaccagcgacgaccugcugauccuggccgccgaccuggagaagcugaagagcaaggugaucagaaccgagagaccccugagcgccggcguguacaugggcaaccugagcagccagcagcuggaccagagaagagcccugcugagcaugaucggcaugagcagcggcaaccagagagcccaggccggcagagacggcguggugagagugugggacgugaagaacguggagcugcugaacaaccaguucggcaccaugcccagccugacccuggccugccugaccaagcagggccagguggaccugaacgacgccgugcaggcccugaccgaccugggccugaucuacaccgccaaguaccccaacaccagcgaccuggacagacugacccagagccaccccauccugaacaugaucgacaccaagaagagcagccugaacaucagcggcuacaacuucagccugggcgccgccgugaaggccggcgccugcaugcuggacggcggcaacaugcuggagaccaucaaggugagcccccagaccauggacggcauccugaagagcauccugaaggugaagaaggcccugggcauguucaucagcgacacccccggcgagagaaaccccuacgagaacauccuguacaagaucugccugagcggcgacggcuggcccuacaucgccagcagaaccagcaucaccggcagagccugggagaacaccgugguggaccuggagagcgacggcaagccccagaaggccggcagcaacaacagcaacaagagccugcagagcgugggcuucaccgccggccugaccuacagccagcugaugacccugaaggacgccaugcugcagcuggaccccaacgccaagaccuggauggacaucgagggcagacccgaggaccccguggagaucgcccuguaccagcccagcagcggcugcuacauccacuucuucagagagcccaccgaccugaagcaguucaagcaggacgccaaguacagccacggcaucgacgugaccgaccuguucgccgcccagcccggccugaccagcgccgugaucgacgcccugcccagaaacauggugaucaccugccagggcagcgacgacaucagaaagcugcuggagagccagggcagaaaggacaucaagcugaucgacaucgcccugagcaagaccgacagcagaaaguacgagaacgccgugugggaccaguacaaggaccugugccacaugcacaccggcguggugguggagaagaagaagagaggcggcaaggaggagaucaccccccacugcgcccugauggacugcaucauguucgacgccgccgugagcggcggccugaacaccagcgugcugagagccgugcugcccagagacaugguguucagaaccagcacccccagaguggugcugugaggacuaguuauaagacugacuagcccgaugggccucccaacgggcccuccuccccuccuugcaccgagauuaaucaaaggcucuuuucagagccaccaaaaaaaaaaaaaaaaaaaaaaaaaaaaaaaaaaaaaaaaaaaaaaaaaaaaaaaaaaaaaaaaaaaaaaaaaaaaaaaaaaaaaaaaaaaaaaaaaaaaa

SEQ ID NO: 21904 - RNA, 1974 nt, Artificial Sequence
  mRNA product Design i-3 (hSL-A100) comprising derived and/or modified sequence from LASV(G1442-SLE-2011;Clade IV)__AIT17181__SP-IgE_NP(2-569) (opt4)
aggagaaagcuuaccauggacuggaccuggauccuguuccugguggccgccgccaccagagugcacagcagcgccagcaaggaggugaagagcuuccuguggacccagagccugagaagagagcugagcggcuacugcagcaacaucaagcugcagguggugaaggacgcccaggcccugcugcacggccuggacuucagcgaggugagcaacgugcagagacugaugagaaagcagagaagagacgacaacgaccugaagagacugagagaccugaaccaggccgugaacaaccugguggagcugaagagcacccagcagaagagcgugcugagagugggcacccugaccagcgacgaccugcuggugcuggccgccgaccuggagaagcugaagagcaaggugaucagaaccgagagaccccugagcgccggcguguacaugggcaaccugagcagccagcagcuggaccagagaagagcccugcugaacaugaucggcaugagcggcggcauccagggcaccagaaccggcagagacggcguggugagagugugggacgugaagaacgccgaccugcugaacaaccaguucggcaccaugcccagccugacccuggccugccugaccaagcagggccagguggaccugaacgacguggugcaggcccugaccgaccugggccugaucuacaccgccaaguaccccaacgccagcgaccuggacagacugacccagagccaccccauccugaacaugaucgacaccaagaagagcagccugaacaucagcggcuacaacuucagccugggcgccgccgugaaggccggcgccugcaugcuggacggcggcaacaugcuggagaccaucaaggugagcccccagaccauggacggcauccugaagagcauccugaaggugaagaagacccugggcauguucaucagcgacacccccggcgagagaaaccccuacgagaacauccuguacaagaucugccugagcggcgacggcuggcccuacaucgccagcagaaccagcaucaccggcagagccugggagaacaccgugguggaccuggagagcgacggcaagccccagaaggccggcagcaacaacagcaacaagagccugcagagcgccggcuucgccgccggccugaccuacagccagcugaugacccugaaggacgccaugcugcagcuggaccccaacgccaagaccuggauggacaucgagggcagacccgaggaccccguggagaucgcccuguaccagcccagcagcggcugcuacauccacuucuucagagagcccaccgaccugaagcaguucaagcaggacgccaaguacagccacggcaucgacgugaccgaccuguucgccgcccagcccggccugaccagcgccgugaucgaggcccugcccagaaacauggugaucaccugccagggcagcgacgacaucaagaagcugcuggagagccagggcagaaaggacaucaagcugaucgacaucgcccugagcaagaccgacagcagaaaguacgagaacgccgugugggaccaguacaaggaccugugccacaugcacaccggcguggugguggagaagaagaagagaggcggcaaggaggagaucaccccccacugcgcccugauggacugcaucauguucgacgccgccgugagcggcggccugaacacccuggugcugagagccgugcugcccagagacaugguguucagaaccagcacccccagaguggugcugugaggacuaguuauaagacugacuagcccgaugggccucccaacgggcccuccuccccuccuugcaccgagauuaaucaaaggcucuuuucagagccaccaaaaaaaaaaaaaaaaaaaaaaaaaaaaaaaaaaaaaaaaaaaaaaaaaaaaaaaaaaaaaaaaaaaaaaaaaaaaaaaaaaaaaaaaaaaaaaaaaaaaa

SEQ ID NO: 21905 - RNA, 1974 nt, Artificial Sequence
  mRNA product Design i-3 (hSL-A100) comprising derived and/or modified sequence from LASV(G3010-SLE-2013;Clade IV)__AIT17345__SP-IgE_NP(2-569) (opt4)
aggagaaagcuuaccauggacuggaccuggauccuguuccugguggccgccgccaccagagugcacagcagcgccagcaaggagaucaagagcuuccuguggacccagagccugagaagagagcugagcggcuacugcagcaacaucaagcugcagguggugaaggacgcccaggcccugcugcacggccuggacuucagcgaggugagcaacgugcagagacugaugagaaaggagagaagagacgacaacgaccugaagagacugagagaccugaaccaggccgugaacaaccugguggagcugaagagcacccagcagaagagcauccugagagugggcacccugaccagcgacgaccugcugauccuggccgccgaccuggagaagcugaagagcaaggugaccagaaccgagagaccccugagcgccggcguguacaugggcaaccugagcagccagcagcuggaccagagaagagcccugcugagcaugaucggcaugagcagcggcgugcagggcgccagagccggcagagacggcguggugagagugugggacgugaagaacgccgagcugcugaacaaccaguucggcaccaugcccagccugacccuggccugccugaccaagcagggccagguggaccugaacgacguggugcaggcccugaccgaccugggccugaucuacaccgccaaguaccccaacaccagcgaccuggacagacugacccagagccaccccauccugaacaugaucgacaccaagaagagcagccugaacaucagcggcuacaacuucagccugggcgccgccgugaaggccggcgccugcaugcuggacggcggcaacaugcuggagaccaucaaggugagcccccagaccauggacggcauccugaagagcauccugaaggugaagaaggcccugggcauguucaucagcgagacccccggcgagagaaaccccuacgagaacauccuguacaagaucugccugagcggcgacggcuggcccuacaucgccagcagaaccagcaucaccggcagagccugggagaacaccgugguggaccuggagagcgacggcaagccccagaaggccggcagcaacaacagcaacaagagccugcagagcgccggcuucaccgccggccugaccuacagccagcugaugacccugaaggacgccaugcugcagcuggaccccaacgccaagaccuggauggacaucgagggcagacccgaggaccccguggagguggcccuguaccagcccagcagcggcugcuacauccacuucuucagagagcccaccgaccugaagcaguucaagcaggacgccaaguacagccacggcaucgacgugaccgaccuguucgccgcccagcccggccugaccagcgccgugaucgacgcccugcccagaaacauggugaucaccugccagggcagcgacgacaucaagaagcugcuggagagccagggcagaaaggacaucaagcugaucgacaucgcccugagcaagaccgacagcagaaaguacgagaacgccgugugggaccaguacaaggaccugugccacaugcacaccggcguggugguggagaagaagaagagaggcggcaaggaggagaucaccccccacugcgcccugauggacugcaucauguucgacgccgccgugagcggcggccugaacaccagcgugcugagagccgugcugcccagagacaugguguucagaaccagcacccccagaguggugcugugaggacuaguuauaagacugacuagcccgaugggccucccaacgggcccuccuccccuccuugcaccgagauuaaucaaaggcucuuuucagagccaccaaaaaaaaaaaaaaaaaaaaaaaaaaaaaaaaaaaaaaaaaaaaaaaaaaaaaaaaaaaaaaaaaaaaaaaaaaaaaaaaaaaaaaaaaaaaaaaaaaaaa

SEQ ID NO: 21906 - RNA, 1974 nt, Artificial Sequence
  mRNA product Design i-3 (hSL-A100) comprising derived and/or modified sequence from LASV(G502-SLE-2009;Clade IV)__AIT17127__SP-IgE_NP(2-569) (opt4)
aggagaaagcuuaccauggacuggaccuggauccuguuccugguggccgccgccaccagagugcacagcagcgccagcaaggagaucaagagcuuccuguggacccagagccugagaagagagcugagcggcuacugcagcaacaucaagcugcagguggugaaggacgcccaggcccugcugcacggccuggacuucagcgaggugagcaacgugcagagacugaugagaaaggagagaagagacgacaacgaccugaagagacugagagaccugaaccaggccgugaacaaccugguggagcugaagagcacccagcagaagagcauccugagagugggcacccugaccagcgacgaccugcugauccuggccgccgaccuggagaagcugaagagcaaggugaucagaaccgagagaccccugagcgccggcguguacaugggcaaccugagcagccagcagcuggaccagagaagagcccugcugagcaugaucggcaugagcggcggcaaccagggcgugagagccggcaaggacggcguggugagagugugggacgugaagaacgccgagcugcugaacaaccaguucggcaccaugcccagccugacccuggccugccugaccaagcagggccagguggaccugaacgacgccgugcaggcccugaccgaccugggccugaucuacaccgccaaguaccccaacaccagcgaccuggacagacugacccagagccaccccauccugaacaugaucgacaccaagaagagcagccugaacaucagcggcuacaacuucagccugggcgccgccgugaaggccggcgccugcaugcuggacggcggcaacaugcuggagaccaucaaggugagcccccagaccauggacggcauccugaagagcauccugaaggugaagaaggcccugggcauguucaucagcgacacccccggcgagagaaaccccuacgagaacauccuguacaagaucugccugagcggcgacggcuggcccuacaucgccagcagaaccagcaucaccggcagagccugggagaacaccgugguggaccuggagagcgacggcaagccccagaaggccggcagcaacaacagcaacaagagccugcagagcgccggcuucaccgccggccugaccuacagccagcugaugacccugaaggacgccaugcugcagcuggaccccaacaccaagaccuggauggacaucgagggcagacccgaggaccccguggagaucgcccuguaccagcccagcagcggcugcuacauccacuucuucagagagcccaccgaccugaagcaguucaagcaggacgccaaguacagccacggcaucgacgugaccgaccuguucgccgcccagcccggccugaccagcgccgugaucgacgcccugcccagaaacauggugaucaccugccagggcagcgacgacaucagaaagcugcuggagagccagggcagaaaggacaucaagcugaucgacaucgcccugaacaagaccgacagcagaaaguacgagaacgccgugugggaccaguacaaggaccugugccacaugcacaccggcguggugguggagaagaagaagagaggcggcaaggaggagaucaccccccacugcgcccugauggacugcaucauguucgacgccgccgugagcggcggccugaacaccagcgugcugagagccgugcugcccagagacaugguguucagaaccagcacccccagaguggugcugugaggacuaguuauaagacugacuagcccgaugggccucccaacgggcccuccuccccuccuugcaccgagauuaaucaaaggcucuuuucagagccaccaaaaaaaaaaaaaaaaaaaaaaaaaaaaaaaaaaaaaaaaaaaaaaaaaaaaaaaaaaaaaaaaaaaaaaaaaaaaaaaaaaaaaaaaaaaaaaaaaaaaa

SEQ ID NO: 21907 - RNA, 1974 nt, Artificial Sequence
  mRNA product Design i-3 (hSL-A100) comprising derived and/or modified sequence from LASV(G733-SLE-2010;Clade IV)__AIT17155__SP-IgE_NP(2-569) (opt4)
aggagaaagcuuaccauggacuggaccuggauccuguuccugguggccgccgccaccagagugcacagcagcgccagcaaggagaucaagagcuuccuguggacccagagccugagaagagagcugagcggcuacugcagcaacaucaagcugcagguggugaaggacgcccaggcccugcugcacggccuggacuucagcgaggugagcaacgugcagagacugaugagaaaggagagaagagacgacaacgaccugaagagacugagagaccugaaccaggccgugaacaaccugguggagcugaagagcacccagcagaagagcgugcugagagugggcacccugaccagcgacgagcugcuggugcuggccgccgaccuggagaagcugaagagcaaggugaucagaaccgagagaccccugagcgccggcguguacaugggcaaccugagcagccagcagcuggaccagagaagagcccugcugagcaugaucggcaugagcggcggcaaccagggcgccagaaccggcagagacggcguggugagagugugggacgugaagaacgccgagcugcugaacaaccaguucggcaccaugcccagccugacccuggccugccugaccaagcagggccagguggaccugaacgacgccgugcaggcccugaccgaccugggccugaucuacaccgccaaguaccccaacaccagcgaccuggacagacugacccagagccaccccauccugaacaugaucgacaccaagaagagcagccugaacaucagcggcuacaacuucagccugggcgccgccgugaaggccggcgccugcaugcuggacggcggcaacaugcuggagaccaucaaggugagcccccagaccauggacggcauccugaagagcauccugaaggugaagaaggcccugggcauguucaucagcgacacccccggcgagagaaaccccuacgagaacauccuguacaagaucugccugagcggcgacggcuggcccuacaucgccagcagaaccagcaucaccggcagagccugggagaacaccgugguggaccuggagagcgacggcaagccccagaaggccggcagcaacaacagcaacaagagccugcagagcgccggcuucaccgccggccugaccuacagccagcugaugacccugaaggacgccaugcugcagcuggaccccaacgccaagaccuggauggacaucgagggcagacccgaggaccccguggagaucgcccuguaccagcccagcagcggcugcuacauccacuucuucagagagcccaccgaccugaagcaguucaagcaggacgccaaguacagccacggcaucgacgugaccgaccuguucgccgcccagcccggccugaccagcgccgugaucgacgcccugcccagaaacauggugaucaccugccagggcagcgacgacaucagaaagcugcuggagagccagggcagaaaggacaucaagcugaucgacaucgcccugagcaagaucgacagcagaaaguacgagaacgccgugugggaccaguacaaggaccugugccacaugcacaccggcguggugguggagaagaagaagagaggcggcaaggaggagaucaccccccacugcgcccugauggacugcaucauguucgacgccgccgugagcggcggccugaacagccuggugcugagagccgugcugcccagagacaugguguucagaaccagcacccccagaguggugcugugaggacuaguuauaagacugacuagcccgaugggccucccaacgggcccuccuccccuccuugcaccgagauuaaucaaaggcucuuuucagagccaccaaaaaaaaaaaaaaaaaaaaaaaaaaaaaaaaaaaaaaaaaaaaaaaaaaaaaaaaaaaaaaaaaaaaaaaaaaaaaaaaaaaaaaaaaaaaaaaaaaaaa

SEQ ID NO: 21908 - RNA, 1974 nt, Artificial Sequence
  mRNA product Design i-3 (hSL-A100) comprising derived and/or modified sequence from MOPV/LASV reassortant(IGS-1;Clade IV)__AFY05578__SP-IgE_NP(2-569) (opt4)
aggagaaagcuuaccauggacuggaccuggauccuguuccugguggccgccgccaccagagugcacagcagcgccagcaaggagaucaagagcuuccuguggacccagagccugagaagagagcugagcggcuacugcagcaacaucaagcugcagguggugaaggacgcccaggcccugcugcacggccuggacuucagcgaggugagcaacgugcagagacugaugagaaaggagagaagagacgacaacgaccugaagagacugagagaccugaaccaggccgugaacaaccugguggagcugaagagcacccagcagaagagcauccugagagugggcacccugaccagcgacgaccugcugauccuggccgccgaccuggagaagcugagaagcaaggugaucagaaccgagagaccccugagcgccggcguguacaugggcaaccugagcagccagcagcuggaccagagaagagcccugcugaacaugaucggcaugagcggcggcaaccagggcgccagagccggcagagacggcguggugagagugugggacgugaagaacgccgagcugcugagcaaccaguucggcaccaugcccagccugacccuggccugccugaccaagcagggccagguggaccugaacgacgccgugcaggcccugaccgaccugggccugaucuacaccgccaaguaccccaacaccagcgaccuggacagacugacccagagccaccccauccugaacaugaucgacaccaagaagagcagccugaacaucagcggcuacaacuucagccugggcgccgccgugaaggccggcgccugcaugcuggacggcggcaacaugcuggagaccaucaaggugagcccccagaccauggacggcauccugaagagcauccugaaggugaagaaggcccugggcauguucaucagcgacacccccggcgagagaaaccccuacgagaacauccuguacaagaucugccugagcggcgacggcuggcccuacaucgccagcagaaccagcaucaccggcagagccugggagaacaccgugguggaccuggagagcgacggcaagccccagaaggccgacagcaacaacagcagcaagagccugcagagcgccggcuucaccgccggccugaccuacagccagcugaugacccugaaggacgccaugcugcagcuggaccccaacgccaagaccuggauggacaucgagggcagacccgaggaccccguggagaucgcccuguaccagcccagcagcggcugcuacauccacuucuucagagagcccaccgaccugaagcaguucaagcaggacgccaaguacagccacggcaucgacgugaccgaccuguucgccacccagcccggccugaccagcgccgugaucgacgcccugcccagaaacauggugaucaccugccagggcagcgacgacaucagaaagcugcuggagagccagggcagaaaggacaucaagcugaucgacaucgaccugagcaagaccgacagcagaaaguacgagaacgccgugugggaccaguacaaggaccugugccacaugcacaccggcguggugguggagaagaagaagagaggcggcaaggaggagaucaccccccacugcgcccugauggacugcaucauguucgacgccgccgugagcggcggccugaacaccagcgugcugagagccgugcugcccagagacaugguguucagaaccagcacccccagaguggugcugugaggacuaguuauaagacugacuagcccgaugggccucccaacgggcccuccuccccuccuugcaccgagauuaaucaaaggcucuuuucagagccaccaaaaaaaaaaaaaaaaaaaaaaaaaaaaaaaaaaaaaaaaaaaaaaaaaaaaaaaaaaaaaaaaaaaaaaaaaaaaaaaaaaaaaaaaaaaaaaaaaaaaa

SEQ ID NO: 21909 - RNA, 1974 nt, Artificial Sequence
  mRNA product Design i-3 (hSL-A100) comprising derived and/or modified sequence from LASV(LM765-SLE-2012;Clade IV)__AIT17815__SP-IgE_NP(2-569) (opt4)
aggagaaagcuuaccauggacuggaccuggauccuguuccugguggccgccgccaccagagugcacagcagcgccagcaaggagaucaagagcuuccuguggacccagagccugagaagagagcugagcggcuacugcagcaacaucaagcugcagguggugaaggacgcccaggcccugcugcacggccuggacuucagcgaggugagcaacgugcagagacugaugagaaaggagagaagagacgacaacgaccugaagagacugagagaccugaaccaggccgugaacaaccugguggagcugaagagcacccagcagaagagcauccugagagugggcacccugaccagcgacgaccugcugauccuggccgccgaccuggagaagcugaagagcaaggugaccagaaccgagagaccccugagcgccggcguguacaugggcaaccugagcagccagcagcuggaccagagaagagcccugcuggacaugaucggcaugagcggcagcaaccagggcgccagagccggcagagacggcguggugagagugugggacgugaagaacgccgagcugcugaacaaccaguucggcaccaugcccagccugacccuggccugccugaccaagcagggccagguggaccugaacgacgccgugcaggcccugaccgaccugggccugaucuacaccgccaaguaccccaacaccagcgaccuggacagacugacccagagccaccccauccugaacaugaucgacaccaagaagagcagccugaacaucagcggcuacaacuucagccugggcgccgccgugaaggccggcgccugcaugcuggacggcggcaacaugcuggagaccaucaaggugagcccccagaccauggacggcauccugaagagcauccugaaggugaagaaggcccugggcauguucaucagcgacgcccccggcgagagaaaccccuacgagaacauccuguacaagaucugccugagcggcgacggcuggcccuacaucgccagcagaaccagcaucaccggcagagccugggagaacaccgugguggaccuggagagcgacggcaagccccagaaggccggcagcaacggcagcaacaagagccugcagagcgccggcuucaccgccggccugaccuacagccagcugaugacccugaaggacgccaugcugcagcuggaccccaacgccaagaccuggauggacaucgagggcagacccgaggaccccguggagaucgcccuguaccagcccagcagcggcugcuacauccacuucuucagagagcccaccgaccugaagcaguucaagcaggacgccaaguacagccacggcaucgacgugaccgaccuguucgccgcccagcccggccugaccagcgccgugaucgacgcccugcccagaaacauggugaucaccugccagggcagcgacgacaucagaaagcuguucgagagccagggcagaaaggacaucaagcugaucgacaucgcccugagcaagaccgacagcagaaaguacgagaacgccgugugggaccaguacaaggaccugugccacaugcacaccggcaucgugguggagaagaagaagagaggcggcaaggaggagaucaccccccacugcgcccugauggacugcaucauguucgacgccgccgugagcggcggccugaacaccagcgugcugagagccgugcugcccagagacaugguguucagaaccagcacccccagaguggugcugugaggacuaguuauaagacugacuagcccgaugggccucccaacgggcccuccuccccuccuugcaccgagauuaaucaaaggcucuuuucagagccaccaaaaaaaaaaaaaaaaaaaaaaaaaaaaaaaaaaaaaaaaaaaaaaaaaaaaaaaaaaaaaaaaaaaaaaaaaaaaaaaaaaaaaaaaaaaaaaaaaaaaa

SEQ ID NO: 21910 - RNA, 1974 nt, Artificial Sequence
  mRNA product Design i-3 (hSL-A100) comprising derived and/or modified sequence from LASV(LM776-SLE-2012;Clade IV)__AIT17825__SP-IgE_NP(2-569) (opt4)
aggagaaagcuuaccauggacuggaccuggauccuguuccugguggccgccgccaccagagugcacagcagcgccagcaaggagaucaagagcuuccuguggacccagagccugagaagagagcugagcagcuacugcagcaacaucaagcugcagguggugaaggacgcccaggcccugcugcacggccuggacuucagcgaggugagcaacgugcagagacugaugagaaaggagagaagagacgacaacgaccugaagagacugagagaccugaaccaggccgugaacaaccugguggagcugaagagcacccagcagaagagcauccugagagugggcacccugaccagcgacgaccugcugauccuggccgccgaccuggagaagcugaagagcaaggugaccagaaccgagagaccccugagcgccggcguguacaugggcaaccugagcagccagcagcuggaccagagaagagcccugcugagcaugaucggcaugagcggcagcaaccagggcgccagagccggcagagacggcguggugagagugugggacgugaagaacgccgagcugcugaacaaccaguucggcaccaugcccagccugacccuggccugccugaccaagcagggccagguggaccugaacgacgccgugcaggcccugaccgaccugggccugaucuacaccgccaaguaccccaacaccagcgaccuggacagacugacccagagccaccccauccugaacaugaucgacaccaagaagagcagccugaacaucagcggcuacaacuucagccugggcgccgccgugaaggccggcgccugcaugcuggacggcggcaacaugcuggagaccaucaaggugagcccccagaccauggacggcauccugaagagcauccugaaggugaagaaggcccugggcauguucaucagcgacacccccggcgagagaaaccccuacgagaacauccuguacaagaucugccugagcggcgacggcuggcccuacaucgccagcagaaccagcaucaccggcagagccugggagaacaccgugguggaccuggagagcgacggcaagccccagaaggccggcagcaacaacagcaacaagagccugcagagcgccggcuucaccgccggccugaccuacagccagcugaugacccugaaggacgccaugcugcagcuggaccccaacgccaagaccuggauggacaucgagggcagacccgaggaccccguggagguggcccuguaccagcccagcagcggcugcuacauccacuucuucagagagcccaccgaccugaagcaguucaagcaggacgccaaguacagccacggcaucgacgugaccgaccuguucgccgcccagcccggccugaccagcgccgugaucgacgcccugcccagaaacauggugaucaccugccagggcagcgacgacaucagaaagcugcuggagagccagggcagaaaggacaucaagcugaucgacaucgcccugagcaagaccgacagcagaaaguacgagaacgccgugugggaccaguacaaggaccugugccacaugcacaccggcguggugguggagaagaagaagagaggcggcaaggaggagaucaccccccacugcgcccugauggacugcaucauguucgacgccgccgugagcggcggccugaacaccagcgugcugagagccgugcugcccagagacaugguguucagaaccagcacccccagaguggugcugugaggacuaguuauaagacugacuagcccgaugggccucccaacgggcccuccuccccuccuugcaccgagauuaaucaaaggcucuuuucagagccaccaaaaaaaaaaaaaaaaaaaaaaaaaaaaaaaaaaaaaaaaaaaaaaaaaaaaaaaaaaaaaaaaaaaaaaaaaaaaaaaaaaaaaaaaaaaaaaaaaaaaa

SEQ ID NO: 21911 - RNA, 1974 nt, Artificial Sequence
  mRNA product Design i-3 (hSL-A100) comprising derived and/or modified sequence from LASV(Mad39;Clade IV)__ANH09723__SP-IgE_NP(2-569) (opt4)
aggagaaagcuuaccauggacuggaccuggauccuguuccugguggccgccgccaccagagugcacagcagcgccagcaaggagaucaagagcuuccuguggacccagagccugagaagagagcugagcggcuacugcagcaacaucaagcugcagguggugaaggacgcccaggcccugcugcacggccuggacuucagcgaggugagcaacgugcagagacugaugagaaagcagagaagagacgacaacgaccugaagagacugagagaccugaaccaggccgugaacaaccugguggagcugaagagcacccagcagaagagcgugcugagagugggcacccugaccagcgacgaccugcugacccuggccgccgaccuggagaagcugaagagcaaggugaccagaaccgagagaccccugaccgccggcguguacaugggcaaccugagcagccagcagcuggaccagagaagagcccugcugaacaugaucggcaugagcggcggcaaccagggcgccagaaccggcagagacggcguggugagagugugggacgugaagaacgccgagcugcugaacaaccaguucggcaccaugcccagccugacccuggccugccugaccaagcagggccagguggaccugaacgacguggugcaggcccugaccgaccugggccugaucuacaccgccaaguaccccaacaccagcgaccuggacagacugacccagagccaccccauccugaacaugaucgacaccaacaagagcagccugaacaucagcggcuacaacuucagccugggcgccgccgugaaggccggcgccugcaugcuggacggcggcaacaugcuggagaccaucaaggugagcccccagaccauggacggcauccugaagagcauccugaaggugaagaagagccugggcauguucaucagcgacacccccggcgagagaaaccccuacgagaacauccuguacaagaucugccugagcggcgacggcuggcccuacaucgccagcagaaccagcaucaccggcagagccugggagaacaccgugguggaccuggagagcggcggcaagccccagaaggccggcagcaacaacagcaacaagagccugcagagcgccggcuucgccgccggccugaccuacagccagcugaugacccugaaggacgccaugcugcagcuggaccccaacgccaagaccuggauggacaucgagggcagacccgaggaccccguggagaucgcccuguaccagcccaucagcggcugcuacauccacuucuucagagagcccaccgaccugaagcaguucaagcaggacgccaaguacagccacggcaucgacgugaccgaccuguucgccgcccagcccggccugaccagcgccgugaucgaggcccugcccagaaacauggugaucaccugccagggcagcgacgacaucagaaagcuguucgagagccagggcagaaaggacaucaagcugaucgacaucgcccugagcaagaccgacagcagaaaguacgagaacgccgugugggaccaguacaaggaccugugccacaugcacaccggcguggugguggagaagaagaagaagggcggcaaggaggagaucaccccccacugcgcccugauggacugcaucauguucgacgccgccgugagcggcggccugaacacccuggugcugagagccgugcugcccagagacaugguguucagaaccagcacccccaagguggugcugugaggacuaguuauaagacugacuagcccgaugggccucccaacgggcccuccuccccuccuugcaccgagauuaaucaaaggcucuuuucagagccaccaaaaaaaaaaaaaaaaaaaaaaaaaaaaaaaaaaaaaaaaaaaaaaaaaaaaaaaaaaaaaaaaaaaaaaaaaaaaaaaaaaaaaaaaaaaaaaaaaaaaa

SEQ ID NO: 21912 - RNA, 1974 nt, Artificial Sequence
  mRNA product Design i-3 (hSL-A100) comprising derived and/or modified sequence from LASV(Z0947-SLE-2011;Clade IV)__AIT17841__SP-IgE_NP(2-569) (opt4)
aggagaaagcuuaccauggacuggaccuggauccuguuccugguggccgccgccaccagagugcacagcagcgccagcaaggagaucaagagcuuccuguggacccagagccugagaagagagcugagcggcuacugcagcaacaucaagcugcagguggugaaggacgcccaggcccugcugcacggccuggacuucagcgaggugagcaacgugcagagacugaugagaaaggagagaagagacgacaacgaccugaagagacugagagaccugaaccaggccgugaacaaccugguggagcugaagagcacccagcagaagagcauccugagagugggcacccugaccagcgacgaccugcugauccuggccgccgaccuggagaagcugaagagcaaggugaccagaaccgagagaccccugagcgccggcguguacaugggcaaccugagcagccagcagcuggaccagagaagagcccugcugaacaugaucggcaugagcggcagcaaccagggcgccagaaccggcagagacggcguggugagagugugggacgugaagaacgccgagcugcugaacaaccaguucggcaccaugcccagccugacccuggccugccugaccaagcagggccagguggaccugaacgacgccgugcaggcccugaccgaccugggccugaucuacaccgccaaguaccccaacaccagcgaccuggacagacugacccagagccaccccauccugaacaugaucgacaccaagaagagcagccugaacaucagcggcuacaacuucagccugggcgccgccgugaaggccggcgccugcaugcuggacggcggcaacaugcuggagaccaucaaggugagcccccagaccauggacggcauccugaagagcauccugaaggugaagaaggcccugggcauguucaucagcgacgcccccggcgagagaaaccccuacgagaacauccuguacaagaucugccugagcggcgacggcuggcccuacaucgccagcagaaccagcaucaccggcagagccugggagaacaccgugguggaccuggagagcgacggcaagccccagaaggccggcagcaacggcagcaacaagagccugcagagcgccggcuucaccgccggccugaccuacagccagcugaugacccugaaggacgccaugcugcagcuggaccccaacgccaagaccuggauggacaucgagggcagacccgaggaccccguggagaucgcccuguaccagcccagcagcggcugcuacauccacuucuucagagagcccaccgaccugaagcaguucaagcaggacgccaaguacagccacggcaucgacgugaccgaccuguucgccgcccagcccggccugaccagcgccgugaucgacgcccugcccagaaacauggugaucaccugccagggcagcgacgacaucagaaagcuguucgagagccagggcagaaaggacaucaagcugaucgacaucgcccugagcaagaccgacagcagaaaguacgagaacgccgugugggaccaguacaaggaccugugccacaugcacaccggcaucgugguggagaagaagaagagaggcggcaaggaggagaucaccccccacugcgcccugauggacugcaucauguucgacgccgccgugagcggcggccugaacaccagcgugcugagagccgugcugcccagagacaugguguucagaaccagcacccccagaguggugcugugaggacuaguuauaagacugacuagcccgaugggccucccaacgggcccuccuccccuccuugcaccgagauuaaucaaaggcucuuuucagagccaccaaaaaaaaaaaaaaaaaaaaaaaaaaaaaaaaaaaaaaaaaaaaaaaaaaaaaaaaaaaaaaaaaaaaaaaaaaaaaaaaaaaaaaaaaaaaaaaaaaaaa

SEQ ID NO: 21913 - RNA, 1974 nt, Artificial Sequence
  mRNA product Design i-3 (hSL-A100) comprising derived and/or modified sequence from LASV(Josiah;Clade IV)__NP_694869__SP-IgE_NP(2-569) (opt5)
aggagaaagcuuaccauggacuggaccuggauccuguuccucguggccgcugccacaagaguccacagcagcgccuccaaggagaucaaaucuuuccuguggacccagagccucagacgggaacuguccggcuacugcucuaacauuaagcugcaaguggucaaagacgcucaggcccugcuccacgggcuggauuuuagcgagguuuccaaugugcagcgccuuaugagaaaggaacggcgcgacgauaacgaccugaaaagacuccgggaucugaaucaggcggugaacaaucuggucgagcucaagucuacacaacaaaagagcauccugcgcgugggaacgcuuaccuccgacgaucugcucauucuggcugccgaccuugaaaaacuuaagagcaaaguuaucagaacagagcggccccucucugccggcguguauauggggaaccuguccagccagcagcuggaucagcgcagagcucuccugaauaugauuggaaugucuggcgggaaccagggagcccgggcuggccgcgacggcgucgugagaguuugggaugugaagaaugccgagcuucugaacaaucaguucgggaccaugccuucccucacacuggcgugucuuaccaaacagggacaagucgaccugaacgaugccgugcaggcucucacagaccugggccugaucuacaccgccaaguauccgaauacgagcgaccucgaucggcugacccagucucaucccauccuuaacaugauugacacaaagaaauccagccugaauaucuccggguacaacuuuucucucggagcugccgugaaggcgggcgccugcaugcuggaugggggaaacaugcuugaaaccauuaaagucagcccucaaacaauggacggcauccugaaguccauucucaaaguuaagaaagcucugggcauguucaucagcgauacccccggggagcgcaauccuuaugaaaacauucuguacaagaucugucucucuggagacggcuggcccuauaucgccuccagaacgagcauuacagggcgggcuugggagaauaccgugguggaucuggagucugacggaaagccucagaaagccgauagcaacaauuccucuaagagccuucaguccgccggcuuuacagcugggcugaccuacagccagcucaugacccugaaagacgcgaugcugcaacuugauccgaacgccaagacauggauggacaucgaaggaagacccgaggacccugucgaaauugcucucuaccagcccucuuccggcugcuauauccacuucuuucgcgagccuacggaucugaaacaguucaagcaggacgccaaguacagccauggcauugaugugaccgaccuguuugccacacaacccgggcucaccucugcuguuaucgaugcccugccgcggaauauggugaucacaugucagggauccgacgauauuagaaaacuucuggaaagccagggccgcaaggacaucaaacucauugauaucgcgcuguccaagaccgacucucggaaauaugagaacgcugucugggaucaguacaaggaccugugccacaugcauacgggggugguuguggagaagaaaaagagaggaggcaaagaagagauuacaccucacugugcccuuauggauugcaucauguucgacgccgcugucagcgggggccucaauaccuccgugcugcgcgccguccugccccgggacaugguguuuagaaccucuacaccucgcguugugcucugaggacuaguuauaagacugacuagcccgaugggccucccaacgggcccuccuccccuccuugcaccgagauuaaucaaaggcucuuuucagagccaccaaaaaaaaaaaaaaaaaaaaaaaaaaaaaaaaaaaaaaaaaaaaaaaaaaaaaaaaaaaaaaaaaaaaaaaaaaaaaaaaaaaaaaaaaaaaaaaaaaaaa

SEQ ID NO: 21914 - RNA, 1974 nt, Artificial Sequence
  mRNA product Design i-3 (hSL-A100) comprising derived and/or modified sequence from LASV(LP;Clade I)__AAF86702__SP-IgE_NP(2-569) (opt5)
aggagaaagcuuaccauggacuggaccuggauccuguuccucguggccgcugccacaagaguccacagcagcaacuccaaggagaucaaaucuuuccuguggacccagagccucagacgggaacuguccggcuacugcucuaauauuaagcuccaaguggucaaagacgcccaggcucugcuccacgggcuggauuuuagcgagguuuccaacgugcagcgccuuaugagaaagcagaaacgggacgaugccgaccugaagcgccucagagaucugaaucaagcggugaacaaucuggucgaacucaagucuacacagcagaaaaacgugcugcggguuggaacgcuuagcuccgacgaucugaucacccucgcugccgaccuggagaaacuuaaaagcaaggugauucgcacagaaagaccccugucuuccggcgucuauauggggaaucucagcucucagcaacuggaucagcggcgcgcccugcucuccaugaucggaaugagcggcgggccucagggaaacagaaccggcggcgacggggugguucgggugugggaugucaaaaaugcugagcugcuuaacaaucaguucggaacaaugccgucucugacccucgccugucugacaaagcaaggccagguggaccuuaacgaugcugugcaggcccugaccgaccucgggcugauuuacacggcgaaguaucccaauuccagcgaccuggauaugcucacccaaucccauccuauccugggaauggucgacacaaagaagucuagccuuaacaucuccggcuacaauuuuagccugggggccgcuguuaaagccggagcuugcaugcucgauggcggcaacaugcuggagaccauuaaggugucuccccagacaauggacgggauccuuaaauccauucugaaggugaaacgcagccucggaauguucaucucugauaccccuggcgaaagaaaccccuaugagaauauucuguacaagaucugucugagcggggaaggauggccuuauauugccucccggacgucuaucacaggccgcgcgugggagaacacccucgucgaccuggagagcgauaauaagccgcccaaacuuaacuccgccgggagcaauaagucucugcaggcugccggacucaacgcuggccugacauacucccagcugaugacccuuaaagacugcaugcuccaacuggauccuagcucuaagaccuggaucgacauugaaggcagacccgaggauccuguggaaaucgcccuguuucagcccuccagcggguguuacauucacuucuuucgggagccgacagaccucaaacaguucaagcaggacgccaaguauucccauggaaucgauguuacggaccuguuuucuacccaaccuggccuuacaagcgcugugauugaagcgcugcccagaaauaugguccuuaccugccagggguccgaugacaucaaaaagcugcuggagucucagggacgccgggauaucaaacuuauugacaucagccucuccaaggccgauagcagaaaauucgagaacgcugugugggaccaguacaaggaucugugucacaugcauacaggcguuguggucgaaaagaaaaagcgcgggggcaaagaggaaauuaccccucacugcgcccugcucgacuguaucauguuugaugccgcuacgacaggaucucugaauauuaccacccuucgggccgugcugcccagagacauggucuuccgcacauccacccccaaggugguucucugaggacuaguuauaagacugacuagcccgaugggccucccaacgggcccuccuccccuccuugcaccgagauuaaucaaaggcucuuuucagagccaccaaaaaaaaaaaaaaaaaaaaaaaaaaaaaaaaaaaaaaaaaaaaaaaaaaaaaaaaaaaaaaaaaaaaaaaaaaaaaaaaaaaaaaaaaaaaaaaaaaaaa

SEQ ID NO: 21915 - RNA, 1974 nt, Artificial Sequence
  mRNA product Design i-3 (hSL-A100) comprising derived and/or modified sequence from LASV(803213;Clade II)__AAF86704__SP-IgE_NP(2-569) (opt5)
aggagaaagcuuaccauggacuggaccuggauccuguuccucguggccgcugccacaagaguccacagcagcgccuccaaggaggugaaaucuuuccuguggacccagagccucagacgggaacuguccggcuacugcucuaacaucaaacuucaagucguuaaggacgcucaggcccugcuccacgggcuggauuuuagcgaggugaauaacgugcagcgccuuaugagaaagcagaaacgggacgauggagaccugaagcgccucagagaucugaaucaagcggucaacaaucugguggaacucaaguccacacagcagaaaucuauucugcggguuggcacgcuuaccagcgacgaucugcucacacuggcugccgaccuugagaagcugaaauccaaggugauccgcaccgaaagaccccucagcucuggggucuauaugggaaaccuguccacacagcaacuggagcagcggcgcgcccuccugaauaugauuggcauggugggaggagcucagggcacccagccuggcagagaugggguugugcgggucugggacgugaaaaacccggaucuucugaauaaccaauucggaacaaugcccagccucacccuggccugucuuacgaagcagggccagguggaccugaaugaugcuguccucgcccugaccgaccuggggcucaucuacacagcgaaguauccuaacucuuccgaccuggaucgccuuagccaaucucaucccauucugaauaugguugacaccaaaaaguccagccucaacaucuccggauacaauuuuucucugggcgccgcugugaaagccggggcuugcaugcuugauggaggcaacaugcuggagacaaucaaggugaccccucagacgauggacggcauucucaaaagcauccugaaggucaaaagaucccuggggauguucgugagcgauacacccggagaacggaacccuuaugagaauauucucuacaagaucugucugucuggcgacggguggccguauauugccucccgcaccagcaucguugggagagcgugggaaaacacaaccguggaucuugagucugacggcaagccccagaaagucgggaccgccggaagcaauaagucccugcagucugcuggcuuuccuacaggccucacguacagccaacugaugacccugaaagauuccaugaugcagcuugaccccagcgccaagacauggauugauaucgaggggcggccugaagaccccguggagaucgcucucuaccagccgaugucuggaugcuauauucacuucuuuagagaaccuaccgaccugaaacaguucaagcaagaugccaaguacucccauggcaucgacguugccgaucuguuucccgcucagccugggcucacaagcgcggugauugaggcccugccccgcaacaugguccuuaccugucagggaucugacgauaucaaaaagcugcucgacucccagggccggagagauauuaaacugaucgacaucagccuguccaagguggauucucgcaaauucgaaaaugcugucugggaccaaugcaaggaucuuugucacaugcauacgggggugguuguggagaagaaaaagcggggcggaaaagaggaaauuacaccccacugcgcccucauggacuguaucauguuugaugccgcugucagcggcgggcugaacauuccugugcugagagccguucucccgcgcgacaugguguuccggaccuccucucccaaggucgugcugugaggacuaguuauaagacugacuagcccgaugggccucccaacgggcccuccuccccuccuugcaccgagauuaaucaaaggcucuuuucagagccaccaaaaaaaaaaaaaaaaaaaaaaaaaaaaaaaaaaaaaaaaaaaaaaaaaaaaaaaaaaaaaaaaaaaaaaaaaaaaaaaaaaaaaaaaaaaaaaaaaaaaa

SEQ ID NO: 21916 - RNA, 1977 nt, Artificial Sequence
  mRNA product Design i-3 (hSL-A100) comprising derived and/or modified sequence from LASV(GA391;Clade III)__CAA36646__SP-IgE_NP(2-570) (opt5)
aggagaaagcuuaccauggacuggaccuggauccuguuccucguggccgcugccacaagaguccacagcagcgccuccaaggaggugagaucuuuccuguggacccagagccuccggcgcgaacuguccggcuacugcucuaacaucaaacuucaagucguuaaggacgcucaggcccugcuccacgggcuggauuuuagcgagguguccaaugugcagagacuuaugcggaaacagaagcgcgacgauggagaccugaaaagacuccgggaucugaaccaagcggucaauaaccugguggaacucaagucuacacagcagaaaagcguucugcgcgugggcacgcuuuccagcgacgaucugcucauucuggcugccgaccuugagaaacugaagucuaaagucaccagaacagaacggccccucuccagcgggguguauaugggaaaucugucuucccagcaacuggaucagcgcagagcccuccugaacaugaucggcaugaccgggguuagcggaggcggcaagggggcuucugacggaauugugcgggucugggaugugaaaaaugccgagcuucugaacaaucaguucggcacaaugccuucccucacccuggcuugucuuacaaagcaggggcaaguggaccugaacgaugccguccaggcgcucaccgaccugggacugaucuacacggccaaguauccgaauagcuccgaccucgaucgccugucucagagccaucccauucuuaacaugaucgacaccaaaaaguccagccugaauaucucuggcuacaacuuuucccucggggcugccguuaaagcuggagccugcaugcuggauggcggcaauaugcuugagacaauuaaggugagcccucaaaccauggacgggauccugaaaucuauucucaaggugaaaaagagccugggaauguucgucuccgauacacccggcgaaagaaacccuuaugagaacauccuguacaagauuugucucucuggggacggauggcccuauaucgcgagccggaccuccauugugggccgcgccugggaaaauacgguuguggaucuggagcaggacaacaaaccucagaagaucgggaauggaggcagcaacaaaucucuucaguccgcuggcuuugccgcugggcugacauacagccaacucaugacccugaaggauuucaaaugcuuuaaucugaucccgaacgccaagacauggauggacauugagggaagacccgaagauccugucgagaucgcccuuuaccagcccucuuccggcuguuaugugcacuucuuucgggaaccuaccgaccucaagcaguucaaacaggacgcuaaguacagccaugggauugauguuaccgaccuguuugcggcccaacccggacugacauccgcugugaucgaggcccucccgagaaauauggucauuacgugccagggcucugaagauauccgcaaacugcuugagagccaggggcggagagacaucaagcugauugauaucacccucuccaaagccgacucucgcaaguucgagaacgcugugugggaucaguuuaaggaccugugucacaugcauacaggcgucgugguugaaaagaagaaacggggaggcaaggaggaaauuaccccucacugcgcccugauggauuguaucauguucgacgcggcugugagcgggggacuugaugccaaaguccucagagugguucugccccgcgacaugguguuccggacauccaccccuaaggucgugcugugaggacuaguuauaagacugacuagcccgaugggccucccaacgggcccuccuccccuccuugcaccgagauuaaucaaaggcucuuuucagagccaccaaaaaaaaaaaaaaaaaaaaaaaaaaaaaaaaaaaaaaaaaaaaaaaaaaaaaaaaaaaaaaaaaaaaaaaaaaaaaaaaaaaaaaaaaaaaaaaaaaaaa

SEQ ID NO: 21917 - RNA, 1974 nt, Artificial Sequence
  mRNA product Design i-3 (hSL-A100) comprising derived and/or modified sequence from LASV(AV;Clade V)__CCA30315__SP-IgE_NP(2-569) (opt5)
aggagaaagcuuaccauggacuggaccuggauccuguuccucguggccgcugccacaagaguccacagcagcgccuccaaggaggugaaaucuuuccuguggacccagagccucagacgggaacuguccggcuacugcucuaacaucaaacuucaagucguuaaggacgcucaggcccugcuccacgggcuggauuuuagcgagguguccaaugugcagcgccuuaugagaaagcagcggcgcgacgauucugaccugaaaagacuccgggaucugaaccaagcggucaauaaccugguggaacucaagagcacacagcagaaguccguucugcgcgugggaacgcuuagcucugacgaucugcucacccuggcugccgaccuugagaaacugaaguccaaagucacaagaaccgaacggccccucagcucuggcguguauauggggaaucuguccagccagcaacuggaucagcgcagagcccuccugaaccuuauuggaaugacaaauggcucucaggggucccaggcuggacgggacggcguugugcgcgucugggaugugaagaacgccgagcugcucaauaaccaauucggcaccaugccuagccugacacuugcuugucugaccaaacagggacagguggaccucaaugaugucguucaagcccugacggaccuggggcucaucuacaccgcgaaguauccgaacacauccgaccuggauagacuuacccagucucaucccauucugaauaugaucgacacaaagaaaagcucccucaacauuagcggcuacaauuuuucucugggggccgcugugaaggccggagcuugcaugcuugauggcgggaacaugcuggagaccaucaaaguguccccucagagcauggacggaauccucaagucuauucugaaagucaagcgggcccugggcauguucgugagcgauacgcccggcgaacgcaacccuuaugagaauauccucuacaaaauuugucuguccggggacggauggcccuauaucgcgucuagaacaagcauuguuggccgggccugggaaaacaccguggucgaucuugagacagacgggaagccucagaagaucggauccggcaauagcaacaaaucucugcaauccgcuggguuuagcgccggacucaccuacucucagcugaugacccugaaggaugcuaugcuucagcucgacccgaaugccaaaacauggauggauauugagggcagacccgaagacccuguggagguugcccuguaccagcccaucuccggcugcuauauccacuucuuucgcgaaccuacggaccugaagcaauucaaacaggaugcuaaguacagccaugggauugacaucgcggaucucuuugccgcucagcccggacugaccuccgccgugauugaggcccuuccgcggaacauggucaucacaugucagggcucugaagacauuaagaaacugcucgagagccaagggagaaaggauaucaaacugaucgacauugcucuguccaagaucgauucucgcaaauucgagaaugccgugugggaccaguauaaggaucuuugccacaugcauaccggagucgugguugaaaagaaaaagcggggcgggaaagaggaaauuacaccucacugugcgcucauggacugcaucauguuugaugcugccgugagcggcggacugaacacccugguccucagagccgugcugccccgcgacaugguuuuccggacguccacaccuagagugguccuuugaggacuaguuauaagacugacuagcccgaugggccucccaacgggcccuccuccccuccuugcaccgagauuaaucaaaggcucuuuucagagccaccaaaaaaaaaaaaaaaaaaaaaaaaaaaaaaaaaaaaaaaaaaaaaaaaaaaaaaaaaaaaaaaaaaaaaaaaaaaaaaaaaaaaaaaaaaaaaaaaaaaaa

SEQ ID NO: 21918 - RNA, 1974 nt, Artificial Sequence
  mRNA product Design i-3 (hSL-A100) comprising derived and/or modified sequence from LASV(Togo/2016/7082;Clade VI)__AMR44578__SP-IgE_NP(2-569) (opt5)
aggagaaagcuuaccauggacuggaccuggauccuguuccucguggccgcugccacaagaguccacagcagcaacuccaaggaggugaaaucuuuccuguggacccagagccucagacgggaacuguccggcuacugcucuaauaucaaacuucaagucguuaaagacgcccaggcucugcuccacgggcuggauuuuagcgagguguccaacgugcagcgccuuaugagaaagcagaaacgggacgauggagaccugaagcgccucagagaucugaaucaagccgucaacaaucugguggaacucaagucuguucagcagaaaagcauucugcgggugggcacacuuacguccgacgaucugcucacccuggcggcugaccuugagaagcugaaaagcaaggucacacgcaccgaaagaccccucucuuccgggguguauaugggaaaccugagcucucagcaacuggaucagcggcgcgcccuccuguccaugaucggcaugagcgggggaaaucagaacucucagccuaaaggcgacggcguugugagagucugggaugugaagaaugccgaccuucugaacaaucaauucgggacaaugccgucccucacccuggcuugucuuacaaagcagggacagguggaucugaacgacgccguccaagcucucaccgaccugggccugauuuacacggccaaauaucccaauagcuccgaucucgaccggcugucucagagccauccuauccuuaacaugauugauaccaagaaauccagccugaauaucucuggguacaacuuuucccucggagcggccaucaagacaggcgcuugcaugcuggacgggggaaacaugcuugagaccauuaaaguuacaccccagaccauggauggcauccucaagagcauucugaaagugaagcgcucucugggcauguucaucagcgacacgccuggggagagaaaucccuaugaaaacauucuguacaagaucugucucuccggagauggcuggccuuauauugccucucggacagcuaucaucgggcgcgccugggagaauaccguggucgaccuggaaagcgauuccaaaccgcagaagauuggaagcaacggcucuaauaaaucccuucaaagcgcgggguuugcccccggacugacauacucucagcucaugacccugaaggacuccaugcugcagcuugauccuaacgcuaaaaccuggaucgacauugagggcagacccgaggacccuguggaaguugcccucuuccagcccaucagcggcugcuacauucacuuuuuccgggagccgacagaucugaagcaauuuaagcaggacgcuaaauauucccaugggaucgaugugacggaccuguucgccgcccagccuggacucaccucugcugucaucgaagcgcugcccagaaauauggugcuuacaugucagggcagcgaugacauuaagaaacugcucgauucccaagggcgccgggacaucaagcugauugauguuucucugaacaaaaucgacagcagaaaguuugagaaugccgugugggaucaguacaaggaccuuugccacaugcauaccggagucguggucgaaaagaagaaaaagggcgggaaagaggagauuacaccucacugugcucuccuggauugcaucauguucgacgccgccguguccggcggacugaacgcuaccguucuccgcgccgugcugccccgggacauggucuuuagaacgagcucucccaaggugguucuuugaggacuaguuauaagacugacuagcccgaugggccucccaacgggcccuccuccccuccuugcaccgagauuaaucaaaggcucuuuucagagccaccaaaaaaaaaaaaaaaaaaaaaaaaaaaaaaaaaaaaaaaaaaaaaaaaaaaaaaaaaaaaaaaaaaaaaaaaaaaaaaaaaaaaaaaaaaaaaaaaaaaaa

SEQ ID NO: 21919 - RNA, 1974 nt, Artificial Sequence
  mRNA product Design i-3 (hSL-A100) comprising derived and/or modified sequence from LASV(KAK-428;Clade n.d. (VII))__ANH09741__SP-IgE_NP(2-569) (opt5)
aggagaaagcuuaccauggacuggaccuggauccuguuccucguggccgcugccacaagaguccacagcagcaacuccaaggaggugaaaucuuuccuguggacccagagccucagacgggaacuguccggcuacugcacaaauaucaaacuucaagucguuaaggacgcccaggcucugcuccacgggcuggauuuuucugaggugagcaacgugcagcgccuuaugagaaagcagaaacgggacgauaaugaccugaagcgccucagagaucugaaccaagccgucaauaaccugguggaacucaaguccguucagcagaaaucugugcugaaggucggaacgcuuaauagcgacgaucugcucacccuggcggcugaccuugagaaacugaaguccaaagugguucggacagaacgcccccucagcucuggcguguauauggggaaccuguccagccagcaacuggaucagagacgggcccuccugaauaugauuggaauggccggcgggucucagggaaaccagccuucccgcgacggcgucgugagagugugggaugucaagaaugcugaccuucugaacaaucaauucggcaccaugccgagccucacacuggccugucuuaccaagcaggggcagguugaucugaacgacguggugcucgcucugacagaccugggacucaucuacaccgccaaauaucccaauucuuccgaucuggaccggcuuagccaaaaccauccuguccugaacaugauugaugugaauaaguccucucucaacaucagcggcuacaauuuuucccugggggcggccguuaaagcuggagccugcaugcuugacggcgggaacaugcuggagacgauuaagaucagcccccagaccguggauggaauccucaaaucuauucugaaggucaaacgcgcucugggcauguucguguccgacacaccuggcgagagaaaucccuaugaaaacauccucuacaagguuugucugagcgggaauggauggccuuauauugccucucggaccagcaucgugggccgcgcgugggagaacacagucguggaucuugaauccaauaagaaccagccgaaagucgggaauaacggaucuaauaagaugcugcagagcuccggcuuugccaccgggcucacguacagccaacugaugacacugagagacucuaugcuucagcucgaucccaccgcuaaaacauggauugacaucgagggacggccugaggaucccguggaacuggcccuguuccagccuuccagcggcugcuacauucacuuuuucagagagcccaccgaccucaagcaguuuaaacaagacgcuaaguauucucauggcaucgauguuaacgaccuguucuccgcccagccggggcuuaccagcgccgugcuggaagcucucccucgcaauaugguccugacaugucagggauccgaugacauccggaagcugcuugauucucaggacagaaaagauauuaagcucaucgacauuagccuguccaaagcggaugcccgcaaguuugagaacgacgugugggaucaauucaaagaccugugccacaugcauacgggcaucguuguggaaaagaagaaaaagggagggaaacaggagaugacaccccacugugcucuccuggauugcauuauguuugacgccgccgucucuggcgggcuuaacgugccuacccugcgggcugugcuccccaccgacaugguuuucagaacaaucaccacgaaggucgugcugugaggacuaguuauaagacugacuagcccgaugggccucccaacgggcccuccuccccuccuugcaccgagauuaaucaaaggcucuuuucagagccaccaaaaaaaaaaaaaaaaaaaaaaaaaaaaaaaaaaaaaaaaaaaaaaaaaaaaaaaaaaaaaaaaaaaaaaaaaaaaaaaaaaaaaaaaaaaaaaaaaaaaa

SEQ ID NO: 21920 - RNA, 1974 nt, Artificial Sequence; identical to SEQ ID NO: 21914
  mRNA product Design i-3 (hSL-A100) comprising derived and/or modified sequence from LASV(Pinneo-NIG-1969;Clade I)__AIT17837__SP-IgE_NP(2-569) (opt5)

SEQ ID NO: 21921 - RNA, 1974 nt, Artificial Sequence
  mRNA product Design i-3 (hSL-A100) comprising derived and/or modified sequence from LASV(ISTH0009-NIG-2011;Clade II)__AIT17405__SP-IgE_NP(2-569) (opt5)
aggagaaagcuuaccauggacuggaccuggauccuguuccucguggccgcugccacaagaguccacagcagcguguccaaggaggucaaaucuuuccuguggacccagagccucagacgggaacuguccggcuacugcucuaacaucaaacuucaaguugugaaggacgcccaggcucugcuccacgggcuggauuuuagcgagguguccaauguccagcgccuuaugagaaagcagaaacgggacgauucugaccugaagcgccucagagaucugaaccaagccgugaauaaccugguugaacucaagagcacacagcagaaauccauucugcgggugggaacgcuuaccagcgacgaucugcucacacuggcggcugaccuugagaagcugaaaucuaaggucauccgcaccgaaagaccccucuccagcggcguguauauggggaaucugucuacacagcaacuggagcagcggcgcgcccuccugaacaugauuggaaugguuggcggggcccagggaacccagccuggcagagauggcgugguccgggugugggacgugaaaaauccggaucuucugaacaaucaauucgggacaaugcccucccucacccuggcuugucuuacgaagcagggacaggucgaccugaacgaugccguucucgcucugaccgaccugggccucaucuacacagccaaguauccuaauagcucugaccuggaucgccuuucccaaagccaucccauucugaacaugguggacaucaaaaaguccucucucaauaucagcggguacaacuuuucccugggagcggccgugaaagcuggcgccugcaugcuugaugggggaaauaugcuggagaccauuaaggucacaccucagaccauggacggcauccucaaaagcauucugaaggugaaaagaucucugggcauguucguuuccgauacgcccggggaacggaacccuuaugagaacauccucuacaagauuugucugagcggagacggcuggccguauaucgcuucucgcacaagcauuguggggagagccugggaaaauaccacagucgaucuugaguccgacggaaagccccagaaagugggcucugcggggagcaacaagucccugcagagcgccggauuuccuaccggccucaccuacucucaacugaugacacugaaagauuccaugaugcagcuugaccccagcgcuaagacguggaucgauaucgagggccggccugaagaccccguugagauugcccucuaccagccgaugucugggugcuauauccacuucuuuagagaaccuaccgaccugaaacaguucaagcaagaugcuaaguacucccauggaauugacguggccgaucuguuucccgcccagccuggccucacaagcgcugucaucgaggcgcugccccgcaauauggugcuuaccugucagggguccgacgauauuaaacggcugcucgacucucagggaagacgcgauaucaagcugaucgacauugcccugagcaaagcugauucccggagauucgaaaacgccgucugggaccaaugcaaggaucuuugucacaugcauacaggcgugguuguggagaaaaagaagcgcgggggcaaagaggaaaucacgccccacugcgcccucauggacuguauuauguaugaugcugccgucucuggaggccugaauaucccugugcugcgggcgguucucccgagagacaugguguuucgcaccagcucccccaaggucgugcugugaggacuaguuauaagacugacuagcccgaugggccucccaacgggcccuccuccccuccuugcaccgagauuaaucaaaggcucuuuucagagccaccaaaaaaaaaaaaaaaaaaaaaaaaaaaaaaaaaaaaaaaaaaaaaaaaaaaaaaaaaaaaaaaaaaaaaaaaaaaaaaaaaaaaaaaaaaaaaaaaaaaaa

SEQ ID NO: 21922 - RNA, 1974 nt, Artificial Sequence
  mRNA product Design i-3 (hSL-A100) comprising derived and/or modified sequence from LASV(ISTH2010-NIG-2012;Clade II)__AIT17483__SP-IgE_NP(2-569) (opt5)
aggagaaagcuuaccauggacuggaccuggauccuguuccucguggccgcugccacaagaguccacagcagcgccuccaaggaggugaaaucuuuccuguggacccagagccucagacgggaacuguccggcuacugcucuaacaucaaacuucaagucguuaaggacgcucaggcccugcuccacgggcuggauuuuagcgagguguccaaugugcagcgccuuaugagaaagcagaaacgggacgauucugaccugaagcgccucagagaucugaaccaagcggucaauaaccugguggaacucaagagcacacagcagaaauccauucugcggguuggaacgcuuaccagcgacgaucugcucacacuggcugccgaccuugagaagcugaaaucuaaggugauccgcaccgaaagaccccucuccagcggcgucuauauggggaaucugucuacacagcaacuggagcagcggcgcgcccuccugaaccuuauuggaauggugggcggggcucagggaacccagccuggcagagauggcguugugcgggucugggacgugaaaaauccggaucugcucaacaaucaauucgggacaaugcccucccugacccuugccugucugacgaagcagggacagguggaccucaacgaugcuguccuggcccugaccgaccucggccugaucuacacagcgaaguauccuaauagcucugaccuugaucgccugucccaaagccaucccauucucaacaugguugacaccaaaaaguccucucugaauaucagcggguuuaacuucucccuuggagccgcugugaaagccggcgcuugcaugcuggaugggggaaauaugcucgagacaaucaaggugaccccucagacgauggacggcauucugaaaagcauccugaaggucaaaaagucucucggcauguuuguguccgauacacccggggaaagaaacccuuacgagaacauucuguauaagaucugucuuagcggagacggcuggccguacauugccucucggaccagcaucguugggcgcgcgugggaaaauacaaccguggaucuggaguccgacggaaaaccccacaaggucggcaccgccgggucuaacaaaagccuccaguccgcuggauucccuacaggccugacguauagccagcugaugacccuuaaggauucuaugaugcaacucgaccccuccgccaaaacauggauugauaucgagggcagaccugaagaccccguggagaucgcucuguaccagccgaugagcgggugcuacauucacuuuuuccgggaaccuaccgaccugaagcaguuuaagcaggaugccaaauauucucauggaaucgacguugccgaucucuuccccgcucaaccuggccugacauccgcggugauugaggcccuucccagaaauaugguccugaccugucaggggagcgacgauaucaagcgccuccuggacucccagggacggagagauauuaaacugaucgacaucgcucuuucuaaggccgauagccgccgguuugaaaacgccgugugggaccagugcaaagaucucugucauaugcacacgggcgucgugguugagaagaagaaaagagggggcaaggaggaaauuacaccccacugcgcucugauggacuguaucauguacgaugccgcgguguccggaggccugaauauuccuguccuccgcgcugugcugccgcgggacaugguuuucagaaccucuagccccaaagugguccuuugaggacuaguuauaagacugacuagcccgaugggccucccaacgggcccuccuccccuccuugcaccgagauuaaucaaaggcucuuuucagagccaccaaaaaaaaaaaaaaaaaaaaaaaaaaaaaaaaaaaaaaaaaaaaaaaaaaaaaaaaaaaaaaaaaaaaaaaaaaaaaaaaaaaaaaaaaaaaaaaaaaaaa

SEQ ID NO: 21923 - RNA, 1974 nt, Artificial Sequence
  mRNA product Design i-3 (hSL-A100) comprising derived and/or modified sequence from LASV(Lassa virus/H.sapiens-wt/NGA/2015/ISTH_0543;Clade II)__AVO03640__SP-IgE_NP(2-569) (opt5)
aggagaaagcuuaccauggacuggaccuggauccuguuccucguggccgcugccacaagaguccacagcagcgccuccaaggaggugaaaucuuuccuguggacccagagccucagacgggaacuguccggcuacugcucuaacaucaaacuucaagucguuaaggacgcucaggcccugcuccacgggcuggauuuuagcgagguguccaaugugcagcgccuuaugagaaagcagaaacgggacgauucugaccugaagcgccucagagaucugaaccaagcggucaauaaccugguggaacucaagagcacacagcagaaauccauucugcggguuggaacgcuuaccagcgacgaucugcucacacuggcugccgaccuugagaagcugaaaucuaaggugauccgcaccgaaagaccccucuccagcggcgucuauauggggaaucugucuacacagcaacuggagcagcggcgcgcccuccugaacaugauuggaauggugggcggggcucagggaacccagccuggcagagauggcguugugcgggucugggacgugaaaaauccggaucuucugaacaaucaauucgggacaaugcccucccucacccuggccugucuuacgaagcagggacagguggaccugaacgaugcuguccucgcccugaccgaccugggccucaucuacacagcgaaguauccuaauagcucugaccuggaucgccuuucccaaagccaucccauucugaacaugguugacaccaaaaaguccucucucaauaucagcggguacaacuuuucccugggagccgcugugaaagccggcgcuugcaugcuugaugggggaaauaugcuggagacaaucaaggugaccccucagacgauggacggcauucucaaaagcauccugaaggucaaaaagucucugggcauguucguguccgauacacccggggaaagaaacccuuaugagaacauucucuacaagaucugucugagcggagacggcuggccguauauugccucucggaccagcaucguugggcgcgcgugggaaaauacaaccguggaucuugaguccgacggaaaaccccagaaggucggcucugccgggagcaacaaaucccugcagagcgcuggauuuccuaccggccucacauacucucaacugaugacgcugaaggauuccaugaugcagcuugaccccagcgccaaaaccuggauugauaucgagggcagaccugaagaccccguggagaucgcucucuaccagccgaugucugggugcuauauucacuucuuucgggaaccuacagaccugaagcaguucaagcaagaugccaaauacucccauggaaucgacguugccgaucuguuucccgcucagccuggccucaccagcgcggugauugaggcccugcccagaaauaugguccuuacaugucagggguccgacgauaucaagcgccugcucgacucucagggacggaaagauauuaagcugaucgacaucgcucugagcaaagccgauuccagacgcuucgaaaacgccgugugggaccaaugcaaggaucuuugucacaugcauaccggcgucgugguugagaagaaaaagagagggggcaaagaggaaauuacgccccacugcgcucucauggacuguaucauguaugaugccgcggugucuggaggccugaauauuccuguccugcgggcugugcucccgcgcgacaugguuuuucggacaagcucccccaaggugguccugugaggacuaguuauaagacugacuagcccgaugggccucccaacgggcccuccuccccuccuugcaccgagauuaaucaaaggcucuuuucagagccaccaaaaaaaaaaaaaaaaaaaaaaaaaaaaaaaaaaaaaaaaaaaaaaaaaaaaaaaaaaaaaaaaaaaaaaaaaaaaaaaaaaaaaaaaaaaaaaaaaaaaa

SEQ ID NO: 21924 - RNA, 1974 nt, Artificial Sequence
  mRNA product Design i-3 (hSL-A100) comprising derived and/or modified sequence from LASV(Lassa virus/H.sapiens-wt/NGA/2016/ISTH_0009;Clade II)__AVO03572__SP-IgE_NP(2-569) (opt5)
aggagaaagcuuaccauggacuggaccuggauccuguuccucguggccgcugccacaagaguccacagcagcgccuccaaggaggugaaaucuuuccuguggacccagagccucagacgggaacuguccggcuacugcucuaacaucaaacuucaagucguuaaggacgcucaggcccugcuccacgggcuggauuuuagcgagguguccaaugugcagcgccuuaugagaaagcagaaacgggacgauucugaccugaagcgccucagagaucugaaccaagcggucaauaaccugguggaacucaagagcacacagcagaaauccauucugcggguuggaacgcuuaccagcgacgaucugcucacacuggcugccgaccuugagaagcugaaaucuaaggugauccgcaccgaaagaccccucuccagcggcgucuauauggggaaucugucuacacagcaacuggagcagcggcgcgcccuccugaacaugauuggaauggugggcggggcucagggaacccagccuggcagagauggcguugugcgggucugggacgugaaaaauccggaucuucugaacaaucaauucgggacaaugcccucccucacccuggccugucuuacgaagcagggacagguggaccugaacgaugcuguccucgcccugaccgaccugggccucaucuacacagcgaaguauccuaauagcucugaccuggaucgccuuucccaaagccaucccauucugaacaugguugacaccaaaaaguccucucucaauaucagcggguacaacuuuucccugggagccgcugugaaagccggcgcuugcaugcuugaugggggaaauaugcuggagacaaucaaggugaccccucagacgauggacggcauucucaaaagcauccugaaggucaaaaagucucugggcauguucguguccgauacacccggggaaagaaacccuuaugagaacauucucuacaagaucugucugagcggagacggcuggccguauauugccucucggaccagcaucguugggcgcgcgugggaaaauacaaccguggaucuugaguccgacggaaaaccccagaaggucggcucugccgggagcaacaaaucccugcagagcgcuggauuuccuaccggccucacauacucucaacugaugacgcugaaggauuccaugaugcagcuugaccccagcgccaaaaccuggauugauaucgagggcagaccugaagaccccguggagaucgcucucuaccagccgaugucugggugcuauauucacuucuuucgggaaccuacagaccugaagcaguucaagcaagaugccaaauacucccauggaaucgacguugccgaucuguuucccgcucagccuggccucaccagcgcggugauugaggcccugcccagaaauaugguccuuacaugucagggguccgacgauaucaagcgccugcucgacucucagggacggagagauauuaaacugaucgacaucgcucugagcaaggccgauucccgccgguucgaaaacgccgugugggaccaaugcaaagaucuuugucacaugcauaccggcgucgugguugagaagaagaaaagagggggcaaggaggaaauuacgccccacugcgcucucauggacuguaucauguaugaugccgcggugucuggaggccugaauauuccuguccugcgcgcugugcucccgcgggacaugguuuuuagaacaagcucccccaaagugguccugugaggacuaguuauaagacugacuagcccgaugggccucccaacgggcccuccuccccuccuugcaccgagauuaaucaaaggcucuuuucagagccaccaaaaaaaaaaaaaaaaaaaaaaaaaaaaaaaaaaaaaaaaaaaaaaaaaaaaaaaaaaaaaaaaaaaaaaaaaaaaaaaaaaaaaaaaaaaaaaaaaaaaa

SEQ ID NO: 21925 - RNA, 1974 nt, Artificial Sequence
  mRNA product Design i-3 (hSL-A100) comprising derived and/or modified sequence from LASV(Lassa virus/H.sapiens-wt/NGA/2016/ISTH_0017;Clade II)__AVO03568__SP-IgE_NP(2-569) (opt5)
aggagaaagcuuaccauggacuggaccuggauccuguuccucguggccgcugccacaagaguccacagcagcgccuccaaggaggugaaaucuuuccuguggacccagagccucagacgggaacuguccggcuacugcucuagcaucaaacuucaagucguuaaggacgcucaggcccugcuccacgggcuggauuuuuccgaggugucuaacgugcagcgccuuaugagaaagcagaaacgggacgauagcgaccugaagcgccucagagaucugaaucaagcggucaacaaucugguggaacucaaguccacacagcagaaaagcauucugcggguuggaacgcuuaccucugacgaucugcucacacuggcugccgaccuugagaagcugaaauccaaggugauccgcaccgaaagaccccucagcucuggcgucuauauggggaaccuguccacacagcaacuggagcagcggcgcgcccuccugaauaugauuggaauggcuggcggggcccagggaacccagccuggcagagauggcgugguucgggugugggacgucaaaaacccggaucuucugaauaaccaauucgggacaaugcccagccucacccuggcuugucuuacgaagcagggacagguggaccugaaugaugccgugcucgcgcugaccgaccugggccucaucuacacagccaaguauccuaacucuuccgaccuggaucgccuuagccaaucccaucccauucugaauauggucgacaccaaaaagucuagccucaacaucuccggguacaauuuuagccugggagcugccguuaaagcuggcgccugcaugcuugaugggggaaacaugcuggagacaaucaaggugaccccucagacgauggacggcauucucaaaucuauccugaaggugaaaagaucccugggcauguucgucagcgaugcgcccggggaacggaauccuuaugagaacauucucuacaagaucugucugucuggagacggcuggccguauauugccagccgcacauccaucguggggagagcuugggaaaacaccacaguugaucuugagucugacggaaagccccagaaagugggcgccaccgggagcaauaagucccugcagagcgcuggauuuccuaccggccucacauacucucaacugaugacgcugaaagauuccaugaugcagcuugaccccagcgccaagaccuggauugauaucgagggccggccugaagaccccgucgagguggcccucuaccagccgguuucugggugcuauauccacuucuuuagagaaccuacagaccugaaacaguucaagcaagaugcuaaguacucccauggaauugacguggcggaucuguuucccgcccagccuggccucaccagcgcugucaucgaggcccugccccgcaacauggugcuuacaugucagggguccgacgauauuaaaaagcugcucgacucucagggacggaaagauaucaagcugauugacaucgcccugagcaaagcugauuccagacgcuucgaaaaugccgucugggaccaaugcaaggaucuuugucacaugcauaccggcgugguuguggagaagaaaaagagagggggcaaagaggaaaucacgccccacugcgcgcucauggacuguauuauguaugaugcugccgucucuggaggccugaacaucccugugcugcgggccguucucccgcgcgacaugguguuucggacaagcucccccaaggucgugcugugaggacuaguuauaagacugacuagcccgaugggccucccaacgggcccuccuccccuccuugcaccgagauuaaucaaaggcucuuuucagagccaccaaaaaaaaaaaaaaaaaaaaaaaaaaaaaaaaaaaaaaaaaaaaaaaaaaaaaaaaaaaaaaaaaaaaaaaaaaaaaaaaaaaaaaaaaaaaaaaaaaaaa

SEQ ID NO: 21926 - RNA, 1974 nt, Artificial Sequence
  mRNA product Design i-3 (hSL-A100) comprising derived and/or modified sequence from LASV(Lassa virus/H.sapiens-wt/NGA/2018/ISTH_0959;Clade II)__AVV65100__SP-IgE_NP(2-569) (opt5)
aggagaaagcuuaccauggacuggaccuggauccuguuccucguggccgcugccacaagaguccacagcagcgccuccaaggaggugaaaucuuuccuguggacccagagccucagacgggaacuguccggcuacugcucuaacaucaaacuucaagucguuaaggacgcucaggcccugcuccacgggcuggauuuuagcgagguguccaaugugcagcgccuuaugagaaagcagaaacgggacgauucugaccugaagcgccucagagaucugaaccaagcggucaauaaccugguggaacucaagagcacccagcagaaauccauucugcggguuggaacgcuuaccagcgacgaucugcucacacuggcugccgaccuugagaagcugaaaucuaaggugauccgcaccgaaagaccccucuccagcggcgucuauauggggaaucugucuacacagcaacuggagcagcggcgcgcccuccugaaccuuauuggaauggugggcggggcucagggaacccagccuggcagagauggcguugugcgggucugggacgugaaaaauccggaucugcucaacaaucaauucgggacaaugcccucccugacccuugccugucugacgaagcagggacagguggaccucaacgaugucguucuggcucugaccgaccucggccugaucuacacagccaaguauccuaauagcucugaccuugaucgccugucccaaagccaucccauucucaacaugguggacaccaaaaaguccucucugaauaucagcggguuuaacuucucccuuggagcggccgugaaagcuggcgccugcaugcuggaugggggaaauaugcucgagacaaucaaggucaccccucagacgauggacggcauucugaaaagcauccugaaggugaaaaagucucucggcauguuuguuuccgauacacccggggaaagaaacccuuacgagaacauucuguauaagaucugucuuagcggagacggcuggccguacauugcuucucggaccagcaucguggggcgcgccugggaaaauacaaccgucgaucuggaguccgacggaaaaccccacaaggugggcaccgcggggucuaacaaaagccuccaguccgccggauucccuacaggccugacguauagccagcugaugacccuuaaggauucuaugaugcaacucgaccccuccgcuaaaacauggauugauaucgagggcagaccugaagaccccguugagaucgcccuguaccagccgaugagcgggugcuacauucacuuuuuccgggaaccuaccgaccugaagcaguuuaagcaggaugcuaaauauucucauggaaucgacguggccgaucucuuccccgcccaaccuggccugacauccgcugucauugaggcgcuucccagaaauauggugcugaccugucaggggagcgacgauaucaagcgccuccuggacucccagggacggaaagauauuaagcugaucgacaucgcccuuucuaaaacggauagcagacgcuuugaaaacgcugucugggaccagugcaaggaucucugucauaugcacacaggcgugguuguggagaagaaaaagagagggggcaaagaggaaauuacaccccacugcgcccugauggacuguaucauguacgaugccgcugucuccggaggccugaauauuccugugcuccgggccguucugccgcgcgacaugguguuccggaccucuagccccaaggucgugcuuugaggacuaguuauaagacugacuagcccgaugggccucccaacgggcccuccuccccuccuugcaccgagauuaaucaaaggcucuuuucagagccaccaaaaaaaaaaaaaaaaaaaaaaaaaaaaaaaaaaaaaaaaaaaaaaaaaaaaaaaaaaaaaaaaaaaaaaaaaaaaaaaaaaaaaaaaaaaaaaaaaaaaa

SEQ ID NO: 21927 - RNA, 1974 nt, Artificial Sequence
  mRNA product Design i-3 (hSL-A100) comprising derived and/or modified sequence from LASV(LASV003-NIG-2008;Clade II)__AIT17581__SP-IgE_NP(2-569) (opt5)
aggagaaagcuuaccauggacuggaccuggauccuguuccucguggccgcugccacaagaguccacagcagcgccuccaaggaggugaaaucuuuccuguggacccagagccucagacgggaacuguccggcuacugcucuagcaucaaacuucaagucguuaaggacgcucaggcccugcuccacgggcuggauuuuuccgaggugucuaacgugcagcgccuuaugagaaagcagaaacgggacgauagcgaccugaagcgccucagagaucugaaucaagcggucaacaaucugguggaacucaaguccacccagcagaaaagcguucugcgggugggaacgcuuaccucugacgaucugcucacacuggcugccgaccuugagaagcugaaauccaaggucauucgcaccgaaagaccccucagcucuggcguguauauggggaaccuguccgcccagcaacuggagcagcggcgcacacuccugaauaugaucggaaugguuggcggggcucagggaacccagccuggcagagauggcgugguccgggugugggacgugaaaaacccggaucuucugaauaaccaauucgggacaaugcccagccucacccuggccugucuuacgaagcagggacaggucgaccugaaugauguugugcucgcucugaccgaccugggccucauuuacacagccaaguauccuaacucuuccgaccuggaucgccuuagccaaucccaucccauccugucuaugguggacaccaaaaagagcucccucaauauuagcggguacaacuuuucucugggagcggccgucaaagcuggcgccugcaugcuugaugggggaaauaugcuggagacaaucaaggugaccccucagacgauggacggcauccucaaauccauucugaagguuaaaaagagccugggcauguucgugucugauacacccggggaaagaaacccuuaugagaauauccucuacaagauuugucugagcggagacggcuggccguauaucgcuucccggaccucuauugucgggcgcgccugggaaaacacaaccguggaucuugagagcgacggaaaaccccagaagguuggcaccgcgggguccaacaaaagccugcagucugccggauuuccuacaggccucacguacucccaacugaugacccugaaggauagcaugaugcagcuugaccccucugcuaaaacauggaucgauauugagggcagaccugaagaccccguggagaucgcccucuaccagccgauguccgggugcuauauccacuucuuucgggaaccuaccgaccugaagcaguucaagcaagaugcuaaauacagccauggaauugacgucacagaucuguuucccgcccagccuggccucaccuccgccgugaucgaggcucugcccagaaauaugguccuuacgugucaggggucugacgauauuaagcgccugcucgacagccagggacggagagauaucaaacugauugacaucgcgcuguccaaggccgauucucgccgguucgaaaacgcugugugggaccaaugcaaagaucuuugucacaugcauacaggcguuguggucgagaagaagaaaagagggggcaaggaggaaaucacaccccacugcgcccucauggacuguauuauguaugaugccgcugugagcggaggccugaauaucccuguucugcgcgccgugcucccgcgggacauggucuuuagaaccuccagccccaaaguggugcugugaggacuaguuauaagacugacuagcccgaugggccucccaacgggcccuccuccccuccuugcaccgagauuaaucaaaggcucuuuucagagccaccaaaaaaaaaaaaaaaaaaaaaaaaaaaaaaaaaaaaaaaaaaaaaaaaaaaaaaaaaaaaaaaaaaaaaaaaaaaaaaaaaaaaaaaaaaaaaaaaaaaaa

SEQ ID NO: 21928 - RNA, 1974 nt, Artificial Sequence
  mRNA product Design i-3 (hSL-A100) comprising derived and/or modified sequence from LASV(LASV035-NIG-2009;Clade II)__AIT17589__SP-IgE_NP(2-569) (opt5)
aggagaaagcuuaccauggacuggaccuggauccuguuccucguggccgcugccacaagaguccacagcagcgccuccaaggaggugaaaucuuuccuguggacccagagccucagacgggaacuguccggcuacugcucuagcaucaaacuucaagucguuaaagacgcucaggcccugcuccacgggcuggauuuuuccgaggugucuaacgugcagcgccuuaugagaaagcagaaacgggacgauagcgaccugaagcgccucagagaucugaaucaagcggucaacaaucugguggaacucaaguccacacagcagaaaagcauucugcggguuggaacgcuuaccucugacgaucugcucacacuggcugccgaccuugagaagcugaaauccaaggugauccgcaccgaaagaccccucagcucuggcgucuauauggggaaccuguccgcccagcaacuggagcagcggcgcgcucuccugaauaugauuggaauggugggcggggcccagggaacacagccuggcagagauggcguugugcgggucugggacgugaaaaacccggaucuucugaauaaccaauucgggaccaugcccagccucacacuggcuugucuuaccaagcagggacagguggaccugaaugaugccguccucgcgcugacggaccugggccucaucuacaccgccaaguauccuaacucuuccgaccuggaucgccuuagccaaucccaucccauucugaauaugguugacacaaagaagucuagccucaacaucuccggguacaauuuuagccugggagcugccgugaaagcuggcgccugcaugcuugaugggggaaacaugcuggagaccaucaaggugacaccucagaccauggacggcauucucaaaucuauccugaaggucaaaagaucccugggcauguucgugagcgauacgcccggggaacggaauccuuaugagaacauucucuacaagaucugucugucuggagacggcuggccguauauugcgagccgcacauccaucguugggagagccugggaaaacaccacaguggaucuugagucugacggaaagccccagaaagucggcaccaccgggagcaauaagucccugcagagcgcuggauuuccuacaggccucacguacucucaacugaugacccugaaagauuccaugaugcagcuugaccccagcgccaagacauggauugauaucgagggccggccugaagaccccguggagaucgcucucuaccagccgaugucugggugcuauauucacuucuuuagagaaccuaccgaccugaaacaguucaagcaagaugccaaguacucccauggaaucgacguugccgaucuguuucccgcucagccuggccucacaagcgcggugauugaggcccugccccgcaacaugguccuuaccugucagggguccgacgauaucaaaaagcugcucgacucucagggacggagagauauuaaacugaucgacaucgcucugagcaaggccgauucccgcaaauucgaaaaugccgugugggaccaaugcaaggaucuuugucacaugcauacgggcgucgugguugagaagaaaaagagagggggcaaagaggaaauuacaccccacugcgcucucauggacuguaucauguaugaugccgcggugucuggaggccugaacauuccuguccugcgggcugugcucccgcgcgacaugguuuuucggaccagcucccccaaggugguccugugaggacuaguuauaagacugacuagcccgaugggccucccaacgggcccuccuccccuccuugcaccgagauuaaucaaaggcucuuuucagagccaccaaaaaaaaaaaaaaaaaaaaaaaaaaaaaaaaaaaaaaaaaaaaaaaaaaaaaaaaaaaaaaaaaaaaaaaaaaaaaaaaaaaaaaaaaaaaaaaaaaaaa

SEQ ID NO: 21929 - RNA, 1974 nt, Artificial Sequence
  mRNA product Design i-3 (hSL-A100) comprising derived and/or modified sequence from LASV(LASV1000-NIG-2009;Clade II)__AIT17783__SP-IgE_NP(2-569) (opt5)
aggagaaagcuuaccauggacuggaccuggauccuguuccucguggccgcugccacaagaguccacagcagcgccuccaaggaggugaaaucuuuccuguggacccagagccucagacgggaacuguccggcuacugcucuaacaucaaacuucaagucguuaaggacgcucaggcccugcuccacgggcuggauuuuagcgagguguccaaugugcagcgccuuaugagaaagcagaaacgggacgauucugaccugaagcgccucagagaucugaaccaagcggucaauaaccugguggaacucaagagcacacagcagaaauccauucugcggguuggaacgcuuaccagcgacgaucugcucacacuggcugccgaccuugagaagcugaaaucuaaggugauccgcaccgaaagaccccucuccagcggcgucuauauggggaaucugucuacacagcaacuggagcagcggcgcgcccuccugaacaugauuggaauggugggcggggcucagggaacccagccuggcagagauggcguugugcgggucugggacgugaaaaauccggaucuucugaacaaucaauucgggacaaugcccucccucacccuggccugucuuacgaagcagggacagguggaccugaacgaugucguucucgcucugaccgaccugggccucaucuacacagccaaguauccuaauagcucugaccuggaucgccuuucccaaagccaucccauucugaacaugguggacaccaaaaaguccucucucaauaucagcggguacaacuuuucccugggagcggccgugaaagcuggcgccugcaugcuugaugggggaaauaugcuggagacaaucaaggucaccccucagacgauggacggcauucucaaaagcauccugaaggugaaaaagucucugggcauguucguuuccgauacacccggggaaagaaacccuuaugagaacauucucuacaagaucugucugagcggagacggcuggccguauauugcuucucggaccagcaucguggggcgcgccugggaaaauacaaccgucgaucuugaguccgacggaaaaccccagaaggugggcaccgcggggucuaacaaaagccugcaguccgccggauuuccuacaggccucacguacagccaacugaugacccugaaggauucuaugaugcagcuugaccccuccgcuaaaacauggauugauaucgagggcagaccugaagaccccguugagaucgcccucuaccagccggugagcgggugcuauauucacuucuuucgggaaccuaccgaccugaagcaguucaagcaagaugcuaaauacucucauggaaucgacgucgccgaucuguuucccgcccagccuggccucacauccgcugugauugaggcgcugcccagaaauaugguccuuaccugucaggggagcgacgauaucaagcgccugcucgacucccagggacggagagauauuaaacugaucgacaucgcccugucuaaggcugauagccgccgguucgaaaacgccgugugggaccaaugcaaagaucuuugucacaugcauacgggcguuguggucgagaagaagaaaagagggggcaaggaggaaauuacaccccacugcgcccucauggacuguaucauguaugaugcugccguguccggaggccugaauauuccuguucugcgcgcggugcucccgcgggacauggucuuuagaaccucuagccccaaaguggugcugugaggacuaguuauaagacugacuagcccgaugggccucccaacgggcccuccuccccuccuugcaccgagauuaaucaaaggcucuuuucagagccaccaaaaaaaaaaaaaaaaaaaaaaaaaaaaaaaaaaaaaaaaaaaaaaaaaaaaaaaaaaaaaaaaaaaaaaaaaaaaaaaaaaaaaaaaaaaaaaaaaaaaa

SEQ ID NO: 21930 - RNA, 1974 nt, Artificial Sequence
  mRNA product Design i-3 (hSL-A100) comprising derived and/or modified sequence from LASV(LASV221-NIG-2010;Clade II)__AIT17625__SP-IgE_NP(2-569) (opt5)
aggagaaagcuuaccauggacuggaccuggauccuguuccucguggccgcugccacaagaguccacagcagcgccuccaaggaggugaaaucuuuccuguggacccagagccucagacgggaacuguccggcuacugcucuagcaucaaacuucaagucguuaaggacgcucaggcccugcuccacgggcuggauuuuuccgaggugucuaacgugcagcgccuuaugagaaagcagcggcgcgacgauagcgaccugaaaagacuccgggaucugaaucaagcggucaacaaucugguggaacucaaguccacacagcaaaagagcauucugcgcguuggaacgcuuaccucugacgaucugcucacacuggcugccgaccuugagaaacugaaguccaaagugaucagaaccgaacggccccucagcucuggcgucuauauggggaaccuguccacacagcagcuggagcagcgcagagcccuccugaauaugauuggaauggugggcggggcucagggaacccagccuggccgggauggcguugugcgcgucugggacgugaagaacccggaucuucugaauaaccaauucgggacaaugcccagccucacccuggccugucuuacgaaacagggacagguggaccugaaugaugcuguccucgcccugaccgaccugggccucaucuacacagcgaaguauccuaacucuuccgaccuggauagacuuagccaaucccaucccauucugaauaugguugacaccaagaaaucuagccucaacaucuccggguacaauuuuagccugggagccgcugugaaggccggcgcuugcaugcuugaugggggaaacaugcuggagacaaucaaagugaccccucagacggucgacggcauucucaagucuauccugaaagugaagcggucccugggcauguucguuagcgauacacccggggaacgcaauccuuaugagaacauucucuacaaaaucugucugucuggagacggcuggccguauauugccagcagaaccuccaucguggggcgggcgugggaaaacacaaccgucgaucuugagucugacggaaagccccagaaggugggcaccgccgggagcaauaaaucccugcagagcgcuggauuuccuacaggccucacguacucucaacugaugacccugaaggauuccaugaugcagcuugaccccagcgccaaaacauggauugauaucgagggcagaccugaagaccccguugagaucgcucucuaccagccgaugucugggugcuauauucacuucuuucgcgaaccuaccgaccugaagcaguucaaacaagaugccaaguacucccauggaaucgacguggccgaucuguuucccgcucagccuggccucacaagcgcggucauugaggcccugccccggaacauggugcuuaccugucagggguccgacgauaucaagagacugcucgacucucagggacgccgggauauuaaacugaucgacaucgcucugagcaaggccgauuccagaaaauucgaaaaugccgucugggaccaaugcaaggaucuuugucacaugcauacgggcgugguuguggagaaaaagaagcgcgggggcaaagaggaaauuacaccccacugcgcucucauggacuguaucauguaugaugccgcggucucuggaggccugaacauuccugugcugcgggcuguucucccgagagacaugguguuucgcaccagcucccccaaggucgugcugugaggacuaguuauaagacugacuagcccgaugggccucccaacgggcccuccuccccuccuugcaccgagauuaaucaaaggcucuuuucagagccaccaaaaaaaaaaaaaaaaaaaaaaaaaaaaaaaaaaaaaaaaaaaaaaaaaaaaaaaaaaaaaaaaaaaaaaaaaaaaaaaaaaaaaaaaaaaaaaaaaaaaa

SEQ ID NO: 21931 - RNA, 1974 nt, Artificial Sequence
  mRNA product Design i-3 (hSL-A100) comprising derived and/or modified sequence from LASV(LASV237-NIG-2010;Clade II)__AIT17639__SP-IgE_NP(2-569) (opt5)
aggagaaagcuuaccauggacuggaccuggauccuguuccucguggccgcugccacaagaguccacagcagcgccuccaaggaggugaaaucuuuccuguggacccagagccucagacgggaacuguccggcuacugcucuaacaucaaacuucaagucguuaaggacgcucaggcccugcuccacgggcuggauuuuagcgagguguccaaugugcagcgccuuaugagaaagcagaaacgggacgauucugaccugaagcgccucagagaucugaaccaagcggucaauaaccugguggaacucaagagcacacagcagaaauccauucugcggguuggaacgcuuaccagcgacgaucugcucacacuggcugccgaccuugagaagcugaaaucuaaggugauccgcaccgaaagaccccucuccagcggcgucuauauggggaaucugucuacacagcaacuggagcagcggcgcgcccuccugaacaugauuggaauggugggcggggcucagggaacccagccuggcagagauggcguugugcgggucugggacgugaaaaauccggaucuucugaacaaucaauucgggacaaugcccucccucacccuggccugucuuacgaagcagggacagguggaccugaacgaugcuguccucgcccugaccgaccugggccucaucuacacagcgaaguauccuaauagcucugaccuggaucgccuuucccaaagccaucccauucugaacaugguugacaucaaaaaguccucucucaauaucagcggguacaacuuuucccugggagccgcugugaaagccggcgcuugcaugcuugaugggggaaauaugcuggagaccauuaaggugacaccucagaccauggacggcauccucaaaagcauucugaaggucaaaagaucucugggcauguucguguccgauacgcccggggaacggaacccuuaugagaacauccucuacaagauuugucugagcggagacggcuggccguauaucgccucucgcacaagcauuguugggagagcgugggaaaauaccacaguggaucuugaguccgacggaaagccccagaaagucggcucugccgggagcaacaagucccugcagagcgcuggauuuccuaccggccucaccuacucucaacugaugacacugaaagauuccaugaugcagcuugaccccagcgccaagacguggaucgauaucgagggccggccugaagaccccguggagauugcucucuaccagccgaugucugggugcuauauccacuucuuuagagaaccuaccgaccugaaacaguucaagcaagaugccaaguacucccauggaauugacguugccgaucuguuucccgcucagccuggccucacaagcgcggugaucgaggcccugccccgcaauaugguccuuaccugucagggguccgacgauauuaaacggcugcucgacucucagggaagacgcgauaucaagcugaucgacauugcucugagcaaagccgauucccggagauucgaaaacgccgugugggaccaaugcaaggaucuuugucacaugcauacaggcgucgugguugagaaaaagaagcgcgggggcaaagaggaaaucacgccccacugcgcucucauggacuguauuauguaugaugccgcggugucuggaggccugaauaucccuguccugcgggcugugcucccgagagacaugguuuuucgcaccagcucccccaaggugguccugugaggacuaguuauaagacugacuagcccgaugggccucccaacgggcccuccuccccuccuugcaccgagauuaaucaaaggcucuuuucagagccaccaaaaaaaaaaaaaaaaaaaaaaaaaaaaaaaaaaaaaaaaaaaaaaaaaaaaaaaaaaaaaaaaaaaaaaaaaaaaaaaaaaaaaaaaaaaaaaaaaaaaa

SEQ ID NO: 21932 - RNA, 1974 nt, Artificial Sequence
  mRNA product Design i-3 (hSL-A100) comprising derived and/or modified sequence from LASV(LASV253-NIG-2011;Clade II)__AIT17671__SP-IgE_NP(2-569) (opt5)
aggagaaagcuuaccauggacuggaccuggauccuguuccucguggccgcugccacaagaguccacagcagcgccuccaaggaggugaaaucuuuccuguggacccagagccucagacgggaacuguccggcuacugcucuagcaucaaacuucaagucguuaaggacgcucaggcccugcuccacgggcuggauuuuuccgaggugucuaacgugcagcgccuuaugagaaagcagaaacgggacgauagcgaccugaagcgccucagagaucugaaucaagcggucaacaaucugguggaacucaaguccacccagcagaaaagcguucugcgggugggaacgcuuaccucugacgaucugcucacacuggcugccgaccuugagaagcugaaauccaaggucauucgcaccgaaagaccccucagcucuggcguguauauggggaaccuguccacacagcaacuggagcagcggcgcgcccuccugaauaugaucggaaugguuggcggggcucagggaacccagccuggcagagauggcgugguccgggugugggacgugaaaaacccggaucuucugaauaaccaauucgggacaaugcccagccucacccuggccugucuuacgaagcagggacaggucgaccugaaugauguugugcucgcucugaccgaccugggccucauuuacacagccaaguauccuaacucuuccgaccuggaucgccuuagccaaucccaucccauccugaauaugguggacaccaaaaagucuagccucaacauuuccggguacaauuuuagccugggagcggccgucaaagcuggcgccugcaugcuugaugggggaaacaugcuggagacaaucaaggugaccccucagacgauggacggcauccucaaaucuauucugaagguuaaaaagucccugggcauguucgugagcgauacacccggggaaagaaauccuuaugagaacauccucuacaagauuugucugucuggagacggcuggccguauaucgcuagccggaccuccauugucgggcgcgccugggaaaacacaaccguggaucuugagucugacggaaaaccccagaagguuggcaccgcggggagcaauaaaucccugcagagcgccggauuuccuacaggccucacguacucucaacugaugacccugaaggauuccaugaugcagcuugaccccagcgcuaaaacauggaucgauauugagggcagaccugaagaccccguggagaucgcccucuaccagccgaugucugggugcuauauccacuucuuucgggaaccuaccgaccugaagcaguucaagcaagaugcuaaauacucccauggaauugacgucacagaucuguuucccgcccagccuggccucaccagcgccgugaucgaggcucugcccagaaacaugguccuuacgugucagggguccgacgauauuaagcgccugcucgacucucagggacggagagauaucaaacugauugacaucgcgcugagcaaggccgauucccgccgguucgaaaaugcugugugggaccaaugcaaagaucuuugucacaugcauacaggcguuguggucgagaagaagaaaagagggggcaaggaggaaaucacaccccacugcgcccucauggacuguauuauguaugaugccgcugugucuggaggccugaacaucccuguucugcgcgccgugcucccgcgggacauggucuuuagaaccagcucccccaaaguggugcugugaggacuaguuauaagacugacuagcccgaugggccucccaacgggcccuccuccccuccuugcaccgagauuaaucaaaggcucuuuucagagccaccaaaaaaaaaaaaaaaaaaaaaaaaaaaaaaaaaaaaaaaaaaaaaaaaaaaaaaaaaaaaaaaaaaaaaaaaaaaaaaaaaaaaaaaaaaaaaaaaaaaaa

SEQ ID NO: 21933 - RNA, 1974 nt, Artificial Sequence
  mRNA product Design i-3 (hSL-A100) comprising derived and/or modified sequence from LASV(LASV254-NIG-2011;Clade II)__AIT17675__SP-IgE_NP(2-569) (opt5)
aggagaaagcuuaccauggacuggaccuggauccuguuccucguggccgcugccacaagaguccacagcagcgccuccaaggaggugaaaucuuuccuguggacccagagccucagacgggaacuguccggcuacugcucuagcaucaaacuucaagucguuaaggacgcucaggcccugcuccacgggcuggauuuuuccgaggugucuaacgugcagcgccuuaugagaaagcagaaacgggacgauagcgaccugaagcgccucagagaucugaaucaagcggucaacaaucugguggaacucaaguccacacagcagaaaagcguucugcgggugggaacgcuuaccucugacgaucugcucacacuggcugccgaccuugagaagcugaaauccaaggucauucgcaccgaaagaccccucagcucuggcguguauauggggaaccuguccacacagcaacuggagcagcggcgcgcccuccugaauaugaucggaaugguuggcggggcucagggaacccagccuggcagagauggcgugguccgggugugggacgugaaaaacccggaucuucugaauaaccaauucgggacaaugcccagccucacccuggccugucuuacgaagcagggacaggucgaccugaaugaugcuguucucgcccugaccgaccugggccucauuuacacagcgaaguauccuaacucuuccgaccuggaucgccuuagccaaucccaucccauccugaauaugguggacaccaaaaagucuagccucaacauuuccggguacaauuuuagccugggagccgcugugaaagccggcgcuugcaugcuugaugggggaaacaugcuggagacaaucaaggucaccccucagacgauggacggcauccucaaaucuauucugaaggugaaaaagucccugggcauguucguuagcgauacacccggggaaagaaauccuuaugagaacauccucuacaagauuugucugucuggagacggcuggccguauaucgccagccggaccuccauuguggggcgcgcgugggaaaacacaaucgucgaucuugagucugacggaaaaccccagaaggugggcaccgccgggagcaauaaaucccugcagagcgcuggauuuccuaccggccucacauacucucaacugaugacgcugaaggauuccaugaugcagcuugaccccagcgccaaaaccuggauugauaucgagggcagaccugaagaccccguugagaucgcucucuaccagccgaugucugggugcuauauucacuucuuucgggaaccuacagaccugaagcaguucaagcaagaugccaaauacucccauggaaucgacguggccgaucuguuucccgcucagccuggccucaccagcgcggucauugaggcccugcccagaaacauggugcuuacaugucagggguccgacgauaucaagcgccugcucgacucucagggacggagagauauuaaacugaucgacaucgcucugagcaaggccgauucccgccgguucgaaaaugccgucugggaccaaugcaaagaucuuugucacaugcauaccggcgugguuguggagaagaagaaaagagggggcaaggaggaaauuacgccccacugcgcucucauggacuguaucauguaugaugccgcggucucuggaggccugaacauuccugugcugcgcgcuguucucccgcgggacaugguguuuagaacaagcucccccaaagucgugcugugaggacuaguuauaagacugacuagcccgaugggccucccaacgggcccuccuccccuccuugcaccgagauuaaucaaaggcucuuuucagagccaccaaaaaaaaaaaaaaaaaaaaaaaaaaaaaaaaaaaaaaaaaaaaaaaaaaaaaaaaaaaaaaaaaaaaaaaaaaaaaaaaaaaaaaaaaaaaaaaaaaaaa

SEQ ID NO: 21934 - RNA, 1974 nt, Artificial Sequence
  mRNA product Design i-3 (hSL-A100) comprising derived and/or modified sequence from LASV(Nig08-04;Clade II)__ADU56611__SP-IgE_NP(2-569) (opt5)
aggagaaagcuuaccauggacuggaccuggauccuguuccucguggccgcugccacaagaguccacagcagcgccuccaaggaggugaaaucuuuccuguggacccagagccucagacgggaacuguccggcuacugcucuaacaucaaacuucaagucguuaaggacgcucaggcccugcuccacgggcuggauuuuagcgagguguccaaugugcagcgccuuaugagaaagcagaaacgggacgauggagaccugaagcgccucagagaucugaaccaagcggucaauaaccugguggaacucaagucuacccagcagaaaagcguucugcgggugggcacgcuuaccuccgacgaucugcucacacuggcugccgaccuugagaagcugaaaagcaaggucauucgcaccgaaagaccccucucuuccgggguguauaugggaaaucugagcacacagcaacuggagcagcggaaagcccuccugucuaugaucggcaugguugggggagcucagggcacccagccuggccgcgaugggguggucagagugugggacgugaagaacccggaucuucugaauaaccaauucggaacaaugcccucccucacccuggccugucuuacgaagcagggccaggucgaccugaaugaugcuguucucgcccugaccgaccuggggcucauuuacacagcgaaauauccuaacagcucugaccuggaucggcuuucccaaagccaucccauccugaauaugguggacaccaagaaauccucucucaacauuagcggauacaauuuuucccugggcgccgcugugaaggccggggcuugcaugcuugauggaggcaacaugcuggagacaaucaaagucaccccucagacgauggacggcauccucaagagcauucugaaagugaagcgcucucuggggauguucguuuccgauacacccggagaaagaaauccuuaugagaacauccucuacaagauuugucugagcggcgacggguggccguauaucgccucucggaccagcauugugggacgcgcgugggaaaacacaaccgucgaucuugaguccgacggcaaaccccagaagguggggaccgccggaucuaauaaaagccugcaguccgcuggcuuuccuacaggccucacguacagccaacugaugacccugaaggauucuaugaugcagcuugaccccuccgccaaaacauggaucgauauugaggggagaccugaagaccccguugagaucgcucucuaccagccgaugagcggaugcuauauccacuucuuucgggaaccuaccgaccugaagcaguucaagcaagaugccaaauacucucauggcauugacgugacagaucuguuuuccgcccagcccgggcucaccagcgcugucaucgaggcgcugccuagaaacauggugcuuacgugucagggauccgacgauauuaagaaacugcucgacucucagggccgccgggauaucaagcugauugacaucagccugaauaaagccgauuccagacgcuucgaaaacgcugucugggaccaaugcaaggaucuuugucacaugcauacaggggugguuguggagaagaaaaagcggggcggaaaagaggaaaucacaccccacugcgcccucauggacuguauuauguuugaugccgcugucucuggcgggcugaauauccccauucugagagccgugcucccucgcgacaugguuuuccggaccagcuccccgaaggugguccugugaggacuaguuauaagacugacuagcccgaugggccucccaacgggcccuccuccccuccuugcaccgagauuaaucaaaggcucuuuucagagccaccaaaaaaaaaaaaaaaaaaaaaaaaaaaaaaaaaaaaaaaaaaaaaaaaaaaaaaaaaaaaaaaaaaaaaaaaaaaaaaaaaaaaaaaaaaaaaaaaaaaaa

SEQ ID NO: 21935 - RNA, 1977 nt, Artificial Sequence
  mRNA product Design i-3 (hSL-A100) comprising derived and/or modified sequence from LASV(GA391;Clade III)__AAA46284__SP-IgE_NP(2-570) (opt5)
aggagaaagcuuaccauggacuggaccuggauccuguuccucguggccgcugccacaagaguccacagcagcgccuccaaggaggugagaucuugccuguggacccagagccuccggcgcgaacuguccggcuacuguucuaacaucaaacuucaagucguuaaggacgcucaggcccugcuccacgggcuggauuucagcgagguguccaaugugcagagacuuaugcggaaacagaagcgcgacgauggagaccugaaaagacuccgggaucugaaccaagcggucaauaaccugguggaacucaagucuacacagcagaaaagcguucugcgcgugggcacgcuuuccagcgacgaucugcucauucuggcugccgaccuugagaaacugaagucuaaagucaccagaacagaacggccccucuccagcgggguguauaugggaaaucugucuucccagcaacuggaucagcgcagagcccuccugaacaugaucggcaugaccgggguuagcggaggcggcaagggggcuucuaauggaauugugcgggucugggacgugaaaaacgccgagcuucugaauaaccaguuuggcacaaugccuucccucacccuggcuugccuuacaaagcaggggcaaguggaucugaaugacgccguccaggcgcucaccgaucugggacugaucuacacggccaaguauccgaacagcuccgaccucgaccgccugucucagagccaucccauucuuaauaugaucgauaccaaaaaguccagccugaacaucucuggcuacaauuucucccucggggcugccguuaaagcuggagccuguaugcuggacggcggcaacaugcuugagacaauuaaggugagcccucaaaccauggaugggauccugaaaucuauucucaaggugaaaaagagccugggaauguuugucuccgacacacccggcgaaagaaacccuuaugagaauauccuguacaagauuugccucucuggggauggauggagcuauaucgcgucccggaccagcauugugggccgcgccugggaaaacacgguuguggaccuggagcaggauaauaaaccccagaagaucgggaacggaggcucuaauaaaucccuucagagcgcuggcuucgccgcugggcugaucuacucucaacucaugacacugaaggacuuuaaauguuucaaccugauuccuaaugccaagaccuggauggauaucgagggaagaccggaagaccccgucgagauugcccuuuaccagccuuccagcggcugcuaugugcacuuuuuccgggaacccacagaucucaagcaguuuaaacaggacgcuaaguacucccaugggagagacguuaccgaucuguucgcggcccaaccuggacugaccucugcugugaucgaggcccucccccgcaacauggucauuacaugucagggcagcgaagacauccggaaacugcuugagucccaggggagacgcgauaucaagcugauugacaucacgcucucuaaagccgauagccggaaguuugagaaugcugugugggaccaguucaaggaucugugccacaugcauaccggcgucgugguugaaaagaagaaaagaggaggcaaggaggaaauuacaccgcacugugcccugauggacugcaucauguuugaugcggcuguguccgggggacuugacgccaaaguccuccgcgugguucugccucgggauaugguguucagaaccagcacacccaaggucgugcugugaggacuaguuauaagacugacuagcccgaugggccucccaacgggcccuccuccccuccuugcaccgagauuaaucaaaggcucuuuucagagccaccaaaaaaaaaaaaaaaaaaaaaaaaaaaaaaaaaaaaaaaaaaaaaaaaaaaaaaaaaaaaaaaaaaaaaaaaaaaaaaaaaaaaaaaaaaaaaaaaaaaaa

SEQ ID NO: 21936 - RNA, 1974 nt, Artificial Sequence
  mRNA product Design i-3 (hSL-A100) comprising derived and/or modified sequence from LASV(Nig08-A19;Clade III)__ADU56619__SP-IgE_NP(2-569) (opt5)
aggagaaagcuuaccauggacuggaccuggauccuguuccucguggccgcugccacaagaguccacagcagcgccuccaaggaggugaaaucuuuccuguggacccagagccucagacgggaacuguccggcuacugcucuaacaucaaacuucaagucguuaaggacgcucaggcccugcuccacgggcuggauuuuagcgagguguccaaugugcagcgccuuaugagaaagcagaaacgggacgauggagaccugaagcgccucagagaucugaaccaagcggucaauaaccugguggaacucaagucuacacagcagaaaagcguucugcgggugggcacgcuuuccagcgacgaucugcucguccuggcugccgaccuugagaagcugaaaucuaaggugguucgcaccgaaagaccccucuccagcgggauuuauaugggaaaucugucuucccagcaacuggaucagcggaaagcccuccugaacaugaucggcaugacagggggaaauggcggccgcaacaccacaagcgacgggauugugagagucugggaugugaagaaugcugagcuucugaacaaucaguucggaaccaugccuucucucacacuggccugucuuaccaagcagggccaaguggaccugaacgaugcuguccaggcccucacggaccuggggcugaucuacaccgcgaaauaucccaauuccagcgaccucgaucggcuggcccagucccauccgauucuuaacaugaucgacacaaagaaaucuagccugaauaucuccggauacaacuuuagccucggcgcugccguuaaggcuggggccugcaugcuggauggaggcaacaugcuugagaccauuaaagugucuccucaaacaauggacggcauccugaaguccauucucaaagugaagcgcagccuggggauguucaucucugauacccccggagaaagaaauccuuaugagaacauucuguacaagaucugucucagcggcgacggguggcccuauauugcgucccggacgucuaucgucggacgcgccugggaaaauacagugguugaucuggagagcgacaacaaaccucagaagaccggcaaugggggauccaacaaaagccuucagucugcuggcuuugccgcuggccugacauacucccagcucaugacccugaaggauagcaugcugcaacuugacccgaaugccaaaaccuggauggauaucgaggggagacccgaagacccuguggagauugcccucuaccagcccucuuccggaugcuauauccacuucuuucgggaaccuacagaccugaagcaguucaagcaggaugcuaaauacagccauggcauugacgucacggaucuguuugcggcccaacccgggcucaccuccgcugugaucgaggcccugccgagaaacaugguuauuacaugucagggaucugaagacauccgcaaacuucuggagagccagggccggagagauaucaagcucauugacaucucccugucuaagguggauagccgcaaauucgagaaugccgucugggaccaguuuaaggaucugugccacaugcauaccgggauuguggucgaaaagaaaaagcggggcggaaaagaggaaaucacaccucacugugcucuuauggacugcauuauguucgaugccgcgguguccggcgggguugacgcuaaggugcucagagccguccugccccgcgauaugguguuucggaccagcacgccuaaaguugugcugugaggacuaguuauaagacugacuagcccgaugggccucccaacgggcccuccuccccuccuugcaccgagauuaaucaaaggcucuuuucagagccaccaaaaaaaaaaaaaaaaaaaaaaaaaaaaaaaaaaaaaaaaaaaaaaaaaaaaaaaaaaaaaaaaaaaaaaaaaaaaaaaaaaaaaaaaaaaaaaaaaaaaa

SEQ ID NO: 21937 - RNA, 1974 nt, Artificial Sequence
  mRNA product Design i-3 (hSL-A100) comprising derived and/or modified sequence from LASV(G1180-SLE-2010;Clade IV)__AIT17169__SP-IgE_NP(2-569) (opt5)
aggagaaagcuuaccauggacuggaccuggauccuguuccucguggccgcugccacaagaguccacagcagcgccuccaaggagaucaaaucuuuccuguggacccagagccucagacgggaacuguccggcuacugcucuaacauuaagcugcaaguggucaaagacgcucaggcccugcuccacgggcuggauuuuagcgagguuuccaaugugcagcgccuuaugagaaaggaacggcgcgacgauaacgaccugaaaagacuccgggaucugaaucaggcggugaacaaucuggucgagcucaagucuacacaacaaaagagcauccugcgcgugggaacgcuuaccuccgacgaucugcucauucuggcugccgaccuugaaaaacuuaagagcaaaguuaucagaacagagcggccccucucugccggcguguauauggggaaccuguccagccagcagcuggaucagcgcagagcucuccugucuaugauuggaauguccagcggcaaucagcgggcccaggcugggcgcgacggagucgugagaguuugggaugugaagaacgucgagcuucugaauaaccaguucggcaccaugccuucucucacacuggccugucuuaccaaacaaggccagguggaccugaaugaugcggugcaggcccucacagaccuggggcugaucuacaccgcuaaguauccgaacacguccgaccucgaucggcugacccaaagccaucccauccuuaauaugauugacacaaagaaauccucucugaacaucagcggauacaauuuuucccucggcgccgcugucaaggccggggcgugcaugcuggauggaggcaacaugcuugaaaccauuaaaguuagcccucagacaauggacgggauccugaagucuauucucaaagugaagaaagcccugggaauguucaucuccgauacccccggcgagcgcaacccuuaugaaaauauucuguacaagaucugucucagcggcgacggguggcccuauaucgcuucuagaacgagcauuacaggacgggccugggagaacaccguggucgaucuggaguccgacggcaagccucagaaagcugggucuaauaacagcaauaagucccuucagagcgugggauuuacagccggccugaccuacucucaacucaugacccugaaagaugccaugcugcagcuugacccgaacgcuaagacauggauggauaucgaagggagacccgaggacccuguugaaauugcgcucuaccagcccuccagcggaugcuauauccacuucuuucgcgagccuacggaccugaaacaguucaagcaagaugccaaguacucucauggcauugacgugaccgaucuguuugcugcccagcccggccucacauccgccgucaucgacgcucugccgcggaauauggugaucaccugucaggggagcgaugacauuagaaaacuucuggaaucccagggacgcaaggauaucaaacucauugacaucgcccugucuaagacagauagccggaaauaugagaacgcgguuugggaccaauacaaggaucugugccacaugcauaccggcguggucguggagaagaaaaagagagggggaaaagaagagauuacgccucacugugcucuuauggacugcaucauguucgaugccgccgucuccggcgggcucaauacaucugugcugcgcgcuguucugccccgggacaugguguuuagaaccagcaccccucgcgucgugcucugaggacuaguuauaagacugacuagcccgaugggccucccaacgggcccuccuccccuccuugcaccgagauuaaucaaaggcucuuuucagagccaccaaaaaaaaaaaaaaaaaaaaaaaaaaaaaaaaaaaaaaaaaaaaaaaaaaaaaaaaaaaaaaaaaaaaaaaaaaaaaaaaaaaaaaaaaaaaaaaaaaaaa

SEQ ID NO: 21938 - RNA, 1974 nt, Artificial Sequence
  mRNA product Design i-3 (hSL-A100) comprising derived and/or modified sequence from LASV(G1442-SLE-2011;Clade IV)__AIT17181__SP-IgE_NP(2-569) (opt5)
aggagaaagcuuaccauggacuggaccuggauccuguuccucguggccgcugccacaagaguccacagcagcgccuccaaggaggugaaaucuuuccuguggacccagagccucagacgggaacuguccggcuacugcucuaacaucaaacuucaagucguuaaggacgcucaggcccugcuccacgggcuggauuuuagcgagguguccaaugugcagcgccuuaugagaaagcagcggcgcgacgauaacgaccugaaaagacuccgggaucugaaucaagcggucaacaaucugguggaacucaagucuacacagcaaaagagcguucugcgcgugggaacgcuuaccuccgacgaucugcucguccuggcugccgaccuugagaaacuuaagagcaaagugauuagaacagaacggccccucucugccggcguuuauauggggaaccuguccagccagcagcuggaucagcgcagagcucuccugaauaugaucggaaugucuggcgggauucagggaacccggacaggccgcgacggcguggucagagugugggaugugaagaacgccgaccuucugaauaaccaguucgggaccaugccuucccucacacuggcuugucuuaccaaacaaggacaggucgaucugaaugacguugugcaggcccucacggaccugggccugaucuacaccgcgaaguauccgaacgccagcgaucucgaccggcugacacaaucucaucccauucuuaauaugaucgauaccaagaaauccagccugaacaucuccggguacaauuuuucucucggagcugccgugaaggcuggcgccugcaugcuggacgggggaaacaugcuugagacaauuaaagucagcccucagaccauggauggcauccugaaguccauucucaaagugaagaaaacgcugggcauguucaucagcgacacacccggggagcgcaacccuuaugaaaauauucuguacaagaucugucucucuggagauggcuggcccuauauugcguccagaaccagcaucacagggcgggccugggagaacaccguuguggaccuggaaucugauggaaagccucagaaagcuggcagcaauaacuccaauaagucucuucagagcgccggguuugcugccggacugaccuacucccaacucaugacacugaaagacgccaugcugcagcuugauccgaacgcuaagacguggauggacaucgagggcagacccgaggacccugucgaaauugcgcucuaccagcccagcucuggcugcuauauccacuucuuucgcgagccuaccgaucugaaacaguucaagcaagacgccaaguacucccaugggauugaugugacagaccuguuugcugcccagcccggacucaccagcgccguuaucgaagcucugccgcggaauauggugauuacaugucagggcucugaugacaucaaaaagcugcuggagucccaggggagaaaagauaucaagcucauugacaucgcccugagcaaaaccgauucccgcaaguaugaaaacgcggucugggaccaauacaaggaucugugccacaugcauacgggaguggucguggagaaaaagaaacggggcgggaaggaggaaauuacaccucacugugcucuuauggacugcaucauguucgaugccgccguuucuggcggacucaauacccuggugcugagagcuguccucccccgcgacaugguguuucggaccagcacaccuagaguugugcugugaggacuaguuauaagacugacuagcccgaugggccucccaacgggcccuccuccccuccuugcaccgagauuaaucaaaggcucuuuucagagccaccaaaaaaaaaaaaaaaaaaaaaaaaaaaaaaaaaaaaaaaaaaaaaaaaaaaaaaaaaaaaaaaaaaaaaaaaaaaaaaaaaaaaaaaaaaaaaaaaaaaaa

SEQ ID NO: 21939 - RNA, 1974 nt, Artificial Sequence
  mRNA product Design i-3 (hSL-A100) comprising derived and/or modified sequence from LASV(G3010-SLE-2013;Clade IV)__AIT17345__SP-IgE_NP(2-569) (opt5)
aggagaaagcuuaccauggacuggaccuggauccuguuccucguggccgcugccacaagaguccacagcagcgccuccaaggagaucaaaucuuuccuguggacccagagccucagacgggaacuguccggcuacugcucuaacauuaaacuucaaguggucaaagacgcucaggcccugcuccacgggcuggauuuuagcgagguuuccaaugugcagcgccuuaugagaaaggaacggcgcgacgauaacgaccugaaaagacuccgggaucugaaucaggcggugaacaaucuggucgagcucaagucuacacaacaaaagagcauccugcgcgugggaacgcuuaccuccgacgaucugcucauucuggcugccgaccuugaaaaacuuaagagcaaaguuacaagaaccgagcggccccucucugccggcguguauauggggaaccuguccagccagcagcuggaucagcgcagagcucuccugucuaugaucggaauguccagcggcguccagggggcccgggcuggacgcgacggcgugguuagagugugggaugucaagaaugccgagcuucugaacaaucaguucggcacaaugccuucucucacccuggcgugucuuacaaaacaggggcaaguggaccugaacgaugugguccaggcccucaccgaccugggacugauuuacacggcuaaguauccgaauaccuccgaccucgaucggcugacacagagccaucccauccuuaacaugaucgacaccaagaaauccucucugaauauuagcggcuacaacuuuucccucggggccgcuguuaaggccggagcgugcaugcuggauggcgggaauaugcuugaaacaaucaaagugagcccucaaaccauggacggcauucugaagucuauccucaaagugaagaaagcccugggaauguucauuuccgagacgcccggcgaacgcaacccuuaugagaacauccuguacaagauuugucucagcggggauggauggcccuauaucgcuucuagaacaagcaucaccggccgggccugggagaauacagucguggaccuggaauccgaugggaagccucagaaagcuggaucuaacaauagcaacaagucccuucagagcgccggcuuuaccgccgggcugaccuacucucagcucaugacacugaaagacgcuaugcugcaacuugauccgaaugcgaagacguggauggacauugagggaagacccgaagauccuguugagguggcccucuaccagcccuccagcggcugcuauauccacuucuuucgcgaaccuaccgaccugaaacaguucaagcaggacgcuaaguacucucauggcauugaugucacagaccuguuugccgcccaacccgggcucaccuccgcugugaucgaugcccugccgcggaacaugguuauuacaugucagggaagcgacgauaucaaaaagcugcuggagucccagggcagaaaagacaucaagcucauugauaucgcgcugucuaaaaccgacagccgcaaguaugagaaugcugugugggaucaguacaaggaccugugccacaugcauacgggggucguggucgaaaagaagaaacggggaggcaaggaggaaauuacaccucacugugcccuuauggauugcaucauguucgacgccgcuguguccgggggccucaacaccucuguucugagagccgugcugccccgcgauauggucuuucggaccagcacaccuagagugguucucugaggacuaguuauaagacugacuagcccgaugggccucccaacgggcccuccuccccuccuugcaccgagauuaaucaaaggcucuuuucagagccaccaaaaaaaaaaaaaaaaaaaaaaaaaaaaaaaaaaaaaaaaaaaaaaaaaaaaaaaaaaaaaaaaaaaaaaaaaaaaaaaaaaaaaaaaaaaaaaaaaaaaa

SEQ ID NO: 21940 - RNA, 1974 nt, Artificial Sequence
  mRNA product Design i-3 (hSL-A100) comprising derived and/or modified sequence from LASV(G502-SLE-2009;Clade IV)__AIT17127__SP-IgE_NP(2-569) (opt5)
aggagaaagcuuaccauggacuggaccuggauccuguuccucguggccgcugccacaagaguccacagcagcgccuccaaggagaucaaaucuuuccuguggacccagagccucagacgggaacuguccggcuacugcucuaacauuaagcugcaaguggucaaagacgcucaggcccugcuccacgggcuggauuuuagcgagguuuccaaugugcagcgccuuaugagaaaggaacggcgcgacgauaacgaccugaaaagacuccgggaucugaaucaggcggugaacaaucuggucgagcucaagucuacacaacaaaagagcauccugcgcgugggaacgcuuaccuccgacgaucugcucauucuggcugccgaccuugaaaaacuuaagagcaaaguuaucagaacagagcggccccucucugccggcguguauauggggaaccuguccagccagcagcuggaucagcgcagagcucuccugucuaugauuggaauguccggcgggaaucagggaguccgggccggcaaggacggcgugguucgcgugugggaugucaaaaacgcugagcuucugaauaaccaguucgggaccaugccuagccucacacuggccugucuuaccaagcagggacaaguggaccugaaugaugcggugcaggcccucacagaccugggccugaucuacaccgcuaaguauccgaacacgucugaccucgauagacugacccagucccaucccauccuuaauaugauugacaccaaaaagagcucccugaacaucucuggguacaauuuuagccucggagccgcugucaaagccggcgcgugcaugcuggaugggggaaacaugcuugaaacaauuaagguuuccccucaaacaauggacggcauccugaaaagcauucucaaggugaaaaaggcccugggcauguucaucucugauacccccggggagcggaacccuuaugaaaauauucuguacaagaucugucucuccggagacggcuggcccuauaucgcuagccgcacgucuauuacagggagagccugggagaacaccguggucgaucuggagagcgacggaaaaccucagaaggcuggcuccaauaacucuaauaaaagccuucaguccgccggguuuacagccggacugaccuacagccagcucaugacccugaaggaugcuaugcugcaacuugacccgaacacaaaaacguggauggauaucgaaggccggcccgaggacccuguggaaauugcgcucuaccagcccucuuccggcugcuauauccacuucuuuagagagccuaccgaccugaagcaguucaagcaggaugccaaauacagccaugggauugacguuacagaucuguuugcugcccaacccggacucaccucugccgugaucgacgcucugccgcgcaauauggucaucacaugucagggcuccgaugacauucggaaacuucuggaaagccaggggagaaaggauaucaagcucauugacaucgcccugaacaaaaccgauucccgcaaguaugagaaugcggugugggaccaguacaaggaucugugccacaugcauacgggaguuguggucgagaaaaagaaacggggcgggaaggaagagauuacaccucacugugcucuuauggacugcaucauguucgaugccgccgugucuggcggacucaacaccagcguccugagagcugugcugccccgcgacaugguuuuucggaccuccacaccuagagugguccucugaggacuaguuauaagacugacuagcccgaugggccucccaacgggcccuccuccccuccuugcaccgagauuaaucaaaggcucuuuucagagccaccaaaaaaaaaaaaaaaaaaaaaaaaaaaaaaaaaaaaaaaaaaaaaaaaaaaaaaaaaaaaaaaaaaaaaaaaaaaaaaaaaaaaaaaaaaaaaaaaaaaaa

SEQ ID NO: 21941 - RNA, 1974 nt, Artificial Sequence
  mRNA product Design i-3 (hSL-A100) comprising derived and/or modified sequence from LASV(G733-SLE-2010;Clade IV)__AIT17155__SP-IgE_NP(2-569) (opt5)
aggagaaagcuuaccauggacuggaccuggauccuguuccucguggccgcugccacaagaguccacagcagcgccuccaaggagaucaaaucuuuccuguggacccagagccucagacgggaacuguccggcuacugcucuaacauuaagcugcaaguggucaaagacgcucaggcccugcuccacgggcuggauuuuagcgagguuuccaaugugcagcgccuuaugagaaaggaacggcgcgacgauaacgaccugaaaagacuccgggaucugaaucaggcggugaacaaucuggucgagcucaagucuacacaacaaaagagcgugcugcgcguuggaacgcuuaccuccgacgaacugcucgugcuggcugccgaucuugagaaacuuaagagcaaagucaucagaacagagcggccccucucugccggcguguauauggggaaccuguccagccagcagcuggaccagcgcagagcucuccugucuaugauuggaauguccggcgggaaucagggagcccggaccggccgcgauggcguugugagagucugggacgugaagaacgcugaacuucugaauaaccaguucgggacaaugccuagccucacccuggccugucuuacaaaacagggacaaguggaucugaaugacgcgguccaggcccucaccgaucugggccugaucuacacggcuaaguauccgaacaccucugaccucgaccggcugacacagucccaucccauucuuaauaugaucgauaccaagaaaagcucccugaacaucucuggguacaauuuuagccucggagccgcuguuaaggccggcgcgugcaugcuggacgggggaaacaugcuugagacaauuaaaguguccccucaaaccauggauggcauccucaagagcauucugaaagugaagaaagcccugggcauguucaucucugacacgcccggggaacgcaacccuuaugagaauauucuguacaagaucugucucuccggagauggcuggcccuauauugcuagcagaacaucuaucaccgggcgggccugggagaacacagucguggaccuggaaagcgauggaaagccucagaaagcuggcuccaauaacucuaauaagagccuucaguccgccggguuuaccgccggacugaccuacagccagcucaugacacugaaagacgcuaugcugcaacuugauccgaacgcgaagacguggauggacaucgagggcagacccgaagauccuguugagauugcccucuaccagcccucuuccggcugcuauauccacuucuuucgcgaaccuaccgaccugaaacaguucaagcaggacgcuaaguacagccaugggauugaugugacagaccuguuugccgcccaacccggacucaccucugcugucaucgaugcccugccgcggaauauggugauuacaugucagggcuccgacgauaucagaaaacuucuggagagccaggggcgcaaggacaucaaacucauugauaucgcgcuguccaagauugacucucggaaauaugagaacgcuguuugggaucaguacaaggaccugugccacaugcauaccggaguggucguggaaaagaaaaagagaggcgggaaagaggaaaucacgccucacugugcccuuauggauugcauuauguucgacgccgcugucagcggcggacucaauucccuggugcugcgcgccguucucccccgggauaugguguuuagaacaucuaccccucgcgucgugcugugaggacuaguuauaagacugacuagcccgaugggccucccaacgggcccuccuccccuccuugcaccgagauuaaucaaaggcucuuuucagagccaccaaaaaaaaaaaaaaaaaaaaaaaaaaaaaaaaaaaaaaaaaaaaaaaaaaaaaaaaaaaaaaaaaaaaaaaaaaaaaaaaaaaaaaaaaaaaaaaaaaaaa

SEQ ID NO: 21942 - RNA, 1974 nt, Artificial Sequence
  mRNA product Design i-3 (hSL-A100) comprising derived and/or modified sequence from MOPV/LASV reassortant(IGS-1;Clade IV)__AFY05578__SP-IgE_NP(2-569) (opt5)
aggagaaagcuuaccauggacuggaccuggauccuguuccucguggccgcugccacaagaguccacagcagcgccuccaaggagaucaaaucuuuccuguggacccagagccucagacgggaacuguccggcuacugcucuaacauuaaacuucaaguggucaaggacgcucaggcccugcuccacgggcuggauuuuagcgagguuuccaaugugcagcgccuuaugagaaaggaacggcgcgacgauaacgaccugaaaagacuccgggaucugaaucaggcggugaacaaucuggucgagcucaagucuacacaacaaaagagcauccugcgcgugggaacgcuuaccuccgacgaucugcucauucuggcugccgaccuugaaaaacugagaagcaagguuauccggacagagcgcccccucucugccggcguguauauggggaaccuguccagccagcagcuggaucagagacgggcucuccugaauaugauuggaaugucuggcgggaaccagggagcccgcgcuggcagagacggcgucgugcggguuugggaugugaaaaaugccgagcuucuguccaaccaguucgggaccaugccuagccucacacuggcgugucuuaccaagcagggacaagucgaccugaaugaugccgugcaggcucucacagaccugggccugaucuacaccgccaaauauccgaacacgucugaccucgaucgccugacccagucccaucccauccuuaauaugauugacacaaagaaaagcucccugaacaucucuggguacaauuuuagccucggagcugccgugaaggcgggcgccugcaugcuggaugggggaaacaugcuugaaaccauuaaggucuccccucaaacaauggacggcauccugaaaagcauucucaagguuaaaaaggcucugggcauguucaucucugauacccccggggagagaaacccuuaugaaaauauucuguacaaaaucugucucuccggagacggcuggcccuauaucgccagccggacgucuauuacagggagagcuugggagaacaccgugguggaucuggagagcgacggaaagccucagaaggccgauuccaauaacucuagcaaaucccuucagagcgccggcuuuacagcugggcugaccuacucucagcucaugacccugaaggacgcgaugcugcaacuugauccgaaugccaaaacauggauggacaucgaaggacgccccgaggacccugucgaaauugcucucuaccagcccuccagcggcugcuauauccacuucuuucgggagccuacggaucugaagcaguucaaacaggacgccaaguacucucauggcauugaugugaccgaccuguuugccacacaacccgggcucaccuccgcuguuaucgaugcccugccgagaaacauggugaucacaugucagggaagcgacgauauucgcaaacuucuggaaucccagggccggaaggacaucaagcucauugauaucgaccugucuaaaaccgauagcagaaaguaugagaaugcggucugggaccaguacaaagaucugugccacaugcauacgggggugguuguggagaagaagaaacgcggaggcaaggaagagauuacaccucacugugcucuuauggacugcaucauguucgacgccgccgucuccgggggccucaacaccucugugcugcgggcuguccugcccagagauaugguguuucgcaccagcacaccucggguugugcucugaggacuaguuauaagacugacuagcccgaugggccucccaacgggcccuccuccccuccuugcaccgagauuaaucaaaggcucuuuucagagccaccaaaaaaaaaaaaaaaaaaaaaaaaaaaaaaaaaaaaaaaaaaaaaaaaaaaaaaaaaaaaaaaaaaaaaaaaaaaaaaaaaaaaaaaaaaaaaaaaaaaaa

SEQ ID NO: 21943 - RNA, 1974 nt, Artificial Sequence
  mRNA product Design i-3 (hSL-A100) comprising derived and/or modified sequence from LASV(LM765-SLE-2012;Clade IV)__AIT17815__SP-IgE_NP(2-569) (opt5)
aggagaaagcuuaccauggacuggaccuggauccuguuccucguggccgcugccacaagaguccacagcagcgccuccaaggagaucaaaucuuuccuguggacccagagccucagacgggaacuguccggcuacugcucuaacauuaagcugcaaguggucaaagacgcucaggcccugcuccacgggcuggauuuuagcgagguuuccaaugugcagcgccuuaugagaaaggaacggcgcgacgauaacgaccugaaaagacuccgggaucugaaucaggcggugaacaaucuggucgagcucaagucuacacaacaaaagagcauccugcgcgugggaacgcuuaccuccgacgaucugcucauucuggcugccgaccuugaaaaacuuaagagcaaaguuacaagaaccgagcggccccucucugccggcguguauauggggaaccuguccagccagcagcuggaucagcgcagagcucuccuggacaugaucggaaugucuggcuccaaucagggggcccgggcuggacgcgauggcgucgugagaguuugggacgugaagaacgccgagcuucugaauaaccaguucggcacaaugccuagccucacccuggcgugucuuacaaaacaggggcaagucgaucugaaugacgccgugcaggcucucaccgaccugggacugauuuacacggccaaguauccgaacaccucugaucucgaccggcugacacagucccaucccauccuuaauaugaucgauaccaagaaaagcucccugaacauuucuggcuacaauuuuagccucggggcugccgugaaggcgggagccugcaugcuggacggcgggaacaugcuugaaacaaucaaagucuccccucaaaccauggauggcauucucaagagcauccugaaaguuaagaaagcucugggaauguucauuucugacgcccccggcgagcgcaacccuuaugaaaauauccuguacaagauuugucucuccggggauggauggcccuauaucgcuagcagaacgucuaucacaggccgggccugggagaacaccgugguggaccuggagagcgaugggaagccucagaaagccggauccaauggcucuaacaagagccuucaguccgcuggguuuacagcgggacugaccuacagccagcucaugacccugaaagacgccaugcugcaacuugauccgaaugcuaagacauggauggacauugaaggcagacccgaggacccugucgaaaucgcccucuaccagcccucuuccggcugcuauauucacuucuuucgcgagccuacggaucugaaacaguucaagcaggacgccaaguacagccaugggaucgaugugaccgaccuguuugcugcccaacccggacucacaucugcgguuauugaugcucugccgcggaacauggugaucaccugucagggcuccgacgauaucagaaaacuuuucgaaagccaggggcgcaaggacauuaaacugaucgauauugcccucuccaagacagacucucggaaauaugagaaugccgucugggaucaguacaaggaccugugccacaugcauaccggaaucgugguugagaagaaaaagagaggcgggaaagaagagauuacgccucacugugcucugauggauugcaucauguuugacgccgcugugagcggcggacuuaacacauccguccuccgcgccgugcugccccgggacauggucuucagaaccucuaccccucgcgugguucugugaggacuaguuauaagacugacuagcccgaugggccucccaacgggcccuccuccccuccuugcaccgagauuaaucaaaggcucuuuucagagccaccaaaaaaaaaaaaaaaaaaaaaaaaaaaaaaaaaaaaaaaaaaaaaaaaaaaaaaaaaaaaaaaaaaaaaaaaaaaaaaaaaaaaaaaaaaaaaaaaaaaaa

SEQ ID NO: 21944 - RNA, 1974 nt, Artificial Sequence
  mRNA product Design i-3 (hSL-A100) comprising derived and/or modified sequence from LASV(LM776-SLE-2012;Clade IV)__AIT17825__SP-IgE_NP(2-569) (opt5)
aggagaaagcuuaccauggacuggaccuggauccuguuccucguggccgcugccacaagaguccacagcagcgccuccaaggagaucaaaucuuuccuguggacccagagccucagacgggaacuguccucuuacugcagcaacauuaaacuucaaguggucaaggacgcucaggcccugcuccacggccuggauuuuuccgagguuucuaaugugcagcgccuuaugagaaaggaacggcgcgacgauaacgaccugaaaagacuccgggaucugaaucaggcggugaacaaucuggucgagcucaagagcacacaacagaaguccauccugcgcguggggacgcuuaccagcgacgaucugcucauucuggcugccgaccuugaaaaacugaagucuaaaguuacaagaaccgagcggccccucuccgccggaguguauaugggcaaccugagcucucagcagcuggaucaacgcagagcucuccuguccaugaucgggaugagcggaucuaaucagggcgcccgggcugggcgcgacggagucgugagaguuugggaugugaagaacgccgagcuucugaauaaccaguucggcacaaugccuucccucacccuggcgugucuuacaaaacagggccaagucgaccugaaugaugccgugcaggcucucaccgaccuggggcugauuuacacggccaaguauccgaacaccagcgaccucgaucggcugacacagucccaucccauccuuaauaugaucgacaccaagaaaucuagccugaacauuuccggauacaauuuuagccucggcgcugccgugaaggcgggggccugcaugcuggauggaggcaacaugcuugaaacaaucaaagucucuccucaaaccauggacgggauucugaaguccauccucaaaguuaagaaagcucugggaauguucauuagcgauacgcccggcgagcgcaacccuuaugaaaauauccuguacaagauuugucucucuggcgacggguggcccuauaucgccagcagaacauccaucaccggacgggcuugggagaacacagugguggaucuggagucugacggcaagccucagaaagccgggagcaauaacuccaauaagagccuucagucugccggauuuaccgcuggccugaccuacucccagcucaugacacugaaagaugcgaugcugcaacuugacccgaacgccaagacguggauggauauugaagggagacccgaggacccugucgaaguggcucucuaccagcccagcucuggaugcuauauccacuucuuucgcgagccuaccgaccugaaacaguucaagcaggaugccaaguacucccauggcauugacguuacagaucuguuugccgcucaacccggccucaccagcgccgugaucgacgcgcugccgcggaauauggucauuacaugucagggguccgaugacaucagaaaacuucuggaaucucagggacgcaaggauaucaaacucauugacaucgcucugagcaagaccgauucccggaaauaugagaacgccgugugggaccaguacaaggaucugugccacaugcauacgggcguuguggucgagaagaaaaagagagggggaaaagaagagauuacaccucacugugcccuuauggacugcaucauguucgaugcugccgugucuggcgggcucaauaccagcguccugcgcgcugugcugccccgggacaugguuuuuagaaccuccacaccucgcgugguccucugaggacuaguuauaagacugacuagcccgaugggccucccaacgggcccuccuccccuccuugcaccgagauuaaucaaaggcucuuuucagagccaccaaaaaaaaaaaaaaaaaaaaaaaaaaaaaaaaaaaaaaaaaaaaaaaaaaaaaaaaaaaaaaaaaaaaaaaaaaaaaaaaaaaaaaaaaaaaaaaaaaaaa

SEQ ID NO: 21945 - RNA, 1974 nt, Artificial Sequence
  mRNA product Design i-3 (hSL-A100) comprising derived and/or modified sequence from LASV(Mad39;Clade IV)__ANH09723__SP-IgE_NP(2-569) (opt5)
aggagaaagcuuaccauggacuggaccuggauccuguuccucguggccgcugccacaagaguccacagcagcgccuccaaggagaucaaaucuuuccuguggacccagagccucagacgggaacuguccggcuacugcucuaacauuaagcugcaaguggucaaagacgcucaggcccugcuccacgggcuggauuuuagcgagguuuccaaugugcagcgccuuaugagaaagcagcggcgcgacgauaacgaccugaaaagacuccgggaucugaaucaagcggugaacaaucuggucgaacucaagucuacacagcaaaagagcgugcugcgcguuggaacgcuuaccuccgacgaucugcucacacuggcugccgaccuugagaaacuuaagagcaaagugaccagaacagaacggccccucaccgccggcgucuauauggggaaccugucuucccagcagcuggaucagcgcagagcucuccugaauaugaucggaaugagcggcgggaaccagggagcccggacaggccgcgacggcgugguuagagugugggaugucaagaaugcugagcuucugaacaaucaguucgggaccaugccuucucucacgcuggccugucuuaccaaacaaggacagguggaccugaacgaugugguccaggcgcucacagaccugggccugauuuacaccgccaaguauccgaauacauccgaccucgaucggcugacccaaagccaucccauccuuaacaugauugacacgaauaagucuucccugaacaucagcggguacaacuuuucccucggagcugccguuaaagcuggcgccugcaugcuggaugggggaaauaugcuugagacaaucaaggugucuccucagaccauggacggcauucugaaaagcauccucaaggugaaaaagucccugggcauguucauuagcgauacacccggggaacgcaacccuuaugagaauauccuguacaaaauuugucucucuggagacggcuggcccuauaucgcguccagaaccagcauuaccgggcgggccugggaaaacacagucguggaucuggagucuggaggcaagccucagaaggcugggagcaauaacuccaauaaaucucuucagagcgccggauuugcugccggccugacguacucccaacucaugacccugaaggacgccaugcugcagcuugauccgaacgcuaaaacauggauggacaucgagggcagacccgaagauccuguugagaucgcgcucuaccagcccauuagcgggugcuauauccacuucuuucgcgaaccuaccgaccugaagcaguucaaacaagacgccaaguacucucauggaauugaugugacagaccuguuugcugcccagcccggccucaccuccgccgucaucgaggcucugccgcggaauauggugauuacgugucaggggagcgaugacaucagaaaacuuuucgaaucucagggacgcaaggauaucaagcugauugacaucgcccucuccaaaacagauagccggaaguaugagaacgcgguuugggaccaauacaaagaucugugccacaugcauaccggcguggucguggagaagaagaaaaagggcgggaaagaagagauuaccccucacugugcucugauggacugcaucauguuugaugccgccgucuccggaggccuuaauacacucgugcugagagcuguucugccccgcgacaugguguuccggaccucuacaccuaaggucgugcucugaggacuaguuauaagacugacuagcccgaugggccucccaacgggcccuccuccccuccuugcaccgagauuaaucaaaggcucuuuucagagccaccaaaaaaaaaaaaaaaaaaaaaaaaaaaaaaaaaaaaaaaaaaaaaaaaaaaaaaaaaaaaaaaaaaaaaaaaaaaaaaaaaaaaaaaaaaaaaaaaaaaaa

SEQ ID NO: 21946 - RNA, 1974 nt, Artificial Sequence
  mRNA product Design i-3 (hSL-A100) comprising derived and/or modified sequence from LASV(Z0947-SLE-2011;Clade IV)__AIT17841__SP-IgE_NP(2-569) (opt5)
aggagaaagcuuaccauggacuggaccuggauccuguuccucguggccgcugccacaagaguccacagcagcgccuccaaggagaucaaaucuuuccuguggacccagagccucagacgggaacuguccggcuacugcucuaacauuaagcugcaaguggucaaagacgcucaggcccugcuccacgggcuggauuuuagcgagguuuccaaugugcagcgccuuaugagaaaggaacggcgcgacgauaacgaccugaaaagacuccgggaucugaaucaggcggugaacaaucuggucgagcucaagucuacacaacaaaagagcauccugcgcgugggaacgcuuaccuccgacgaucugcucauucuggcugccgaccuugaaaaacuuaagagcaaaguuacaagaaccgagcggccccucucugccggcguguauauggggaaccuguccagccagcagcuggaucagcgcagagcucuccugaauaugaucggaaugucuggcuccaaccagggggcccggacaggacgcgacggcgucgugagaguuugggaugugaagaaugcugagcuucugaacaaucaguucggcaccaugccuagccucacacuggccugucuuaccaaacaggggcaagucgaccugaacgaugcggugcaggcccucacggaccugggacugauuuacaccgcuaaguauccgaauacaucugaccucgaucggcugacccagucccaucccauccuuaacaugaucgacacaaagaaaagcucccugaauauuucuggcuacaacuuuagccucggggccgcugugaaggccggagcgugcaugcuggauggcgggaacaugcuugaaaccaucaaagucuccccucaaacgauggacggcauucucaagagcauccugaaaguuaagaaagcccugggaauguucauuucugaugcucccggcgagcgcaauccuuaugaaaacauccuguacaagauuugucucuccggggacggauggcccuauaucgccagcagaacaucuaucaccggccgggcuugggagaauacagugguggaucuggagagcgacgggaagccucagaaagccggauccaacggcucuaauaagagccuucaguccgccggguuuaccgcuggacugaccuacagccagcucaugacacugaaagaugcgaugcugcaacuugacccgaacgccaagacguggauggauauugaaggcagacccgaggacccugucgaaaucgcucucuaccagcccucuuccggcugcuauauucacuucuuucgcgagccuaccgaccugaaacaguucaagcaggaugccaaguacagccaugggaucgacgugacagaucuguuugccgcucaacccggacucaccucugccguuauugacgcgcugccgcggaauauggugaucacaugucagggcuccgaugacaucagaaaacuuuucgaaagccaggggcgcaaggauauuaaacugaucgacauugcucucuccaagaccgauucucggaaauaugagaacgccgucugggaccaguacaaggaucugugccacaugcauacgggaaucgugguugagaagaaaaagagaggcgggaaagaagagauuacaccucacugugcccugauggacugcaucauguuugaugcugccgugagcggcggacuuaauaccuccguccuccgcgcugugcugccccgggacauggucuucagaaccucuacaccucgcgugguucugugaggacuaguuauaagacugacuagcccgaugggccucccaacgggcccuccuccccuccuugcaccgagauuaaucaaaggcucuuuucagagccaccaaaaaaaaaaaaaaaaaaaaaaaaaaaaaaaaaaaaaaaaaaaaaaaaaaaaaaaaaaaaaaaaaaaaaaaaaaaaaaaaaaaaaaaaaaaaaaaaaaaaa

SEQ ID NO: 21947 - RNA, 1950 nt, Artificial Sequence
  mRNA product Design i-3 (A100) comprising derived and/or modified sequence from LASV(Josiah;Clade IV)__NP_694869__SP-IgE_NP(2-569) (opt1)
aggagaaagcuuaccauggacuggaccuggauccuguuccucguggccgccgcgacccgcguccacagcagcgccuccaaggagaucaagagcuuccuguggacccagucccuccgccgggagcugagcggcuacugcuccaacaucaagcuccagguggucaaggacgcccaggcgcugcugcacgggcuggacuucagcgagguguccaacgugcagcgccucaugcggaaggagcgccgggacgacaacgaccugaagcgccugcgggaccucaaccaggccgucaacaaccugguggagcucaagagcacccagcagaaguccauccugcgcgugggcacccugaccagcgacgaccugcucauccuggccgccgaccuggagaagcucaaguccaaggucauccggaccgagcgcccccugagcgccgggguguacaugggcaaccuguccagccagcagcucgaccagcggcgcgcgcugcugaacaugaucgggauguccggcggcaaccagggggcccgggccggccgcgacggggugguccgggugugggacgugaagaacgccgagcuccugaacaaccaguucggcaccaugccgagccugacgcucgcgugccugaccaagcaggggcaggucgaccugaacgacgccgugcaggcccucaccgaccugggccugaucuacaccgccaaguaccccaacacguccgaccucgaccgccugacccagagccaccccauccugaacaugaucgacaccaagaaguccagccucaacaucagcggcuacaacuucucccugggggccgcggugaaggccggcgccugcaugcuggacgggggcaacaugcucgagaccaucaaggucagcccccagacgauggacggcauccugaaguccauccugaaggugaagaaggcccucgggauguucaucagcgacaccccgggcgagcggaaccccuacgagaacauccuguacaagaucugccuguccggggacggcuggcccuacaucgccagccgcaccuccaucaccgggcgggcgugggagaacacgguggucgaccucgagagcgacggcaagccccagaaggccgacuccaacaacagcuccaagagccugcaguccgccggcuucaccgccgggcugaccuacagccagcucaugacccugaaggacgccaugcugcagcuggacccgaacgcgaagacguggauggacaucgagggccgccccgaggaccccguggagaucgcccucuaccagcccuccagcgggugcuacauccacuucuuccgggagccgaccgaccugaagcaguucaagcaggacgccaaguacucccacggcaucgacgugaccgaccuguucgccacccagcccgggcucacgagcgccgucaucgacgcgcugccccgcaacauggugaucacgugccagggcuccgacgacauccgcaagcugcucgagagccagggccggaaggacaucaagcugaucgacaucgcccugagcaagaccgacucccgcaaguacgagaacgccgugugggaccaguacaaggaccucugccacaugcacaccggggucguggucgagaagaagaagcggggcgggaaggaggagaucaccccgcacugcgcccugauggacugcaucauguucgacgcggccgugagcggcgggcugaacaccuccgugcuccgcgccguccugccccgggacaugguguuccgcaccagcacgccccgggugguccugugaggacuaguuauaagacugacuagcccgaugggccucccaacgggcccuccuccccuccuugcaccgagauuaauaaaaaaaaaaaaaaaaaaaaaaaaaaaaaaaaaaaaaaaaaaaaaaaaaaaaaaaaaaaaaaaaaaaaaaaaaaaaaaaaaaaaaaaaaaaaaaaaaaaa

SEQ ID NO: 21948 - RNA, 1950 nt, Artificial Sequence
  mRNA product Design i-3 (A100) comprising derived and/or modified sequence from LASV(LP;Clade I)__AAF86702__SP-IgE_NP(2-569) (opt1)
aggagaaagcuuaccauggacuggaccuggauccuguuccucguggccgccgcgacccgcguccacagcagcaacuccaaggagaucaagagcuuccuguggacccagucccuccgccgggagcugagcggcuacugcuccaacaucaagcuccagguggucaaggacgcccaggcccugcugcacgggcuggacuucagcgagguguccaacgugcagcgccucaugcggaagcagaagcgcgacgacgcggaccugaagcggcugcgcgaccucaaccaggccgucaacaaccugguggagcucaagagcacccagcagaagaacgugcugcgggucggcacgcuguccagcgacgaccugaucacccucgccgccgaccuggagaagcugaaguccaaggugauccgcaccgagcggccccucagcuccgggguguacaugggcaaccugagcucccagcagcuggaccagcgccgggcccuccugagcaugaucgggauguccggcggcccgcaggggaaccgcaccggcggggacggcgucgugcgggugugggacgucaagaacgcggagcugcucaacaaccaguucgggacgaugcccagccugacccuggccugccucaccaagcagggccagguggaccugaacgacgccgugcaggcccugaccgaccucggccugaucuacacggcgaaguaccccaacuccagcgaccuggacaugcucacccagagccaccccauccuggggauggucgacaccaagaaguccagccugaacaucuccggcuacaacuucagccucggggccgccgugaaggccggcgccugcaugcuggacggcgggaacaugcuggagaccaucaagguguccccgcagacgauggacggcauccucaagagcauccugaaggucaagcgcucccuggggauguucaucagcgacacccccggcgagcggaaccccuacgagaacauccucuacaagaucugccuguccggggagggcuggcccuacaucgcgagccgcaccuccaucaccggccgggccugggagaacacgcugguggaccucgagagcgacaacaagccgcccaagcugaacuccgccgggagcaacaagucccugcaggccgccggccucaacgcggggcugaccuacagccagcugaugacccugaaggacugcaugcuccagcuggaccccuccagcaagaccuggaucgacaucgagggccgccccgaggacccgguggagaucgcccuguuccagcccuccagcgggugcuacauccacuucuuccgggagcccacggaccucaagcaguucaagcaggacgccaaguacagccacggcaucgacgucaccgaccuguucuccacccagcccggccugaccagcgccgugaucgaggcccucccgcgcaacauggugcugacgugccagggguccgacgacaucaagaagcugcucgagagccagggccggcgcgacaucaagcugaucgacaucucccugagcaaggcggacucccgcaaguucgagaacgccgucugggaccaguacaaggaccucugccacaugcacaccgggguggucguggagaagaagaagcggggcgggaaggaggagaucacgccccacugcgcccugcuggacugcaucauguucgacgccgccaccaccggcagccucaacaucaccacccugcgcgcggugcugccccgggacauggucuuccgcaccuccacgcccaagguggugcucugaggacuaguuauaagacugacuagcccgaugggccucccaacgggcccuccuccccuccuugcaccgagauuaauaaaaaaaaaaaaaaaaaaaaaaaaaaaaaaaaaaaaaaaaaaaaaaaaaaaaaaaaaaaaaaaaaaaaaaaaaaaaaaaaaaaaaaaaaaaaaaaaaaaa

SEQ ID NO: 21949 - RNA, 1950 nt, Artificial Sequence
  mRNA product Design i-3 (A100) comprising derived and/or modified sequence from LASV(803213;Clade II)__AAF86704__SP-IgE_NP(2-569) (opt1)
aggagaaagcuuaccauggacuggaccuggauccuguuccucguggccgccgcgacccgcguccacagcagcgccuccaaggaggugaaguccuuccuguggacccagagccuccgccgggagcugagcggcuacugcuccaacaucaagcugcaggucgugaaggacgcccaggcgcuccugcacgggcuggacuucagcgaggugaacaacguccagcgccucaugcggaagcagaagcgcgacgacggcgaccugaagcggcugcgcgaccucaaccaggccgugaacaaccugguggagcugaaguccacccagcagaaguccauccuccgggucgggacgcugaccagcgacgaccugcucacccuggccgccgaccuggagaagcucaagagcaaggugauccgcaccgagcggccccuguccagcggcguguacauggggaaccuguccacgcagcagcucgagcagcgccgggcccugcugaacaugaucggcauggucggcggggcgcagggcacccagccggggcgcgacggcguggugcgggucugggacgugaagaaccccgaccuccugaacaaccaguucgggaccaugcccagccugacccucgccugccugacgaagcagggccagguggaccugaacgacgccguccucgcccugaccgaccugggccucaucuacaccgcgaaguaccccaacuccagcgaccuggaccgccugucccagagccacccgauccucaacaugguggacaccaagaaguccagccugaacaucagcggguacaacuucucccugggcgccgccgugaaggccggggccugcaugcucgacggcggcaacaugcuggagacgaucaaggucacgccccagaccauggacgggauccucaagagcauccugaaggugaagcggucccugggcauguucgugagcgacacccccggggagcgcaaccccuacgagaacauccuguacaagaucugccucuccggcgacggguggccguacaucgcgagccggaccuccaucgucggccgcgccugggagaacaccaccguggaccuggagagcgacggcaagccccagaagguggggaccgccggcuccaacaagagccugcaguccgccggguuccccacgggccucaccuacagccagcugaugacccugaaggacuccaugaugcagcuggaccccagcgccaagaccuggaucgacaucgaggggcggccggaggaccccgucgagaucgcgcucuaccagcccauguccggcugcuacauccacuucuuccgcgagcccacggaccugaagcaguucaagcaggacgccaaguacagccacggcaucgacguggccgaccuguucccggcccagcccgggcucaccuccgccgucaucgaggcgcugccccggaacauggugcugaccugccagggcagcgacgacaucaagaagcuccuggacucccaggggcgccgcgacaucaagcugaucgacaucagccucagcaagguggacucccggaaguucgagaacgccgucugggaccagugcaaggaccugugccacaugcacaccggcgugguggucgagaagaagaagcgcgggggcaaggaggagaucacgccccacugcgcccugauggacugcaucauguucgacgccgccgugagcggcgggcucaacaucccggugcugcgggcgguccugccccgcgacaugguguuccggaccuccagccccaaggugguccucugaggacuaguuauaagacugacuagcccgaugggccucccaacgggcccuccuccccuccuugcaccgagauuaauaaaaaaaaaaaaaaaaaaaaaaaaaaaaaaaaaaaaaaaaaaaaaaaaaaaaaaaaaaaaaaaaaaaaaaaaaaaaaaaaaaaaaaaaaaaaaaaaaaaa

SEQ ID NO: 21950 - RNA, 1953 nt, Artificial Sequence
  mRNA product Design i-3 (A100) comprising derived and/or modified sequence from LASV(GA391;Clade III)__CAA36646__SP-IgE_NP(2-570) (opt1)
aggagaaagcuuaccauggacuggaccuggauccuguuccucguggccgccgcgacccgcguccacagcagcgccuccaaggaggugcgcagcuuccuguggacccagucccuccggcgcgagcugagcggcuacugcuccaacaucaagcugcaggucgugaaggacgcccaggcgcuccugcacgggcuggacuucagcgagguguccaacguccagcggcucaugcgcaagcagaagcgggacgacggcgaccugaagcgccugcgggaccucaaccaggccgugaacaaccugguggagcucaagagcacccagcagaaguccguccugcgcguggggacccugagcuccgacgaccugcucauccuggccgccgaccuggagaagcucaagagcaaggugacccggaccgagcgcccccuguccagcggcgucuacauggggaaccuguccagccagcagcucgaccagcggcgcgcccugcugaacaugaucggcaugaccggcguguccgggggcgggaagggcgcgagcgacgggaucgugcgggucugggacgugaagaacgccgagcuccugaacaaccaguucggcacgaugccgucccugacccucgccugccugaccaagcagggccagguggaccugaacgacgccguccaggcgcucaccgaccuggggcugaucuacacggccaaguaccccaacagcagcgaccucgaccgccugucccagagccaccccauccugaacaugaucgacaccaagaaguccagccucaacaucuccggcuacaacuucagccugggggccgccgugaaggccggcgcgugcaugcuggacggcgggaacaugcucgagaccaucaaggugagcccccagaccauggacggcauccucaaguccauccugaaggucaagaagucccuggggauguucgugagcgacacgccgggcgagcggaaccccuacgagaacauccuguacaagaucugccuguccggggacggcuggcccuacaucgccagccgcaccuccaucgugggccgggccugggagaacaccgucguggaccucgagcaggacaacaagccccagaagaucgggaacggcgggagcaacaagucccugcagagcgccggcuucgccgcggggcugaccuacucccagcucaugacgcugaaggacuucaagugcuucaaccugaucccgaacgccaagaccuggauggacaucgagggccgccccgaggaccccguggagaucgcccuguaccagcccagcuccggcugcuacguccacuucuuccgggagccgaccgaccucaagcaguucaagcaggacgccaaguacagccacgggaucgacgugaccgaccuguucgccgcgcagcccggccugacgagcgccgucaucgaggcccucccccgcaacauggugaucacgugccagggguccgaggacauccggaagcugcuggagagccagggccgccgcgacaucaagcucaucgacaucacccuguccaaggccgacagccggaaguucgagaacgccgugugggaccaguucaaggaccugugccacaugcacaccggggucgugguggagaagaagaagcgcggcggcaaggaggagaucacgccccacugcgcgcucauggacugcaucauguucgacgccgccgucuccgggggccuggacgccaaggugcugcgggugguccucccgcgcgacaugguguuccggaccagcacccccaaggugguccugugaggacuaguuauaagacugacuagcccgaugggccucccaacgggcccuccuccccuccuugcaccgagauuaauaaaaaaaaaaaaaaaaaaaaaaaaaaaaaaaaaaaaaaaaaaaaaaaaaaaaaaaaaaaaaaaaaaaaaaaaaaaaaaaaaaaaaaaaaaaaaaaaaaaa

SEQ ID NO: 21951 - RNA, 1950 nt, Artificial Sequence
  mRNA product Design i-3 (A100) comprising derived and/or modified sequence from LASV(AV;Clade V)__CCA30315__SP-IgE_NP(2-569) (opt1)
aggagaaagcuuaccauggacuggaccuggauccuguuccucguggccgccgcgacccgcguccacagcagcgccuccaaggaggugaaguccuuccuguggacccagagccuccgccgggagcugagcggcuacugcuccaacaucaagcugcaggucgugaaggacgcccaggcgcuccugcacgggcuggacuucagcgagguguccaacguccagcgccucaugcggaagcagcgccgggacgacagcgaccugaagcgccugcgggaccucaaccaggccgugaacaaccugguggagcugaaguccacccagcagaaguccguccuccgcgugggcacgcugagcagcgacgaccugcucacccuggccgccgaccuggagaagcucaaguccaaggugacccggaccgagcgcccccugagcuccggggucuacaugggcaaccugagcucccagcagcucgaccagcggcgcgcccugcugaaccucaucgggaugacgaacggcagccagggcucccaggcggggcgggacggcguggugcgcgucugggacgugaagaacgccgagcugcugaacaaccaguucgggaccaugccgagccucacccuggccugccugaccaagcagggccagguggaccucaacgacgucgugcaggcccugacggaccuggggcucaucuacaccgcgaaguaccccaacaccagcgaccuggaccggcugacccagucccaccccauccucaacaugaucgacacgaagaaguccagccugaacaucagcggcuacaacuucucccugggcgccgccgugaaggccggggccugcaugcucgacggcgggaacaugcuggagaccaucaaggucagcccccaguccauggacggcauccucaagagcauccugaaggugaagcgcgcgcugggcauguucguguccgacaccccgggggagcggaaccccuacgagaacauccuguacaagaucugccucagcggcgacggguggcccuacaucgccucccgcaccagcaucgucggccgggccugggagaacacggugguggaccuggagaccgacgggaagccccagaagaucggcuccggcaacagcaacaagucccugcagagcgccggguucuccgccggccucaccuacagccagcugaugacccugaaggacgcgaugcugcagcucgacccgaacgccaagacguggauggacaucgaggggcgccccgaggaccccgucgagguggcccuguaccagcccaucuccggcugcuacauccacuucuuccgggagccgaccgaccugaagcaguucaagcaggacgccaaguacagccacgggaucgacaucgccgaccucuucgcggcccagcccggccugaccagcgccgucaucgaggcccugccccgcaacauggugaucacgugccagggcuccgaggacaucaagaagcuccuggagagccaggggcgcaaggacaucaagcugaucgacaucgcccucuccaagaucgacagccggaaguucgagaacgcggugugggaccaguacaaggaccugugccacaugcacaccggcgucgugguggagaagaagaagcgcgggggcaaggaggagaucaccccgcacugcgcccugauggacugcaucauguucgacgccgccgucuccgggggccucaacacccuggugcugcgggcggugcucccccgcgacauggucuuccggaccagcacgccccgcguggugcugugaggacuaguuauaagacugacuagcccgaugggccucccaacgggcccuccuccccuccuugcaccgagauuaauaaaaaaaaaaaaaaaaaaaaaaaaaaaaaaaaaaaaaaaaaaaaaaaaaaaaaaaaaaaaaaaaaaaaaaaaaaaaaaaaaaaaaaaaaaaaaaaaaaaa

SEQ ID NO: 21952 - RNA, 1950 nt, Artificial Sequence
  mRNA product Design i-3 (A100) comprising derived and/or modified sequence from LASV(Togo/2016/7082;Clade VI)__AMR44578__SP-IgE_NP(2-569) (opt1)
aggagaaagcuuaccauggacuggaccuggauccuguuccucguggccgccgcgacccgcguccacagcagcaacuccaaggaggugaaguccuuccuguggacccagagccuccgccgggagcugagcggcuacugcuccaacaucaagcugcaggucgugaaggacgcccaggcccuccugcacgggcuggacuucagcgagguguccaacguccagcgccucaugcggaagcagaagcgcgacgacggcgaccugaagcggcugcgcgaccucaaccaggcggugaacaaccugguggagcucaagagcguccagcagaaguccauccugcggguggggacccugaccagcgacgaccugcucacccuggccgccgaccuggagaagcucaaguccaaggugacccgcaccgagcggccccugagcuccggcgucuacauggggaaccugagcucccagcagcucgaccagcgccgggcccugcugagcaugaucggcauguccggcgggaaccagaacagccagccgaagggcgacgggguggugcgcgucugggacgugaagaacgccgaccuccugaacaaccaguucggcacgaugcccucccugacccucgcgugccugaccaagcagggccagguggaccugaacgacgccguccaggcccucaccgaccuggggcugaucuacacggccaaguaccccaacagcagcgaccucgaccggcugucccagagccaccccauccugaacaugaucgacaccaagaaguccagccucaacaucuccggcuacaacuucagccugggggcggccaucaagaccggcgccugcaugcuggacgggggcaacaugcucgagaccaucaaggugacgccgcagaccauggacggcauccugaaguccauccugaaggugaagcgcagccucgggauguucaucuccgacacccccggcgagcggaaccccuacgagaacauccuguacaagaucugccugagcggggacggcuggcccuacaucgccucccgcaccgccaucaucgggcgggcgugggagaacacggucguggaccucgagagcgacuccaagccgcagaagaucggcagcaacggcuccaacaagagccugcaguccgccggguucgcccccggccugaccuacagccagcucaugacccugaaggacuccaugcugcagcuggaccccaacgccaagaccuggaucgacaucgaggggcgccccgaggacccgguggaggucgcccucuuccagcccaucagcggcugcuacauccacuucuuccgggagcccacggaccugaagcaguucaagcaggacgcgaaguacagccacgggaucgacgugaccgaccuguucgccgcccagcccggccucaccuccgccgugaucgaggcccugccgcgcaacaugguccugaccugccagggcagcgacgacaucaagaagcuccuggacucccaggggcggcgcgacaucaagcugaucgacgugagccucaacaagaucgacucccgcaaguucgagaacgcggucugggaccaguacaaggaccugugccacaugcacacgggcgugguggucgagaagaagaagaagggcgggaaggaggagaucacgccccacugcgcccugcucgacugcaucauguucgacgccgccgugagcgggggccugaacgccaccgugcugcgggcgguccucccccgcgacaugguguuccggaccuccagccccaaggugguccugugaggacuaguuauaagacugacuagcccgaugggccucccaacgggcccuccuccccuccuugcaccgagauuaauaaaaaaaaaaaaaaaaaaaaaaaaaaaaaaaaaaaaaaaaaaaaaaaaaaaaaaaaaaaaaaaaaaaaaaaaaaaaaaaaaaaaaaaaaaaaaaaaaaaa

SEQ ID NO: 21953 - RNA, 1950 nt, Artificial Sequence
  mRNA product Design i-3 (A100) comprising derived and/or modified sequence from LASV(KAK-428;Clade n.d. (VII))__ANH09741__SP-IgE_NP(2-569) (opt1)
aggagaaagcuuaccauggacuggaccuggauccuguuccucguggccgccgcgacccgcguccacagcagcaacuccaaggaggugaaguccuuccuguggacccagagccuccgccgggagcugagcggcuacugcaccaacaucaagcugcaggucgugaaggacgcccaggcccuccugcacgggcuggacuucuccgaggugagcaacguccagcgccucaugcggaagcagaagcgcgacgacaacgaccugaagcggcugcgcgaccucaaccaggcggugaacaaccugguggagcugaaguccguccagcagaaguccgugcucaaggugggcacgcugaacagcgacgaccugcucacccuggccgccgaccuggagaagcucaagagcaaggucgugcggaccgagcgcccccuguccagcgggguguacaugggcaaccuguccagccagcagcucgaccagcggcgcgcccugcugaacaugaucgggauggccggcggcucccaggggaaccagccgagccgggacggcgucgugcgcgugugggacgucaagaacgcggaccuccugaacaaccaguucgggaccaugcccucccugacgcucgccugccugaccaagcagggccagguggaccugaacgacgugguccucgcccugaccgaccuggggcucaucuacaccgccaaguaccccaacagcuccgaccuggaccggcugagccagaaccaccccgugcucaacaugaucgacgugaacaagagcucccugaacaucagcggcuacaacuucucccugggcgcggccgucaaggccggggccugcaugcucgacggcgggaacaugcuggagacgaucaagaucagcccgcagaccguggacggcauccugaaguccauccucaaggugaagcgcgcccugggcauguucgucagcgacacccccggggagcggaaccccuacgagaacauccuguacaaggugugccucuccggcaacggguggcccuacaucgcgagccgcaccuccaucgucggccgggccugggagaacacggugguggaccuggagagcaacaagaaccagccgaaggucgggaacaacggcuccaacaagaugcugcagagcuccggcuucgccaccgggcucaccuacagccagcugaugacccugcgcgacuccaugcugcagcucgaccccacggccaagaccuggaucgacaucgagggccggcccgaggaccccguggagcuggcccuguuccagccgagcuccgggugcuacauccacuucuuccgcgagcccaccgaccucaagcaguucaagcaggacgcgaaguacagccacggcaucgacgugaacgaccuguucuccgcccagcccgggcugaccagcgccguccucgaggcccugccccggaacauggugcugacgugccagggcagcgacgacauccgcaagcuccuggacucccaggaccgcaaggacaucaagcugaucgacaucagccucuccaaggccgacgcgcggaaguucgagaacgacgugugggaccaguucaaggaccugugccacaugcacaccggcaucgucguggagaagaagaagaagggcgggaagcaggagaugaccccgcacugcgcccugcucgacugcaucauguucgacgccgccgugagcgggggccugaacguccccacccugcgcgccgugcuccccacggacaugguguuccggaccaucaccaccaaggucgugcugugaggacuaguuauaagacugacuagcccgaugggccucccaacgggcccuccuccccuccuugcaccgagauuaauaaaaaaaaaaaaaaaaaaaaaaaaaaaaaaaaaaaaaaaaaaaaaaaaaaaaaaaaaaaaaaaaaaaaaaaaaaaaaaaaaaaaaaaaaaaaaaaaaaaa

SEQ ID NO: 21954 - RNA, 1950 nt, Artificial Sequence; identical to SEQ ID NO: 21948
  mRNA product Design i-3 (A100) comprising derived and/or modified sequence from LASV(Pinneo-NIG-1969;Clade I)__AIT17837__SP-IgE_NP(2-569) (opt1)

SEQ ID NO: 21955 - RNA, 1950 nt, Artificial Sequence
  mRNA product Design i-3 (A100) comprising derived and/or modified sequence from LASV(ISTH0009-NIG-2011;Clade II)__AIT17405__SP-IgE_NP(2-569) (opt1)
aggagaaagcuuaccauggacuggaccuggauccuguuccucguggccgccgcgacccgcguccacagcagcguguccaaggaggucaagagcuuccuguggacccagucccuccgccgggagcugagcggcuacugcuccaacaucaagcuccagguggugaaggacgcccaggcccugcugcacgggcuggacuucagcgaggucuccaacgugcagcgccucaugcggaagcagaagcgcgacgacagcgaccugaagcggcugcgcgaccucaaccaggcggugaacaaccuggucgagcugaaguccacccagcagaaguccauccuccgggugggcacccugaccagcgacgaccugcucacccuggccgccgaccuggagaagcucaagagcaaggugauccgcaccgagcggccccuguccagcggggucuacaugggcaaccuguccacgcagcagcucgagcagcgccgggcccugcugaacaugaucgggauggugggcggcgcccaggggacccagccgggccgcgacggggugguccgggugugggacgugaagaaccccgaccuccugaacaaccaguucggcaccaugcccagccugacccucgcgugccugacgaagcaggggcaggucgaccugaacgacgccgugcucgcccugaccgaccugggccucaucuacaccgccaaguaccccaacuccagcgaccuggaccgccugucccagagccacccgauccucaacaugguggacaucaagaaguccagccugaacaucagcggcuacaacuucucccugggggcggccgucaaggccggcgccugcaugcucgacgggggcaacaugcuggagaccaucaaggugacgccccagaccauggacggcauccucaagagcauccugaaggugaagcggucccuggggauguucgucagcgacacccccggcgagcgcaaccccuacgagaacauccuguacaagaucugccucuccggggacggcuggccguacaucgccagccggaccuccaucguggggcgcgcgugggagaacacgaccguggaccuggagagcgacggcaagccccagaaggucggcuccgccgggagcaacaagucccugcagagcgccggcuuccccaccgggcucaccuacucccagcugaugacgcugaaggacagcaugaugcagcuggaccccuccgccaagaccuggaucgacaucgagggccggccggaggaccccguggagaucgcccucuaccagcccaugagcgggugcuacauccacuucuuccgcgagcccaccgaccugaagcaguucaagcaggacgcgaaguacucccacggcaucgacgucgccgaccuguucccggcccagcccggccucaccagcgccgugaucgaggcccugccccggaacauggugcugacgugccaggggagcgacgacaucaagcgccuccuggacucccagggccgccgggacaucaagcugaucgacaucgcgcucagcaaggccgacucccgccgguucgagaacgccgucugggaccagugcaaggaccugugccacaugcacaccggggugguggucgagaagaagaagcgcggcgggaaggaggagaucacgccccacugcgcccugauggacugcaucauguacgacgccgcggugagcggcggccucaacaucccggugcugcgggccguccugccccgcgacaugguguuccggaccuccagccccaaggugguccucugaggacuaguuauaagacugacuagcccgaugggccucccaacgggcccuccuccccuccuugcaccgagauuaauaaaaaaaaaaaaaaaaaaaaaaaaaaaaaaaaaaaaaaaaaaaaaaaaaaaaaaaaaaaaaaaaaaaaaaaaaaaaaaaaaaaaaaaaaaaaaaaaaaaa

SEQ ID NO: 21956 - RNA, 1950 nt, Artificial Sequence
  mRNA product Design i-3 (A100) comprising derived and/or modified sequence from LASV(ISTH2010-NIG-2012;Clade II)__AIT17483__SP-IgE_NP(2-569) (opt1)
aggagaaagcuuaccauggacuggaccuggauccuguuccucguggccgccgcgacccgcguccacagcagcgccuccaaggaggugaaguccuuccuguggacccagagccuccgccgggagcugagcggcuacugcuccaacaucaagcugcaggucgugaaggacgcccaggcgcuccugcacgggcuggacuucagcgagguguccaacguccagcgccucaugcggaagcagaagcgcgacgacagcgaccugaagcggcugcgcgaccucaaccaggccgugaacaaccugguggagcugaaguccacccagcagaaguccauccuccgggucggcacgcugaccagcgacgaccugcucacccuggccgccgaccuggagaagcucaagagcaaggugauccgcaccgagcggccccuguccagcgggguguacaugggcaaccuguccacgcagcagcucgagcagcgccgggcccugcugaaccucaucgggauggucggcggcgcgcaggggacccagccgggccgcgacgggguggugcgggucugggacgugaagaaccccgaccugcugaacaaccaguucggcaccaugcccagccucacccuggccugccugacgaagcagggccagguggaccucaacgacgccguccuggcccugaccgaccucgggcugaucuacaccgcgaaguaccccaacuccagcgaccuggaccgccucucccagagccacccgauccugaacaugguggacaccaagaaguccagccugaacaucagcggcuucaacuucucccucggggccgccgugaaggccggcgccugcaugcuggacgggggcaacaugcuggagacgaucaaggucacgccccagaccauggacggcauccucaagagcauccugaaggugaagaagucccuggggauguucgugagcgacacccccggcgagcggaaccccuacgagaacauccucuacaagaucugccuguccggggacggcuggccguacaucgcgagccgcaccuccaucgucgggcgggccugggagaacaccaccguggaccuggagagcgacggcaagccccacaaggugggcaccgccggguccaacaagagccuccaguccgccggcuuccccacggggcugaccuacagccagcugaugacccugaaggacuccaugaugcagcucgaccccagcgccaagaccuggaucgacaucgagggccgcccggaggaccccgucgagaucgcgcuguaccagcccauguccgggugcuacauccacuucuuccgggagcccacggaccugaagcaguucaagcaggacgccaaguacagccacggcaucgacguggccgaccucuucccggcccagcccggccugaccuccgccgucaucgaggcgcugccccgcaacauggugcugaccugccaggggagcgacgacaucaagcggcuccuggacagccagggccgccgcgacaucaagcucaucgacaucgcccuguccaaggccgacagccggcgcuucgagaacgccgugugggaccagugcaaggaccugugccacaugcacaccggggucgugguggagaagaagaagcggggcgggaaggaggagaucacgccccacugcgcccucauggacugcaucauguacgacgcggccgucuccggcggccugaacaucccggugcugcgcgccgugcucccccgggacauggucuuccgcaccagcucccccaagguggugcugugaggacuaguuauaagacugacuagcccgaugggccucccaacgggcccuccuccccuccuugcaccgagauuaauaaaaaaaaaaaaaaaaaaaaaaaaaaaaaaaaaaaaaaaaaaaaaaaaaaaaaaaaaaaaaaaaaaaaaaaaaaaaaaaaaaaaaaaaaaaaaaaaaaaa

SEQ ID NO: 21957 - RNA, 1950 nt, Artificial Sequence
  mRNA product Design i-3 (A100) comprising derived and/or modified sequence from LASV(Lassa virus/H.sapiens-wt/NGA/2015/ISTH_0543;Clade II)__AVO03640__SP-IgE_NP(2-569) (opt1)
aggagaaagcuuaccauggacuggaccuggauccuguuccucguggccgccgcgacccgcguccacagcagcgccuccaaggaggugaaguccuuccuguggacccagagccuccgccgggagcugagcggcuacugcuccaacaucaagcugcaggucgugaaggacgcccaggcgcuccugcacgggcuggacuucagcgagguguccaacguccagcgccucaugcggaagcagaagcgcgacgacagcgaccugaagcggcugcgcgaccucaaccaggccgugaacaaccugguggagcugaaguccacccagcagaaguccauccuccgggucggcacgcugaccagcgacgaccugcucacccuggccgccgaccuggagaagcucaagagcaaggugauccgcaccgagcggccccuguccagcgggguguacaugggcaaccuguccacgcagcagcucgagcagcgccgggcccugcugaacaugaucgggauggucggcggcgcgcaggggacccagccgggccgcgacgggguggugcgggucugggacgugaagaaccccgaccuccugaacaaccaguucggcaccaugcccagccugacccucgccugccugacgaagcagggccagguggaccugaacgacgccguccucgcccugaccgaccuggggcucaucuacaccgcgaaguaccccaacuccagcgaccuggaccgccugucccagagccacccgauccucaacaugguggacaccaagaaguccagccugaacaucagcggcuacaacuucucccugggggccgccgugaaggccggcgccugcaugcucgacgggggcaacaugcuggagacgaucaaggucacgccccagaccauggacggcauccucaagagcauccugaaggugaagaagucccuggggauguucgugagcgacacccccggcgagcggaaccccuacgagaacauccuguacaagaucugccucuccggggacggcuggccguacaucgcgagccgcaccuccaucgucgggcgggccugggagaacaccaccguggaccuggagagcgacggcaagccccagaaggugggcuccgccgggagcaacaagucccugcagagcgccggcuuccccaccgggcucacguacucccagcugaugacccugaaggacagcaugaugcagcuggaccccuccgccaagaccuggaucgacaucgagggccgcccggaggaccccgucgagaucgcgcucuaccagcccaugagcgggugcuacauccacuucuuccgggagcccaccgaccugaagcaguucaagcaggacgccaaguacucccacggcaucgacguggccgaccuguucccggcccagcccggccucacgagcgccgucaucgaggcgcugccccgcaacauggugcugaccugccaggggagcgacgacaucaagcggcuccuggacucccagggccgcaaggacaucaagcugaucgacaucgcccucagcaaggccgacucccgccgguucgagaacgccgugugggaccagugcaaggaccugugccacaugcacaccggggucgugguggagaagaagaagcgcggcgggaaggaggagaucacgccccacugcgcccugauggacugcaucauguacgacgcggccgucagcggcggccucaacaucccggugcugcgggccgugcugccccgcgacauggucuuccggaccuccagccccaagguggugcucugaggacuaguuauaagacugacuagcccgaugggccucccaacgggcccuccuccccuccuugcaccgagauuaauaaaaaaaaaaaaaaaaaaaaaaaaaaaaaaaaaaaaaaaaaaaaaaaaaaaaaaaaaaaaaaaaaaaaaaaaaaaaaaaaaaaaaaaaaaaaaaaaaaaa

SEQ ID NO: 21958 - RNA, 1950 nt, Artificial Sequence
  mRNA product Design i-3 (A100) comprising derived and/or modified sequence from LASV(Lassa virus/H.sapiens-wt/NGA/2016/ISTH_0009;Clade II)__AVO03572__SP-IgE_NP(2-569) (opt1)
aggagaaagcuuaccauggacuggaccuggauccuguuccucguggccgccgcgacccgcguccacagcagcgccuccaaggaggugaaguccuuccuguggacccagagccuccgccgggagcugagcggcuacugcuccaacaucaagcugcaggucgugaaggacgcccaggcgcuccugcacgggcuggacuucagcgagguguccaacguccagcgccucaugcggaagcagaagcgcgacgacagcgaccugaagcggcugcgcgaccucaaccaggccgugaacaaccugguggagcugaaguccacccagcagaaguccauccuccgggucggcacgcugaccagcgacgaccugcucacccuggccgccgaccuggagaagcucaagagcaaggugauccgcaccgagcggccccuguccagcgggguguacaugggcaaccuguccacgcagcagcucgagcagcgccgggcccugcugaacaugaucgggauggucggcggcgcgcaggggacccagccgggccgcgacgggguggugcgggucugggacgugaagaaccccgaccuccugaacaaccaguucggcaccaugcccagccugacccucgccugccugacgaagcagggccagguggaccugaacgacgccguccucgcccugaccgaccuggggcucaucuacaccgcgaaguaccccaacuccagcgaccuggaccgccugucccagagccacccgauccucaacaugguggacaccaagaaguccagccugaacaucagcggcuacaacuucucccugggggccgccgugaaggccggcgccugcaugcucgacgggggcaacaugcuggagacgaucaaggucacgccccagaccauggacggcauccucaagagcauccugaaggugaagaagucccuggggauguucgugagcgacacccccggcgagcggaaccccuacgagaacauccuguacaagaucugccucuccggggacggcuggccguacaucgcgagccgcaccuccaucgucgggcgggccugggagaacaccaccguggaccuggagagcgacggcaagccccagaaggugggcuccgccgggagcaacaagucccugcagagcgccggcuuccccaccgggcucacguacucccagcugaugacccugaaggacagcaugaugcagcuggaccccuccgccaagaccuggaucgacaucgagggccgcccggaggaccccgucgagaucgcgcucuaccagcccaugagcgggugcuacauccacuucuuccgggagcccaccgaccugaagcaguucaagcaggacgccaaguacucccacggcaucgacguggccgaccuguucccggcccagcccggccucacgagcgccgucaucgaggcgcugccccgcaacauggugcugaccugccaggggagcgacgacaucaagcggcuccuggacucccagggccgccgcgacaucaagcugaucgacaucgcccucagcaaggccgacucccggcgcuucgagaacgccgugugggaccagugcaaggaccugugccacaugcacaccggggucgugguggagaagaagaagcggggcgggaaggaggagaucacgccccacugcgcccugauggacugcaucauguacgacgcggccgucagcggcggccucaacaucccggugcugcgcgccgugcugccccgggacauggucuuccgcaccuccagccccaagguggugcucugaggacuaguuauaagacugacuagcccgaugggccucccaacgggcccuccuccccuccuugcaccgagauuaauaaaaaaaaaaaaaaaaaaaaaaaaaaaaaaaaaaaaaaaaaaaaaaaaaaaaaaaaaaaaaaaaaaaaaaaaaaaaaaaaaaaaaaaaaaaaaaaaaaaa

SEQ ID NO: 21959 - RNA, 1950 nt, Artificial Sequence
  mRNA product Design i-3 (A100) comprising derived and/or modified sequence from LASV(Lassa virus/H.sapiens-wt/NGA/2016/ISTH_0017;Clade II)__AVO03568__SP-IgE_NP(2-569) (opt1)
aggagaaagcuuaccauggacuggaccuggauccuguuccucguggccgccgcgacccgcguccacagcagcgccuccaaggaggugaaguccuuccuguggacccagagccuccgccgggagcugagcggcuacugcuccagcaucaagcugcaggucgugaaggacgcccaggcgcuccugcacgggcuggacuucuccgaggugagcaacguccagcgccucaugcggaagcagaagcgcgacgacuccgaccugaagcggcugcgcgaccucaaccaggccgugaacaaccugguggagcucaagagcacccagcagaaguccauccugcgggucggcacgcugaccagcgacgaccugcucacccuggccgccgaccuggagaagcucaaguccaaggugauccgcaccgagcggccccugagcuccgggguguacaugggcaaccugagcacgcagcagcucgagcagcgccgggcccugcugaacaugaucgggauggcgggcggcgcccaggggacccagccgggccgcgacggggucgugcgggugugggacgucaagaaccccgaccuccugaacaaccaguucggcaccaugcccucccugacccucgccugccugacgaagcagggccagguggaccugaacgacgccgugcucgcgcugaccgaccuggggcucaucuacaccgccaaguaccccaacagcuccgaccuggaccgccugagccagagccacccgauccucaacauggucgacaccaagaaguccagccugaacaucuccggcuacaacuucagccugggggccgccgugaaggccggcgcgugcaugcucgacgggggcaacaugcuggagacgaucaaggugacgccccagaccauggacggcauccugaaguccauccucaaggucaagcggagccuggggauguucguguccgacgcccccggcgagcgcaaccccuacgagaacauccuguacaagaucugccucagcggggacggcuggccguacaucgccucccggaccagcaucguggggcgcgccugggagaacaccaccgucgaccuggaguccgacggcaagccccagaaggugggcgccaccgggagcaacaagucccugcagagcgcgggcuuccccaccgggcucacguacucccagcugaugacccugaaggacagcaugaugcagcuggaccccuccgccaagaccuggaucgacaucgagggccggccggaggaccccguggaggucgcccucuaccagcccgugagcgggugcuacauccacuucuuccgcgagcccaccgaccugaagcaguucaagcaggacgccaaguacucccacggcaucgacgucgccgaccuguucccggcgcagcccggccucacgagcgccgugaucgaggcccugccccggaacauggugcugaccugccaggggagcgacgacaucaagaagcuccuggacucccagggccgcaaggacaucaagcugaucgacaucgcccucagcaaggccgacucccgccgguucgagaacgcggucugggaccagugcaaggaccugugccacaugcacaccggggugguggucgagaagaagaagcgcggcgggaaggaggagaucacgccccacugcgcccugauggacugcaucauguacgacgccgccgugagcggcggccucaacaucccggugcugcgggcgguccugccccgcgacaugguguuccggaccuccagccccaaggugguccucugaggacuaguuauaagacugacuagcccgaugggccucccaacgggcccuccuccccuccuugcaccgagauuaauaaaaaaaaaaaaaaaaaaaaaaaaaaaaaaaaaaaaaaaaaaaaaaaaaaaaaaaaaaaaaaaaaaaaaaaaaaaaaaaaaaaaaaaaaaaaaaaaaaaa

SEQ ID NO: 21960 - RNA, 1950 nt, Artificial Sequence
  mRNA product Design i-3 (A100) comprising derived and/or modified sequence from LASV(Lassa virus/H.sapiens-wt/NGA/2018/ISTH_0959;Clade II)__AVV65100__SP-IgE_NP(2-569) (opt1)
aggagaaagcuuaccauggacuggaccuggauccuguuccucguggccgccgcgacccgcguccacagcagcgccuccaaggaggugaaguccuuccuguggacccagagccuccgccgggagcugagcggcuacugcuccaacaucaagcugcaggucgugaaggacgcccaggcgcuccugcacgggcuggacuucagcgagguguccaacguccagcgccucaugcggaagcagaagcgcgacgacagcgaccugaagcggcugcgcgaccucaaccaggccgugaacaaccugguggagcugaaguccacccagcagaaguccauccuccgggucggcacccugaccagcgacgaccugcucacccuggccgccgaccuggagaagcucaagagcaaggugauccgcaccgagcggccccuguccagcgggguguacaugggcaaccuguccacgcagcagcucgagcagcgccgggcccugcugaaccucaucgggauggucggcggcgcgcaggggacccagccgggccgcgacgggguggugcgggucugggacgugaagaaccccgaccugcugaacaaccaguucggcaccaugcccagccucacccuggccugccugacgaagcagggccagguggaccucaacgacgucgugcuggcccugaccgaccucgggcugaucuacaccgccaaguaccccaacuccagcgaccuggaccgccucucccagagccacccgauccugaacaugguggacaccaagaaguccagccugaacaucagcggcuucaacuucucccucggggcggccgucaaggccggcgccugcaugcuggacgggggcaacaugcuggagacgaucaaggugacgccccagaccauggacggcauccucaagagcauccugaaggugaagaagucccuggggauguucgucagcgacacccccggcgagcggaaccccuacgagaacauccucuacaagaucugccuguccggggacggcuggccguacaucgccagccgcaccuccaucguggggcgggcgugggagaacaccaccguggaccuggagagcgacggcaagccccacaaggucggcaccgccggguccaacaagagccuccaguccgccggcuuccccacggggcugaccuacagccagcugaugacccugaaggacuccaugaugcagcucgaccccagcgccaagaccuggaucgacaucgagggccgcccggaggaccccguggagaucgcccuguaccagcccauguccgggugcuacauccacuucuuccgggagcccacggaccugaagcaguucaagcaggacgcgaaguacagccacggcaucgacgucgccgaccucuucccggcccagcccggccugaccuccgccgugaucgaggcccugccccgcaacauggugcugaccugccaggggagcgacgacaucaagcggcuccuggacagccagggccgcaaggacaucaagcucaucgacaucgcgcuguccaagaccgacagccgccgguucgagaacgccgucugggaccagugcaaggaccugugccacaugcacacgggggugguggucgagaagaagaagcgcggcgggaaggaggagaucacgccccacugcgcccucauggacugcaucauguacgacgccgccguguccggcggccugaacaucccggugcugcgggcgguccucccccgcgacaugguguuccggaccagcucccccaaggugguccugugaggacuaguuauaagacugacuagcccgaugggccucccaacgggcccuccuccccuccuugcaccgagauuaauaaaaaaaaaaaaaaaaaaaaaaaaaaaaaaaaaaaaaaaaaaaaaaaaaaaaaaaaaaaaaaaaaaaaaaaaaaaaaaaaaaaaaaaaaaaaaaaaaaaa

SEQ ID NO: 21961 - RNA, 1950 nt, Artificial Sequence
  mRNA product Design i-3 (A100) comprising derived and/or modified sequence from LASV(LASV003-NIG-2008;Clade II)__AIT17581__SP-IgE_NP(2-569) (opt1)
aggagaaagcuuaccauggacuggaccuggauccuguuccucguggccgccgcgacccgcguccacagcagcgccuccaaggaggugaaguccuuccuguggacccagagccuccgccgggagcugagcggcuacugcuccagcaucaagcugcaggucgugaaggacgcccaggcgcuccugcacgggcuggacuucuccgaggugagcaacguccagcgccucaugcggaagcagaagcgcgacgacuccgaccugaagcggcugcgcgaccucaaccaggccgugaacaaccugguggagcucaagagcacccagcagaaguccguccugcgggugggcacccugaccagcgacgaccugcucacccuggccgccgaccuggagaagcucaaguccaaggugauccgcaccgagcggccccugagcuccggggucuacaugggcaaccugagcgcccagcagcucgagcagcgccggacgcugcugaacaugaucgggauggugggcggcgcgcaggggacccagccgggccgcgacggggugguccgggugugggacgugaagaaccccgaccuccugaacaaccaguucggcaccaugcccucccugacccucgccugccugacgaagcaggggcaggucgaccugaacgacguggugcucgcccugaccgaccugggccucaucuacaccgccaaguaccccaacagcuccgaccuggaccgccugagccagagccacccgauccucuccauggucgacaccaagaaguccagccugaacaucagcggcuacaacuucucccugggggcggccgugaaggccggcgccugcaugcucgacgggggcaacaugcuggagacgaucaaggugacgccccagaccauggacggcauccucaagagcauccugaaggucaagaagucccuggggauguucgugagcgacacccccggcgagcggaaccccuacgagaacauccuguacaagaucugccucuccggggacggcuggccguacaucgccagccgcaccuccaucguggggcgggcgugggagaacaccaccgucgaccuggagagcgacggcaagccccagaaggugggcaccgccggguccaacaagagccugcaguccgccggcuuccccacggggcucaccuacagccagcugaugacccugaaggacuccaugaugcagcuggaccccagcgccaagaccuggaucgacaucgagggccgcccggaggaccccgucgagaucgcccucuaccagcccauguccgggugcuacauccacuucuuccgggagcccacggaccugaagcaguucaagcaggacgcgaaguacagccacggcaucgacgugaccgaccuguucccggcccagcccggccucaccagcgccgugaucgaggcccugccccgcaacaugguccugaccugccagggguccgacgacaucaagcggcuccuggacagccagggccgccgcgacaucaagcugaucgacaucgcccucuccaaggcggacagccggcgcuucgagaacgccgugugggaccagugcaaggaccugugccacaugcacacggggguggucguggagaagaagaagcggggcgggaaggaggagaucacgccccacugcgcccugauggacugcaucauguacgacgccgccguguccggcggccucaacaucccgguccugcgcgcggugcugccccgggacaugguguuccgcaccagcucccccaaggucgugcucugaggacuaguuauaagacugacuagcccgaugggccucccaacgggcccuccuccccuccuugcaccgagauuaauaaaaaaaaaaaaaaaaaaaaaaaaaaaaaaaaaaaaaaaaaaaaaaaaaaaaaaaaaaaaaaaaaaaaaaaaaaaaaaaaaaaaaaaaaaaaaaaaaaaa

SEQ ID NO: 21962 - RNA, 1950 nt, Artificial Sequence
  mRNA product Design i-3 (A100) comprising derived and/or modified sequence from LASV(LASV035-NIG-2009;Clade II)__AIT17589__SP-IgE_NP(2-569) (opt1)
aggagaaagcuuaccauggacuggaccuggauccuguuccucguggccgccgcgacccgcguccacagcagcgccuccaaggaggugaaguccuuccuguggacccagagccuccgccgggagcugagcggcuacugcuccagcaucaagcugcaggucgugaaggacgcccaggcgcuccugcacgggcuggacuucuccgaggugagcaacguccagcgccucaugcggaagcagaagcgcgacgacuccgaccugaagcggcugcgcgaccucaaccaggccgugaacaaccugguggagcucaagagcacccagcagaaguccauccugcgggucggcacgcugaccagcgacgaccugcucacccuggccgccgaccuggagaagcucaaguccaaggugauccgcaccgagcggccccugagcuccgggguguacaugggcaaccugagcgcccagcagcucgagcagcgccgggcgcugcugaacaugaucgggauggucggcggcgcccaggggacgcagccgggccgcgacgggguggugcgggucugggacgugaagaaccccgaccuccugaacaaccaguucggcaccaugcccucccugacccucgccugccugaccaagcagggccagguggaccugaacgacgccguccucgcgcugacggaccuggggcucaucuacaccgccaaguaccccaacagcuccgaccuggaccgccugagccagagccacccgauccucaacaugguggacaccaagaaguccagccugaacaucuccggcuacaacuucagccugggggccgccgugaaggccggcgcgugcaugcucgacgggggcaacaugcuggagaccaucaaggucacgccccagaccauggacggcauccugaaguccauccucaaggugaagcggagccuggggauguucguguccgacacccccggcgagcgcaaccccuacgagaacauccuguacaagaucugccucagcggggacggcuggccguacaucgccucccggaccagcaucgucgggcgcgccugggagaacacgaccguggaccuggaguccgacggcaagccccagaaggugggcaccaccgggagcaacaagucccugcagagcgccggcuuccccacggggcucaccuacucccagcugaugacccugaaggacagcaugaugcagcuggaccccuccgccaagaccuggaucgacaucgagggccggccggaggaccccgucgagaucgcgcucuaccagcccaugagcgggugcuacauccacuucuuccgcgagcccacggaccugaagcaguucaagcaggacgccaaguacucccacggcaucgacguggccgaccuguucccggcccagcccggccucaccagcgccgucaucgaggcgcugccccggaacauggugcugaccugccaggggagcgacgacaucaagaagcuccuggacucccagggccgccgcgacaucaagcugaucgacaucgcccucagcaaggccgacucccggaaguucgagaacgccgugugggaccagugcaaggaccugugccacaugcacaccggggucgugguggagaagaagaagcgcggcgggaaggaggagaucacgccccacugcgcccugauggacugcaucauguacgacgcggccgucagcggcggccucaacaucccggugcugcgggccgugcugccccgcgacauggucuuccggaccuccagccccaagguggugcucugaggacuaguuauaagacugacuagcccgaugggccucccaacgggcccuccuccccuccuugcaccgagauuaauaaaaaaaaaaaaaaaaaaaaaaaaaaaaaaaaaaaaaaaaaaaaaaaaaaaaaaaaaaaaaaaaaaaaaaaaaaaaaaaaaaaaaaaaaaaaaaaaaaaa

SEQ ID NO: 21963 - RNA, 1950 nt, Artificial Sequence
  mRNA product Design i-3 (A100) comprising derived and/or modified sequence from LASV(LASV1000-NIG-2009;Clade II)__AIT17783__SP-IgE_NP(2-569) (opt1)
aggagaaagcuuaccauggacuggaccuggauccuguuccucguggccgccgcgacccgcguccacagcagcgccuccaaggaggugaaguccuuccuguggacccagagccuccgccgggagcugagcggcuacugcuccaacaucaagcugcaggucgugaaggacgcccaggcgcuccugcacgggcuggacuucagcgagguguccaacguccagcgccucaugcggaagcagaagcgcgacgacagcgaccugaagcggcugcgcgaccucaaccaggccgugaacaaccugguggagcugaaguccacccagcagaaguccauccuccgggucggcacgcugaccagcgacgaccugcucacccuggccgccgaccuggagaagcucaagagcaaggugauccgcaccgagcggccccuguccagcgggguguacaugggcaaccuguccacgcagcagcucgagcagcgccgggcccugcugaacaugaucgggauggucggcggcgcgcaggggacccagccgggccgcgacgggguggugcgggucugggacgugaagaaccccgaccuccugaacaaccaguucggcaccaugcccagccugacccucgccugccugacgaagcagggccagguggaccugaacgacgucgugcucgcccugaccgaccuggggcucaucuacaccgccaaguaccccaacuccagcgaccuggaccgccugucccagagccacccgauccucaacaugguggacaccaagaaguccagccugaacaucagcggcuacaacuucucccugggggcggccgucaaggccggcgccugcaugcucgacgggggcaacaugcuggagacgaucaaggugacgccccagaccauggacggcauccucaagagcauccugaaggugaagaagucccuggggauguucgucagcgacacccccggcgagcggaaccccuacgagaacauccuguacaagaucugccucuccggggacggcuggccguacaucgccagccgcaccuccaucguggggcgggcgugggagaacaccaccguggaccuggagagcgacggcaagccccagaaggucggcaccgccggguccaacaagagccugcaguccgccggcuuccccacggggcucaccuacagccagcugaugacccugaaggacuccaugaugcagcuggaccccagcgccaagaccuggaucgacaucgagggccgcccggaggaccccguggagaucgcccucuaccagcccgucuccgggugcuacauccacuucuuccgggagcccacggaccugaagcaguucaagcaggacgcgaaguacagccacggcaucgacguggccgaccuguucccggcccagcccggccucaccuccgccgugaucgaggcccugccccgcaacaugguccugaccugccaggggagcgacgacaucaagcggcuccuggacagccagggccgccgcgacaucaagcugaucgacaucgcgcucuccaaggccgacagccggcgcuucgagaacgccgugugggaccagugcaaggaccugugccacaugcacaccgggguggucguggagaagaagaagcggggcgggaaggaggagaucacgccccacugcgcccugauggacugcaucauguacgacgccgcgguguccggcggccucaacaucccgguccugcgcgccgugcugccccgggacaugguguuccgcaccagcucccccaaggucgugcucugaggacuaguuauaagacugacuagcccgaugggccucccaacgggcccuccuccccuccuugcaccgagauuaauaaaaaaaaaaaaaaaaaaaaaaaaaaaaaaaaaaaaaaaaaaaaaaaaaaaaaaaaaaaaaaaaaaaaaaaaaaaaaaaaaaaaaaaaaaaaaaaaaaaa

SEQ ID NO: 21964 - RNA, 1950 nt, Artificial Sequence
  mRNA product Design i-3 (A100) comprising derived and/or modified sequence from LASV(LASV221-NIG-2010;Clade II)__AIT17625__SP-IgE_NP(2-569) (opt1)
aggagaaagcuuaccauggacuggaccuggauccuguuccucguggccgccgcgacccgcguccacagcagcgccuccaaggaggugaaguccuuccuguggacccagagccuccgccgggagcugagcggcuacugcuccagcaucaagcugcaggucgugaaggacgcccaggcgcuccugcacgggcuggacuucuccgaggugagcaacguccagcgccucaugcggaagcagcgccgggacgacuccgaccugaagcgccugcgggaccucaaccaggccgugaacaaccugguggagcucaagagcacccagcagaaguccauccugcgcgucggcacgcugaccagcgacgaccugcucacccuggccgccgaccuggagaagcucaaguccaaggugauccggaccgagcgcccccugagcuccgggguguacaugggcaaccugagcacgcagcagcucgagcagcggcgcgcccugcugaacaugaucgggauggucggcggcgcgcaggggacccagccgggccgggacgggguggugcgcgucugggacgugaagaaccccgaccuccugaacaaccaguucggcaccaugcccucccugacccucgccugccugacgaagcagggccagguggaccugaacgacgccguccucgcccugaccgaccuggggcucaucuacaccgcgaaguaccccaacagcuccgaccuggaccggcugagccagagccacccgauccucaacaugguggacaccaagaaguccagccugaacaucuccggcuacaacuucagccugggggccgccgugaaggccggcgccugcaugcucgacgggggcaacaugcuggagacgaucaaggucacgccccagaccguggacggcauccugaaguccauccucaaggugaagcgcagccuggggauguucgucuccgacacccccggcgagcggaaccccuacgagaacauccuguacaagaucugccucagcggggacggcuggccguacaucgcgucccgcaccagcaucguggggcgggccugggagaacaccaccguggaccuggaguccgacggcaagccccagaaggucggcaccgccgggagcaacaagucccugcagagcgccggcuuccccacggggcucaccuacucccagcugaugacccugaaggacagcaugaugcagcuggaccccuccgccaagaccuggaucgacaucgagggccgcccggaggaccccguggagaucgcgcucuaccagcccaugagcgggugcuacauccacuucuuccgggagcccacggaccugaagcaguucaagcaggacgccaaguacucccacggcaucgacgucgccgaccuguucccggcccagcccggccucaccagcgccgugaucgaggcgcugccccgcaacauggugcugaccugccaggggagcgacgacaucaagcgccuccuggacucccagggccggcgcgacaucaagcugaucgacaucgcccucagcaaggccgacucccggaaguucgagaacgccgucugggaccagugcaaggaccugugccacaugcacaccggggugguggucgagaagaagaagcgcggcgggaaggaggagaucacgccccacugcgcccugauggacugcaucauguacgacgcggccgugagcggcggccucaacaucccggugcugcgggccguccugccccgcgacaugguguuccggaccuccagccccaaggugguccucugaggacuaguuauaagacugacuagcccgaugggccucccaacgggcccuccuccccuccuugcaccgagauuaauaaaaaaaaaaaaaaaaaaaaaaaaaaaaaaaaaaaaaaaaaaaaaaaaaaaaaaaaaaaaaaaaaaaaaaaaaaaaaaaaaaaaaaaaaaaaaaaaaaaa

SEQ ID NO: 21965 - RNA, 1950 nt, Artificial Sequence
  mRNA product Design i-3 (A100) comprising derived and/or modified sequence from LASV(LASV237-NIG-2010;Clade II)__AIT17639__SP-IgE_NP(2-569) (opt1)
aggagaaagcuuaccauggacuggaccuggauccuguuccucguggccgccgcgacccgcguccacagcagcgccuccaaggaggugaaguccuuccuguggacccagagccuccgccgggagcugagcggcuacugcuccaacaucaagcugcaggucgugaaggacgcccaggcgcuccugcacgggcuggacuucagcgagguguccaacguccagcgccucaugcggaagcagaagcgcgacgacagcgaccugaagcggcugcgcgaccucaaccaggccgugaacaaccugguggagcugaaguccacccagcagaaguccauccuccgggucggcacccugaccagcgacgaccugcucacccuggccgccgaccuggagaagcucaagagcaaggugauccgcaccgagcggccccuguccagcgggguguacaugggcaaccuguccacgcagcagcucgagcagcgccgggcccugcugaacaugaucgggauggucggcggcgcgcaggggacccagccgggccgcgacgggguggugcgggucugggacgugaagaaccccgaccuccugaacaaccaguucggcaccaugcccagccugacccucgccugccugacgaagcagggccagguggaccugaacgacgccguccucgcccugaccgaccuggggcucaucuacaccgcgaaguaccccaacuccagcgaccuggaccgccugucccagagccacccgauccucaacaugguggacaucaagaaguccagccugaacaucagcggcuacaacuucucccugggggccgccgugaaggccggcgccugcaugcucgacgggggcaacaugcuggagaccaucaaggucacgccccagaccauggacggcauccucaagagcauccugaaggugaagcggucccuggggauguucgugagcgacacccccggcgagcgcaaccccuacgagaacauccuguacaagaucugccucuccggggacggcuggccguacaucgcgagccggaccuccaucgucgggcgcgccugggagaacacgaccguggaccuggagagcgacggcaagccccagaaggugggcuccgccgggagcaacaagucccugcagagcgccggcuuccccaccgggcucaccuacucccagcugaugacgcugaaggacagcaugaugcagcuggaccccuccgccaagaccuggaucgacaucgagggccggccggaggaccccgucgagaucgcgcucuaccagcccaugagcgggugcuacauccacuucuuccgcgagcccaccgaccugaagcaguucaagcaggacgccaaguacucccacggcaucgacguggccgaccuguucccggcccagcccggccucaccagcgccgucaucgaggcgcugccccggaacauggugcugacgugccaggggagcgacgacaucaagcgccuccuggacucccagggccgccgggacaucaagcugaucgacaucgcccucagcaaggccgacucccgccgguucgagaacgccgugugggaccagugcaaggaccugugccacaugcacaccggggucgugguggagaagaagaagcgcggcgggaaggaggagaucacgccccacugcgcccugauggacugcaucauguacgacgcggccgucagcggcggccucaacaucccggugcugcgggccgugcugccccgcgacauggucuuccggaccuccagccccaagguggugcucugaggacuaguuauaagacugacuagcccgaugggccucccaacgggcccuccuccccuccuugcaccgagauuaauaaaaaaaaaaaaaaaaaaaaaaaaaaaaaaaaaaaaaaaaaaaaaaaaaaaaaaaaaaaaaaaaaaaaaaaaaaaaaaaaaaaaaaaaaaaaaaaaaaaa

SEQ ID NO: 21966 - RNA, 1950 nt, Artificial Sequence
  mRNA product Design i-3 (A100) comprising derived and/or modified sequence from LASV(LASV253-NIG-2011;Clade II)__AIT17671__SP-IgE_NP(2-569) (opt1)
aggagaaagcuuaccauggacuggaccuggauccuguuccucguggccgccgcgacccgcguccacagcagcgccuccaaggaggugaaguccuuccuguggacccagagccuccgccgggagcugagcggcuacugcuccagcaucaagcugcaggucgugaaggacgcccaggcgcuccugcacgggcuggacuucuccgaggugagcaacguccagcgccucaugcggaagcagaagcgcgacgacuccgaccugaagcggcugcgcgaccucaaccaggccgugaacaaccugguggagcucaagagcacccagcagaaguccguccugcgggugggcacccugaccagcgacgaccugcucacccuggccgccgaccuggagaagcucaaguccaaggugauccgcaccgagcggccccugagcuccggggucuacaugggcaaccugagcacgcagcagcucgagcagcgccgggcccugcugaacaugaucgggauggugggcggcgcgcaggggacccagccgggccgcgacggggugguccgggugugggacgugaagaaccccgaccuccugaacaaccaguucggcaccaugcccucccugacccucgccugccugacgaagcaggggcaggucgaccugaacgacguggugcucgcccugaccgaccugggccucaucuacaccgccaaguaccccaacagcuccgaccuggaccgccugagccagagccacccgauccucaacauggucgacaccaagaaguccagccugaacaucuccggcuacaacuucagccugggggcggccgugaaggccggcgccugcaugcucgacgggggcaacaugcuggagacgaucaaggugacgccccagaccauggacggcauccugaaguccauccucaaggucaagaagucccuggggauguucgugagcgacacccccggcgagcggaaccccuacgagaacauccuguacaagaucugccucagcggggacggcuggccguacaucgccucccgcaccagcaucguggggcgggcgugggagaacaccaccgucgaccuggaguccgacggcaagccccagaaggugggcaccgccgggagcaacaagucccugcagagcgccggcuuccccacggggcucaccuacucccagcugaugacccugaaggacagcaugaugcagcuggaccccuccgccaagaccuggaucgacaucgagggccgcccggaggaccccgucgagaucgcccucuaccagcccaugagcgggugcuacauccacuucuuccgggagcccacggaccugaagcaguucaagcaggacgcgaaguacucccacggcaucgacgugaccgaccuguucccggcccagcccggccucaccagcgccgugaucgaggcccugccccgcaacaugguccugaccugccaggggagcgacgacaucaagcggcuccuggacucccagggccgccgcgacaucaagcugaucgacaucgcccucagcaaggcggacucccggcgcuucgagaacgccgugugggaccagugcaaggaccugugccacaugcacacggggguggucguggagaagaagaagcggggcgggaaggaggagaucacgccccacugcgcccugauggacugcaucauguacgacgccgccgugagcggcggccucaacaucccgguccugcgcgcggugcugccccgggacaugguguuccgcaccuccagccccaaggucgugcucugaggacuaguuauaagacugacuagcccgaugggccucccaacgggcccuccuccccuccuugcaccgagauuaauaaaaaaaaaaaaaaaaaaaaaaaaaaaaaaaaaaaaaaaaaaaaaaaaaaaaaaaaaaaaaaaaaaaaaaaaaaaaaaaaaaaaaaaaaaaaaaaaaaaa

SEQ ID NO: 21967 - RNA, 1950 nt, Artificial Sequence
  mRNA product Design i-3 (A100) comprising derived and/or modified sequence from LASV(LASV254-NIG-2011;Clade II)__AIT17675__SP-IgE_NP(2-569) (opt1)
aggagaaagcuuaccauggacuggaccuggauccuguuccucguggccgccgcgacccgcguccacagcagcgccuccaaggaggugaaguccuuccuguggacccagagccuccgccgggagcugagcggcuacugcuccagcaucaagcugcaggucgugaaggacgcccaggcgcuccugcacgggcuggacuucuccgaggugagcaacguccagcgccucaugcggaagcagaagcgcgacgacuccgaccugaagcggcugcgcgaccucaaccaggccgugaacaaccugguggagcucaagagcacccagcagaaguccguccugcgggugggcacgcugaccagcgacgaccugcucacccuggccgccgaccuggagaagcucaaguccaaggugauccgcaccgagcggccccugagcuccggggucuacaugggcaaccugagcacgcagcagcucgagcagcgccgggcccugcugaacaugaucgggauggugggcggcgcgcaggggacccagccgggccgcgacggggugguccgggugugggacgugaagaaccccgaccuccugaacaaccaguucggcaccaugcccucccugacccucgccugccugacgaagcaggggcaggucgaccugaacgacgccgugcucgcccugaccgaccugggccucaucuacaccgcgaaguaccccaacagcuccgaccuggaccgccugagccagagccacccgauccucaacaugguggacaccaagaaguccagccugaacaucuccggcuacaacuucagccugggggccgccgucaaggccggcgccugcaugcucgacgggggcaacaugcuggagacgaucaaggugacgccccagaccauggacggcauccugaaguccauccucaaggugaagaagucccuggggauguucgucagcgacacccccggcgagcggaaccccuacgagaacauccuguacaagaucugccucagcggggacggcuggccguacaucgcgucccgcaccagcaucguggggcgggccugggagaacaccaucguggaccuggaguccgacggcaagccccagaaggucggcaccgccgggagcaacaagucccugcagagcgccggcuuccccaccgggcucacguacucccagcugaugacccugaaggacagcaugaugcagcuggaccccuccgccaagaccuggaucgacaucgagggccgcccggaggaccccguggagaucgcgcucuaccagcccaugagcgggugcuacauccacuucuuccgggagcccaccgaccugaagcaguucaagcaggacgccaaguacucccacggcaucgacgucgccgaccuguucccggcccagcccggccucacgagcgccgugaucgaggcgcugccccgcaacauggugcugaccugccaggggagcgacgacaucaagcggcuccuggacucccagggccgccgcgacaucaagcugaucgacaucgcccucagcaaggccgacucccggcgcuucgagaacgccgucugggaccagugcaaggaccugugccacaugcacaccggggugguggucgagaagaagaagcggggcgggaaggaggagaucacgccccacugcgcccugauggacugcaucauguacgacgcggccgugagcggcggccucaacaucccggugcugcgcgccguccugccccgggacaugguguuccgcaccuccagccccaaggugguccucugaggacuaguuauaagacugacuagcccgaugggccucccaacgggcccuccuccccuccuugcaccgagauuaauaaaaaaaaaaaaaaaaaaaaaaaaaaaaaaaaaaaaaaaaaaaaaaaaaaaaaaaaaaaaaaaaaaaaaaaaaaaaaaaaaaaaaaaaaaaaaaaaaaaa

SEQ ID NO: 21968 - RNA, 1950 nt, Artificial Sequence
  mRNA product Design i-3 (A100) comprising derived and/or modified sequence from LASV(Nig08-04;Clade II)__ADU56611__SP-IgE_NP(2-569) (opt1)
aggagaaagcuuaccauggacuggaccuggauccuguuccucguggccgccgcgacccgcguccacagcagcgccuccaaggaggugaaguccuuccuguggacccagagccuccgccgggagcugagcggcuacugcuccaacaucaagcugcaggucgugaaggacgcccaggcgcuccugcacgggcuggacuucagcgagguguccaacguccagcgccucaugcggaagcagaagcgcgacgacggcgaccugaagcggcugcgcgaccucaaccaggccgugaacaaccugguggagcucaagagcacccagcagaaguccguccugcggguggggacccugaccagcgacgaccugcucacccuggccgccgaccuggagaagcucaaguccaaggugauccgcaccgagcggccccugagcuccggcgucuacauggggaaccugagcacgcagcagcucgagcagcgcaaggcccugcuguccaugaucggcauggugggcggggcgcagggcacccagccggggcgggacggcgugguccgcgugugggacgugaagaaccccgaccuccugaacaaccaguucgggaccaugcccagccugacccucgccugccugacgaagcagggccaggucgaccugaacgacgccgugcucgcccugaccgaccugggccucaucuacaccgcgaaguaccccaacuccagcgaccuggaccggcugucccagagccacccgauccucaacaugguggacaccaagaaguccagccugaacaucagcggguacaacuucucccugggcgccgccgucaaggccggggccugcaugcucgacggcggcaacaugcuggagacgaucaaggugacgccccagaccauggacgggauccucaagagcauccugaaggugaagcgcucccugggcauguucgucagcgacacccccggggagcggaaccccuacgagaacauccuguacaagaucugccucuccggcgacggguggccguacaucgcgagccgcaccuccaucgugggccgggccugggagaacaccaccguggaccuggagagcgacggcaagccccagaaggucgggaccgccggcuccaacaagagccugcaguccgccggguuccccacgggccucaccuacagccagcugaugacccugaaggacuccaugaugcagcuggaccccagcgccaagaccuggaucgacaucgaggggcgcccggaggaccccguggagaucgcgcucuaccagcccauguccggcugcuacauccacuucuuccgggagcccacggaccugaagcaguucaagcaggacgccaaguacagccacggcaucgacgucaccgaccuguucuccgcccagccggggcucaccagcgccgugaucgaggcccugccccgcaacauggugcugaccugccagggcagcgacgacaucaagaagcuccuggacucccaggggcggcgcgacaucaagcugaucgacaucagccucaacaaggcggacucccgccgguucgagaacgccgucugggaccagugcaaggaccugugccacaugcacacgggcgugguggucgagaagaagaagcgcgggggcaaggaggagaucacgccccacugcgcccugauggacugcaucauguucgacgccgccgugagcggcgggcucaacauccccauccugcgggcggugcugccgcgcgacauggucuuccggaccuccagccccaagguggugcucugaggacuaguuauaagacugacuagcccgaugggccucccaacgggcccuccuccccuccuugcaccgagauuaauaaaaaaaaaaaaaaaaaaaaaaaaaaaaaaaaaaaaaaaaaaaaaaaaaaaaaaaaaaaaaaaaaaaaaaaaaaaaaaaaaaaaaaaaaaaaaaaaaaaa

SEQ ID NO: 21969 - RNA, 1953 nt, Artificial Sequence
  mRNA product Design i-3 (A100) comprising derived and/or modified sequence from LASV(GA391;Clade III)__AAA46284__SP-IgE_NP(2-570) (opt1)
aggagaaagcuuaccauggacuggaccuggauccuguuccucguggccgccgcgacccgcguccacagcagcgccuccaaggaggugcgcagcugccuguggacccagucccuccggcgcgagcugagcggcuacugcuccaacaucaagcugcaggucgugaaggacgcccaggcgcuccugcacgggcuggacuucagcgagguguccaacguccagcggcucaugcgcaagcagaagcgggacgacggcgaccugaagcgccugcgggaccucaaccaggccgugaacaaccugguggagcugaaguccacccagcagaaguccguccuccgcguggggacgcugagcuccgacgaccugcucauccuggccgccgaccuggagaagcucaagagcaaggugacccggaccgagcgcccccuguccagcggcgucuacauggggaaccuguccagccagcagcucgaccagcggcgcgcccugcugaacaugaucggcaugaccggcguguccgggggcgggaagggcgcgagcaacgggaucgugcgggucugggacgugaagaacgccgagcuccugaacaaccaguucggcacgaugccgucccugacccucgccugccugaccaagcagggccagguggaccugaacgacgccguccaggcgcucaccgaccuggggcugaucuacacggccaaguaccccaacagcagcgaccucgaccgccugucccagagccaccccauccugaacaugaucgacaccaagaaguccagccucaacaucuccggcuacaacuucagccugggggccgccgugaaggccggcgcgugcaugcuggacggcgggaacaugcucgagaccaucaaggugagcccccagaccauggacggcauccucaagagcauccugaaggucaagaagucccuggggauguucgugagcgacacgccgggcgagcggaaccccuacgagaacauccuguacaagaucugccuguccggggacggcuggagcuacaucgccucccgcaccagcaucgugggccgggccugggagaacaccgucguggaccucgagcaggacaacaagccccagaagaucgggaacggcggguccaacaagagccugcaguccgccggcuucgccgcggggcugaucuacagccagcucaugacccugaaggacuucaagugcuucaaccugauccccaacgccaagacguggauggacaucgagggccgcccggaggaccccguggagaucgcccuguaccagcccuccagcggcugcuacguccacuucuuccgggagcccaccgaccucaagcaguucaagcaggacgccaaguacagccacgggcgcgacgugaccgaccuguucgccgcgcagccgggccugaccuccgccgucaucgaggcccucccccggaacauggugaucacgugccaggggagcgaggacauccgcaagcugcuggagucccagggccgccgggacaucaagcucaucgacaucacccugagcaaggccgacucccgcaaguucgagaacgccgugugggaccaguucaaggaccugugccacaugcacaccggggucgugguggagaagaagaagcggggcggcaaggaggagaucacgccccacugcgcgcucauggacugcaucauguucgacgccgccgucagcgggggccuggacgccaaggugcugcgcgugguccucccccgggacaugguguuccgcaccuccaccccgaaggugguccugugaggacuaguuauaagacugacuagcccgaugggccucccaacgggcccuccuccccuccuugcaccgagauuaauaaaaaaaaaaaaaaaaaaaaaaaaaaaaaaaaaaaaaaaaaaaaaaaaaaaaaaaaaaaaaaaaaaaaaaaaaaaaaaaaaaaaaaaaaaaaaaaaaaaa

SEQ ID NO: 21970 - RNA, 1950 nt, Artificial Sequence
  mRNA product Design i-3 (A100) comprising derived and/or modified sequence from LASV(Nig08-A19;Clade III)__ADU56619__SP-IgE_NP(2-569) (opt1)
aggagaaagcuuaccauggacuggaccuggauccuguuccucguggccgccgcgacccgcguccacagcagcgccuccaaggaggugaaguccuuccuguggacccagucccuccgccgggagcugagcggcuacugcuccaacaucaagcugcaggucgugaaggacgcccaggcgcuccugcacgggcuggacuucagcgagguguccaacguccagcgccucaugcggaagcagaagcgcgacgacggcgaccugaagcggcugcgcgaccucaaccaggccgugaacaaccugguggagcucaagagcacccagcagaaguccguccugcggguggggacccugagcuccgacgaccugcucgugcuggccgccgaccuggagaagcucaagagcaaggucgugcgcaccgagcggccccuguccagcggcaucuacauggggaaccuguccagccagcagcucgaccagcgcaaggcccugcugaacaugaucggcaugaccggcgggaacggcgggcggaacaccacguccgacggcaucgugcgcgucugggacgugaagaacgcggagcuccugaacaaccaguucgggaccaugccgagccugacccucgccugccugaccaagcagggccagguggaccugaacgacgccguccaggcccucacggaccugggccugaucuacaccgcgaaguaccccaacuccagcgaccucgaccggcuggcccagagccaccccauccugaacaugaucgacaccaagaaguccagccucaacaucuccggguacaacuucagccugggcgccgccgugaaggccggggcgugcaugcuggacggcggcaacaugcucgagaccaucaaggugagcccccagacgauggacgggauccucaagagcauccugaaggucaagcgcucccugggcauguucaucagcgacaccccgggggagcggaaccccuacgagaacauccuguacaagaucugccuguccggcgacggguggcccuacaucgccagccgcaccuccaucgugggccgggccugggagaacaccguggucgaccucgagagcgacaacaagccccagaagacgggcaacgggggcuccaacaagagccugcaguccgccggguucgccgcgggccugaccuacagccagcucaugacccugaaggacuccaugcugcagcuggacccgaacgccaagaccuggauggacaucgaggggcgccccgaggaccccguggagaucgcccucuaccagcccagcuccggcugcuacauccacuucuuccgggagccgacggaccugaagcaguucaagcaggacgccaaguacagccacggcaucgacgugaccgaccuguucgccgcgcagcccgggcucaccagcgccgucaucgaggcccugccccgcaacauggugaucacgugccagggcuccgaggacauccggaagcugcucgagagccaggggcgccgcgacaucaagcugaucgacaucucccugagcaaggucgacucccggaaguucgagaacgccgugugggaccaguucaaggaccucugccacaugcacaccggcaucguggucgagaagaagaagcgcgggggcaaggaggagaucacgccccacugcgcccugauggacugcaucauguucgacgcggccgugagcggcgggguggacgccaagguccugcgggccgugcucccgcgcgacaugguguuccggaccuccacccccaaggucgugcugugaggacuaguuauaagacugacuagcccgaugggccucccaacgggcccuccuccccuccuugcaccgagauuaauaaaaaaaaaaaaaaaaaaaaaaaaaaaaaaaaaaaaaaaaaaaaaaaaaaaaaaaaaaaaaaaaaaaaaaaaaaaaaaaaaaaaaaaaaaaaaaaaaaaa

SEQ ID NO: 21971 - RNA, 1950 nt, Artificial Sequence
  mRNA product Design i-3 (A100) comprising derived and/or modified sequence from LASV(G1180-SLE-2010;Clade IV)__AIT17169__SP-IgE_NP(2-569) (opt1)
aggagaaagcuuaccauggacuggaccuggauccuguuccucguggccgccgcgacccgcguccacagcagcgccuccaaggagaucaagagcuuccuguggacccagucccuccgccgggagcugagcggcuacugcuccaacaucaagcuccagguggucaaggacgcccaggcgcugcugcacgggcuggacuucagcgagguguccaacgugcagcgccucaugcggaaggagcgccgggacgacaacgaccugaagcgccugcgggaccucaaccaggccgucaacaaccugguggagcucaagagcacccagcagaaguccauccugcgcgugggcacccugaccagcgacgaccugcucauccuggccgccgaccuggagaagcucaaguccaaggucauccggaccgagcgcccccugagcgccgggguguacaugggcaaccuguccagccagcagcucgaccagcggcgcgcgcugcuguccaugaucgggaugagcuccggcaaccagcgggcccaggccggccgcgacggggugguccgggugugggacgugaagaacgucgagcuccugaacaaccaguucggcaccaugccgagccugacgcucgccugccugaccaagcagggccagguggaccugaacgacgcggugcaggcccucaccgaccuggggcugaucuacaccgccaaguaccccaacacguccgaccucgaccgccugacccagagccaccccauccugaacaugaucgacaccaagaaguccagccucaacaucagcggguacaacuucucccugggcgccgccgucaaggcgggcgccugcaugcuggacgggggcaacaugcucgagaccaucaaggugagcccccagacgauggacgggauccugaaguccauccugaaggugaagaaggcccucggcauguucaucagcgacaccccgggcgagcggaaccccuacgagaacauccuguacaagaucugccuguccggggacggcuggcccuacaucgccagccgcaccuccaucaccgggcgggccugggagaacacggucguggaccucgagagcgacggcaagccccagaaggcgggguccaacaacagcaacaagucccugcagagcgugggcuucaccgccggccugaccuacucccagcucaugacccugaaggacgccaugcugcagcuggacccgaacgccaagacguggauggacaucgaggggcgccccgaggaccccgucgagaucgcccucuaccagcccagcuccggcugcuacauccacuucuuccgggagccgaccgaccugaagcaguucaagcaggacgcgaaguacagccacgggaucgacgugaccgaccuguucgccgcccagcccggccucaccuccgccgugaucgacgcccugccccgcaacauggucaucacgugccaggggagcgacgacauccgcaagcugcucgagagccagggccggaaggacaucaagcugaucgacaucgcgcuguccaagaccgacagccgcaaguacgagaacgccgugugggaccaguacaaggaccucugccacaugcacaccggcgucgugguggagaagaagaagcgcgggggcaaggaggagaucacgccccacugcgcccugauggacugcaucauguucgacgccgcggucuccgggggccugaacaccagcgugcuccgggccgugcugccgcgggacauggucuuccgcaccuccacgccccggguggugcugugaggacuaguuauaagacugacuagcccgaugggccucccaacgggcccuccuccccuccuugcaccgagauuaauaaaaaaaaaaaaaaaaaaaaaaaaaaaaaaaaaaaaaaaaaaaaaaaaaaaaaaaaaaaaaaaaaaaaaaaaaaaaaaaaaaaaaaaaaaaaaaaaaaaa

SEQ ID NO: 21972 - RNA, 1950 nt, Artificial Sequence
  mRNA product Design i-3 (A100) comprising derived and/or modified sequence from LASV(G1442-SLE-2011;Clade IV)__AIT17181__SP-IgE_NP(2-569) (opt1)
aggagaaagcuuaccauggacuggaccuggauccuguuccucguggccgccgcgacccgcguccacagcagcgccuccaaggaggugaaguccuuccuguggacccagagccuccgccgggagcugagcggcuacugcuccaacaucaagcugcaggucgugaaggacgcccaggcgcuccugcacgggcuggacuucagcgagguguccaacguccagcgccucaugcggaagcagcgccgggacgacaacgaccugaagcgccugcgggaccucaaccaggccgugaacaaccugguggagcucaagagcacccagcagaaguccguccugcgcgugggcacccugaccagcgacgaccugcucgugcuggccgccgaccuggagaagcucaaguccaaggucauccggaccgagcgcccccugagcgccgggguguacaugggcaaccuguccagccagcagcucgaccagcggcgcgcgcugcugaacaugaucgggauguccggcggcauccaggggacccggacgggccgcgacggggugguccgggugugggacgugaagaacgccgaccuccugaacaaccaguucggcaccaugccgagccugacccucgccugccugaccaagcaggggcaggucgaccugaacgacguggugcaggcccucacggaccugggccugaucuacaccgcgaaguaccccaacgccuccgaccucgaccgccugacccagagccaccccauccugaacaugaucgacaccaagaaguccagccucaacaucagcggcuacaacuucucccugggggccgccgucaaggccggcgcgugcaugcuggacgggggcaacaugcucgagacgaucaaggugagcccccagaccauggacggcauccugaaguccauccugaaggugaagaagacccucgggauguucaucagcgacaccccgggcgagcggaaccccuacgagaacauccuguacaagaucugccuguccggggacggcuggcccuacaucgccagccgcacguccaucaccgggcgggccugggagaacaccgucguggaccucgagagcgacggcaagccccagaaggccggcuccaacaacagcaacaagucccugcagagcgccggguucgcggccggccugaccuacucccagcucaugacgcugaaggacgccaugcugcagcuggacccgaacgccaagaccuggauggacaucgaggggcgccccgaggaccccguggagaucgcccucuaccagcccagcuccggcugcuacauccacuucuuccgggagccgaccgaccugaagcaguucaagcaggacgcgaaguacagccacgggaucgacgucaccgaccuguucgccgcccagcccggccucacguccgccgugaucgaggcccugccccgcaacauggucaucacgugccagggcagcgacgacaucaagaagcugcucgagucccaggggcgcaaggacaucaagcugaucgacaucgcgcugagcaagaccgacagccggaaguacgagaacgccgugugggaccaguacaaggaccucugccacaugcacaccggcguggucguggagaagaagaagcgcgggggcaaggaggagaucaccccgcacugcgcccugauggacugcaucauguucgacgccgcgguguccgggggccugaacacccucguccugcgggccgugcugccccgcgacaugguguuccggaccagcacgccccgcgucgugcucugaggacuaguuauaagacugacuagcccgaugggccucccaacgggcccuccuccccuccuugcaccgagauuaauaaaaaaaaaaaaaaaaaaaaaaaaaaaaaaaaaaaaaaaaaaaaaaaaaaaaaaaaaaaaaaaaaaaaaaaaaaaaaaaaaaaaaaaaaaaaaaaaaaaa

SEQ ID NO: 21973 - RNA, 1950 nt, Artificial Sequence
  mRNA product Design i-3 (A100) comprising derived and/or modified sequence from LASV(G3010-SLE-2013;Clade IV)__AIT17345__SP-IgE_NP(2-569) (opt1)
aggagaaagcuuaccauggacuggaccuggauccuguuccucguggccgccgcgacccgcguccacagcagcgccuccaaggagaucaagagcuuccuguggacccagucccuccgccgggagcugagcggcuacugcuccaacaucaagcuccagguggucaaggacgcccaggcgcugcugcacgggcuggacuucagcgagguguccaacgugcagcgccucaugcggaaggagcgccgggacgacaacgaccugaagcgccugcgggaccucaaccaggccgucaacaaccugguggagcucaagagcacccagcagaaguccauccugcgcgugggcacccugaccagcgacgaccugcucauccuggccgccgaccuggagaagcucaaguccaaggucacccggaccgagcgcccccugagcgccgggguguacaugggcaaccuguccagccagcagcucgaccagcggcgcgcgcugcuguccaugaucgggaugagcuccggcgugcagggcgcccgggccgggcgcgacggcgucgugcgggugugggacgucaagaacgccgagcuccugaacaaccaguucgggacgaugccgagccugacccucgcgugccugaccaagcagggccagguggaccugaacgacgugguccaggcccucaccgaccuggggcugaucuacacggccaaguaccccaacaccuccgaccucgaccgccugacccagagccaccccauccugaacaugaucgacaccaagaaguccagccucaacaucagcggcuacaacuucucccugggcgccgccgugaaggcgggggccugcaugcuggacggcgggaacaugcucgagacgaucaaggugagcccccagaccauggacggcauccugaaguccauccugaaggucaagaaggcccucggcauguucaucagcgagaccccgggggagcggaaccccuacgagaacauccuguacaagaucugccuguccggcgacggguggcccuacaucgccagccgcaccuccaucacgggccgggccugggagaacaccgugguggaccucgagagcgacgggaagccccagaaggcgggcuccaacaacagcaacaagucccugcagagcgccggcuucaccgccgggcugaccuacucccagcucaugacgcugaaggacgccaugcugcagcuggacccgaacgccaagaccuggauggacaucgagggccgccccgaggaccccgucgagguggcgcucuaccagcccagcuccgggugcuacauccacuucuuccgggagccgaccgaccugaagcaguucaagcaggacgccaaguacagccacggcaucgacgugaccgaccuguucgccgcccagcccgggcucacguccgccgucaucgacgcgcugccccgcaacauggugaucacgugccagggcagcgacgacaucaagaagcugcucgagagccagggccgcaaggacaucaagcugaucgacaucgcccuguccaagaccgacagccggaaguacgagaacgccgucugggaccaguacaaggaccucugccacaugcacaccggggugguggucgagaagaagaagcgcggcgggaaggaggagaucaccccgcacugcgcccugauggacugcaucauguucgacgcggccguguccggcgggcugaacaccagcgugcuccgggccguccugccccgcgacaugguguuccggaccuccacgccccgcgugguccugugaggacuaguuauaagacugacuagcccgaugggccucccaacgggcccuccuccccuccuugcaccgagauuaauaaaaaaaaaaaaaaaaaaaaaaaaaaaaaaaaaaaaaaaaaaaaaaaaaaaaaaaaaaaaaaaaaaaaaaaaaaaaaaaaaaaaaaaaaaaaaaaaaaaa

SEQ ID NO: 21974 - RNA, 1950 nt, Artificial Sequence
  mRNA product Design i-3 (A100) comprising derived and/or modified sequence from LASV(G502-SLE-2009;Clade IV)__AIT17127__SP-IgE_NP(2-569) (opt1)
aggagaaagcuuaccauggacuggaccuggauccuguuccucguggccgccgcgacccgcguccacagcagcgccuccaaggagaucaagagcuuccuguggacccagucccuccgccgggagcugagcggcuacugcuccaacaucaagcuccagguggucaaggacgcccaggcgcugcugcacgggcuggacuucagcgagguguccaacgugcagcgccucaugcggaaggagcgccgggacgacaacgaccugaagcgccugcgggaccucaaccaggccgucaacaaccugguggagcucaagagcacccagcagaaguccauccugcgcgugggcacccugaccagcgacgaccugcucauccuggccgccgaccuggagaagcucaaguccaaggucauccggaccgagcgcccccugagcgccgggguguacaugggcaaccuguccagccagcagcucgaccagcggcgcgcgcugcuguccaugaucgggaugagcggcggcaaccagggggugcgggccggcaaggacggggucgugcgcgugugggacgucaagaacgccgagcuccugaacaaccaguucggcaccaugccgucccugacgcucgccugccugaccaagcagggccagguggaccugaacgacgcggugcaggcccucaccgaccuggggcugaucuacaccgccaaguaccccaacacgagcgaccucgaccggcugacccagucccaccccauccugaacaugaucgacaccaagaaguccagccucaacaucuccggcuacaacuucagccugggggccgccgucaaggcgggcgccugcaugcuggacgggggcaacaugcucgagaccaucaaggugagcccccagacgauggacggcauccucaagagcauccugaaggugaagaaggcccuggggauguucaucuccgacaccccgggcgagcgcaaccccuacgagaacauccuguacaagaucugccugagcggggacggcuggcccuacaucgccucccggaccagcaucaccgggcgcgccugggagaacacggucguggaccucgaguccgacggcaagccccagaaggcgggcagcaacaacuccaacaagagccugcaguccgccggguucaccgccggccugaccuacagccagcucaugacccugaaggacgccaugcugcagcuggacccgaacacgaagaccuggauggacaucgaggggcggcccgaggaccccguggagaucgcccucuaccagcccuccagcggcugcuacauccacuucuuccgcgagccgaccgaccugaagcaguucaagcaggacgcgaaguacucccacgggaucgacgucaccgaccuguucgccgcccagcccggccucacgagcgccgugaucgacgcccugccccggaacauggugaucacgugccagggcuccgacgacauccgcaagcugcucgagagccaggggcgcaaggacaucaagcugaucgacaucgcgcugaacaagaccgacagccggaaguacgagaacgccgucugggaccaguacaaggaccucugccacaugcacaccggcguggucguggagaagaagaagcgcgggggcaaggaggagaucaccccgcacugcgcccugauggacugcaucauguucgacgccgcgguguccgggggccugaacaccagcguccuccgggccgugcugccccgcgacaugguguuccggaccuccacgccccgcgucgugcugugaggacuaguuauaagacugacuagcccgaugggccucccaacgggcccuccuccccuccuugcaccgagauuaauaaaaaaaaaaaaaaaaaaaaaaaaaaaaaaaaaaaaaaaaaaaaaaaaaaaaaaaaaaaaaaaaaaaaaaaaaaaaaaaaaaaaaaaaaaaaaaaaaaaa

SEQ ID NO: 21975 - RNA, 1950 nt, Artificial Sequence
  mRNA product Design i-3 (A100) comprising derived and/or modified sequence from LASV(G733-SLE-2010;Clade IV)__AIT17155__SP-IgE_NP(2-569) (opt1)
aggagaaagcuuaccauggacuggaccuggauccuguuccucguggccgccgcgacccgcguccacagcagcgccuccaaggagaucaagagcuuccuguggacccagucccuccgccgggagcugagcggcuacugcuccaacaucaagcuccagguggucaaggacgcccaggcgcugcugcacgggcuggacuucagcgagguguccaacgugcagcgccucaugcggaaggagcgccgggacgacaacgaccugaagcgccugcgggaccucaaccaggccgucaacaaccugguggagcucaagagcacccagcagaaguccgugcugcgcgucggcacccugaccagcgacgagcugcucgugcuggccgccgaccuggagaagcucaaguccaaggugauccggaccgagcgcccccugagcgccggggucuacaugggcaaccuguccagccagcagcucgaccagcggcgcgcgcugcuguccaugaucgggaugagcggcggcaaccagggggcccggaccggccgcgacgggguggugcgggucugggacgugaagaacgccgagcuccugaacaaccaguucggcaccaugccgucccugacccucgccugccugaccaagcagggccagguggaccugaacgacgcgguccaggcccucaccgaccuggggcugaucuacacggccaaguaccccaacaccagcgaccucgaccgccugacccagucccaccccauccugaacaugaucgacaccaagaaguccagccucaacaucuccggcuacaacuucagccugggggccgccgugaaggcgggcgccugcaugcuggacgggggcaacaugcucgagacgaucaaggugagcccccagaccauggacggcauccucaagagcauccugaaggucaagaaggcccuggggauguucaucuccgacaccccgggcgagcggaaccccuacgagaacauccuguacaagaucugccugagcggggacggcuggcccuacaucgccucccgcaccagcaucacggggcgggccugggagaacaccgugguggaccucgaguccgacggcaagccccagaaggcgggcagcaacaacuccaacaagagccugcaguccgccggguucaccgccggccugaccuacagccagcucaugacgcugaaggacgccaugcugcagcuggacccgaacgccaagaccuggauggacaucgaggggcgccccgaggaccccgucgagaucgcgcucuaccagcccuccagcggcugcuacauccacuucuuccgggagccgaccgaccugaagcaguucaagcaggacgccaaguacucccacgggaucgacgugaccgaccuguucgccgcccagcccggccucacgagcgccgugaucgacgcgcugccccgcaacauggucaucacgugccagggcuccgacgacauccgcaagcugcucgagagccaggggcggaaggacaucaagcugaucgacaucgcccugagcaagaucgacucccgcaaguacgagaacgccgugugggaccaguacaaggaccucugccacaugcacaccggcgucgugguggagaagaagaagcgcgggggcaaggaggagaucacgccccacugcgcccugauggacugcaucauguucgacgcggccgucagcgggggccugaacucccucgugcugcgggccgugcugccgcgggacauggucuuccgcaccagcacgccccggguggugcucugaggacuaguuauaagacugacuagcccgaugggccucccaacgggcccuccuccccuccuugcaccgagauuaauaaaaaaaaaaaaaaaaaaaaaaaaaaaaaaaaaaaaaaaaaaaaaaaaaaaaaaaaaaaaaaaaaaaaaaaaaaaaaaaaaaaaaaaaaaaaaaaaaaaa

SEQ ID NO: 21976 - RNA, 1950 nt, Artificial Sequence
  mRNA product Design i-3 (A100) comprising derived and/or modified sequence from MOPV/LASV reassortant(IGS-1;Clade IV)__AFY05578__SP-IgE_NP(2-569) (opt1)
aggagaaagcuuaccauggacuggaccuggauccuguuccucguggccgccgcgacccgcguccacagcagcgccuccaaggagaucaagagcuuccuguggacccagucccuccgccgggagcugagcggcuacugcuccaacaucaagcuccagguggucaaggacgcccaggcgcugcugcacgggcuggacuucagcgagguguccaacgugcagcgccucaugcggaaggagcgccgggacgacaacgaccugaagcgccugcgggaccucaaccaggccgucaacaaccugguggagcucaagagcacccagcagaaguccauccugcgcgugggcacccugaccagcgacgaccugcucauccuggccgccgaccuggagaagcuccgguccaaggucauccgcaccgagcggccccugagcgccgggguguacaugggcaaccuguccagccagcagcucgaccagcgccgggcgcugcugaacaugaucgggauguccggcggcaaccagggggcccgcgccggccgggacggggugguccgcgugugggacgugaagaacgccgagcuccugagcaaccaguucggcaccaugccgucccugacgcucgcgugccugaccaagcaggggcaggucgaccugaacgacgccgugcaggcccucaccgaccugggccugaucuacaccgccaaguaccccaacacgagcgaccucgaccggcugacccagucccaccccauccugaacaugaucgacaccaagaaguccagccucaacaucuccggcuacaacuucagccugggggccgcggugaaggccggcgccugcaugcuggacgggggcaacaugcucgagaccaucaaggucagcccccagacgauggacggcauccucaagagcauccugaaggugaagaaggcccuggggauguucaucuccgacaccccgggcgagcgcaaccccuacgagaacauccuguacaagaucugccugagcggggacggcuggcccuacaucgccucccggaccagcaucaccgggcgcgcgugggagaacacgguggucgaccucgaguccgacggcaagccccagaaggccgacagcaacaacuccagcaagucccugcagagcgccggcuucaccgccgggcugaccuacucccagcucaugacccugaaggacgccaugcugcagcuggacccgaacgcgaagacguggauggacaucgagggccggcccgaggaccccguggagaucgcccucuaccagcccagcuccgggugcuacauccacuucuuccgcgagccgaccgaccugaagcaguucaagcaggacgccaaguacagccacggcaucgacgugaccgaccuguucgccacccagcccgggcucacguccgccgucaucgacgcgcugccccgcaacauggugaucacgugccagggcagcgacgacauccggaagcugcucgagagccagggccgcaaggacaucaagcugaucgacaucgaccuguccaagaccgacagccggaaguacgagaacgccgugugggaccaguacaaggaccucugccacaugcacaccggggucguggucgagaagaagaagcgcggcgggaaggaggagaucaccccgcacugcgcccugauggacugcaucauguucgacgccgcgguguccggcgggcugaacaccagcgugcuccgggccguccugccccgcgacaugguguuccggaccuccacgccccgcgugguccugugaggacuaguuauaagacugacuagcccgaugggccucccaacgggcccuccuccccuccuugcaccgagauuaauaaaaaaaaaaaaaaaaaaaaaaaaaaaaaaaaaaaaaaaaaaaaaaaaaaaaaaaaaaaaaaaaaaaaaaaaaaaaaaaaaaaaaaaaaaaaaaaaaaaa

SEQ ID NO: 21977 - RNA, 1950 nt, Artificial Sequence
  mRNA product Design i-3 (A100) comprising derived and/or modified sequence from LASV(LM765-SLE-2012;Clade IV)__AIT17815__SP-IgE_NP(2-569) (opt1)
aggagaaagcuuaccauggacuggaccuggauccuguuccucguggccgccgcgacccgcguccacagcagcgccuccaaggagaucaagagcuuccuguggacccagucccuccgccgggagcugagcggcuacugcuccaacaucaagcuccagguggucaaggacgcccaggcgcugcugcacgggcuggacuucagcgagguguccaacgugcagcgccucaugcggaaggagcgccgggacgacaacgaccugaagcgccugcgggaccucaaccaggccgucaacaaccugguggagcucaagagcacccagcagaaguccauccugcgcgugggcacccugaccagcgacgaccugcucauccuggccgccgaccuggagaagcucaaguccaaggucacccggaccgagcgcccccugagcgccgggguguacaugggcaaccuguccagccagcagcucgaccagcggcgcgcgcugcuggacaugaucgggauguccggcagcaaccagggcgcccgggccgggcgcgacggcgugguccgggugugggacgugaagaacgccgagcuccugaacaaccaguucgggacgaugccgucccugacccucgcgugccugaccaagcagggccaggucgaccugaacgacgccgugcaggcccucaccgaccuggggcugaucuacacggccaaguaccccaacaccagcgaccucgaccgccugacccagucccaccccauccugaacaugaucgacaccaagaaguccagccucaacaucuccggcuacaacuucagccugggcgccgcggugaaggccggggccugcaugcuggacggcgggaacaugcucgagacgaucaaggucagcccccagaccauggacggcauccucaagagcauccugaaggugaagaaggcccugggcauguucaucuccgacgccccgggggagcggaaccccuacgagaacauccuguacaagaucugccugagcggcgacggguggcccuacaucgcgucccgcaccagcaucaccggccgggccugggagaacacgguggucgaccucgaguccgacgggaagccccagaaggccggcagcaacggcuccaacaagagccugcaguccgccggguucaccgccggccugaccuacagccagcucaugacccugaaggacgcgaugcugcagcuggacccgaacgccaagacguggauggacaucgaggggcgccccgaggaccccguggagaucgcccucuaccagcccuccagcggcugcuacauccacuucuuccgggagccgaccgaccugaagcaguucaagcaggacgccaaguacucccacgggaucgacgugaccgaccuguucgccgcgcagcccggccucaccagcgccgucaucgacgcccugccccgcaacauggugaucacgugccagggcuccgacgacauccgcaagcuguucgagagccaggggcggaaggacaucaagcucaucgacaucgcccugagcaagaccgacucccgcaaguacgagaacgcggugugggaccaguacaaggaccugugccacaugcacaccggcaucgucguggagaagaagaagcgcgggggcaaggaggagaucacgccccacugcgcccucauggacugcaucauguucgacgccgccgucagcgggggccugaacaccuccgugcugcgggccgugcucccgcgggacauggucuuccgcaccagcacgccccggguggugcugugaggacuaguuauaagacugacuagcccgaugggccucccaacgggcccuccuccccuccuugcaccgagauuaauaaaaaaaaaaaaaaaaaaaaaaaaaaaaaaaaaaaaaaaaaaaaaaaaaaaaaaaaaaaaaaaaaaaaaaaaaaaaaaaaaaaaaaaaaaaaaaaaaaaa

SEQ ID NO: 21978 - RNA, 1950 nt, Artificial Sequence
  mRNA product Design i-3 (A100) comprising derived and/or modified sequence from LASV(LM776-SLE-2012;Clade IV)__AIT17825__SP-IgE_NP(2-569) (opt1)
aggagaaagcuuaccauggacuggaccuggauccuguuccucguggccgccgcgacccgcguccacagcagcgccuccaaggagaucaagagcuuccuguggacccagucccuccgccgggagcugagcuccuacugcagcaacaucaagcuccagguggucaaggacgcccaggcgcugcugcacggccuggacuucuccgaggugagcaacgugcagcgccucaugcggaaggagcgccgggacgacaacgaccugaagcgccugcgggaccucaaccaggccgucaacaaccugguggagcugaaguccacccagcagaaguccauccuccgcguggggacccugaccuccgacgaccugcucauccuggccgccgaccuggagaagcucaagagcaaggucacccggaccgagcgcccccuguccgccggcguguacauggggaaccugagcucccagcagcucgaccagcggcgcgcgcugcugagcaugaucggcauguccgggagcaaccagggcgcccgggccggccgcgacggggugguccgggugugggacgugaagaacgccgagcuccugaacaaccaguucggcacgaugccgucccugacccucgcgugccugaccaagcaggggcaggucgaccugaacgacgccgugcaggcccucaccgaccugggccugaucuacacggccaaguaccccaacaccagcgaccucgaccgccugacccagagccaccccauccugaacaugaucgacaccaagaaguccagccucaacaucuccggguacaacuucagccugggcgccgcggugaaggccggcgccugcaugcuggacgggggcaacaugcucgagacgaucaaggucagcccccagaccauggacgggauccucaagagcauccugaaggugaagaaggcccugggcauguucaucuccgacaccccgggcgagcggaaccccuacgagaacauccuguacaagaucugccugagcggggacggcuggcccuacaucgccucccgcaccagcaucacggggcgggcgugggagaacaccguggucgaccucgaguccgacggcaagccccagaaggccgggagcaacaacuccaacaagagccugcaguccgccggcuucaccgccggccugaccuacagccagcucaugacgcugaaggacgccaugcugcagcuggacccgaacgcgaagaccuggauggacaucgaggggcgccccgaggaccccguggagguggcccucuaccagcccuccagcggcugcuacauccacuucuuccgggagccgaccgaccugaagcaguucaagcaggacgccaaguacucccacgggaucgacgucaccgaccuguucgccgcccagcccggccucacgagcgcggugaucgacgcccugccccgcaacauggugaucacgugccaggggagcgacgacauccgcaagcugcucgagucccagggccggaaggacaucaagcugaucgacaucgcccugagcaagaccgacucccgcaaguacgagaacgccgucugggaccaguacaaggaccucugccacaugcacaccggcguggucguggagaagaagaagcgcgggggcaaggaggagaucaccccgcacugcgcgcugauggacugcaucauguucgacgccgccgugagcgggggccugaacaccuccguccuccgggccgugcugccccgggacaugguguuccgcaccagcacgccccgggucgugcugugaggacuaguuauaagacugacuagcccgaugggccucccaacgggcccuccuccccuccuugcaccgagauuaauaaaaaaaaaaaaaaaaaaaaaaaaaaaaaaaaaaaaaaaaaaaaaaaaaaaaaaaaaaaaaaaaaaaaaaaaaaaaaaaaaaaaaaaaaaaaaaaaaaaa

SEQ ID NO: 21979 - RNA, 1950 nt, Artificial Sequence
  mRNA product Design i-3 (A100) comprising derived and/or modified sequence from LASV(Mad39;Clade IV)__ANH09723__SP-IgE_NP(2-569) (opt1)
aggagaaagcuuaccauggacuggaccuggauccuguuccucguggccgccgcgacccgcguccacagcagcgccuccaaggagaucaagagcuuccuguggacccagucccuccgccgggagcugagcggcuacugcuccaacaucaagcuccagguggucaaggacgcccaggcgcugcugcacgggcuggacuucagcgagguguccaacgugcagcgccucaugcggaagcagcgccgggacgacaacgaccugaagcgccugcgggaccucaaccaggccgucaacaaccugguggagcugaaguccacccagcagaaguccgugcuccgcgucggcacgcugaccagcgacgaccugcucacccuggccgccgaccuggagaagcucaaguccaaggugacccggacggagcgcccccugaccgccgggguguacaugggcaaccugagcucccagcagcucgaccagcggcgcgcgcugcugaacaugaucgggaugagcggcggcaaccagggggcccggaccggccgcgacggggucgugcgggugugggacgucaagaacgccgagcuccugaacaaccaguucggcaccaugccgucccugacgcucgccugccugaccaagcagggccagguggaccugaacgacgugguccaggcgcucaccgaccuggggcugaucuacaccgccaaguaccccaacacgagcgaccucgaccgccugacccagucccaccccauccugaacaugaucgacaccaacaagagcucccucaacaucagcggcuacaacuucagccugggggccgccgugaaggccggcgcgugcaugcuggacgggggcaacaugcucgagaccaucaaggugagcccccagacgauggacggcauccucaagagcauccugaaggucaagaagucccuggggauguucaucagcgacaccccgggcgagcggaaccccuacgagaacauccuguacaagaucugccuguccggggacggcuggcccuacaucgccagccgcaccuccaucaccgggcgggccugggagaacacggugguggaccucgagagcggcggcaagccccagaaggccggguccaacaacagcaacaagucccugcagagcgccggcuucgcggccgggcugaccuacucccagcucaugacccugaaggacgccaugcugcagcuggacccgaacgccaagaccuggauggacaucgagggccgccccgaggaccccgucgagaucgcccucuaccagcccaucagcgggugcuacauccacuucuuccgggagccgacggaccugaagcaguucaagcaggacgcgaaguacucccacggcaucgacgugaccgaccuguucgccgcccagcccggccucaccagcgccgugaucgaggcccugccccgcaacauggucaucacgugccagggguccgacgacauccgcaagcuguucgagagccagggccggaaggacaucaagcucaucgacaucgcgcuguccaagaccgacagccgcaaguacgagaacgccgugugggaccaguacaaggaccugugccacaugcacaccggggucgugguggagaagaagaagaagggcgggaaggaggagaucacgccccacugcgcccucauggacugcaucauguucgacgccgcggucagcggcggccugaacacccuggugcuccgggccgugcugccgcgcgacauggucuuccggaccuccacccccaagguggugcugugaggacuaguuauaagacugacuagcccgaugggccucccaacgggcccuccuccccuccuugcaccgagauuaauaaaaaaaaaaaaaaaaaaaaaaaaaaaaaaaaaaaaaaaaaaaaaaaaaaaaaaaaaaaaaaaaaaaaaaaaaaaaaaaaaaaaaaaaaaaaaaaaaaaa

SEQ ID NO: 21980 - RNA, 1950 nt, Artificial Sequence
  mRNA product Design i-3 (A100) comprising derived and/or modified sequence from LASV(Z0947-SLE-2011;Clade IV)__AIT17841__SP-IgE_NP(2-569) (opt1)
aggagaaagcuuaccauggacuggaccuggauccuguuccucguggccgccgcgacccgcguccacagcagcgccuccaaggagaucaagagcuuccuguggacccagucccuccgccgggagcugagcggcuacugcuccaacaucaagcuccagguggucaaggacgcccaggcgcugcugcacgggcuggacuucagcgagguguccaacgugcagcgccucaugcggaaggagcgccgggacgacaacgaccugaagcgccugcgggaccucaaccaggccgucaacaaccugguggagcucaagagcacccagcagaaguccauccugcgcgugggcacccugaccagcgacgaccugcucauccuggccgccgaccuggagaagcucaaguccaaggucacccggaccgagcgcccccugagcgccgggguguacaugggcaaccuguccagccagcagcucgaccagcggcgcgcgcugcugaacaugaucgggauguccggcagcaaccagggcgcccggacggggcgcgacggcgugguccgggugugggacgugaagaacgccgagcuccugaacaaccaguucgggaccaugccgucccugacccucgccugccugaccaagcagggccaggucgaccugaacgacgcggugcaggcccucacggaccuggggcugaucuacaccgccaaguaccccaacaccagcgaccucgaccgccugacccagucccaccccauccugaacaugaucgacacgaagaaguccagccucaacaucuccggcuacaacuucagccugggcgccgccgugaaggcgggggccugcaugcuggacggcgggaacaugcucgagaccaucaaggucagcccccagaccauggacggcauccucaagagcauccugaaggugaagaaggcccugggcauguucaucuccgacgccccgggggagcggaaccccuacgagaacauccuguacaagaucugccugagcggcgacggguggcccuacaucgccucccgcaccagcaucacgggccgggcgugggagaacaccguggucgaccucgaguccgacgggaagccccagaaggccggcagcaacggcuccaacaagagccugcaguccgccggguucaccgccggccugaccuacagccagcucaugacgcugaaggacgccaugcugcagcuggacccgaacgcgaagaccuggauggacaucgaggggcgccccgaggaccccguggagaucgcccucuaccagcccuccagcggcugcuacauccacuucuuccgggagccgaccgaccugaagcaguucaagcaggacgccaaguacucccacgggaucgacgugaccgaccuguucgccgcccagcccggccucacgagcgcggucaucgacgcccugccccgcaacauggugaucacgugccagggcuccgacgacauccgcaagcuguucgagagccaggggcggaaggacaucaagcucaucgacaucgcccugagcaagaccgacucccgcaaguacgagaacgccgugugggaccaguacaaggaccugugccacaugcacaccggcaucgucguggagaagaagaagcgcgggggcaaggaggagaucaccccgcacugcgcgcucauggacugcaucauguucgacgccgccgucagcgggggccugaacaccuccgugcugcgggccgugcucccccgggacauggucuuccgcaccagcacgccccggguggugcugugaggacuaguuauaagacugacuagcccgaugggccucccaacgggcccuccuccccuccuugcaccgagauuaauaaaaaaaaaaaaaaaaaaaaaaaaaaaaaaaaaaaaaaaaaaaaaaaaaaaaaaaaaaaaaaaaaaaaaaaaaaaaaaaaaaaaaaaaaaaaaaaaaaaa

SEQ ID NO: 21981 - RNA, 1950 nt, Artificial Sequence
  mRNA product Design i-3 (A100) comprising derived and/or modified sequence from LASV(Josiah;Clade IV)__NP_694869__SP-IgE_NP(2-569) (opt4)
aggagaaagcuuaccauggacuggaccuggauccuguuccugguggccgccgccaccagagugcacagcagcgccagcaaggagaucaagagcuuccuguggacccagagccugagaagagagcugagcggcuacugcagcaacaucaagcugcagguggugaaggacgcccaggcccugcugcacggccuggacuucagcgaggugagcaacgugcagagacugaugagaaaggagagaagagacgacaacgaccugaagagacugagagaccugaaccaggccgugaacaaccugguggagcugaagagcacccagcagaagagcauccugagagugggcacccugaccagcgacgaccugcugauccuggccgccgaccuggagaagcugaagagcaaggugaucagaaccgagagaccccugagcgccggcguguacaugggcaaccugagcagccagcagcuggaccagagaagagcccugcugaacaugaucggcaugagcggcggcaaccagggcgccagagccggcagagacggcguggugagagugugggacgugaagaacgccgagcugcugaacaaccaguucggcaccaugcccagccugacccuggccugccugaccaagcagggccagguggaccugaacgacgccgugcaggcccugaccgaccugggccugaucuacaccgccaaguaccccaacaccagcgaccuggacagacugacccagagccaccccauccugaacaugaucgacaccaagaagagcagccugaacaucagcggcuacaacuucagccugggcgccgccgugaaggccggcgccugcaugcuggacggcggcaacaugcuggagaccaucaaggugagcccccagaccauggacggcauccugaagagcauccugaaggugaagaaggcccugggcauguucaucagcgacacccccggcgagagaaaccccuacgagaacauccuguacaagaucugccugagcggcgacggcuggcccuacaucgccagcagaaccagcaucaccggcagagccugggagaacaccgugguggaccuggagagcgacggcaagccccagaaggccgacagcaacaacagcagcaagagccugcagagcgccggcuucaccgccggccugaccuacagccagcugaugacccugaaggacgccaugcugcagcuggaccccaacgccaagaccuggauggacaucgagggcagacccgaggaccccguggagaucgcccuguaccagcccagcagcggcugcuacauccacuucuucagagagcccaccgaccugaagcaguucaagcaggacgccaaguacagccacggcaucgacgugaccgaccuguucgccacccagcccggccugaccagcgccgugaucgacgcccugcccagaaacauggugaucaccugccagggcagcgacgacaucagaaagcugcuggagagccagggcagaaaggacaucaagcugaucgacaucgcccugagcaagaccgacagcagaaaguacgagaacgccgugugggaccaguacaaggaccugugccacaugcacaccggcguggugguggagaagaagaagagaggcggcaaggaggagaucaccccccacugcgcccugauggacugcaucauguucgacgccgccgugagcggcggccugaacaccagcgugcugagagccgugcugcccagagacaugguguucagaaccagcacccccagaguggugcugugaggacuaguuauaagacugacuagcccgaugggccucccaacgggcccuccuccccuccuugcaccgagauuaauaaaaaaaaaaaaaaaaaaaaaaaaaaaaaaaaaaaaaaaaaaaaaaaaaaaaaaaaaaaaaaaaaaaaaaaaaaaaaaaaaaaaaaaaaaaaaaaaaaaa

SEQ ID NO: 21982 - RNA, 1950 nt, Artificial Sequence
  mRNA product Design i-3 (A100) comprising derived and/or modified sequence from LASV(LP;Clade I)__AAF86702__SP-IgE_NP(2-569) (opt4)
aggagaaagcuuaccauggacuggaccuggauccuguuccugguggccgccgccaccagagugcacagcagcaacagcaaggagaucaagagcuuccuguggacccagagccugagaagagagcugagcggcuacugcagcaacaucaagcugcagguggugaaggacgcccaggcccugcugcacggccuggacuucagcgaggugagcaacgugcagagacugaugagaaagcagaagagagacgacgccgaccugaagagacugagagaccugaaccaggccgugaacaaccugguggagcugaagagcacccagcagaagaacgugcugagagugggcacccugagcagcgacgaccugaucacccuggccgccgaccuggagaagcugaagagcaaggugaucagaaccgagagaccccugagcagcggcguguacaugggcaaccugagcagccagcagcuggaccagagaagagcccugcugagcaugaucggcaugagcggcggcccccagggcaacagaaccggcggcgacggcguggugagagugugggacgugaagaacgccgagcugcugaacaaccaguucggcaccaugcccagccugacccuggccugccugaccaagcagggccagguggaccugaacgacgccgugcaggcccugaccgaccugggccugaucuacaccgccaaguaccccaacagcagcgaccuggacaugcugacccagagccaccccauccugggcaugguggacaccaagaagagcagccugaacaucagcggcuacaacuucagccugggcgccgccgugaaggccggcgccugcaugcuggacggcggcaacaugcuggagaccaucaaggugagcccccagaccauggacggcauccugaagagcauccugaaggugaagagaagccugggcauguucaucagcgacacccccggcgagagaaaccccuacgagaacauccuguacaagaucugccugagcggcgagggcuggcccuacaucgccagcagaaccagcaucaccggcagagccugggagaacacccugguggaccuggagagcgacaacaagccccccaagcugaacagcgccggcagcaacaagagccugcaggccgccggccugaacgccggccugaccuacagccagcugaugacccugaaggacugcaugcugcagcuggaccccagcagcaagaccuggaucgacaucgagggcagacccgaggaccccguggagaucgcccuguuccagcccagcagcggcugcuacauccacuucuucagagagcccaccgaccugaagcaguucaagcaggacgccaaguacagccacggcaucgacgugaccgaccuguucagcacccagcccggccugaccagcgccgugaucgaggcccugcccagaaacauggugcugaccugccagggcagcgacgacaucaagaagcugcuggagagccagggcagaagagacaucaagcugaucgacaucagccugagcaaggccgacagcagaaaguucgagaacgccgugugggaccaguacaaggaccugugccacaugcacaccggcguggugguggagaagaagaagagaggcggcaaggaggagaucaccccccacugcgcccugcuggacugcaucauguucgacgccgccaccaccggcagccugaacaucaccacccugagagccgugcugcccagagacaugguguucagaaccagcacccccaagguggugcugugaggacuaguuauaagacugacuagcccgaugggccucccaacgggcccuccuccccuccuugcaccgagauuaauaaaaaaaaaaaaaaaaaaaaaaaaaaaaaaaaaaaaaaaaaaaaaaaaaaaaaaaaaaaaaaaaaaaaaaaaaaaaaaaaaaaaaaaaaaaaaaaaaaaa

SEQ ID NO: 21983 - RNA, 1950 nt, Artificial Sequence
  mRNA product Design i-3 (A100) comprising derived and/or modified sequence from LASV(803213;Clade II)__AAF86704__SP-IgE_NP(2-569) (opt4)
aggagaaagcuuaccauggacuggaccuggauccuguuccugguggccgccgccaccagagugcacagcagcgccagcaaggaggugaagagcuuccuguggacccagagccugagaagagagcugagcggcuacugcagcaacaucaagcugcagguggugaaggacgcccaggcccugcugcacggccuggacuucagcgaggugaacaacgugcagagacugaugagaaagcagaagagagacgacggcgaccugaagagacugagagaccugaaccaggccgugaacaaccugguggagcugaagagcacccagcagaagagcauccugagagugggcacccugaccagcgacgaccugcugacccuggccgccgaccuggagaagcugaagagcaaggugaucagaaccgagagaccccugagcagcggcguguacaugggcaaccugagcacccagcagcuggagcagagaagagcccugcugaacaugaucggcauggugggcggcgcccagggcacccagcccggcagagacggcguggugagagugugggacgugaagaaccccgaccugcugaacaaccaguucggcaccaugcccagccugacccuggccugccugaccaagcagggccagguggaccugaacgacgccgugcuggcccugaccgaccugggccugaucuacaccgccaaguaccccaacagcagcgaccuggacagacugagccagagccaccccauccugaacaugguggacaccaagaagagcagccugaacaucagcggcuacaacuucagccugggcgccgccgugaaggccggcgccugcaugcuggacggcggcaacaugcuggagaccaucaaggugaccccccagaccauggacggcauccugaagagcauccugaaggugaagagaagccugggcauguucgugagcgacacccccggcgagagaaaccccuacgagaacauccuguacaagaucugccugagcggcgacggcuggcccuacaucgccagcagaaccagcaucgugggcagagccugggagaacaccaccguggaccuggagagcgacggcaagccccagaaggugggcaccgccggcagcaacaagagccugcagagcgccggcuuccccaccggccugaccuacagccagcugaugacccugaaggacagcaugaugcagcuggaccccagcgccaagaccuggaucgacaucgagggcagacccgaggaccccguggagaucgcccuguaccagcccaugagcggcugcuacauccacuucuucagagagcccaccgaccugaagcaguucaagcaggacgccaaguacagccacggcaucgacguggccgaccuguuccccgcccagcccggccugaccagcgccgugaucgaggcccugcccagaaacauggugcugaccugccagggcagcgacgacaucaagaagcugcuggacagccagggcagaagagacaucaagcugaucgacaucagccugagcaagguggacagcagaaaguucgagaacgccgugugggaccagugcaaggaccugugccacaugcacaccggcguggugguggagaagaagaagagaggcggcaaggaggagaucaccccccacugcgcccugauggacugcaucauguucgacgccgccgugagcggcggccugaacauccccgugcugagagccgugcugcccagagacaugguguucagaaccagcagccccaagguggugcugugaggacuaguuauaagacugacuagcccgaugggccucccaacgggcccuccuccccuccuugcaccgagauuaauaaaaaaaaaaaaaaaaaaaaaaaaaaaaaaaaaaaaaaaaaaaaaaaaaaaaaaaaaaaaaaaaaaaaaaaaaaaaaaaaaaaaaaaaaaaaaaaaaaaa

SEQ ID NO: 21984 - RNA, 1953 nt, Artificial Sequence
  mRNA product Design i-3 (A100) comprising derived and/or modified sequence from LASV(GA391;Clade III)__CAA36646__SP-IgE_NP(2-570) (opt4)
aggagaaagcuuaccauggacuggaccuggauccuguuccugguggccgccgccaccagagugcacagcagcgccagcaaggaggugagaagcuuccuguggacccagagccugagaagagagcugagcggcuacugcagcaacaucaagcugcagguggugaaggacgcccaggcccugcugcacggccuggacuucagcgaggugagcaacgugcagagacugaugagaaagcagaagagagacgacggcgaccugaagagacugagagaccugaaccaggccgugaacaaccugguggagcugaagagcacccagcagaagagcgugcugagagugggcacccugagcagcgacgaccugcugauccuggccgccgaccuggagaagcugaagagcaaggugaccagaaccgagagaccccugagcagcggcguguacaugggcaaccugagcagccagcagcuggaccagagaagagcccugcugaacaugaucggcaugaccggcgugagcggcggcggcaagggcgccagcgacggcaucgugagagugugggacgugaagaacgccgagcugcugaacaaccaguucggcaccaugcccagccugacccuggccugccugaccaagcagggccagguggaccugaacgacgccgugcaggcccugaccgaccugggccugaucuacaccgccaaguaccccaacagcagcgaccuggacagacugagccagagccaccccauccugaacaugaucgacaccaagaagagcagccugaacaucagcggcuacaacuucagccugggcgccgccgugaaggccggcgccugcaugcuggacggcggcaacaugcuggagaccaucaaggugagcccccagaccauggacggcauccugaagagcauccugaaggugaagaagagccugggcauguucgugagcgacacccccggcgagagaaaccccuacgagaacauccuguacaagaucugccugagcggcgacggcuggcccuacaucgccagcagaaccagcaucgugggcagagccugggagaacaccgugguggaccuggagcaggacaacaagccccagaagaucggcaacggcggcagcaacaagagccugcagagcgccggcuucgccgccggccugaccuacagccagcugaugacccugaaggacuucaagugcuucaaccugauccccaacgccaagaccuggauggacaucgagggcagacccgaggaccccguggagaucgcccuguaccagcccagcagcggcugcuacgugcacuucuucagagagcccaccgaccugaagcaguucaagcaggacgccaaguacagccacggcaucgacgugaccgaccuguucgccgcccagcccggccugaccagcgccgugaucgaggcccugcccagaaacauggugaucaccugccagggcagcgaggacaucagaaagcugcuggagagccagggcagaagagacaucaagcugaucgacaucacccugagcaaggccgacagcagaaaguucgagaacgccgugugggaccaguucaaggaccugugccacaugcacaccggcguggugguggagaagaagaagagaggcggcaaggaggagaucaccccccacugcgcccugauggacugcaucauguucgacgccgccgugagcggcggccuggacgccaaggugcugagaguggugcugcccagagacaugguguucagaaccagcacccccaagguggugcugugaggacuaguuauaagacugacuagcccgaugggccucccaacgggcccuccuccccuccuugcaccgagauuaauaaaaaaaaaaaaaaaaaaaaaaaaaaaaaaaaaaaaaaaaaaaaaaaaaaaaaaaaaaaaaaaaaaaaaaaaaaaaaaaaaaaaaaaaaaaaaaaaaaaa

SEQ ID NO: 21985 - RNA, 1950 nt, Artificial Sequence
  mRNA product Design i-3 (A100) comprising derived and/or modified sequence from LASV(AV;Clade V)__CCA30315__SP-IgE_NP(2-569) (opt4)
aggagaaagcuuaccauggacuggaccuggauccuguuccugguggccgccgccaccagagugcacagcagcgccagcaaggaggugaagagcuuccuguggacccagagccugagaagagagcugagcggcuacugcagcaacaucaagcugcagguggugaaggacgcccaggcccugcugcacggccuggacuucagcgaggugagcaacgugcagagacugaugagaaagcagagaagagacgacagcgaccugaagagacugagagaccugaaccaggccgugaacaaccugguggagcugaagagcacccagcagaagagcgugcugagagugggcacccugagcagcgacgaccugcugacccuggccgccgaccuggagaagcugaagagcaaggugaccagaaccgagagaccccugagcagcggcguguacaugggcaaccugagcagccagcagcuggaccagagaagagcccugcugaaccugaucggcaugaccaacggcagccagggcagccaggccggcagagacggcguggugagagugugggacgugaagaacgccgagcugcugaacaaccaguucggcaccaugcccagccugacccuggccugccugaccaagcagggccagguggaccugaacgacguggugcaggcccugaccgaccugggccugaucuacaccgccaaguaccccaacaccagcgaccuggacagacugacccagagccaccccauccugaacaugaucgacaccaagaagagcagccugaacaucagcggcuacaacuucagccugggcgccgccgugaaggccggcgccugcaugcuggacggcggcaacaugcuggagaccaucaaggugagcccccagagcauggacggcauccugaagagcauccugaaggugaagagagcccugggcauguucgugagcgacacccccggcgagagaaaccccuacgagaacauccuguacaagaucugccugagcggcgacggcuggcccuacaucgccagcagaaccagcaucgugggcagagccugggagaacaccgugguggaccuggagaccgacggcaagccccagaagaucggcagcggcaacagcaacaagagccugcagagcgccggcuucagcgccggccugaccuacagccagcugaugacccugaaggacgccaugcugcagcuggaccccaacgccaagaccuggauggacaucgagggcagacccgaggaccccguggagguggcccuguaccagcccaucagcggcugcuacauccacuucuucagagagcccaccgaccugaagcaguucaagcaggacgccaaguacagccacggcaucgacaucgccgaccuguucgccgcccagcccggccugaccagcgccgugaucgaggcccugcccagaaacauggugaucaccugccagggcagcgaggacaucaagaagcugcuggagagccagggcagaaaggacaucaagcugaucgacaucgcccugagcaagaucgacagcagaaaguucgagaacgccgugugggaccaguacaaggaccugugccacaugcacaccggcguggugguggagaagaagaagagaggcggcaaggaggagaucaccccccacugcgcccugauggacugcaucauguucgacgccgccgugagcggcggccugaacacccuggugcugagagccgugcugcccagagacaugguguucagaaccagcacccccagaguggugcugugaggacuaguuauaagacugacuagcccgaugggccucccaacgggcccuccuccccuccuugcaccgagauuaauaaaaaaaaaaaaaaaaaaaaaaaaaaaaaaaaaaaaaaaaaaaaaaaaaaaaaaaaaaaaaaaaaaaaaaaaaaaaaaaaaaaaaaaaaaaaaaaaaaaa

SEQ ID NO: 21986 - RNA, 1950 nt, Artificial Sequence
  mRNA product Design i-3 (A100) comprising derived and/or modified sequence from LASV(Togo/2016/7082;Clade VI)__AMR44578__SP-IgE_NP(2-569) (opt4)
aggagaaagcuuaccauggacuggaccuggauccuguuccugguggccgccgccaccagagugcacagcagcaacagcaaggaggugaagagcuuccuguggacccagagccugagaagagagcugagcggcuacugcagcaacaucaagcugcagguggugaaggacgcccaggcccugcugcacggccuggacuucagcgaggugagcaacgugcagagacugaugagaaagcagaagagagacgacggcgaccugaagagacugagagaccugaaccaggccgugaacaaccugguggagcugaagagcgugcagcagaagagcauccugagagugggcacccugaccagcgacgaccugcugacccuggccgccgaccuggagaagcugaagagcaaggugaccagaaccgagagaccccugagcagcggcguguacaugggcaaccugagcagccagcagcuggaccagagaagagcccugcugagcaugaucggcaugagcggcggcaaccagaacagccagcccaagggcgacggcguggugagagugugggacgugaagaacgccgaccugcugaacaaccaguucggcaccaugcccagccugacccuggccugccugaccaagcagggccagguggaccugaacgacgccgugcaggcccugaccgaccugggccugaucuacaccgccaaguaccccaacagcagcgaccuggacagacugagccagagccaccccauccugaacaugaucgacaccaagaagagcagccugaacaucagcggcuacaacuucagccugggcgccgccaucaagaccggcgccugcaugcuggacggcggcaacaugcuggagaccaucaaggugaccccccagaccauggacggcauccugaagagcauccugaaggugaagagaagccugggcauguucaucagcgacacccccggcgagagaaaccccuacgagaacauccuguacaagaucugccugagcggcgacggcuggcccuacaucgccagcagaaccgccaucaucggcagagccugggagaacaccgugguggaccuggagagcgacagcaagccccagaagaucggcagcaacggcagcaacaagagccugcagagcgccggcuucgcccccggccugaccuacagccagcugaugacccugaaggacagcaugcugcagcuggaccccaacgccaagaccuggaucgacaucgagggcagacccgaggaccccguggagguggcccuguuccagcccaucagcggcugcuacauccacuucuucagagagcccaccgaccugaagcaguucaagcaggacgccaaguacagccacggcaucgacgugaccgaccuguucgccgcccagcccggccugaccagcgccgugaucgaggcccugcccagaaacauggugcugaccugccagggcagcgacgacaucaagaagcugcuggacagccagggcagaagagacaucaagcugaucgacgugagccugaacaagaucgacagcagaaaguucgagaacgccgugugggaccaguacaaggaccugugccacaugcacaccggcguggugguggagaagaagaagaagggcggcaaggaggagaucaccccccacugcgcccugcuggacugcaucauguucgacgccgccgugagcggcggccugaacgccaccgugcugagagccgugcugcccagagacaugguguucagaaccagcagccccaagguggugcugugaggacuaguuauaagacugacuagcccgaugggccucccaacgggcccuccuccccuccuugcaccgagauuaauaaaaaaaaaaaaaaaaaaaaaaaaaaaaaaaaaaaaaaaaaaaaaaaaaaaaaaaaaaaaaaaaaaaaaaaaaaaaaaaaaaaaaaaaaaaaaaaaaaaa

SEQ ID NO: 21987 - RNA, 1950 nt, Artificial Sequence
  mRNA product Design i-3 (A100) comprising derived and/or modified sequence from LASV(KAK-428;Clade n.d. (VII))__ANH09741__SP-IgE_NP(2-569) (opt4)
aggagaaagcuuaccauggacuggaccuggauccuguuccugguggccgccgccaccagagugcacagcagcaacagcaaggaggugaagagcuuccuguggacccagagccugagaagagagcugagcggcuacugcaccaacaucaagcugcagguggugaaggacgcccaggcccugcugcacggccuggacuucagcgaggugagcaacgugcagagacugaugagaaagcagaagagagacgacaacgaccugaagagacugagagaccugaaccaggccgugaacaaccugguggagcugaagagcgugcagcagaagagcgugcugaaggugggcacccugaacagcgacgaccugcugacccuggccgccgaccuggagaagcugaagagcaagguggugagaaccgagagaccccugagcagcggcguguacaugggcaaccugagcagccagcagcuggaccagagaagagcccugcugaacaugaucggcauggccggcggcagccagggcaaccagcccagcagagacggcguggugagagugugggacgugaagaacgccgaccugcugaacaaccaguucggcaccaugcccagccugacccuggccugccugaccaagcagggccagguggaccugaacgacguggugcuggcccugaccgaccugggccugaucuacaccgccaaguaccccaacagcagcgaccuggacagacugagccagaaccaccccgugcugaacaugaucgacgugaacaagagcagccugaacaucagcggcuacaacuucagccugggcgccgccgugaaggccggcgccugcaugcuggacggcggcaacaugcuggagaccaucaagaucagcccccagaccguggacggcauccugaagagcauccugaaggugaagagagcccugggcauguucgugagcgacacccccggcgagagaaaccccuacgagaacauccuguacaaggugugccugagcggcaacggcuggcccuacaucgccagcagaaccagcaucgugggcagagccugggagaacaccgugguggaccuggagagcaacaagaaccagcccaaggugggcaacaacggcagcaacaagaugcugcagagcagcggcuucgccaccggccugaccuacagccagcugaugacccugagagacagcaugcugcagcuggaccccaccgccaagaccuggaucgacaucgagggcagacccgaggaccccguggagcuggcccuguuccagcccagcagcggcugcuacauccacuucuucagagagcccaccgaccugaagcaguucaagcaggacgccaaguacagccacggcaucgacgugaacgaccuguucagcgcccagcccggccugaccagcgccgugcuggaggcccugcccagaaacauggugcugaccugccagggcagcgacgacaucagaaagcugcuggacagccaggacagaaaggacaucaagcugaucgacaucagccugagcaaggccgacgccagaaaguucgagaacgacgugugggaccaguucaaggaccugugccacaugcacaccggcaucgugguggagaagaagaagaagggcggcaagcaggagaugaccccccacugcgcccugcuggacugcaucauguucgacgccgccgugagcggcggccugaacgugcccacccugagagccgugcugcccaccgacaugguguucagaaccaucaccaccaagguggugcugugaggacuaguuauaagacugacuagcccgaugggccucccaacgggcccuccuccccuccuugcaccgagauuaauaaaaaaaaaaaaaaaaaaaaaaaaaaaaaaaaaaaaaaaaaaaaaaaaaaaaaaaaaaaaaaaaaaaaaaaaaaaaaaaaaaaaaaaaaaaaaaaaaaaa

SEQ ID NO: 21988 - RNA, 1950 nt, Artificial Sequence; identical to SEQ ID NO: 21982
  mRNA product Design i-3 (A100) comprising derived and/or modified sequence from LASV(Pinneo-NIG-1969;Clade I)__AIT17837__SP-IgE_NP(2-569) (opt4)

SEQ ID NO: 21989 - RNA, 1950 nt, Artificial Sequence
  mRNA product Design i-3 (A100) comprising derived and/or modified sequence from LASV(ISTH0009-NIG-2011;Clade II)__AIT17405__SP-IgE_NP(2-569) (opt4)
aggagaaagcuuaccauggacuggaccuggauccuguuccugguggccgccgccaccagagugcacagcagcgugagcaaggaggugaagagcuuccuguggacccagagccugagaagagagcugagcggcuacugcagcaacaucaagcugcagguggugaaggacgcccaggcccugcugcacggccuggacuucagcgaggugagcaacgugcagagacugaugagaaagcagaagagagacgacagcgaccugaagagacugagagaccugaaccaggccgugaacaaccugguggagcugaagagcacccagcagaagagcauccugagagugggcacccugaccagcgacgaccugcugacccuggccgccgaccuggagaagcugaagagcaaggugaucagaaccgagagaccccugagcagcggcguguacaugggcaaccugagcacccagcagcuggagcagagaagagcccugcugaacaugaucggcauggugggcggcgcccagggcacccagcccggcagagacggcguggugagagugugggacgugaagaaccccgaccugcugaacaaccaguucggcaccaugcccagccugacccuggccugccugaccaagcagggccagguggaccugaacgacgccgugcuggcccugaccgaccugggccugaucuacaccgccaaguaccccaacagcagcgaccuggacagacugagccagagccaccccauccugaacaugguggacaucaagaagagcagccugaacaucagcggcuacaacuucagccugggcgccgccgugaaggccggcgccugcaugcuggacggcggcaacaugcuggagaccaucaaggugaccccccagaccauggacggcauccugaagagcauccugaaggugaagagaagccugggcauguucgugagcgacacccccggcgagagaaaccccuacgagaacauccuguacaagaucugccugagcggcgacggcuggcccuacaucgccagcagaaccagcaucgugggcagagccugggagaacaccaccguggaccuggagagcgacggcaagccccagaaggugggcagcgccggcagcaacaagagccugcagagcgccggcuuccccaccggccugaccuacagccagcugaugacccugaaggacagcaugaugcagcuggaccccagcgccaagaccuggaucgacaucgagggcagacccgaggaccccguggagaucgcccuguaccagcccaugagcggcugcuacauccacuucuucagagagcccaccgaccugaagcaguucaagcaggacgccaaguacagccacggcaucgacguggccgaccuguuccccgcccagcccggccugaccagcgccgugaucgaggcccugcccagaaacauggugcugaccugccagggcagcgacgacaucaagagacugcuggacagccagggcagaagagacaucaagcugaucgacaucgcccugagcaaggccgacagcagaagauucgagaacgccgugugggaccagugcaaggaccugugccacaugcacaccggcguggugguggagaagaagaagagaggcggcaaggaggagaucaccccccacugcgcccugauggacugcaucauguacgacgccgccgugagcggcggccugaacauccccgugcugagagccgugcugcccagagacaugguguucagaaccagcagccccaagguggugcugugaggacuaguuauaagacugacuagcccgaugggccucccaacgggcccuccuccccuccuugcaccgagauuaauaaaaaaaaaaaaaaaaaaaaaaaaaaaaaaaaaaaaaaaaaaaaaaaaaaaaaaaaaaaaaaaaaaaaaaaaaaaaaaaaaaaaaaaaaaaaaaaaaaaa

SEQ ID NO: 21990 - RNA, 1950 nt, Artificial Sequence
  mRNA product Design i-3 (A100) comprising derived and/or modified sequence from LASV(ISTH2010-NIG-2012;Clade II)__AIT17483__SP-IgE_NP(2-569) (opt4)
aggagaaagcuuaccauggacuggaccuggauccuguuccugguggccgccgccaccagagugcacagcagcgccagcaaggaggugaagagcuuccuguggacccagagccugagaagagagcugagcggcuacugcagcaacaucaagcugcagguggugaaggacgcccaggcccugcugcacggccuggacuucagcgaggugagcaacgugcagagacugaugagaaagcagaagagagacgacagcgaccugaagagacugagagaccugaaccaggccgugaacaaccugguggagcugaagagcacccagcagaagagcauccugagagugggcacccugaccagcgacgaccugcugacccuggccgccgaccuggagaagcugaagagcaaggugaucagaaccgagagaccccugagcagcggcguguacaugggcaaccugagcacccagcagcuggagcagagaagagcccugcugaaccugaucggcauggugggcggcgcccagggcacccagcccggcagagacggcguggugagagugugggacgugaagaaccccgaccugcugaacaaccaguucggcaccaugcccagccugacccuggccugccugaccaagcagggccagguggaccugaacgacgccgugcuggcccugaccgaccugggccugaucuacaccgccaaguaccccaacagcagcgaccuggacagacugagccagagccaccccauccugaacaugguggacaccaagaagagcagccugaacaucagcggcuucaacuucagccugggcgccgccgugaaggccggcgccugcaugcuggacggcggcaacaugcuggagaccaucaaggugaccccccagaccauggacggcauccugaagagcauccugaaggugaagaagagccugggcauguucgugagcgacacccccggcgagagaaaccccuacgagaacauccuguacaagaucugccugagcggcgacggcuggcccuacaucgccagcagaaccagcaucgugggcagagccugggagaacaccaccguggaccuggagagcgacggcaagccccacaaggugggcaccgccggcagcaacaagagccugcagagcgccggcuuccccaccggccugaccuacagccagcugaugacccugaaggacagcaugaugcagcuggaccccagcgccaagaccuggaucgacaucgagggcagacccgaggaccccguggagaucgcccuguaccagcccaugagcggcugcuacauccacuucuucagagagcccaccgaccugaagcaguucaagcaggacgccaaguacagccacggcaucgacguggccgaccuguuccccgcccagcccggccugaccagcgccgugaucgaggcccugcccagaaacauggugcugaccugccagggcagcgacgacaucaagagacugcuggacagccagggcagaagagacaucaagcugaucgacaucgcccugagcaaggccgacagcagaagauucgagaacgccgugugggaccagugcaaggaccugugccacaugcacaccggcguggugguggagaagaagaagagaggcggcaaggaggagaucaccccccacugcgcccugauggacugcaucauguacgacgccgccgugagcggcggccugaacauccccgugcugagagccgugcugcccagagacaugguguucagaaccagcagccccaagguggugcugugaggacuaguuauaagacugacuagcccgaugggccucccaacgggcccuccuccccuccuugcaccgagauuaauaaaaaaaaaaaaaaaaaaaaaaaaaaaaaaaaaaaaaaaaaaaaaaaaaaaaaaaaaaaaaaaaaaaaaaaaaaaaaaaaaaaaaaaaaaaaaaaaaaaa

SEQ ID NO: 21991 - RNA, 1950 nt, Artificial Sequence
  mRNA product Design i-3 (A100) comprising derived and/or modified sequence from LASV(Lassa virus/H.sapiens-wt/NGA/2015/ISTH_0543;Clade II)__AVO03640__SP-IgE_NP(2-569) (opt4)
aggagaaagcuuaccauggacuggaccuggauccuguuccugguggccgccgccaccagagugcacagcagcgccagcaaggaggugaagagcuuccuguggacccagagccugagaagagagcugagcggcuacugcagcaacaucaagcugcagguggugaaggacgcccaggcccugcugcacggccuggacuucagcgaggugagcaacgugcagagacugaugagaaagcagaagagagacgacagcgaccugaagagacugagagaccugaaccaggccgugaacaaccugguggagcugaagagcacccagcagaagagcauccugagagugggcacccugaccagcgacgaccugcugacccuggccgccgaccuggagaagcugaagagcaaggugaucagaaccgagagaccccugagcagcggcguguacaugggcaaccugagcacccagcagcuggagcagagaagagcccugcugaacaugaucggcauggugggcggcgcccagggcacccagcccggcagagacggcguggugagagugugggacgugaagaaccccgaccugcugaacaaccaguucggcaccaugcccagccugacccuggccugccugaccaagcagggccagguggaccugaacgacgccgugcuggcccugaccgaccugggccugaucuacaccgccaaguaccccaacagcagcgaccuggacagacugagccagagccaccccauccugaacaugguggacaccaagaagagcagccugaacaucagcggcuacaacuucagccugggcgccgccgugaaggccggcgccugcaugcuggacggcggcaacaugcuggagaccaucaaggugaccccccagaccauggacggcauccugaagagcauccugaaggugaagaagagccugggcauguucgugagcgacacccccggcgagagaaaccccuacgagaacauccuguacaagaucugccugagcggcgacggcuggcccuacaucgccagcagaaccagcaucgugggcagagccugggagaacaccaccguggaccuggagagcgacggcaagccccagaaggugggcagcgccggcagcaacaagagccugcagagcgccggcuuccccaccggccugaccuacagccagcugaugacccugaaggacagcaugaugcagcuggaccccagcgccaagaccuggaucgacaucgagggcagacccgaggaccccguggagaucgcccuguaccagcccaugagcggcugcuacauccacuucuucagagagcccaccgaccugaagcaguucaagcaggacgccaaguacagccacggcaucgacguggccgaccuguuccccgcccagcccggccugaccagcgccgugaucgaggcccugcccagaaacauggugcugaccugccagggcagcgacgacaucaagagacugcuggacagccagggcagaaaggacaucaagcugaucgacaucgcccugagcaaggccgacagcagaagauucgagaacgccgugugggaccagugcaaggaccugugccacaugcacaccggcguggugguggagaagaagaagagaggcggcaaggaggagaucaccccccacugcgcccugauggacugcaucauguacgacgccgccgugagcggcggccugaacauccccgugcugagagccgugcugcccagagacaugguguucagaaccagcagccccaagguggugcugugaggacuaguuauaagacugacuagcccgaugggccucccaacgggcccuccuccccuccuugcaccgagauuaauaaaaaaaaaaaaaaaaaaaaaaaaaaaaaaaaaaaaaaaaaaaaaaaaaaaaaaaaaaaaaaaaaaaaaaaaaaaaaaaaaaaaaaaaaaaaaaaaaaaa

SEQ ID NO: 21992 - RNA, 1950 nt, Artificial Sequence
  mRNA product Design i-3 (A100) comprising derived and/or modified sequence from LASV(Lassa virus/H.sapiens-wt/NGA/2016/ISTH_0009;Clade II)__AVO03572__SP-IgE_NP(2-569) (opt4)
aggagaaagcuuaccauggacuggaccuggauccuguuccugguggccgccgccaccagagugcacagcagcgccagcaaggaggugaagagcuuccuguggacccagagccugagaagagagcugagcggcuacugcagcaacaucaagcugcagguggugaaggacgcccaggcccugcugcacggccuggacuucagcgaggugagcaacgugcagagacugaugagaaagcagaagagagacgacagcgaccugaagagacugagagaccugaaccaggccgugaacaaccugguggagcugaagagcacccagcagaagagcauccugagagugggcacccugaccagcgacgaccugcugacccuggccgccgaccuggagaagcugaagagcaaggugaucagaaccgagagaccccugagcagcggcguguacaugggcaaccugagcacccagcagcuggagcagagaagagcccugcugaacaugaucggcauggugggcggcgcccagggcacccagcccggcagagacggcguggugagagugugggacgugaagaaccccgaccugcugaacaaccaguucggcaccaugcccagccugacccuggccugccugaccaagcagggccagguggaccugaacgacgccgugcuggcccugaccgaccugggccugaucuacaccgccaaguaccccaacagcagcgaccuggacagacugagccagagccaccccauccugaacaugguggacaccaagaagagcagccugaacaucagcggcuacaacuucagccugggcgccgccgugaaggccggcgccugcaugcuggacggcggcaacaugcuggagaccaucaaggugaccccccagaccauggacggcauccugaagagcauccugaaggugaagaagagccugggcauguucgugagcgacacccccggcgagagaaaccccuacgagaacauccuguacaagaucugccugagcggcgacggcuggcccuacaucgccagcagaaccagcaucgugggcagagccugggagaacaccaccguggaccuggagagcgacggcaagccccagaaggugggcagcgccggcagcaacaagagccugcagagcgccggcuuccccaccggccugaccuacagccagcugaugacccugaaggacagcaugaugcagcuggaccccagcgccaagaccuggaucgacaucgagggcagacccgaggaccccguggagaucgcccuguaccagcccaugagcggcugcuacauccacuucuucagagagcccaccgaccugaagcaguucaagcaggacgccaaguacagccacggcaucgacguggccgaccuguuccccgcccagcccggccugaccagcgccgugaucgaggcccugcccagaaacauggugcugaccugccagggcagcgacgacaucaagagacugcuggacagccagggcagaagagacaucaagcugaucgacaucgcccugagcaaggccgacagcagaagauucgagaacgccgugugggaccagugcaaggaccugugccacaugcacaccggcguggugguggagaagaagaagagaggcggcaaggaggagaucaccccccacugcgcccugauggacugcaucauguacgacgccgccgugagcggcggccugaacauccccgugcugagagccgugcugcccagagacaugguguucagaaccagcagccccaagguggugcugugaggacuaguuauaagacugacuagcccgaugggccucccaacgggcccuccuccccuccuugcaccgagauuaauaaaaaaaaaaaaaaaaaaaaaaaaaaaaaaaaaaaaaaaaaaaaaaaaaaaaaaaaaaaaaaaaaaaaaaaaaaaaaaaaaaaaaaaaaaaaaaaaaaaa

SEQ ID NO: 21993 - RNA, 1950 nt, Artificial Sequence
  mRNA product Design i-3 (A100) comprising derived and/or modified sequence from LASV(Lassa virus/H.sapiens-wt/NGA/2016/ISTH_0017;Clade II)__AVO03568__SP-IgE_NP(2-569) (opt4)
aggagaaagcuuaccauggacuggaccuggauccuguuccugguggccgccgccaccagagugcacagcagcgccagcaaggaggugaagagcuuccuguggacccagagccugagaagagagcugagcggcuacugcagcagcaucaagcugcagguggugaaggacgcccaggcccugcugcacggccuggacuucagcgaggugagcaacgugcagagacugaugagaaagcagaagagagacgacagcgaccugaagagacugagagaccugaaccaggccgugaacaaccugguggagcugaagagcacccagcagaagagcauccugagagugggcacccugaccagcgacgaccugcugacccuggccgccgaccuggagaagcugaagagcaaggugaucagaaccgagagaccccugagcagcggcguguacaugggcaaccugagcacccagcagcuggagcagagaagagcccugcugaacaugaucggcauggccggcggcgcccagggcacccagcccggcagagacggcguggugagagugugggacgugaagaaccccgaccugcugaacaaccaguucggcaccaugcccagccugacccuggccugccugaccaagcagggccagguggaccugaacgacgccgugcuggcccugaccgaccugggccugaucuacaccgccaaguaccccaacagcagcgaccuggacagacugagccagagccaccccauccugaacaugguggacaccaagaagagcagccugaacaucagcggcuacaacuucagccugggcgccgccgugaaggccggcgccugcaugcuggacggcggcaacaugcuggagaccaucaaggugaccccccagaccauggacggcauccugaagagcauccugaaggugaagagaagccugggcauguucgugagcgacgcccccggcgagagaaaccccuacgagaacauccuguacaagaucugccugagcggcgacggcuggcccuacaucgccagcagaaccagcaucgugggcagagccugggagaacaccaccguggaccuggagagcgacggcaagccccagaaggugggcgccaccggcagcaacaagagccugcagagcgccggcuuccccaccggccugaccuacagccagcugaugacccugaaggacagcaugaugcagcuggaccccagcgccaagaccuggaucgacaucgagggcagacccgaggaccccguggagguggcccuguaccagcccgugagcggcugcuacauccacuucuucagagagcccaccgaccugaagcaguucaagcaggacgccaaguacagccacggcaucgacguggccgaccuguuccccgcccagcccggccugaccagcgccgugaucgaggcccugcccagaaacauggugcugaccugccagggcagcgacgacaucaagaagcugcuggacagccagggcagaaaggacaucaagcugaucgacaucgcccugagcaaggccgacagcagaagauucgagaacgccgugugggaccagugcaaggaccugugccacaugcacaccggcguggugguggagaagaagaagagaggcggcaaggaggagaucaccccccacugcgcccugauggacugcaucauguacgacgccgccgugagcggcggccugaacauccccgugcugagagccgugcugcccagagacaugguguucagaaccagcagccccaagguggugcugugaggacuaguuauaagacugacuagcccgaugggccucccaacgggcccuccuccccuccuugcaccgagauuaauaaaaaaaaaaaaaaaaaaaaaaaaaaaaaaaaaaaaaaaaaaaaaaaaaaaaaaaaaaaaaaaaaaaaaaaaaaaaaaaaaaaaaaaaaaaaaaaaaaaa

SEQ ID NO: 21994 - RNA, 1950 nt, Artificial Sequence
  mRNA product Design i-3 (A100) comprising derived and/or modified sequence from LASV(Lassa virus/H.sapiens-wt/NGA/2018/ISTH_0959;Clade II)__AVV65100__SP-IgE_NP(2-569) (opt4)
aggagaaagcuuaccauggacuggaccuggauccuguuccugguggccgccgccaccagagugcacagcagcgccagcaaggaggugaagagcuuccuguggacccagagccugagaagagagcugagcggcuacugcagcaacaucaagcugcagguggugaaggacgcccaggcccugcugcacggccuggacuucagcgaggugagcaacgugcagagacugaugagaaagcagaagagagacgacagcgaccugaagagacugagagaccugaaccaggccgugaacaaccugguggagcugaagagcacccagcagaagagcauccugagagugggcacccugaccagcgacgaccugcugacccuggccgccgaccuggagaagcugaagagcaaggugaucagaaccgagagaccccugagcagcggcguguacaugggcaaccugagcacccagcagcuggagcagagaagagcccugcugaaccugaucggcauggugggcggcgcccagggcacccagcccggcagagacggcguggugagagugugggacgugaagaaccccgaccugcugaacaaccaguucggcaccaugcccagccugacccuggccugccugaccaagcagggccagguggaccugaacgacguggugcuggcccugaccgaccugggccugaucuacaccgccaaguaccccaacagcagcgaccuggacagacugagccagagccaccccauccugaacaugguggacaccaagaagagcagccugaacaucagcggcuucaacuucagccugggcgccgccgugaaggccggcgccugcaugcuggacggcggcaacaugcuggagaccaucaaggugaccccccagaccauggacggcauccugaagagcauccugaaggugaagaagagccugggcauguucgugagcgacacccccggcgagagaaaccccuacgagaacauccuguacaagaucugccugagcggcgacggcuggcccuacaucgccagcagaaccagcaucgugggcagagccugggagaacaccaccguggaccuggagagcgacggcaagccccacaaggugggcaccgccggcagcaacaagagccugcagagcgccggcuuccccaccggccugaccuacagccagcugaugacccugaaggacagcaugaugcagcuggaccccagcgccaagaccuggaucgacaucgagggcagacccgaggaccccguggagaucgcccuguaccagcccaugagcggcugcuacauccacuucuucagagagcccaccgaccugaagcaguucaagcaggacgccaaguacagccacggcaucgacguggccgaccuguuccccgcccagcccggccugaccagcgccgugaucgaggcccugcccagaaacauggugcugaccugccagggcagcgacgacaucaagagacugcuggacagccagggcagaaaggacaucaagcugaucgacaucgcccugagcaagaccgacagcagaagauucgagaacgccgugugggaccagugcaaggaccugugccacaugcacaccggcguggugguggagaagaagaagagaggcggcaaggaggagaucaccccccacugcgcccugauggacugcaucauguacgacgccgccgugagcggcggccugaacauccccgugcugagagccgugcugcccagagacaugguguucagaaccagcagccccaagguggugcugugaggacuaguuauaagacugacuagcccgaugggccucccaacgggcccuccuccccuccuugcaccgagauuaauaaaaaaaaaaaaaaaaaaaaaaaaaaaaaaaaaaaaaaaaaaaaaaaaaaaaaaaaaaaaaaaaaaaaaaaaaaaaaaaaaaaaaaaaaaaaaaaaaaaa

SEQ ID NO: 21995 - RNA, 1950 nt, Artificial Sequence
  mRNA product Design i-3 (A100) comprising derived and/or modified sequence from LASV(LASV003-NIG-2008;Clade II)__AIT17581__SP-IgE_NP(2-569) (opt4)
aggagaaagcuuaccauggacuggaccuggauccuguuccugguggccgccgccaccagagugcacagcagcgccagcaaggaggugaagagcuuccuguggacccagagccugagaagagagcugagcggcuacugcagcagcaucaagcugcagguggugaaggacgcccaggcccugcugcacggccuggacuucagcgaggugagcaacgugcagagacugaugagaaagcagaagagagacgacagcgaccugaagagacugagagaccugaaccaggccgugaacaaccugguggagcugaagagcacccagcagaagagcgugcugagagugggcacccugaccagcgacgaccugcugacccuggccgccgaccuggagaagcugaagagcaaggugaucagaaccgagagaccccugagcagcggcguguacaugggcaaccugagcgcccagcagcuggagcagagaagaacccugcugaacaugaucggcauggugggcggcgcccagggcacccagcccggcagagacggcguggugagagugugggacgugaagaaccccgaccugcugaacaaccaguucggcaccaugcccagccugacccuggccugccugaccaagcagggccagguggaccugaacgacguggugcuggcccugaccgaccugggccugaucuacaccgccaaguaccccaacagcagcgaccuggacagacugagccagagccaccccauccugagcaugguggacaccaagaagagcagccugaacaucagcggcuacaacuucagccugggcgccgccgugaaggccggcgccugcaugcuggacggcggcaacaugcuggagaccaucaaggugaccccccagaccauggacggcauccugaagagcauccugaaggugaagaagagccugggcauguucgugagcgacacccccggcgagagaaaccccuacgagaacauccuguacaagaucugccugagcggcgacggcuggcccuacaucgccagcagaaccagcaucgugggcagagccugggagaacaccaccguggaccuggagagcgacggcaagccccagaaggugggcaccgccggcagcaacaagagccugcagagcgccggcuuccccaccggccugaccuacagccagcugaugacccugaaggacagcaugaugcagcuggaccccagcgccaagaccuggaucgacaucgagggcagacccgaggaccccguggagaucgcccuguaccagcccaugagcggcugcuacauccacuucuucagagagcccaccgaccugaagcaguucaagcaggacgccaaguacagccacggcaucgacgugaccgaccuguuccccgcccagcccggccugaccagcgccgugaucgaggcccugcccagaaacauggugcugaccugccagggcagcgacgacaucaagagacugcuggacagccagggcagaagagacaucaagcugaucgacaucgcccugagcaaggccgacagcagaagauucgagaacgccgugugggaccagugcaaggaccugugccacaugcacaccggcguggugguggagaagaagaagagaggcggcaaggaggagaucaccccccacugcgcccugauggacugcaucauguacgacgccgccgugagcggcggccugaacauccccgugcugagagccgugcugcccagagacaugguguucagaaccagcagccccaagguggugcugugaggacuaguuauaagacugacuagcccgaugggccucccaacgggcccuccuccccuccuugcaccgagauuaauaaaaaaaaaaaaaaaaaaaaaaaaaaaaaaaaaaaaaaaaaaaaaaaaaaaaaaaaaaaaaaaaaaaaaaaaaaaaaaaaaaaaaaaaaaaaaaaaaaaa

SEQ ID NO: 21996 - RNA, 1950 nt, Artificial Sequence
  mRNA product Design i-3 (A100) comprising derived and/or modified sequence from LASV(LASV035-NIG-2009;Clade II)__AIT17589__SP-IgE_NP(2-569) (opt4)
aggagaaagcuuaccauggacuggaccuggauccuguuccugguggccgccgccaccagagugcacagcagcgccagcaaggaggugaagagcuuccuguggacccagagccugagaagagagcugagcggcuacugcagcagcaucaagcugcagguggugaaggacgcccaggcccugcugcacggccuggacuucagcgaggugagcaacgugcagagacugaugagaaagcagaagagagacgacagcgaccugaagagacugagagaccugaaccaggccgugaacaaccugguggagcugaagagcacccagcagaagagcauccugagagugggcacccugaccagcgacgaccugcugacccuggccgccgaccuggagaagcugaagagcaaggugaucagaaccgagagaccccugagcagcggcguguacaugggcaaccugagcgcccagcagcuggagcagagaagagcccugcugaacaugaucggcauggugggcggcgcccagggcacccagcccggcagagacggcguggugagagugugggacgugaagaaccccgaccugcugaacaaccaguucggcaccaugcccagccugacccuggccugccugaccaagcagggccagguggaccugaacgacgccgugcuggcccugaccgaccugggccugaucuacaccgccaaguaccccaacagcagcgaccuggacagacugagccagagccaccccauccugaacaugguggacaccaagaagagcagccugaacaucagcggcuacaacuucagccugggcgccgccgugaaggccggcgccugcaugcuggacggcggcaacaugcuggagaccaucaaggugaccccccagaccauggacggcauccugaagagcauccugaaggugaagagaagccugggcauguucgugagcgacacccccggcgagagaaaccccuacgagaacauccuguacaagaucugccugagcggcgacggcuggcccuacaucgccagcagaaccagcaucgugggcagagccugggagaacaccaccguggaccuggagagcgacggcaagccccagaaggugggcaccaccggcagcaacaagagccugcagagcgccggcuuccccaccggccugaccuacagccagcugaugacccugaaggacagcaugaugcagcuggaccccagcgccaagaccuggaucgacaucgagggcagacccgaggaccccguggagaucgcccuguaccagcccaugagcggcugcuacauccacuucuucagagagcccaccgaccugaagcaguucaagcaggacgccaaguacagccacggcaucgacguggccgaccuguuccccgcccagcccggccugaccagcgccgugaucgaggcccugcccagaaacauggugcugaccugccagggcagcgacgacaucaagaagcugcuggacagccagggcagaagagacaucaagcugaucgacaucgcccugagcaaggccgacagcagaaaguucgagaacgccgugugggaccagugcaaggaccugugccacaugcacaccggcguggugguggagaagaagaagagaggcggcaaggaggagaucaccccccacugcgcccugauggacugcaucauguacgacgccgccgugagcggcggccugaacauccccgugcugagagccgugcugcccagagacaugguguucagaaccagcagccccaagguggugcugugaggacuaguuauaagacugacuagcccgaugggccucccaacgggcccuccuccccuccuugcaccgagauuaauaaaaaaaaaaaaaaaaaaaaaaaaaaaaaaaaaaaaaaaaaaaaaaaaaaaaaaaaaaaaaaaaaaaaaaaaaaaaaaaaaaaaaaaaaaaaaaaaaaaa

SEQ ID NO: 21997 - RNA, 1950 nt, Artificial Sequence
  mRNA product Design i-3 (A100) comprising derived and/or modified sequence from LASV(LASV1000-NIG-2009;Clade II)__AIT17783__SP-IgE_NP(2-569) (opt4)
aggagaaagcuuaccauggacuggaccuggauccuguuccugguggccgccgccaccagagugcacagcagcgccagcaaggaggugaagagcuuccuguggacccagagccugagaagagagcugagcggcuacugcagcaacaucaagcugcagguggugaaggacgcccaggcccugcugcacggccuggacuucagcgaggugagcaacgugcagagacugaugagaaagcagaagagagacgacagcgaccugaagagacugagagaccugaaccaggccgugaacaaccugguggagcugaagagcacccagcagaagagcauccugagagugggcacccugaccagcgacgaccugcugacccuggccgccgaccuggagaagcugaagagcaaggugaucagaaccgagagaccccugagcagcggcguguacaugggcaaccugagcacccagcagcuggagcagagaagagcccugcugaacaugaucggcauggugggcggcgcccagggcacccagcccggcagagacggcguggugagagugugggacgugaagaaccccgaccugcugaacaaccaguucggcaccaugcccagccugacccuggccugccugaccaagcagggccagguggaccugaacgacguggugcuggcccugaccgaccugggccugaucuacaccgccaaguaccccaacagcagcgaccuggacagacugagccagagccaccccauccugaacaugguggacaccaagaagagcagccugaacaucagcggcuacaacuucagccugggcgccgccgugaaggccggcgccugcaugcuggacggcggcaacaugcuggagaccaucaaggugaccccccagaccauggacggcauccugaagagcauccugaaggugaagaagagccugggcauguucgugagcgacacccccggcgagagaaaccccuacgagaacauccuguacaagaucugccugagcggcgacggcuggcccuacaucgccagcagaaccagcaucgugggcagagccugggagaacaccaccguggaccuggagagcgacggcaagccccagaaggugggcaccgccggcagcaacaagagccugcagagcgccggcuuccccaccggccugaccuacagccagcugaugacccugaaggacagcaugaugcagcuggaccccagcgccaagaccuggaucgacaucgagggcagacccgaggaccccguggagaucgcccuguaccagcccgugagcggcugcuacauccacuucuucagagagcccaccgaccugaagcaguucaagcaggacgccaaguacagccacggcaucgacguggccgaccuguuccccgcccagcccggccugaccagcgccgugaucgaggcccugcccagaaacauggugcugaccugccagggcagcgacgacaucaagagacugcuggacagccagggcagaagagacaucaagcugaucgacaucgcccugagcaaggccgacagcagaagauucgagaacgccgugugggaccagugcaaggaccugugccacaugcacaccggcguggugguggagaagaagaagagaggcggcaaggaggagaucaccccccacugcgcccugauggacugcaucauguacgacgccgccgugagcggcggccugaacauccccgugcugagagccgugcugcccagagacaugguguucagaaccagcagccccaagguggugcugugaggacuaguuauaagacugacuagcccgaugggccucccaacgggcccuccuccccuccuugcaccgagauuaauaaaaaaaaaaaaaaaaaaaaaaaaaaaaaaaaaaaaaaaaaaaaaaaaaaaaaaaaaaaaaaaaaaaaaaaaaaaaaaaaaaaaaaaaaaaaaaaaaaaa

SEQ ID NO: 21998 - RNA, 1950 nt, Artificial Sequence
  mRNA product Design i-3 (A100) comprising derived and/or modified sequence from LASV(LASV221-NIG-2010;Clade II)__AIT17625__SP-IgE_NP(2-569) (opt4)
aggagaaagcuuaccauggacuggaccuggauccuguuccugguggccgccgccaccagagugcacagcagcgccagcaaggaggugaagagcuuccuguggacccagagccugagaagagagcugagcggcuacugcagcagcaucaagcugcagguggugaaggacgcccaggcccugcugcacggccuggacuucagcgaggugagcaacgugcagagacugaugagaaagcagagaagagacgacagcgaccugaagagacugagagaccugaaccaggccgugaacaaccugguggagcugaagagcacccagcagaagagcauccugagagugggcacccugaccagcgacgaccugcugacccuggccgccgaccuggagaagcugaagagcaaggugaucagaaccgagagaccccugagcagcggcguguacaugggcaaccugagcacccagcagcuggagcagagaagagcccugcugaacaugaucggcauggugggcggcgcccagggcacccagcccggcagagacggcguggugagagugugggacgugaagaaccccgaccugcugaacaaccaguucggcaccaugcccagccugacccuggccugccugaccaagcagggccagguggaccugaacgacgccgugcuggcccugaccgaccugggccugaucuacaccgccaaguaccccaacagcagcgaccuggacagacugagccagagccaccccauccugaacaugguggacaccaagaagagcagccugaacaucagcggcuacaacuucagccugggcgccgccgugaaggccggcgccugcaugcuggacggcggcaacaugcuggagaccaucaaggugaccccccagaccguggacggcauccugaagagcauccugaaggugaagagaagccugggcauguucgugagcgacacccccggcgagagaaaccccuacgagaacauccuguacaagaucugccugagcggcgacggcuggcccuacaucgccagcagaaccagcaucgugggcagagccugggagaacaccaccguggaccuggagagcgacggcaagccccagaaggugggcaccgccggcagcaacaagagccugcagagcgccggcuuccccaccggccugaccuacagccagcugaugacccugaaggacagcaugaugcagcuggaccccagcgccaagaccuggaucgacaucgagggcagacccgaggaccccguggagaucgcccuguaccagcccaugagcggcugcuacauccacuucuucagagagcccaccgaccugaagcaguucaagcaggacgccaaguacagccacggcaucgacguggccgaccuguuccccgcccagcccggccugaccagcgccgugaucgaggcccugcccagaaacauggugcugaccugccagggcagcgacgacaucaagagacugcuggacagccagggcagaagagacaucaagcugaucgacaucgcccugagcaaggccgacagcagaaaguucgagaacgccgugugggaccagugcaaggaccugugccacaugcacaccggcguggugguggagaagaagaagagaggcggcaaggaggagaucaccccccacugcgcccugauggacugcaucauguacgacgccgccgugagcggcggccugaacauccccgugcugagagccgugcugcccagagacaugguguucagaaccagcagccccaagguggugcugugaggacuaguuauaagacugacuagcccgaugggccucccaacgggcccuccuccccuccuugcaccgagauuaauaaaaaaaaaaaaaaaaaaaaaaaaaaaaaaaaaaaaaaaaaaaaaaaaaaaaaaaaaaaaaaaaaaaaaaaaaaaaaaaaaaaaaaaaaaaaaaaaaaaa

SEQ ID NO: 21999 - RNA, 1950 nt, Artificial Sequence
  mRNA product Design i-3 (A100) comprising derived and/or modified sequence from LASV(LASV237-NIG-2010;Clade II)__AIT17639__SP-IgE_NP(2-569) (opt4)
aggagaaagcuuaccauggacuggaccuggauccuguuccugguggccgccgccaccagagugcacagcagcgccagcaaggaggugaagagcuuccuguggacccagagccugagaagagagcugagcggcuacugcagcaacaucaagcugcagguggugaaggacgcccaggcccugcugcacggccuggacuucagcgaggugagcaacgugcagagacugaugagaaagcagaagagagacgacagcgaccugaagagacugagagaccugaaccaggccgugaacaaccugguggagcugaagagcacccagcagaagagcauccugagagugggcacccugaccagcgacgaccugcugacccuggccgccgaccuggagaagcugaagagcaaggugaucagaaccgagagaccccugagcagcggcguguacaugggcaaccugagcacccagcagcuggagcagagaagagcccugcugaacaugaucggcauggugggcggcgcccagggcacccagcccggcagagacggcguggugagagugugggacgugaagaaccccgaccugcugaacaaccaguucggcaccaugcccagccugacccuggccugccugaccaagcagggccagguggaccugaacgacgccgugcuggcccugaccgaccugggccugaucuacaccgccaaguaccccaacagcagcgaccuggacagacugagccagagccaccccauccugaacaugguggacaucaagaagagcagccugaacaucagcggcuacaacuucagccugggcgccgccgugaaggccggcgccugcaugcuggacggcggcaacaugcuggagaccaucaaggugaccccccagaccauggacggcauccugaagagcauccugaaggugaagagaagccugggcauguucgugagcgacacccccggcgagagaaaccccuacgagaacauccuguacaagaucugccugagcggcgacggcuggcccuacaucgccagcagaaccagcaucgugggcagagccugggagaacaccaccguggaccuggagagcgacggcaagccccagaaggugggcagcgccggcagcaacaagagccugcagagcgccggcuuccccaccggccugaccuacagccagcugaugacccugaaggacagcaugaugcagcuggaccccagcgccaagaccuggaucgacaucgagggcagacccgaggaccccguggagaucgcccuguaccagcccaugagcggcugcuacauccacuucuucagagagcccaccgaccugaagcaguucaagcaggacgccaaguacagccacggcaucgacguggccgaccuguuccccgcccagcccggccugaccagcgccgugaucgaggcccugcccagaaacauggugcugaccugccagggcagcgacgacaucaagagacugcuggacagccagggcagaagagacaucaagcugaucgacaucgcccugagcaaggccgacagcagaagauucgagaacgccgugugggaccagugcaaggaccugugccacaugcacaccggcguggugguggagaagaagaagagaggcggcaaggaggagaucaccccccacugcgcccugauggacugcaucauguacgacgccgccgugagcggcggccugaacauccccgugcugagagccgugcugcccagagacaugguguucagaaccagcagccccaagguggugcugugaggacuaguuauaagacugacuagcccgaugggccucccaacgggcccuccuccccuccuugcaccgagauuaauaaaaaaaaaaaaaaaaaaaaaaaaaaaaaaaaaaaaaaaaaaaaaaaaaaaaaaaaaaaaaaaaaaaaaaaaaaaaaaaaaaaaaaaaaaaaaaaaaaaa

SEQ ID NO: 22000 - RNA, 1950 nt, Artificial Sequence
  mRNA product Design i-3 (A100) comprising derived and/or modified sequence from LASV(LASV253-NIG-2011;Clade II)__AIT17671__SP-IgE_NP(2-569) (opt4)
aggagaaagcuuaccauggacuggaccuggauccuguuccugguggccgccgccaccagagugcacagcagcgccagcaaggaggugaagagcuuccuguggacccagagccugagaagagagcugagcggcuacugcagcagcaucaagcugcagguggugaaggacgcccaggcccugcugcacggccuggacuucagcgaggugagcaacgugcagagacugaugagaaagcagaagagagacgacagcgaccugaagagacugagagaccugaaccaggccgugaacaaccugguggagcugaagagcacccagcagaagagcgugcugagagugggcacccugaccagcgacgaccugcugacccuggccgccgaccuggagaagcugaagagcaaggugaucagaaccgagagaccccugagcagcggcguguacaugggcaaccugagcacccagcagcuggagcagagaagagcccugcugaacaugaucggcauggugggcggcgcccagggcacccagcccggcagagacggcguggugagagugugggacgugaagaaccccgaccugcugaacaaccaguucggcaccaugcccagccugacccuggccugccugaccaagcagggccagguggaccugaacgacguggugcuggcccugaccgaccugggccugaucuacaccgccaaguaccccaacagcagcgaccuggacagacugagccagagccaccccauccugaacaugguggacaccaagaagagcagccugaacaucagcggcuacaacuucagccugggcgccgccgugaaggccggcgccugcaugcuggacggcggcaacaugcuggagaccaucaaggugaccccccagaccauggacggcauccugaagagcauccugaaggugaagaagagccugggcauguucgugagcgacacccccggcgagagaaaccccuacgagaacauccuguacaagaucugccugagcggcgacggcuggcccuacaucgccagcagaaccagcaucgugggcagagccugggagaacaccaccguggaccuggagagcgacggcaagccccagaaggugggcaccgccggcagcaacaagagccugcagagcgccggcuuccccaccggccugaccuacagccagcugaugacccugaaggacagcaugaugcagcuggaccccagcgccaagaccuggaucgacaucgagggcagacccgaggaccccguggagaucgcccuguaccagcccaugagcggcugcuacauccacuucuucagagagcccaccgaccugaagcaguucaagcaggacgccaaguacagccacggcaucgacgugaccgaccuguuccccgcccagcccggccugaccagcgccgugaucgaggcccugcccagaaacauggugcugaccugccagggcagcgacgacaucaagagacugcuggacagccagggcagaagagacaucaagcugaucgacaucgcccugagcaaggccgacagcagaagauucgagaacgccgugugggaccagugcaaggaccugugccacaugcacaccggcguggugguggagaagaagaagagaggcggcaaggaggagaucaccccccacugcgcccugauggacugcaucauguacgacgccgccgugagcggcggccugaacauccccgugcugagagccgugcugcccagagacaugguguucagaaccagcagccccaagguggugcugugaggacuaguuauaagacugacuagcccgaugggccucccaacgggcccuccuccccuccuugcaccgagauuaauaaaaaaaaaaaaaaaaaaaaaaaaaaaaaaaaaaaaaaaaaaaaaaaaaaaaaaaaaaaaaaaaaaaaaaaaaaaaaaaaaaaaaaaaaaaaaaaaaaaa

SEQ ID NO: 22001 - RNA, 1950 nt, Artificial Sequence
  mRNA product Design i-3 (A100) comprising derived and/or modified sequence from LASV(LASV254-NIG-2011;Clade II)__AIT17675__SP-IgE_NP(2-569) (opt4)
aggagaaagcuuaccauggacuggaccuggauccuguuccugguggccgccgccaccagagugcacagcagcgccagcaaggaggugaagagcuuccuguggacccagagccugagaagagagcugagcggcuacugcagcagcaucaagcugcagguggugaaggacgcccaggcccugcugcacggccuggacuucagcgaggugagcaacgugcagagacugaugagaaagcagaagagagacgacagcgaccugaagagacugagagaccugaaccaggccgugaacaaccugguggagcugaagagcacccagcagaagagcgugcugagagugggcacccugaccagcgacgaccugcugacccuggccgccgaccuggagaagcugaagagcaaggugaucagaaccgagagaccccugagcagcggcguguacaugggcaaccugagcacccagcagcuggagcagagaagagcccugcugaacaugaucggcauggugggcggcgcccagggcacccagcccggcagagacggcguggugagagugugggacgugaagaaccccgaccugcugaacaaccaguucggcaccaugcccagccugacccuggccugccugaccaagcagggccagguggaccugaacgacgccgugcuggcccugaccgaccugggccugaucuacaccgccaaguaccccaacagcagcgaccuggacagacugagccagagccaccccauccugaacaugguggacaccaagaagagcagccugaacaucagcggcuacaacuucagccugggcgccgccgugaaggccggcgccugcaugcuggacggcggcaacaugcuggagaccaucaaggugaccccccagaccauggacggcauccugaagagcauccugaaggugaagaagagccugggcauguucgugagcgacacccccggcgagagaaaccccuacgagaacauccuguacaagaucugccugagcggcgacggcuggcccuacaucgccagcagaaccagcaucgugggcagagccugggagaacaccaucguggaccuggagagcgacggcaagccccagaaggugggcaccgccggcagcaacaagagccugcagagcgccggcuuccccaccggccugaccuacagccagcugaugacccugaaggacagcaugaugcagcuggaccccagcgccaagaccuggaucgacaucgagggcagacccgaggaccccguggagaucgcccuguaccagcccaugagcggcugcuacauccacuucuucagagagcccaccgaccugaagcaguucaagcaggacgccaaguacagccacggcaucgacguggccgaccuguuccccgcccagcccggccugaccagcgccgugaucgaggcccugcccagaaacauggugcugaccugccagggcagcgacgacaucaagagacugcuggacagccagggcagaagagacaucaagcugaucgacaucgcccugagcaaggccgacagcagaagauucgagaacgccgugugggaccagugcaaggaccugugccacaugcacaccggcguggugguggagaagaagaagagaggcggcaaggaggagaucaccccccacugcgcccugauggacugcaucauguacgacgccgccgugagcggcggccugaacauccccgugcugagagccgugcugcccagagacaugguguucagaaccagcagccccaagguggugcugugaggacuaguuauaagacugacuagcccgaugggccucccaacgggcccuccuccccuccuugcaccgagauuaauaaaaaaaaaaaaaaaaaaaaaaaaaaaaaaaaaaaaaaaaaaaaaaaaaaaaaaaaaaaaaaaaaaaaaaaaaaaaaaaaaaaaaaaaaaaaaaaaaaaa

SEQ ID NO: 22002 - RNA, 1950 nt, Artificial Sequence
  mRNA product Design i-3 (A100) comprising derived and/or modified sequence from LASV(Nig08-04;Clade II)__ADU56611__SP-IgE_NP(2-569) (opt4)
aggagaaagcuuaccauggacuggaccuggauccuguuccugguggccgccgccaccagagugcacagcagcgccagcaaggaggugaagagcuuccuguggacccagagccugagaagagagcugagcggcuacugcagcaacaucaagcugcagguggugaaggacgcccaggcccugcugcacggccuggacuucagcgaggugagcaacgugcagagacugaugagaaagcagaagagagacgacggcgaccugaagagacugagagaccugaaccaggccgugaacaaccugguggagcugaagagcacccagcagaagagcgugcugagagugggcacccugaccagcgacgaccugcugacccuggccgccgaccuggagaagcugaagagcaaggugaucagaaccgagagaccccugagcagcggcguguacaugggcaaccugagcacccagcagcuggagcagagaaaggcccugcugagcaugaucggcauggugggcggcgcccagggcacccagcccggcagagacggcguggugagagugugggacgugaagaaccccgaccugcugaacaaccaguucggcaccaugcccagccugacccuggccugccugaccaagcagggccagguggaccugaacgacgccgugcuggcccugaccgaccugggccugaucuacaccgccaaguaccccaacagcagcgaccuggacagacugagccagagccaccccauccugaacaugguggacaccaagaagagcagccugaacaucagcggcuacaacuucagccugggcgccgccgugaaggccggcgccugcaugcuggacggcggcaacaugcuggagaccaucaaggugaccccccagaccauggacggcauccugaagagcauccugaaggugaagagaagccugggcauguucgugagcgacacccccggcgagagaaaccccuacgagaacauccuguacaagaucugccugagcggcgacggcuggcccuacaucgccagcagaaccagcaucgugggcagagccugggagaacaccaccguggaccuggagagcgacggcaagccccagaaggugggcaccgccggcagcaacaagagccugcagagcgccggcuuccccaccggccugaccuacagccagcugaugacccugaaggacagcaugaugcagcuggaccccagcgccaagaccuggaucgacaucgagggcagacccgaggaccccguggagaucgcccuguaccagcccaugagcggcugcuacauccacuucuucagagagcccaccgaccugaagcaguucaagcaggacgccaaguacagccacggcaucgacgugaccgaccuguucagcgcccagcccggccugaccagcgccgugaucgaggcccugcccagaaacauggugcugaccugccagggcagcgacgacaucaagaagcugcuggacagccagggcagaagagacaucaagcugaucgacaucagccugaacaaggccgacagcagaagauucgagaacgccgugugggaccagugcaaggaccugugccacaugcacaccggcguggugguggagaagaagaagagaggcggcaaggaggagaucaccccccacugcgcccugauggacugcaucauguucgacgccgccgugagcggcggccugaacauccccauccugagagccgugcugcccagagacaugguguucagaaccagcagccccaagguggugcugugaggacuaguuauaagacugacuagcccgaugggccucccaacgggcccuccuccccuccuugcaccgagauuaauaaaaaaaaaaaaaaaaaaaaaaaaaaaaaaaaaaaaaaaaaaaaaaaaaaaaaaaaaaaaaaaaaaaaaaaaaaaaaaaaaaaaaaaaaaaaaaaaaaaa

SEQ ID NO: 22003 - RNA, 1953 nt, Artificial Sequence
  mRNA product Design i-3 (A100) comprising derived and/or modified sequence from LASV(GA391;Clade III)__AAA46284__SP-IgE_NP(2-570) (opt4)
aggagaaagcuuaccauggacuggaccuggauccuguuccugguggccgccgccaccagagugcacagcagcgccagcaaggaggugagaagcugccuguggacccagagccugagaagagagcugagcggcuacugcagcaacaucaagcugcagguggugaaggacgcccaggcccugcugcacggccuggacuucagcgaggugagcaacgugcagagacugaugagaaagcagaagagagacgacggcgaccugaagagacugagagaccugaaccaggccgugaacaaccugguggagcugaagagcacccagcagaagagcgugcugagagugggcacccugagcagcgacgaccugcugauccuggccgccgaccuggagaagcugaagagcaaggugaccagaaccgagagaccccugagcagcggcguguacaugggcaaccugagcagccagcagcuggaccagagaagagcccugcugaacaugaucggcaugaccggcgugagcggcggcggcaagggcgccagcaacggcaucgugagagugugggacgugaagaacgccgagcugcugaacaaccaguucggcaccaugcccagccugacccuggccugccugaccaagcagggccagguggaccugaacgacgccgugcaggcccugaccgaccugggccugaucuacaccgccaaguaccccaacagcagcgaccuggacagacugagccagagccaccccauccugaacaugaucgacaccaagaagagcagccugaacaucagcggcuacaacuucagccugggcgccgccgugaaggccggcgccugcaugcuggacggcggcaacaugcuggagaccaucaaggugagcccccagaccauggacggcauccugaagagcauccugaaggugaagaagagccugggcauguucgugagcgacacccccggcgagagaaaccccuacgagaacauccuguacaagaucugccugagcggcgacggcuggagcuacaucgccagcagaaccagcaucgugggcagagccugggagaacaccgugguggaccuggagcaggacaacaagccccagaagaucggcaacggcggcagcaacaagagccugcagagcgccggcuucgccgccggccugaucuacagccagcugaugacccugaaggacuucaagugcuucaaccugauccccaacgccaagaccuggauggacaucgagggcagacccgaggaccccguggagaucgcccuguaccagcccagcagcggcugcuacgugcacuucuucagagagcccaccgaccugaagcaguucaagcaggacgccaaguacagccacggcagagacgugaccgaccuguucgccgcccagcccggccugaccagcgccgugaucgaggcccugcccagaaacauggugaucaccugccagggcagcgaggacaucagaaagcugcuggagagccagggcagaagagacaucaagcugaucgacaucacccugagcaaggccgacagcagaaaguucgagaacgccgugugggaccaguucaaggaccugugccacaugcacaccggcguggugguggagaagaagaagagaggcggcaaggaggagaucaccccccacugcgcccugauggacugcaucauguucgacgccgccgugagcggcggccuggacgccaaggugcugagaguggugcugcccagagacaugguguucagaaccagcacccccaagguggugcugugaggacuaguuauaagacugacuagcccgaugggccucccaacgggcccuccuccccuccuugcaccgagauuaauaaaaaaaaaaaaaaaaaaaaaaaaaaaaaaaaaaaaaaaaaaaaaaaaaaaaaaaaaaaaaaaaaaaaaaaaaaaaaaaaaaaaaaaaaaaaaaaaaaaa

SEQ ID NO: 22004 - RNA, 1950 nt, Artificial Sequence
  mRNA product Design i-3 (A100) comprising derived and/or modified sequence from LASV(Nig08-A19;Clade III)__ADU56619__SP-IgE_NP(2-569) (opt4)
aggagaaagcuuaccauggacuggaccuggauccuguuccugguggccgccgccaccagagugcacagcagcgccagcaaggaggugaagagcuuccuguggacccagagccugagaagagagcugagcggcuacugcagcaacaucaagcugcagguggugaaggacgcccaggcccugcugcacggccuggacuucagcgaggugagcaacgugcagagacugaugagaaagcagaagagagacgacggcgaccugaagagacugagagaccugaaccaggccgugaacaaccugguggagcugaagagcacccagcagaagagcgugcugagagugggcacccugagcagcgacgaccugcuggugcuggccgccgaccuggagaagcugaagagcaagguggugagaaccgagagaccccugagcagcggcaucuacaugggcaaccugagcagccagcagcuggaccagagaaaggcccugcugaacaugaucggcaugaccggcggcaacggcggcagaaacaccaccagcgacggcaucgugagagugugggacgugaagaacgccgagcugcugaacaaccaguucggcaccaugcccagccugacccuggccugccugaccaagcagggccagguggaccugaacgacgccgugcaggcccugaccgaccugggccugaucuacaccgccaaguaccccaacagcagcgaccuggacagacuggcccagagccaccccauccugaacaugaucgacaccaagaagagcagccugaacaucagcggcuacaacuucagccugggcgccgccgugaaggccggcgccugcaugcuggacggcggcaacaugcuggagaccaucaaggugagcccccagaccauggacggcauccugaagagcauccugaaggugaagagaagccugggcauguucaucagcgacacccccggcgagagaaaccccuacgagaacauccuguacaagaucugccugagcggcgacggcuggcccuacaucgccagcagaaccagcaucgugggcagagccugggagaacaccgugguggaccuggagagcgacaacaagccccagaagaccggcaacggcggcagcaacaagagccugcagagcgccggcuucgccgccggccugaccuacagccagcugaugacccugaaggacagcaugcugcagcuggaccccaacgccaagaccuggauggacaucgagggcagacccgaggaccccguggagaucgcccuguaccagcccagcagcggcugcuacauccacuucuucagagagcccaccgaccugaagcaguucaagcaggacgccaaguacagccacggcaucgacgugaccgaccuguucgccgcccagcccggccugaccagcgccgugaucgaggcccugcccagaaacauggugaucaccugccagggcagcgaggacaucagaaagcugcuggagagccagggcagaagagacaucaagcugaucgacaucagccugagcaagguggacagcagaaaguucgagaacgccgugugggaccaguucaaggaccugugccacaugcacaccggcaucgugguggagaagaagaagagaggcggcaaggaggagaucaccccccacugcgcccugauggacugcaucauguucgacgccgccgugagcggcggcguggacgccaaggugcugagagccgugcugcccagagacaugguguucagaaccagcacccccaagguggugcugugaggacuaguuauaagacugacuagcccgaugggccucccaacgggcccuccuccccuccuugcaccgagauuaauaaaaaaaaaaaaaaaaaaaaaaaaaaaaaaaaaaaaaaaaaaaaaaaaaaaaaaaaaaaaaaaaaaaaaaaaaaaaaaaaaaaaaaaaaaaaaaaaaaaa

SEQ ID NO: 22005 - RNA, 1950 nt, Artificial Sequence
  mRNA product Design i-3 (A100) comprising derived and/or modified sequence from LASV(G1180-SLE-2010;Clade IV)__AIT17169__SP-IgE_NP(2-569) (opt4)
aggagaaagcuuaccauggacuggaccuggauccuguuccugguggccgccgccaccagagugcacagcagcgccagcaaggagaucaagagcuuccuguggacccagagccugagaagagagcugagcggcuacugcagcaacaucaagcugcagguggugaaggacgcccaggcccugcugcacggccuggacuucagcgaggugagcaacgugcagagacugaugagaaaggagagaagagacgacaacgaccugaagagacugagagaccugaaccaggccgugaacaaccugguggagcugaagagcacccagcagaagagcauccugagagugggcacccugaccagcgacgaccugcugauccuggccgccgaccuggagaagcugaagagcaaggugaucagaaccgagagaccccugagcgccggcguguacaugggcaaccugagcagccagcagcuggaccagagaagagcccugcugagcaugaucggcaugagcagcggcaaccagagagcccaggccggcagagacggcguggugagagugugggacgugaagaacguggagcugcugaacaaccaguucggcaccaugcccagccugacccuggccugccugaccaagcagggccagguggaccugaacgacgccgugcaggcccugaccgaccugggccugaucuacaccgccaaguaccccaacaccagcgaccuggacagacugacccagagccaccccauccugaacaugaucgacaccaagaagagcagccugaacaucagcggcuacaacuucagccugggcgccgccgugaaggccggcgccugcaugcuggacggcggcaacaugcuggagaccaucaaggugagcccccagaccauggacggcauccugaagagcauccugaaggugaagaaggcccugggcauguucaucagcgacacccccggcgagagaaaccccuacgagaacauccuguacaagaucugccugagcggcgacggcuggcccuacaucgccagcagaaccagcaucaccggcagagccugggagaacaccgugguggaccuggagagcgacggcaagccccagaaggccggcagcaacaacagcaacaagagccugcagagcgugggcuucaccgccggccugaccuacagccagcugaugacccugaaggacgccaugcugcagcuggaccccaacgccaagaccuggauggacaucgagggcagacccgaggaccccguggagaucgcccuguaccagcccagcagcggcugcuacauccacuucuucagagagcccaccgaccugaagcaguucaagcaggacgccaaguacagccacggcaucgacgugaccgaccuguucgccgcccagcccggccugaccagcgccgugaucgacgcccugcccagaaacauggugaucaccugccagggcagcgacgacaucagaaagcugcuggagagccagggcagaaaggacaucaagcugaucgacaucgcccugagcaagaccgacagcagaaaguacgagaacgccgugugggaccaguacaaggaccugugccacaugcacaccggcguggugguggagaagaagaagagaggcggcaaggaggagaucaccccccacugcgcccugauggacugcaucauguucgacgccgccgugagcggcggccugaacaccagcgugcugagagccgugcugcccagagacaugguguucagaaccagcacccccagaguggugcugugaggacuaguuauaagacugacuagcccgaugggccucccaacgggcccuccuccccuccuugcaccgagauuaauaaaaaaaaaaaaaaaaaaaaaaaaaaaaaaaaaaaaaaaaaaaaaaaaaaaaaaaaaaaaaaaaaaaaaaaaaaaaaaaaaaaaaaaaaaaaaaaaaaaa

SEQ ID NO: 22006 - RNA, 1950 nt, Artificial Sequence
  mRNA product Design i-3 (A100) comprising derived and/or modified sequence from LASV(G1442-SLE-2011;Clade IV)__AIT17181__SP-IgE_NP(2-569) (opt4)
aggagaaagcuuaccauggacuggaccuggauccuguuccugguggccgccgccaccagagugcacagcagcgccagcaaggaggugaagagcuuccuguggacccagagccugagaagagagcugagcggcuacugcagcaacaucaagcugcagguggugaaggacgcccaggcccugcugcacggccuggacuucagcgaggugagcaacgugcagagacugaugagaaagcagagaagagacgacaacgaccugaagagacugagagaccugaaccaggccgugaacaaccugguggagcugaagagcacccagcagaagagcgugcugagagugggcacccugaccagcgacgaccugcuggugcuggccgccgaccuggagaagcugaagagcaaggugaucagaaccgagagaccccugagcgccggcguguacaugggcaaccugagcagccagcagcuggaccagagaagagcccugcugaacaugaucggcaugagcggcggcauccagggcaccagaaccggcagagacggcguggugagagugugggacgugaagaacgccgaccugcugaacaaccaguucggcaccaugcccagccugacccuggccugccugaccaagcagggccagguggaccugaacgacguggugcaggcccugaccgaccugggccugaucuacaccgccaaguaccccaacgccagcgaccuggacagacugacccagagccaccccauccugaacaugaucgacaccaagaagagcagccugaacaucagcggcuacaacuucagccugggcgccgccgugaaggccggcgccugcaugcuggacggcggcaacaugcuggagaccaucaaggugagcccccagaccauggacggcauccugaagagcauccugaaggugaagaagacccugggcauguucaucagcgacacccccggcgagagaaaccccuacgagaacauccuguacaagaucugccugagcggcgacggcuggcccuacaucgccagcagaaccagcaucaccggcagagccugggagaacaccgugguggaccuggagagcgacggcaagccccagaaggccggcagcaacaacagcaacaagagccugcagagcgccggcuucgccgccggccugaccuacagccagcugaugacccugaaggacgccaugcugcagcuggaccccaacgccaagaccuggauggacaucgagggcagacccgaggaccccguggagaucgcccuguaccagcccagcagcggcugcuacauccacuucuucagagagcccaccgaccugaagcaguucaagcaggacgccaaguacagccacggcaucgacgugaccgaccuguucgccgcccagcccggccugaccagcgccgugaucgaggcccugcccagaaacauggugaucaccugccagggcagcgacgacaucaagaagcugcuggagagccagggcagaaaggacaucaagcugaucgacaucgcccugagcaagaccgacagcagaaaguacgagaacgccgugugggaccaguacaaggaccugugccacaugcacaccggcguggugguggagaagaagaagagaggcggcaaggaggagaucaccccccacugcgcccugauggacugcaucauguucgacgccgccgugagcggcggccugaacacccuggugcugagagccgugcugcccagagacaugguguucagaaccagcacccccagaguggugcugugaggacuaguuauaagacugacuagcccgaugggccucccaacgggcccuccuccccuccuugcaccgagauuaauaaaaaaaaaaaaaaaaaaaaaaaaaaaaaaaaaaaaaaaaaaaaaaaaaaaaaaaaaaaaaaaaaaaaaaaaaaaaaaaaaaaaaaaaaaaaaaaaaaaa

SEQ ID NO: 22007 - RNA, 1950 nt, Artificial Sequence
  mRNA product Design i-3 (A100) comprising derived and/or modified sequence from LASV(G3010-SLE-2013;Clade IV)__AIT17345__SP-IgE_NP(2-569) (opt4)
aggagaaagcuuaccauggacuggaccuggauccuguuccugguggccgccgccaccagagugcacagcagcgccagcaaggagaucaagagcuuccuguggacccagagccugagaagagagcugagcggcuacugcagcaacaucaagcugcagguggugaaggacgcccaggcccugcugcacggccuggacuucagcgaggugagcaacgugcagagacugaugagaaaggagagaagagacgacaacgaccugaagagacugagagaccugaaccaggccgugaacaaccugguggagcugaagagcacccagcagaagagcauccugagagugggcacccugaccagcgacgaccugcugauccuggccgccgaccuggagaagcugaagagcaaggugaccagaaccgagagaccccugagcgccggcguguacaugggcaaccugagcagccagcagcuggaccagagaagagcccugcugagcaugaucggcaugagcagcggcgugcagggcgccagagccggcagagacggcguggugagagugugggacgugaagaacgccgagcugcugaacaaccaguucggcaccaugcccagccugacccuggccugccugaccaagcagggccagguggaccugaacgacguggugcaggcccugaccgaccugggccugaucuacaccgccaaguaccccaacaccagcgaccuggacagacugacccagagccaccccauccugaacaugaucgacaccaagaagagcagccugaacaucagcggcuacaacuucagccugggcgccgccgugaaggccggcgccugcaugcuggacggcggcaacaugcuggagaccaucaaggugagcccccagaccauggacggcauccugaagagcauccugaaggugaagaaggcccugggcauguucaucagcgagacccccggcgagagaaaccccuacgagaacauccuguacaagaucugccugagcggcgacggcuggcccuacaucgccagcagaaccagcaucaccggcagagccugggagaacaccgugguggaccuggagagcgacggcaagccccagaaggccggcagcaacaacagcaacaagagccugcagagcgccggcuucaccgccggccugaccuacagccagcugaugacccugaaggacgccaugcugcagcuggaccccaacgccaagaccuggauggacaucgagggcagacccgaggaccccguggagguggcccuguaccagcccagcagcggcugcuacauccacuucuucagagagcccaccgaccugaagcaguucaagcaggacgccaaguacagccacggcaucgacgugaccgaccuguucgccgcccagcccggccugaccagcgccgugaucgacgcccugcccagaaacauggugaucaccugccagggcagcgacgacaucaagaagcugcuggagagccagggcagaaaggacaucaagcugaucgacaucgcccugagcaagaccgacagcagaaaguacgagaacgccgugugggaccaguacaaggaccugugccacaugcacaccggcguggugguggagaagaagaagagaggcggcaaggaggagaucaccccccacugcgcccugauggacugcaucauguucgacgccgccgugagcggcggccugaacaccagcgugcugagagccgugcugcccagagacaugguguucagaaccagcacccccagaguggugcugugaggacuaguuauaagacugacuagcccgaugggccucccaacgggcccuccuccccuccuugcaccgagauuaauaaaaaaaaaaaaaaaaaaaaaaaaaaaaaaaaaaaaaaaaaaaaaaaaaaaaaaaaaaaaaaaaaaaaaaaaaaaaaaaaaaaaaaaaaaaaaaaaaaaa

SEQ ID NO: 22008 - RNA, 1950 nt, Artificial Sequence
  mRNA product Design i-3 (A100) comprising derived and/or modified sequence from LASV(G502-SLE-2009;Clade IV)__AIT17127__SP-IgE_NP(2-569) (opt4)
aggagaaagcuuaccauggacuggaccuggauccuguuccugguggccgccgccaccagagugcacagcagcgccagcaaggagaucaagagcuuccuguggacccagagccugagaagagagcugagcggcuacugcagcaacaucaagcugcagguggugaaggacgcccaggcccugcugcacggccuggacuucagcgaggugagcaacgugcagagacugaugagaaaggagagaagagacgacaacgaccugaagagacugagagaccugaaccaggccgugaacaaccugguggagcugaagagcacccagcagaagagcauccugagagugggcacccugaccagcgacgaccugcugauccuggccgccgaccuggagaagcugaagagcaaggugaucagaaccgagagaccccugagcgccggcguguacaugggcaaccugagcagccagcagcuggaccagagaagagcccugcugagcaugaucggcaugagcggcggcaaccagggcgugagagccggcaaggacggcguggugagagugugggacgugaagaacgccgagcugcugaacaaccaguucggcaccaugcccagccugacccuggccugccugaccaagcagggccagguggaccugaacgacgccgugcaggcccugaccgaccugggccugaucuacaccgccaaguaccccaacaccagcgaccuggacagacugacccagagccaccccauccugaacaugaucgacaccaagaagagcagccugaacaucagcggcuacaacuucagccugggcgccgccgugaaggccggcgccugcaugcuggacggcggcaacaugcuggagaccaucaaggugagcccccagaccauggacggcauccugaagagcauccugaaggugaagaaggcccugggcauguucaucagcgacacccccggcgagagaaaccccuacgagaacauccuguacaagaucugccugagcggcgacggcuggcccuacaucgccagcagaaccagcaucaccggcagagccugggagaacaccgugguggaccuggagagcgacggcaagccccagaaggccggcagcaacaacagcaacaagagccugcagagcgccggcuucaccgccggccugaccuacagccagcugaugacccugaaggacgccaugcugcagcuggaccccaacaccaagaccuggauggacaucgagggcagacccgaggaccccguggagaucgcccuguaccagcccagcagcggcugcuacauccacuucuucagagagcccaccgaccugaagcaguucaagcaggacgccaaguacagccacggcaucgacgugaccgaccuguucgccgcccagcccggccugaccagcgccgugaucgacgcccugcccagaaacauggugaucaccugccagggcagcgacgacaucagaaagcugcuggagagccagggcagaaaggacaucaagcugaucgacaucgcccugaacaagaccgacagcagaaaguacgagaacgccgugugggaccaguacaaggaccugugccacaugcacaccggcguggugguggagaagaagaagagaggcggcaaggaggagaucaccccccacugcgcccugauggacugcaucauguucgacgccgccgugagcggcggccugaacaccagcgugcugagagccgugcugcccagagacaugguguucagaaccagcacccccagaguggugcugugaggacuaguuauaagacugacuagcccgaugggccucccaacgggcccuccuccccuccuugcaccgagauuaauaaaaaaaaaaaaaaaaaaaaaaaaaaaaaaaaaaaaaaaaaaaaaaaaaaaaaaaaaaaaaaaaaaaaaaaaaaaaaaaaaaaaaaaaaaaaaaaaaaaa

SEQ ID NO: 22009 - RNA, 1950 nt, Artificial Sequence
  mRNA product Design i-3 (A100) comprising derived and/or modified sequence from LASV(G733-SLE-2010;Clade IV)__AIT17155__SP-IgE_NP(2-569) (opt4)
aggagaaagcuuaccauggacuggaccuggauccuguuccugguggccgccgccaccagagugcacagcagcgccagcaaggagaucaagagcuuccuguggacccagagccugagaagagagcugagcggcuacugcagcaacaucaagcugcagguggugaaggacgcccaggcccugcugcacggccuggacuucagcgaggugagcaacgugcagagacugaugagaaaggagagaagagacgacaacgaccugaagagacugagagaccugaaccaggccgugaacaaccugguggagcugaagagcacccagcagaagagcgugcugagagugggcacccugaccagcgacgagcugcuggugcuggccgccgaccuggagaagcugaagagcaaggugaucagaaccgagagaccccugagcgccggcguguacaugggcaaccugagcagccagcagcuggaccagagaagagcccugcugagcaugaucggcaugagcggcggcaaccagggcgccagaaccggcagagacggcguggugagagugugggacgugaagaacgccgagcugcugaacaaccaguucggcaccaugcccagccugacccuggccugccugaccaagcagggccagguggaccugaacgacgccgugcaggcccugaccgaccugggccugaucuacaccgccaaguaccccaacaccagcgaccuggacagacugacccagagccaccccauccugaacaugaucgacaccaagaagagcagccugaacaucagcggcuacaacuucagccugggcgccgccgugaaggccggcgccugcaugcuggacggcggcaacaugcuggagaccaucaaggugagcccccagaccauggacggcauccugaagagcauccugaaggugaagaaggcccugggcauguucaucagcgacacccccggcgagagaaaccccuacgagaacauccuguacaagaucugccugagcggcgacggcuggcccuacaucgccagcagaaccagcaucaccggcagagccugggagaacaccgugguggaccuggagagcgacggcaagccccagaaggccggcagcaacaacagcaacaagagccugcagagcgccggcuucaccgccggccugaccuacagccagcugaugacccugaaggacgccaugcugcagcuggaccccaacgccaagaccuggauggacaucgagggcagacccgaggaccccguggagaucgcccuguaccagcccagcagcggcugcuacauccacuucuucagagagcccaccgaccugaagcaguucaagcaggacgccaaguacagccacggcaucgacgugaccgaccuguucgccgcccagcccggccugaccagcgccgugaucgacgcccugcccagaaacauggugaucaccugccagggcagcgacgacaucagaaagcugcuggagagccagggcagaaaggacaucaagcugaucgacaucgcccugagcaagaucgacagcagaaaguacgagaacgccgugugggaccaguacaaggaccugugccacaugcacaccggcguggugguggagaagaagaagagaggcggcaaggaggagaucaccccccacugcgcccugauggacugcaucauguucgacgccgccgugagcggcggccugaacagccuggugcugagagccgugcugcccagagacaugguguucagaaccagcacccccagaguggugcugugaggacuaguuauaagacugacuagcccgaugggccucccaacgggcccuccuccccuccuugcaccgagauuaauaaaaaaaaaaaaaaaaaaaaaaaaaaaaaaaaaaaaaaaaaaaaaaaaaaaaaaaaaaaaaaaaaaaaaaaaaaaaaaaaaaaaaaaaaaaaaaaaaaaa

SEQ ID NO: 22010 - RNA, 1950 nt, Artificial Sequence
  mRNA product Design i-3 (A100) comprising derived and/or modified sequence from MOPV/LASV reassortant(IGS-1;Clade IV)__AFY05578__SP-IgE_NP(2-569) (opt4)
aggagaaagcuuaccauggacuggaccuggauccuguuccugguggccgccgccaccagagugcacagcagcgccagcaaggagaucaagagcuuccuguggacccagagccugagaagagagcugagcggcuacugcagcaacaucaagcugcagguggugaaggacgcccaggcccugcugcacggccuggacuucagcgaggugagcaacgugcagagacugaugagaaaggagagaagagacgacaacgaccugaagagacugagagaccugaaccaggccgugaacaaccugguggagcugaagagcacccagcagaagagcauccugagagugggcacccugaccagcgacgaccugcugauccuggccgccgaccuggagaagcugagaagcaaggugaucagaaccgagagaccccugagcgccggcguguacaugggcaaccugagcagccagcagcuggaccagagaagagcccugcugaacaugaucggcaugagcggcggcaaccagggcgccagagccggcagagacggcguggugagagugugggacgugaagaacgccgagcugcugagcaaccaguucggcaccaugcccagccugacccuggccugccugaccaagcagggccagguggaccugaacgacgccgugcaggcccugaccgaccugggccugaucuacaccgccaaguaccccaacaccagcgaccuggacagacugacccagagccaccccauccugaacaugaucgacaccaagaagagcagccugaacaucagcggcuacaacuucagccugggcgccgccgugaaggccggcgccugcaugcuggacggcggcaacaugcuggagaccaucaaggugagcccccagaccauggacggcauccugaagagcauccugaaggugaagaaggcccugggcauguucaucagcgacacccccggcgagagaaaccccuacgagaacauccuguacaagaucugccugagcggcgacggcuggcccuacaucgccagcagaaccagcaucaccggcagagccugggagaacaccgugguggaccuggagagcgacggcaagccccagaaggccgacagcaacaacagcagcaagagccugcagagcgccggcuucaccgccggccugaccuacagccagcugaugacccugaaggacgccaugcugcagcuggaccccaacgccaagaccuggauggacaucgagggcagacccgaggaccccguggagaucgcccuguaccagcccagcagcggcugcuacauccacuucuucagagagcccaccgaccugaagcaguucaagcaggacgccaaguacagccacggcaucgacgugaccgaccuguucgccacccagcccggccugaccagcgccgugaucgacgcccugcccagaaacauggugaucaccugccagggcagcgacgacaucagaaagcugcuggagagccagggcagaaaggacaucaagcugaucgacaucgaccugagcaagaccgacagcagaaaguacgagaacgccgugugggaccaguacaaggaccugugccacaugcacaccggcguggugguggagaagaagaagagaggcggcaaggaggagaucaccccccacugcgcccugauggacugcaucauguucgacgccgccgugagcggcggccugaacaccagcgugcugagagccgugcugcccagagacaugguguucagaaccagcacccccagaguggugcugugaggacuaguuauaagacugacuagcccgaugggccucccaacgggcccuccuccccuccuugcaccgagauuaauaaaaaaaaaaaaaaaaaaaaaaaaaaaaaaaaaaaaaaaaaaaaaaaaaaaaaaaaaaaaaaaaaaaaaaaaaaaaaaaaaaaaaaaaaaaaaaaaaaaa

SEQ ID NO: 22011 - RNA, 1950 nt, Artificial Sequence
  mRNA product Design i-3 (A100) comprising derived and/or modified sequence from LASV(LM765-SLE-2012;Clade IV)__AIT17815__SP-IgE_NP(2-569) (opt4)
aggagaaagcuuaccauggacuggaccuggauccuguuccugguggccgccgccaccagagugcacagcagcgccagcaaggagaucaagagcuuccuguggacccagagccugagaagagagcugagcggcuacugcagcaacaucaagcugcagguggugaaggacgcccaggcccugcugcacggccuggacuucagcgaggugagcaacgugcagagacugaugagaaaggagagaagagacgacaacgaccugaagagacugagagaccugaaccaggccgugaacaaccugguggagcugaagagcacccagcagaagagcauccugagagugggcacccugaccagcgacgaccugcugauccuggccgccgaccuggagaagcugaagagcaaggugaccagaaccgagagaccccugagcgccggcguguacaugggcaaccugagcagccagcagcuggaccagagaagagcccugcuggacaugaucggcaugagcggcagcaaccagggcgccagagccggcagagacggcguggugagagugugggacgugaagaacgccgagcugcugaacaaccaguucggcaccaugcccagccugacccuggccugccugaccaagcagggccagguggaccugaacgacgccgugcaggcccugaccgaccugggccugaucuacaccgccaaguaccccaacaccagcgaccuggacagacugacccagagccaccccauccugaacaugaucgacaccaagaagagcagccugaacaucagcggcuacaacuucagccugggcgccgccgugaaggccggcgccugcaugcuggacggcggcaacaugcuggagaccaucaaggugagcccccagaccauggacggcauccugaagagcauccugaaggugaagaaggcccugggcauguucaucagcgacgcccccggcgagagaaaccccuacgagaacauccuguacaagaucugccugagcggcgacggcuggcccuacaucgccagcagaaccagcaucaccggcagagccugggagaacaccgugguggaccuggagagcgacggcaagccccagaaggccggcagcaacggcagcaacaagagccugcagagcgccggcuucaccgccggccugaccuacagccagcugaugacccugaaggacgccaugcugcagcuggaccccaacgccaagaccuggauggacaucgagggcagacccgaggaccccguggagaucgcccuguaccagcccagcagcggcugcuacauccacuucuucagagagcccaccgaccugaagcaguucaagcaggacgccaaguacagccacggcaucgacgugaccgaccuguucgccgcccagcccggccugaccagcgccgugaucgacgcccugcccagaaacauggugaucaccugccagggcagcgacgacaucagaaagcuguucgagagccagggcagaaaggacaucaagcugaucgacaucgcccugagcaagaccgacagcagaaaguacgagaacgccgugugggaccaguacaaggaccugugccacaugcacaccggcaucgugguggagaagaagaagagaggcggcaaggaggagaucaccccccacugcgcccugauggacugcaucauguucgacgccgccgugagcggcggccugaacaccagcgugcugagagccgugcugcccagagacaugguguucagaaccagcacccccagaguggugcugugaggacuaguuauaagacugacuagcccgaugggccucccaacgggcccuccuccccuccuugcaccgagauuaauaaaaaaaaaaaaaaaaaaaaaaaaaaaaaaaaaaaaaaaaaaaaaaaaaaaaaaaaaaaaaaaaaaaaaaaaaaaaaaaaaaaaaaaaaaaaaaaaaaaa

SEQ ID NO: 22012 - RNA, 1950 nt, Artificial Sequence
  mRNA product Design i-3 (A100) comprising derived and/or modified sequence from LASV(LM776-SLE-2012;Clade IV)__AIT17825__SP-IgE_NP(2-569) (opt4)
aggagaaagcuuaccauggacuggaccuggauccuguuccugguggccgccgccaccagagugcacagcagcgccagcaaggagaucaagagcuuccuguggacccagagccugagaagagagcugagcagcuacugcagcaacaucaagcugcagguggugaaggacgcccaggcccugcugcacggccuggacuucagcgaggugagcaacgugcagagacugaugagaaaggagagaagagacgacaacgaccugaagagacugagagaccugaaccaggccgugaacaaccugguggagcugaagagcacccagcagaagagcauccugagagugggcacccugaccagcgacgaccugcugauccuggccgccgaccuggagaagcugaagagcaaggugaccagaaccgagagaccccugagcgccggcguguacaugggcaaccugagcagccagcagcuggaccagagaagagcccugcugagcaugaucggcaugagcggcagcaaccagggcgccagagccggcagagacggcguggugagagugugggacgugaagaacgccgagcugcugaacaaccaguucggcaccaugcccagccugacccuggccugccugaccaagcagggccagguggaccugaacgacgccgugcaggcccugaccgaccugggccugaucuacaccgccaaguaccccaacaccagcgaccuggacagacugacccagagccaccccauccugaacaugaucgacaccaagaagagcagccugaacaucagcggcuacaacuucagccugggcgccgccgugaaggccggcgccugcaugcuggacggcggcaacaugcuggagaccaucaaggugagcccccagaccauggacggcauccugaagagcauccugaaggugaagaaggcccugggcauguucaucagcgacacccccggcgagagaaaccccuacgagaacauccuguacaagaucugccugagcggcgacggcuggcccuacaucgccagcagaaccagcaucaccggcagagccugggagaacaccgugguggaccuggagagcgacggcaagccccagaaggccggcagcaacaacagcaacaagagccugcagagcgccggcuucaccgccggccugaccuacagccagcugaugacccugaaggacgccaugcugcagcuggaccccaacgccaagaccuggauggacaucgagggcagacccgaggaccccguggagguggcccuguaccagcccagcagcggcugcuacauccacuucuucagagagcccaccgaccugaagcaguucaagcaggacgccaaguacagccacggcaucgacgugaccgaccuguucgccgcccagcccggccugaccagcgccgugaucgacgcccugcccagaaacauggugaucaccugccagggcagcgacgacaucagaaagcugcuggagagccagggcagaaaggacaucaagcugaucgacaucgcccugagcaagaccgacagcagaaaguacgagaacgccgugugggaccaguacaaggaccugugccacaugcacaccggcguggugguggagaagaagaagagaggcggcaaggaggagaucaccccccacugcgcccugauggacugcaucauguucgacgccgccgugagcggcggccugaacaccagcgugcugagagccgugcugcccagagacaugguguucagaaccagcacccccagaguggugcugugaggacuaguuauaagacugacuagcccgaugggccucccaacgggcccuccuccccuccuugcaccgagauuaauaaaaaaaaaaaaaaaaaaaaaaaaaaaaaaaaaaaaaaaaaaaaaaaaaaaaaaaaaaaaaaaaaaaaaaaaaaaaaaaaaaaaaaaaaaaaaaaaaaaa

SEQ ID NO: 22013 - RNA, 1950 nt, Artificial Sequence
  mRNA product Design i-3 (A100) comprising derived and/or modified sequence from LASV(Mad39;Clade IV)__ANH09723__SP-IgE_NP(2-569) (opt4)
aggagaaagcuuaccauggacuggaccuggauccuguuccugguggccgccgccaccagagugcacagcagcgccagcaaggagaucaagagcuuccuguggacccagagccugagaagagagcugagcggcuacugcagcaacaucaagcugcagguggugaaggacgcccaggcccugcugcacggccuggacuucagcgaggugagcaacgugcagagacugaugagaaagcagagaagagacgacaacgaccugaagagacugagagaccugaaccaggccgugaacaaccugguggagcugaagagcacccagcagaagagcgugcugagagugggcacccugaccagcgacgaccugcugacccuggccgccgaccuggagaagcugaagagcaaggugaccagaaccgagagaccccugaccgccggcguguacaugggcaaccugagcagccagcagcuggaccagagaagagcccugcugaacaugaucggcaugagcggcggcaaccagggcgccagaaccggcagagacggcguggugagagugugggacgugaagaacgccgagcugcugaacaaccaguucggcaccaugcccagccugacccuggccugccugaccaagcagggccagguggaccugaacgacguggugcaggcccugaccgaccugggccugaucuacaccgccaaguaccccaacaccagcgaccuggacagacugacccagagccaccccauccugaacaugaucgacaccaacaagagcagccugaacaucagcggcuacaacuucagccugggcgccgccgugaaggccggcgccugcaugcuggacggcggcaacaugcuggagaccaucaaggugagcccccagaccauggacggcauccugaagagcauccugaaggugaagaagagccugggcauguucaucagcgacacccccggcgagagaaaccccuacgagaacauccuguacaagaucugccugagcggcgacggcuggcccuacaucgccagcagaaccagcaucaccggcagagccugggagaacaccgugguggaccuggagagcggcggcaagccccagaaggccggcagcaacaacagcaacaagagccugcagagcgccggcuucgccgccggccugaccuacagccagcugaugacccugaaggacgccaugcugcagcuggaccccaacgccaagaccuggauggacaucgagggcagacccgaggaccccguggagaucgcccuguaccagcccaucagcggcugcuacauccacuucuucagagagcccaccgaccugaagcaguucaagcaggacgccaaguacagccacggcaucgacgugaccgaccuguucgccgcccagcccggccugaccagcgccgugaucgaggcccugcccagaaacauggugaucaccugccagggcagcgacgacaucagaaagcuguucgagagccagggcagaaaggacaucaagcugaucgacaucgcccugagcaagaccgacagcagaaaguacgagaacgccgugugggaccaguacaaggaccugugccacaugcacaccggcguggugguggagaagaagaagaagggcggcaaggaggagaucaccccccacugcgcccugauggacugcaucauguucgacgccgccgugagcggcggccugaacacccuggugcugagagccgugcugcccagagacaugguguucagaaccagcacccccaagguggugcugugaggacuaguuauaagacugacuagcccgaugggccucccaacgggcccuccuccccuccuugcaccgagauuaauaaaaaaaaaaaaaaaaaaaaaaaaaaaaaaaaaaaaaaaaaaaaaaaaaaaaaaaaaaaaaaaaaaaaaaaaaaaaaaaaaaaaaaaaaaaaaaaaaaaa

SEQ ID NO: 22014 - RNA, 1950 nt, Artificial Sequence
  mRNA product Design i-3 (A100) comprising derived and/or modified sequence from LASV(Z0947-SLE-2011;Clade IV)__AIT17841__SP-IgE_NP(2-569) (opt4)
aggagaaagcuuaccauggacuggaccuggauccuguuccugguggccgccgccaccagagugcacagcagcgccagcaaggagaucaagagcuuccuguggacccagagccugagaagagagcugagcggcuacugcagcaacaucaagcugcagguggugaaggacgcccaggcccugcugcacggccuggacuucagcgaggugagcaacgugcagagacugaugagaaaggagagaagagacgacaacgaccugaagagacugagagaccugaaccaggccgugaacaaccugguggagcugaagagcacccagcagaagagcauccugagagugggcacccugaccagcgacgaccugcugauccuggccgccgaccuggagaagcugaagagcaaggugaccagaaccgagagaccccugagcgccggcguguacaugggcaaccugagcagccagcagcuggaccagagaagagcccugcugaacaugaucggcaugagcggcagcaaccagggcgccagaaccggcagagacggcguggugagagugugggacgugaagaacgccgagcugcugaacaaccaguucggcaccaugcccagccugacccuggccugccugaccaagcagggccagguggaccugaacgacgccgugcaggcccugaccgaccugggccugaucuacaccgccaaguaccccaacaccagcgaccuggacagacugacccagagccaccccauccugaacaugaucgacaccaagaagagcagccugaacaucagcggcuacaacuucagccugggcgccgccgugaaggccggcgccugcaugcuggacggcggcaacaugcuggagaccaucaaggugagcccccagaccauggacggcauccugaagagcauccugaaggugaagaaggcccugggcauguucaucagcgacgcccccggcgagagaaaccccuacgagaacauccuguacaagaucugccugagcggcgacggcuggcccuacaucgccagcagaaccagcaucaccggcagagccugggagaacaccgugguggaccuggagagcgacggcaagccccagaaggccggcagcaacggcagcaacaagagccugcagagcgccggcuucaccgccggccugaccuacagccagcugaugacccugaaggacgccaugcugcagcuggaccccaacgccaagaccuggauggacaucgagggcagacccgaggaccccguggagaucgcccuguaccagcccagcagcggcugcuacauccacuucuucagagagcccaccgaccugaagcaguucaagcaggacgccaaguacagccacggcaucgacgugaccgaccuguucgccgcccagcccggccugaccagcgccgugaucgacgcccugcccagaaacauggugaucaccugccagggcagcgacgacaucagaaagcuguucgagagccagggcagaaaggacaucaagcugaucgacaucgcccugagcaagaccgacagcagaaaguacgagaacgccgugugggaccaguacaaggaccugugccacaugcacaccggcaucgugguggagaagaagaagagaggcggcaaggaggagaucaccccccacugcgcccugauggacugcaucauguucgacgccgccgugagcggcggccugaacaccagcgugcugagagccgugcugcccagagacaugguguucagaaccagcacccccagaguggugcugugaggacuaguuauaagacugacuagcccgaugggccucccaacgggcccuccuccccuccuugcaccgagauuaauaaaaaaaaaaaaaaaaaaaaaaaaaaaaaaaaaaaaaaaaaaaaaaaaaaaaaaaaaaaaaaaaaaaaaaaaaaaaaaaaaaaaaaaaaaaaaaaaaaaa

SEQ ID NO: 22015 - RNA, 1950 nt, Artificial Sequence
  mRNA product Design i-3 (A100) comprising derived and/or modified sequence from LASV(Josiah;Clade IV)__NP_694869__SP-IgE_NP(2-569) (opt5)
aggagaaagcuuaccauggacuggaccuggauccuguuccucguggccgcugccacaagaguccacagcagcgccuccaaggagaucaaaucuuuccuguggacccagagccucagacgggaacuguccggcuacugcucuaacauuaagcugcaaguggucaaagacgcucaggcccugcuccacgggcuggauuuuagcgagguuuccaaugugcagcgccuuaugagaaaggaacggcgcgacgauaacgaccugaaaagacuccgggaucugaaucaggcggugaacaaucuggucgagcucaagucuacacaacaaaagagcauccugcgcgugggaacgcuuaccuccgacgaucugcucauucuggcugccgaccuugaaaaacuuaagagcaaaguuaucagaacagagcggccccucucugccggcguguauauggggaaccuguccagccagcagcuggaucagcgcagagcucuccugaauaugauuggaaugucuggcgggaaccagggagcccgggcuggccgcgacggcgucgugagaguuugggaugugaagaaugccgagcuucugaacaaucaguucgggaccaugccuucccucacacuggcgugucuuaccaaacagggacaagucgaccugaacgaugccgugcaggcucucacagaccugggccugaucuacaccgccaaguauccgaauacgagcgaccucgaucggcugacccagucucaucccauccuuaacaugauugacacaaagaaauccagccugaauaucuccggguacaacuuuucucucggagcugccgugaaggcgggcgccugcaugcuggaugggggaaacaugcuugaaaccauuaaagucagcccucaaacaauggacggcauccugaaguccauucucaaaguuaagaaagcucugggcauguucaucagcgauacccccggggagcgcaauccuuaugaaaacauucuguacaagaucugucucucuggagacggcuggcccuauaucgccuccagaacgagcauuacagggcgggcuugggagaauaccgugguggaucuggagucugacggaaagccucagaaagccgauagcaacaauuccucuaagagccuucaguccgccggcuuuacagcugggcugaccuacagccagcucaugacccugaaagacgcgaugcugcaacuugauccgaacgccaagacauggauggacaucgaaggaagacccgaggacccugucgaaauugcucucuaccagcccucuuccggcugcuauauccacuucuuucgcgagccuacggaucugaaacaguucaagcaggacgccaaguacagccauggcauugaugugaccgaccuguuugccacacaacccgggcucaccucugcuguuaucgaugcccugccgcggaauauggugaucacaugucagggauccgacgauauuagaaaacuucuggaaagccagggccgcaaggacaucaaacucauugauaucgcgcuguccaagaccgacucucggaaauaugagaacgcugucugggaucaguacaaggaccugugccacaugcauacgggggugguuguggagaagaaaaagagaggaggcaaagaagagauuacaccucacugugcccuuauggauugcaucauguucgacgccgcugucagcgggggccucaauaccuccgugcugcgcgccguccugccccgggacaugguguuuagaaccucuacaccucgcguugugcucugaggacuaguuauaagacugacuagcccgaugggccucccaacgggcccuccuccccuccuugcaccgagauuaauaaaaaaaaaaaaaaaaaaaaaaaaaaaaaaaaaaaaaaaaaaaaaaaaaaaaaaaaaaaaaaaaaaaaaaaaaaaaaaaaaaaaaaaaaaaaaaaaaaaa

SEQ ID NO: 22016 - RNA, 1950 nt, Artificial Sequence
  mRNA product Design i-3 (A100) comprising derived and/or modified sequence from LASV(LP;Clade I)__AAF86702__SP-IgE_NP(2-569) (opt5)
aggagaaagcuuaccauggacuggaccuggauccuguuccucguggccgcugccacaagaguccacagcagcaacuccaaggagaucaaaucuuuccuguggacccagagccucagacgggaacuguccggcuacugcucuaauauuaagcuccaaguggucaaagacgcccaggcucugcuccacgggcuggauuuuagcgagguuuccaacgugcagcgccuuaugagaaagcagaaacgggacgaugccgaccugaagcgccucagagaucugaaucaagcggugaacaaucuggucgaacucaagucuacacagcagaaaaacgugcugcggguuggaacgcuuagcuccgacgaucugaucacccucgcugccgaccuggagaaacuuaaaagcaaggugauucgcacagaaagaccccugucuuccggcgucuauauggggaaucucagcucucagcaacuggaucagcggcgcgcccugcucuccaugaucggaaugagcggcgggccucagggaaacagaaccggcggcgacggggugguucgggugugggaugucaaaaaugcugagcugcuuaacaaucaguucggaacaaugccgucucugacccucgccugucugacaaagcaaggccagguggaccuuaacgaugcugugcaggcccugaccgaccucgggcugauuuacacggcgaaguaucccaauuccagcgaccuggauaugcucacccaaucccauccuauccugggaauggucgacacaaagaagucuagccuuaacaucuccggcuacaauuuuagccugggggccgcuguuaaagccggagcuugcaugcucgauggcggcaacaugcuggagaccauuaaggugucuccccagacaauggacgggauccuuaaauccauucugaaggugaaacgcagccucggaauguucaucucugauaccccuggcgaaagaaaccccuaugagaauauucuguacaagaucugucugagcggggaaggauggccuuauauugccucccggacgucuaucacaggccgcgcgugggagaacacccucgucgaccuggagagcgauaauaagccgcccaaacuuaacuccgccgggagcaauaagucucugcaggcugccggacucaacgcuggccugacauacucccagcugaugacccuuaaagacugcaugcuccaacuggauccuagcucuaagaccuggaucgacauugaaggcagacccgaggauccuguggaaaucgcccuguuucagcccuccagcggguguuacauucacuucuuucgggagccgacagaccucaaacaguucaagcaggacgccaaguauucccauggaaucgauguuacggaccuguuuucuacccaaccuggccuuacaagcgcugugauugaagcgcugcccagaaauaugguccuuaccugccagggguccgaugacaucaaaaagcugcuggagucucagggacgccgggauaucaaacuuauugacaucagccucuccaaggccgauagcagaaaauucgagaacgcugugugggaccaguacaaggaucugugucacaugcauacaggcguuguggucgaaaagaaaaagcgcgggggcaaagaggaaauuaccccucacugcgcccugcucgacuguaucauguuugaugccgcuacgacaggaucucugaauauuaccacccuucgggccgugcugcccagagacauggucuuccgcacauccacccccaaggugguucucugaggacuaguuauaagacugacuagcccgaugggccucccaacgggcccuccuccccuccuugcaccgagauuaauaaaaaaaaaaaaaaaaaaaaaaaaaaaaaaaaaaaaaaaaaaaaaaaaaaaaaaaaaaaaaaaaaaaaaaaaaaaaaaaaaaaaaaaaaaaaaaaaaaaa

SEQ ID NO: 22017 - RNA, 1950 nt, Artificial Sequence
  mRNA product Design i-3 (A100) comprising derived and/or modified sequence from LASV(803213;Clade II)__AAF86704__SP-IgE_NP(2-569) (opt5)
aggagaaagcuuaccauggacuggaccuggauccuguuccucguggccgcugccacaagaguccacagcagcgccuccaaggaggugaaaucuuuccuguggacccagagccucagacgggaacuguccggcuacugcucuaacaucaaacuucaagucguuaaggacgcucaggcccugcuccacgggcuggauuuuagcgaggugaauaacgugcagcgccuuaugagaaagcagaaacgggacgauggagaccugaagcgccucagagaucugaaucaagcggucaacaaucugguggaacucaaguccacacagcagaaaucuauucugcggguuggcacgcuuaccagcgacgaucugcucacacuggcugccgaccuugagaagcugaaauccaaggugauccgcaccgaaagaccccucagcucuggggucuauaugggaaaccuguccacacagcaacuggagcagcggcgcgcccuccugaauaugauuggcauggugggaggagcucagggcacccagccuggcagagaugggguugugcgggucugggacgugaaaaacccggaucuucugaauaaccaauucggaacaaugcccagccucacccuggccugucuuacgaagcagggccagguggaccugaaugaugcuguccucgcccugaccgaccuggggcucaucuacacagcgaaguauccuaacucuuccgaccuggaucgccuuagccaaucucaucccauucugaauaugguugacaccaaaaaguccagccucaacaucuccggauacaauuuuucucugggcgccgcugugaaagccggggcuugcaugcuugauggaggcaacaugcuggagacaaucaaggugaccccucagacgauggacggcauucucaaaagcauccugaaggucaaaagaucccuggggauguucgugagcgauacacccggagaacggaacccuuaugagaauauucucuacaagaucugucugucuggcgacggguggccguauauugccucccgcaccagcaucguugggagagcgugggaaaacacaaccguggaucuugagucugacggcaagccccagaaagucgggaccgccggaagcaauaagucccugcagucugcuggcuuuccuacaggccucacguacagccaacugaugacccugaaagauuccaugaugcagcuugaccccagcgccaagacauggauugauaucgaggggcggccugaagaccccguggagaucgcucucuaccagccgaugucuggaugcuauauucacuucuuuagagaaccuaccgaccugaaacaguucaagcaagaugccaaguacucccauggcaucgacguugccgaucuguuucccgcucagccugggcucacaagcgcggugauugaggcccugccccgcaacaugguccuuaccugucagggaucugacgauaucaaaaagcugcucgacucccagggccggagagauauuaaacugaucgacaucagccuguccaagguggauucucgcaaauucgaaaaugcugucugggaccaaugcaaggaucuuugucacaugcauacgggggugguuguggagaagaaaaagcggggcggaaaagaggaaauuacaccccacugcgcccucauggacuguaucauguuugaugccgcugucagcggcgggcugaacauuccugugcugagagccguucucccgcgcgacaugguguuccggaccuccucucccaaggucgugcugugaggacuaguuauaagacugacuagcccgaugggccucccaacgggcccuccuccccuccuugcaccgagauuaauaaaaaaaaaaaaaaaaaaaaaaaaaaaaaaaaaaaaaaaaaaaaaaaaaaaaaaaaaaaaaaaaaaaaaaaaaaaaaaaaaaaaaaaaaaaaaaaaaaaa

SEQ ID NO: 22018 - RNA, 1953 nt, Artificial Sequence
  mRNA product Design i-3 (A100) comprising derived and/or modified sequence from LASV(GA391;Clade III)__CAA36646__SP-IgE_NP(2-570) (opt5)
aggagaaagcuuaccauggacuggaccuggauccuguuccucguggccgcugccacaagaguccacagcagcgccuccaaggaggugagaucuuuccuguggacccagagccuccggcgcgaacuguccggcuacugcucuaacaucaaacuucaagucguuaaggacgcucaggcccugcuccacgggcuggauuuuagcgagguguccaaugugcagagacuuaugcggaaacagaagcgcgacgauggagaccugaaaagacuccgggaucugaaccaagcggucaauaaccugguggaacucaagucuacacagcagaaaagcguucugcgcgugggcacgcuuuccagcgacgaucugcucauucuggcugccgaccuugagaaacugaagucuaaagucaccagaacagaacggccccucuccagcgggguguauaugggaaaucugucuucccagcaacuggaucagcgcagagcccuccugaacaugaucggcaugaccgggguuagcggaggcggcaagggggcuucugacggaauugugcgggucugggaugugaaaaaugccgagcuucugaacaaucaguucggcacaaugccuucccucacccuggcuugucuuacaaagcaggggcaaguggaccugaacgaugccguccaggcgcucaccgaccugggacugaucuacacggccaaguauccgaauagcuccgaccucgaucgccugucucagagccaucccauucuuaacaugaucgacaccaaaaaguccagccugaauaucucuggcuacaacuuuucccucggggcugccguuaaagcuggagccugcaugcuggauggcggcaauaugcuugagacaauuaaggugagcccucaaaccauggacgggauccugaaaucuauucucaaggugaaaaagagccugggaauguucgucuccgauacacccggcgaaagaaacccuuaugagaacauccuguacaagauuugucucucuggggacggauggcccuauaucgcgagccggaccuccauugugggccgcgccugggaaaauacgguuguggaucuggagcaggacaacaaaccucagaagaucgggaauggaggcagcaacaaaucucuucaguccgcuggcuuugccgcugggcugacauacagccaacucaugacccugaaggauuucaaaugcuuuaaucugaucccgaacgccaagacauggauggacauugagggaagacccgaagauccugucgagaucgcccuuuaccagcccucuuccggcuguuaugugcacuucuuucgggaaccuaccgaccucaagcaguucaaacaggacgcuaaguacagccaugggauugauguuaccgaccuguuugcggcccaacccggacugacauccgcugugaucgaggcccucccgagaaauauggucauuacgugccagggcucugaagauauccgcaaacugcuugagagccaggggcggagagacaucaagcugauugauaucacccucuccaaagccgacucucgcaaguucgagaacgcugugugggaucaguuuaaggaccugugucacaugcauacaggcgucgugguugaaaagaagaaacggggaggcaaggaggaaauuaccccucacugcgcccugauggauuguaucauguucgacgcggcugugagcgggggacuugaugccaaaguccucagagugguucugccccgcgacaugguguuccggacauccaccccuaaggucgugcugugaggacuaguuauaagacugacuagcccgaugggccucccaacgggcccuccuccccuccuugcaccgagauuaauaaaaaaaaaaaaaaaaaaaaaaaaaaaaaaaaaaaaaaaaaaaaaaaaaaaaaaaaaaaaaaaaaaaaaaaaaaaaaaaaaaaaaaaaaaaaaaaaaaaa

SEQ ID NO: 22019 - RNA, 1950 nt, Artificial Sequence
  mRNA product Design i-3 (A100) comprising derived and/or modified sequence from LASV(AV;Clade V)__CCA30315__SP-IgE_NP(2-569) (opt5)
aggagaaagcuuaccauggacuggaccuggauccuguuccucguggccgcugccacaagaguccacagcagcgccuccaaggaggugaaaucuuuccuguggacccagagccucagacgggaacuguccggcuacugcucuaacaucaaacuucaagucguuaaggacgcucaggcccugcuccacgggcuggauuuuagcgagguguccaaugugcagcgccuuaugagaaagcagcggcgcgacgauucugaccugaaaagacuccgggaucugaaccaagcggucaauaaccugguggaacucaagagcacacagcagaaguccguucugcgcgugggaacgcuuagcucugacgaucugcucacccuggcugccgaccuugagaaacugaaguccaaagucacaagaaccgaacggccccucagcucuggcguguauauggggaaucuguccagccagcaacuggaucagcgcagagcccuccugaaccuuauuggaaugacaaauggcucucaggggucccaggcuggacgggacggcguugugcgcgucugggaugugaagaacgccgagcugcucaauaaccaauucggcaccaugccuagccugacacuugcuugucugaccaaacagggacagguggaccucaaugaugucguucaagcccugacggaccuggggcucaucuacaccgcgaaguauccgaacacauccgaccuggauagacuuacccagucucaucccauucugaauaugaucgacacaaagaaaagcucccucaacauuagcggcuacaauuuuucucugggggccgcugugaaggccggagcuugcaugcuugauggcgggaacaugcuggagaccaucaaaguguccccucagagcauggacggaauccucaagucuauucugaaagucaagcgggcccugggcauguucgugagcgauacgcccggcgaacgcaacccuuaugagaauauccucuacaaaauuugucuguccggggacggauggcccuauaucgcgucuagaacaagcauuguuggccgggccugggaaaacaccguggucgaucuugagacagacgggaagccucagaagaucggauccggcaauagcaacaaaucucugcaauccgcuggguuuagcgccggacucaccuacucucagcugaugacccugaaggaugcuaugcuucagcucgacccgaaugccaaaacauggauggauauugagggcagacccgaagacccuguggagguugcccuguaccagcccaucuccggcugcuauauccacuucuuucgcgaaccuacggaccugaagcaauucaaacaggaugcuaaguacagccaugggauugacaucgcggaucucuuugccgcucagcccggacugaccuccgccgugauugaggcccuuccgcggaacauggucaucacaugucagggcucugaagacauuaagaaacugcucgagagccaagggagaaaggauaucaaacugaucgacauugcucuguccaagaucgauucucgcaaauucgagaaugccgugugggaccaguauaaggaucuuugccacaugcauaccggagucgugguugaaaagaaaaagcggggcgggaaagaggaaauuacaccucacugugcgcucauggacugcaucauguuugaugcugccgugagcggcggacugaacacccugguccucagagccgugcugccccgcgacaugguuuuccggacguccacaccuagagugguccuuugaggacuaguuauaagacugacuagcccgaugggccucccaacgggcccuccuccccuccuugcaccgagauuaauaaaaaaaaaaaaaaaaaaaaaaaaaaaaaaaaaaaaaaaaaaaaaaaaaaaaaaaaaaaaaaaaaaaaaaaaaaaaaaaaaaaaaaaaaaaaaaaaaaaa

SEQ ID NO: 22020 - RNA, 1950 nt, Artificial Sequence
  mRNA product Design i-3 (A100) comprising derived and/or modified sequence from LASV(Togo/2016/7082;Clade VI)__AMR44578__SP-IgE_NP(2-569) (opt5)
aggagaaagcuuaccauggacuggaccuggauccuguuccucguggccgcugccacaagaguccacagcagcaacuccaaggaggugaaaucuuuccuguggacccagagccucagacgggaacuguccggcuacugcucuaauaucaaacuucaagucguuaaagacgcccaggcucugcuccacgggcuggauuuuagcgagguguccaacgugcagcgccuuaugagaaagcagaaacgggacgauggagaccugaagcgccucagagaucugaaucaagccgucaacaaucugguggaacucaagucuguucagcagaaaagcauucugcgggugggcacacuuacguccgacgaucugcucacccuggcggcugaccuugagaagcugaaaagcaaggucacacgcaccgaaagaccccucucuuccgggguguauaugggaaaccugagcucucagcaacuggaucagcggcgcgcccuccuguccaugaucggcaugagcgggggaaaucagaacucucagccuaaaggcgacggcguugugagagucugggaugugaagaaugccgaccuucugaacaaucaauucgggacaaugccgucccucacccuggcuugucuuacaaagcagggacagguggaucugaacgacgccguccaagcucucaccgaccugggccugauuuacacggccaaauaucccaauagcuccgaucucgaccggcugucucagagccauccuauccuuaacaugauugauaccaagaaauccagccugaauaucucuggguacaacuuuucccucggagcggccaucaagacaggcgcuugcaugcuggacgggggaaacaugcuugagaccauuaaaguuacaccccagaccauggauggcauccucaagagcauucugaaagugaagcgcucucugggcauguucaucagcgacacgccuggggagagaaaucccuaugaaaacauucuguacaagaucugucucuccggagauggcuggccuuauauugccucucggacagcuaucaucgggcgcgccugggagaauaccguggucgaccuggaaagcgauuccaaaccgcagaagauuggaagcaacggcucuaauaaaucccuucaaagcgcgggguuugcccccggacugacauacucucagcucaugacccugaaggacuccaugcugcagcuugauccuaacgcuaaaaccuggaucgacauugagggcagacccgaggacccuguggaaguugcccucuuccagcccaucagcggcugcuacauucacuuuuuccgggagccgacagaucugaagcaauuuaagcaggacgcuaaauauucccaugggaucgaugugacggaccuguucgccgcccagccuggacucaccucugcugucaucgaagcgcugcccagaaauauggugcuuacaugucagggcagcgaugacauuaagaaacugcucgauucccaagggcgccgggacaucaagcugauugauguuucucugaacaaaaucgacagcagaaaguuugagaaugccgugugggaucaguacaaggaccuuugccacaugcauaccggagucguggucgaaaagaagaaaaagggcgggaaagaggagauuacaccucacugugcucuccuggauugcaucauguucgacgccgccguguccggcggacugaacgcuaccguucuccgcgccgugcugccccgggacauggucuuuagaacgagcucucccaaggugguucuuugaggacuaguuauaagacugacuagcccgaugggccucccaacgggcccuccuccccuccuugcaccgagauuaauaaaaaaaaaaaaaaaaaaaaaaaaaaaaaaaaaaaaaaaaaaaaaaaaaaaaaaaaaaaaaaaaaaaaaaaaaaaaaaaaaaaaaaaaaaaaaaaaaaaa

SEQ ID NO: 22021 - RNA, 1950 nt, Artificial Sequence
  mRNA product Design i-3 (A100) comprising derived and/or modified sequence from LASV(KAK-428;Clade n.d. (VII))__ANH09741__SP-IgE_NP(2-569) (opt5)
aggagaaagcuuaccauggacuggaccuggauccuguuccucguggccgcugccacaagaguccacagcagcaacuccaaggaggugaaaucuuuccuguggacccagagccucagacgggaacuguccggcuacugcacaaauaucaaacuucaagucguuaaggacgcccaggcucugcuccacgggcuggauuuuucugaggugagcaacgugcagcgccuuaugagaaagcagaaacgggacgauaaugaccugaagcgccucagagaucugaaccaagccgucaauaaccugguggaacucaaguccguucagcagaaaucugugcugaaggucggaacgcuuaauagcgacgaucugcucacccuggcggcugaccuugagaaacugaaguccaaagugguucggacagaacgcccccucagcucuggcguguauauggggaaccuguccagccagcaacuggaucagagacgggcccuccugaauaugauuggaauggccggcgggucucagggaaaccagccuucccgcgacggcgucgugagagugugggaugucaagaaugcugaccuucugaacaaucaauucggcaccaugccgagccucacacuggccugucuuaccaagcaggggcagguugaucugaacgacguggugcucgcucugacagaccugggacucaucuacaccgccaaauaucccaauucuuccgaucuggaccggcuuagccaaaaccauccuguccugaacaugauugaugugaauaaguccucucucaacaucagcggcuacaauuuuucccugggggcggccguuaaagcuggagccugcaugcuugacggcgggaacaugcuggagacgauuaagaucagcccccagaccguggauggaauccucaaaucuauucugaaggucaaacgcgcucugggcauguucguguccgacacaccuggcgagagaaaucccuaugaaaacauccucuacaagguuugucugagcgggaauggauggccuuauauugccucucggaccagcaucgugggccgcgcgugggagaacacagucguggaucuugaauccaauaagaaccagccgaaagucgggaauaacggaucuaauaagaugcugcagagcuccggcuuugccaccgggcucacguacagccaacugaugacacugagagacucuaugcuucagcucgaucccaccgcuaaaacauggauugacaucgagggacggccugaggaucccguggaacuggcccuguuccagccuuccagcggcugcuacauucacuuuuucagagagcccaccgaccucaagcaguuuaaacaagacgcuaaguauucucauggcaucgauguuaacgaccuguucuccgcccagccggggcuuaccagcgccgugcuggaagcucucccucgcaauaugguccugacaugucagggauccgaugacauccggaagcugcuugauucucaggacagaaaagauauuaagcucaucgacauuagccuguccaaagcggaugcccgcaaguuugagaacgacgugugggaucaauucaaagaccugugccacaugcauacgggcaucguuguggaaaagaagaaaaagggagggaaacaggagaugacaccccacugugcucuccuggauugcauuauguuugacgccgccgucucuggcgggcuuaacgugccuacccugcgggcugugcuccccaccgacaugguuuucagaacaaucaccacgaaggucgugcugugaggacuaguuauaagacugacuagcccgaugggccucccaacgggcccuccuccccuccuugcaccgagauuaauaaaaaaaaaaaaaaaaaaaaaaaaaaaaaaaaaaaaaaaaaaaaaaaaaaaaaaaaaaaaaaaaaaaaaaaaaaaaaaaaaaaaaaaaaaaaaaaaaaaa

SEQ ID NO: 22022 - RNA, 1950 nt, Artificial Sequence; identical to SEQ ID NO: 22016
  mRNA product Design i-3 (A100) comprising derived and/or modified sequence from LASV(Pinneo-NIG-1969;Clade I)__AIT17837__SP-IgE_NP(2-569) (opt5)

SEQ ID NO: 22023 - RNA, 1950 nt, Artificial Sequence
  mRNA product Design i-3 (A100) comprising derived and/or modified sequence from LASV(ISTH0009-NIG-2011;Clade II)__AIT17405__SP-IgE_NP(2-569) (opt5)
aggagaaagcuuaccauggacuggaccuggauccuguuccucguggccgcugccacaagaguccacagcagcguguccaaggaggucaaaucuuuccuguggacccagagccucagacgggaacuguccggcuacugcucuaacaucaaacuucaaguugugaaggacgcccaggcucugcuccacgggcuggauuuuagcgagguguccaauguccagcgccuuaugagaaagcagaaacgggacgauucugaccugaagcgccucagagaucugaaccaagccgugaauaaccugguugaacucaagagcacacagcagaaauccauucugcgggugggaacgcuuaccagcgacgaucugcucacacuggcggcugaccuugagaagcugaaaucuaaggucauccgcaccgaaagaccccucuccagcggcguguauauggggaaucugucuacacagcaacuggagcagcggcgcgcccuccugaacaugauuggaaugguuggcggggcccagggaacccagccuggcagagauggcgugguccgggugugggacgugaaaaauccggaucuucugaacaaucaauucgggacaaugcccucccucacccuggcuugucuuacgaagcagggacaggucgaccugaacgaugccguucucgcucugaccgaccugggccucaucuacacagccaaguauccuaauagcucugaccuggaucgccuuucccaaagccaucccauucugaacaugguggacaucaaaaaguccucucucaauaucagcggguacaacuuuucccugggagcggccgugaaagcuggcgccugcaugcuugaugggggaaauaugcuggagaccauuaaggucacaccucagaccauggacggcauccucaaaagcauucugaaggugaaaagaucucugggcauguucguuuccgauacgcccggggaacggaacccuuaugagaacauccucuacaagauuugucugagcggagacggcuggccguauaucgcuucucgcacaagcauuguggggagagccugggaaaauaccacagucgaucuugaguccgacggaaagccccagaaagugggcucugcggggagcaacaagucccugcagagcgccggauuuccuaccggccucaccuacucucaacugaugacacugaaagauuccaugaugcagcuugaccccagcgcuaagacguggaucgauaucgagggccggccugaagaccccguugagauugcccucuaccagccgaugucugggugcuauauccacuucuuuagagaaccuaccgaccugaaacaguucaagcaagaugcuaaguacucccauggaauugacguggccgaucuguuucccgcccagccuggccucacaagcgcugucaucgaggcgcugccccgcaauauggugcuuaccugucagggguccgacgauauuaaacggcugcucgacucucagggaagacgcgauaucaagcugaucgacauugcccugagcaaagcugauucccggagauucgaaaacgccgucugggaccaaugcaaggaucuuugucacaugcauacaggcgugguuguggagaaaaagaagcgcgggggcaaagaggaaaucacgccccacugcgcccucauggacuguauuauguaugaugcugccgucucuggaggccugaauaucccugugcugcgggcgguucucccgagagacaugguguuucgcaccagcucccccaaggucgugcugugaggacuaguuauaagacugacuagcccgaugggccucccaacgggcccuccuccccuccuugcaccgagauuaauaaaaaaaaaaaaaaaaaaaaaaaaaaaaaaaaaaaaaaaaaaaaaaaaaaaaaaaaaaaaaaaaaaaaaaaaaaaaaaaaaaaaaaaaaaaaaaaaaaaa

SEQ ID NO: 22024 - RNA, 1950 nt, Artificial Sequence
  mRNA product Design i-3 (A100) comprising derived and/or modified sequence from LASV(ISTH2010-NIG-2012;Clade II)__AIT17483__SP-IgE_NP(2-569) (opt5)
aggagaaagcuuaccauggacuggaccuggauccuguuccucguggccgcugccacaagaguccacagcagcgccuccaaggaggugaaaucuuuccuguggacccagagccucagacgggaacuguccggcuacugcucuaacaucaaacuucaagucguuaaggacgcucaggcccugcuccacgggcuggauuuuagcgagguguccaaugugcagcgccuuaugagaaagcagaaacgggacgauucugaccugaagcgccucagagaucugaaccaagcggucaauaaccugguggaacucaagagcacacagcagaaauccauucugcggguuggaacgcuuaccagcgacgaucugcucacacuggcugccgaccuugagaagcugaaaucuaaggugauccgcaccgaaagaccccucuccagcggcgucuauauggggaaucugucuacacagcaacuggagcagcggcgcgcccuccugaaccuuauuggaauggugggcggggcucagggaacccagccuggcagagauggcguugugcgggucugggacgugaaaaauccggaucugcucaacaaucaauucgggacaaugcccucccugacccuugccugucugacgaagcagggacagguggaccucaacgaugcuguccuggcccugaccgaccucggccugaucuacacagcgaaguauccuaauagcucugaccuugaucgccugucccaaagccaucccauucucaacaugguugacaccaaaaaguccucucugaauaucagcggguuuaacuucucccuuggagccgcugugaaagccggcgcuugcaugcuggaugggggaaauaugcucgagacaaucaaggugaccccucagacgauggacggcauucugaaaagcauccugaaggucaaaaagucucucggcauguuuguguccgauacacccggggaaagaaacccuuacgagaacauucuguauaagaucugucuuagcggagacggcuggccguacauugccucucggaccagcaucguugggcgcgcgugggaaaauacaaccguggaucuggaguccgacggaaaaccccacaaggucggcaccgccgggucuaacaaaagccuccaguccgcuggauucccuacaggccugacguauagccagcugaugacccuuaaggauucuaugaugcaacucgaccccuccgccaaaacauggauugauaucgagggcagaccugaagaccccguggagaucgcucuguaccagccgaugagcgggugcuacauucacuuuuuccgggaaccuaccgaccugaagcaguuuaagcaggaugccaaauauucucauggaaucgacguugccgaucucuuccccgcucaaccuggccugacauccgcggugauugaggcccuucccagaaauaugguccugaccugucaggggagcgacgauaucaagcgccuccuggacucccagggacggagagauauuaaacugaucgacaucgcucuuucuaaggccgauagccgccgguuugaaaacgccgugugggaccagugcaaagaucucugucauaugcacacgggcgucgugguugagaagaagaaaagagggggcaaggaggaaauuacaccccacugcgcucugauggacuguaucauguacgaugccgcgguguccggaggccugaauauuccuguccuccgcgcugugcugccgcgggacaugguuuucagaaccucuagccccaaagugguccuuugaggacuaguuauaagacugacuagcccgaugggccucccaacgggcccuccuccccuccuugcaccgagauuaauaaaaaaaaaaaaaaaaaaaaaaaaaaaaaaaaaaaaaaaaaaaaaaaaaaaaaaaaaaaaaaaaaaaaaaaaaaaaaaaaaaaaaaaaaaaaaaaaaaaa

SEQ ID NO: 22025 - RNA, 1950 nt, Artificial Sequence
  mRNA product Design i-3 (A100) comprising derived and/or modified sequence from LASV(Lassa virus/H.sapiens-wt/NGA/2015/ISTH_0543;Clade II)__AVO03640__SP-IgE_NP(2-569) (opt5)
aggagaaagcuuaccauggacuggaccuggauccuguuccucguggccgcugccacaagaguccacagcagcgccuccaaggaggugaaaucuuuccuguggacccagagccucagacgggaacuguccggcuacugcucuaacaucaaacuucaagucguuaaggacgcucaggcccugcuccacgggcuggauuuuagcgagguguccaaugugcagcgccuuaugagaaagcagaaacgggacgauucugaccugaagcgccucagagaucugaaccaagcggucaauaaccugguggaacucaagagcacacagcagaaauccauucugcggguuggaacgcuuaccagcgacgaucugcucacacuggcugccgaccuugagaagcugaaaucuaaggugauccgcaccgaaagaccccucuccagcggcgucuauauggggaaucugucuacacagcaacuggagcagcggcgcgcccuccugaacaugauuggaauggugggcggggcucagggaacccagccuggcagagauggcguugugcgggucugggacgugaaaaauccggaucuucugaacaaucaauucgggacaaugcccucccucacccuggccugucuuacgaagcagggacagguggaccugaacgaugcuguccucgcccugaccgaccugggccucaucuacacagcgaaguauccuaauagcucugaccuggaucgccuuucccaaagccaucccauucugaacaugguugacaccaaaaaguccucucucaauaucagcggguacaacuuuucccugggagccgcugugaaagccggcgcuugcaugcuugaugggggaaauaugcuggagacaaucaaggugaccccucagacgauggacggcauucucaaaagcauccugaaggucaaaaagucucugggcauguucguguccgauacacccggggaaagaaacccuuaugagaacauucucuacaagaucugucugagcggagacggcuggccguauauugccucucggaccagcaucguugggcgcgcgugggaaaauacaaccguggaucuugaguccgacggaaaaccccagaaggucggcucugccgggagcaacaaaucccugcagagcgcuggauuuccuaccggccucacauacucucaacugaugacgcugaaggauuccaugaugcagcuugaccccagcgccaaaaccuggauugauaucgagggcagaccugaagaccccguggagaucgcucucuaccagccgaugucugggugcuauauucacuucuuucgggaaccuacagaccugaagcaguucaagcaagaugccaaauacucccauggaaucgacguugccgaucuguuucccgcucagccuggccucaccagcgcggugauugaggcccugcccagaaauaugguccuuacaugucagggguccgacgauaucaagcgccugcucgacucucagggacggaaagauauuaagcugaucgacaucgcucugagcaaagccgauuccagacgcuucgaaaacgccgugugggaccaaugcaaggaucuuugucacaugcauaccggcgucgugguugagaagaaaaagagagggggcaaagaggaaauuacgccccacugcgcucucauggacuguaucauguaugaugccgcggugucuggaggccugaauauuccuguccugcgggcugugcucccgcgcgacaugguuuuucggacaagcucccccaaggugguccugugaggacuaguuauaagacugacuagcccgaugggccucccaacgggcccuccuccccuccuugcaccgagauuaauaaaaaaaaaaaaaaaaaaaaaaaaaaaaaaaaaaaaaaaaaaaaaaaaaaaaaaaaaaaaaaaaaaaaaaaaaaaaaaaaaaaaaaaaaaaaaaaaaaaa

SEQ ID NO: 22026 - RNA, 1950 nt, Artificial Sequence
  mRNA product Design i-3 (A100) comprising derived and/or modified sequence from LASV(Lassa virus/H.sapiens-wt/NGA/2016/ISTH_0009;Clade II)__AVO03572__SP-IgE_NP(2-569) (opt5)
aggagaaagcuuaccauggacuggaccuggauccuguuccucguggccgcugccacaagaguccacagcagcgccuccaaggaggugaaaucuuuccuguggacccagagccucagacgggaacuguccggcuacugcucuaacaucaaacuucaagucguuaaggacgcucaggcccugcuccacgggcuggauuuuagcgagguguccaaugugcagcgccuuaugagaaagcagaaacgggacgauucugaccugaagcgccucagagaucugaaccaagcggucaauaaccugguggaacucaagagcacacagcagaaauccauucugcggguuggaacgcuuaccagcgacgaucugcucacacuggcugccgaccuugagaagcugaaaucuaaggugauccgcaccgaaagaccccucuccagcggcgucuauauggggaaucugucuacacagcaacuggagcagcggcgcgcccuccugaacaugauuggaauggugggcggggcucagggaacccagccuggcagagauggcguugugcgggucugggacgugaaaaauccggaucuucugaacaaucaauucgggacaaugcccucccucacccuggccugucuuacgaagcagggacagguggaccugaacgaugcuguccucgcccugaccgaccugggccucaucuacacagcgaaguauccuaauagcucugaccuggaucgccuuucccaaagccaucccauucugaacaugguugacaccaaaaaguccucucucaauaucagcggguacaacuuuucccugggagccgcugugaaagccggcgcuugcaugcuugaugggggaaauaugcuggagacaaucaaggugaccccucagacgauggacggcauucucaaaagcauccugaaggucaaaaagucucugggcauguucguguccgauacacccggggaaagaaacccuuaugagaacauucucuacaagaucugucugagcggagacggcuggccguauauugccucucggaccagcaucguugggcgcgcgugggaaaauacaaccguggaucuugaguccgacggaaaaccccagaaggucggcucugccgggagcaacaaaucccugcagagcgcuggauuuccuaccggccucacauacucucaacugaugacgcugaaggauuccaugaugcagcuugaccccagcgccaaaaccuggauugauaucgagggcagaccugaagaccccguggagaucgcucucuaccagccgaugucugggugcuauauucacuucuuucgggaaccuacagaccugaagcaguucaagcaagaugccaaauacucccauggaaucgacguugccgaucuguuucccgcucagccuggccucaccagcgcggugauugaggcccugcccagaaauaugguccuuacaugucagggguccgacgauaucaagcgccugcucgacucucagggacggagagauauuaaacugaucgacaucgcucugagcaaggccgauucccgccgguucgaaaacgccgugugggaccaaugcaaagaucuuugucacaugcauaccggcgucgugguugagaagaagaaaagagggggcaaggaggaaauuacgccccacugcgcucucauggacuguaucauguaugaugccgcggugucuggaggccugaauauuccuguccugcgcgcugugcucccgcgggacaugguuuuuagaacaagcucccccaaagugguccugugaggacuaguuauaagacugacuagcccgaugggccucccaacgggcccuccuccccuccuugcaccgagauuaauaaaaaaaaaaaaaaaaaaaaaaaaaaaaaaaaaaaaaaaaaaaaaaaaaaaaaaaaaaaaaaaaaaaaaaaaaaaaaaaaaaaaaaaaaaaaaaaaaaaa

SEQ ID NO: 22027 - RNA, 1950 nt, Artificial Sequence
  mRNA product Design i-3 (A100) comprising derived and/or modified sequence from LASV(Lassa virus/H.sapiens-wt/NGA/2016/ISTH_0017;Clade II)__AVO03568__SP-IgE_NP(2-569) (opt5)
aggagaaagcuuaccauggacuggaccuggauccuguuccucguggccgcugccacaagaguccacagcagcgccuccaaggaggugaaaucuuuccuguggacccagagccucagacgggaacuguccggcuacugcucuagcaucaaacuucaagucguuaaggacgcucaggcccugcuccacgggcuggauuuuuccgaggugucuaacgugcagcgccuuaugagaaagcagaaacgggacgauagcgaccugaagcgccucagagaucugaaucaagcggucaacaaucugguggaacucaaguccacacagcagaaaagcauucugcggguuggaacgcuuaccucugacgaucugcucacacuggcugccgaccuugagaagcugaaauccaaggugauccgcaccgaaagaccccucagcucuggcgucuauauggggaaccuguccacacagcaacuggagcagcggcgcgcccuccugaauaugauuggaauggcuggcggggcccagggaacccagccuggcagagauggcgugguucgggugugggacgucaaaaacccggaucuucugaauaaccaauucgggacaaugcccagccucacccuggcuugucuuacgaagcagggacagguggaccugaaugaugccgugcucgcgcugaccgaccugggccucaucuacacagccaaguauccuaacucuuccgaccuggaucgccuuagccaaucccaucccauucugaauauggucgacaccaaaaagucuagccucaacaucuccggguacaauuuuagccugggagcugccguuaaagcuggcgccugcaugcuugaugggggaaacaugcuggagacaaucaaggugaccccucagacgauggacggcauucucaaaucuauccugaaggugaaaagaucccugggcauguucgucagcgaugcgcccggggaacggaauccuuaugagaacauucucuacaagaucugucugucuggagacggcuggccguauauugccagccgcacauccaucguggggagagcuugggaaaacaccacaguugaucuugagucugacggaaagccccagaaagugggcgccaccgggagcaauaagucccugcagagcgcuggauuuccuaccggccucacauacucucaacugaugacgcugaaagauuccaugaugcagcuugaccccagcgccaagaccuggauugauaucgagggccggccugaagaccccgucgagguggcccucuaccagccgguuucugggugcuauauccacuucuuuagagaaccuacagaccugaaacaguucaagcaagaugcuaaguacucccauggaauugacguggcggaucuguuucccgcccagccuggccucaccagcgcugucaucgaggcccugccccgcaacauggugcuuacaugucagggguccgacgauauuaaaaagcugcucgacucucagggacggaaagauaucaagcugauugacaucgcccugagcaaagcugauuccagacgcuucgaaaaugccgucugggaccaaugcaaggaucuuugucacaugcauaccggcgugguuguggagaagaaaaagagagggggcaaagaggaaaucacgccccacugcgcgcucauggacuguauuauguaugaugcugccgucucuggaggccugaacaucccugugcugcgggccguucucccgcgcgacaugguguuucggacaagcucccccaaggucgugcugugaggacuaguuauaagacugacuagcccgaugggccucccaacgggcccuccuccccuccuugcaccgagauuaauaaaaaaaaaaaaaaaaaaaaaaaaaaaaaaaaaaaaaaaaaaaaaaaaaaaaaaaaaaaaaaaaaaaaaaaaaaaaaaaaaaaaaaaaaaaaaaaaaaaa

SEQ ID NO: 22028 - RNA, 1950 nt, Artificial Sequence
  mRNA product Design i-3 (A100) comprising derived and/or modified sequence from LASV(Lassa virus/H.sapiens-wt/NGA/2018/ISTH_0959;Clade II)__AVV65100__SP-IgE_NP(2-569) (opt5)
aggagaaagcuuaccauggacuggaccuggauccuguuccucguggccgcugccacaagaguccacagcagcgccuccaaggaggugaaaucuuuccuguggacccagagccucagacgggaacuguccggcuacugcucuaacaucaaacuucaagucguuaaggacgcucaggcccugcuccacgggcuggauuuuagcgagguguccaaugugcagcgccuuaugagaaagcagaaacgggacgauucugaccugaagcgccucagagaucugaaccaagcggucaauaaccugguggaacucaagagcacccagcagaaauccauucugcggguuggaacgcuuaccagcgacgaucugcucacacuggcugccgaccuugagaagcugaaaucuaaggugauccgcaccgaaagaccccucuccagcggcgucuauauggggaaucugucuacacagcaacuggagcagcggcgcgcccuccugaaccuuauuggaauggugggcggggcucagggaacccagccuggcagagauggcguugugcgggucugggacgugaaaaauccggaucugcucaacaaucaauucgggacaaugcccucccugacccuugccugucugacgaagcagggacagguggaccucaacgaugucguucuggcucugaccgaccucggccugaucuacacagccaaguauccuaauagcucugaccuugaucgccugucccaaagccaucccauucucaacaugguggacaccaaaaaguccucucugaauaucagcggguuuaacuucucccuuggagcggccgugaaagcuggcgccugcaugcuggaugggggaaauaugcucgagacaaucaaggucaccccucagacgauggacggcauucugaaaagcauccugaaggugaaaaagucucucggcauguuuguuuccgauacacccggggaaagaaacccuuacgagaacauucuguauaagaucugucuuagcggagacggcuggccguacauugcuucucggaccagcaucguggggcgcgccugggaaaauacaaccgucgaucuggaguccgacggaaaaccccacaaggugggcaccgcggggucuaacaaaagccuccaguccgccggauucccuacaggccugacguauagccagcugaugacccuuaaggauucuaugaugcaacucgaccccuccgcuaaaacauggauugauaucgagggcagaccugaagaccccguugagaucgcccuguaccagccgaugagcgggugcuacauucacuuuuuccgggaaccuaccgaccugaagcaguuuaagcaggaugcuaaauauucucauggaaucgacguggccgaucucuuccccgcccaaccuggccugacauccgcugucauugaggcgcuucccagaaauauggugcugaccugucaggggagcgacgauaucaagcgccuccuggacucccagggacggaaagauauuaagcugaucgacaucgcccuuucuaaaacggauagcagacgcuuugaaaacgcugucugggaccagugcaaggaucucugucauaugcacacaggcgugguuguggagaagaaaaagagagggggcaaagaggaaauuacaccccacugcgcccugauggacuguaucauguacgaugccgcugucuccggaggccugaauauuccugugcuccgggccguucugccgcgcgacaugguguuccggaccucuagccccaaggucgugcuuugaggacuaguuauaagacugacuagcccgaugggccucccaacgggcccuccuccccuccuugcaccgagauuaauaaaaaaaaaaaaaaaaaaaaaaaaaaaaaaaaaaaaaaaaaaaaaaaaaaaaaaaaaaaaaaaaaaaaaaaaaaaaaaaaaaaaaaaaaaaaaaaaaaaa

SEQ ID NO: 22029 - RNA, 1950 nt, Artificial Sequence
  mRNA product Design i-3 (A100) comprising derived and/or modified sequence from LASV(LASV003-NIG-2008;Clade II)__AIT17581__SP-IgE_NP(2-569) (opt5)
aggagaaagcuuaccauggacuggaccuggauccuguuccucguggccgcugccacaagaguccacagcagcgccuccaaggaggugaaaucuuuccuguggacccagagccucagacgggaacuguccggcuacugcucuagcaucaaacuucaagucguuaaggacgcucaggcccugcuccacgggcuggauuuuuccgaggugucuaacgugcagcgccuuaugagaaagcagaaacgggacgauagcgaccugaagcgccucagagaucugaaucaagcggucaacaaucugguggaacucaaguccacccagcagaaaagcguucugcgggugggaacgcuuaccucugacgaucugcucacacuggcugccgaccuugagaagcugaaauccaaggucauucgcaccgaaagaccccucagcucuggcguguauauggggaaccuguccgcccagcaacuggagcagcggcgcacacuccugaauaugaucggaaugguuggcggggcucagggaacccagccuggcagagauggcgugguccgggugugggacgugaaaaacccggaucuucugaauaaccaauucgggacaaugcccagccucacccuggccugucuuacgaagcagggacaggucgaccugaaugauguugugcucgcucugaccgaccugggccucauuuacacagccaaguauccuaacucuuccgaccuggaucgccuuagccaaucccaucccauccugucuaugguggacaccaaaaagagcucccucaauauuagcggguacaacuuuucucugggagcggccgucaaagcuggcgccugcaugcuugaugggggaaauaugcuggagacaaucaaggugaccccucagacgauggacggcauccucaaauccauucugaagguuaaaaagagccugggcauguucgugucugauacacccggggaaagaaacccuuaugagaauauccucuacaagauuugucugagcggagacggcuggccguauaucgcuucccggaccucuauugucgggcgcgccugggaaaacacaaccguggaucuugagagcgacggaaaaccccagaagguuggcaccgcgggguccaacaaaagccugcagucugccggauuuccuacaggccucacguacucccaacugaugacccugaaggauagcaugaugcagcuugaccccucugcuaaaacauggaucgauauugagggcagaccugaagaccccguggagaucgcccucuaccagccgauguccgggugcuauauccacuucuuucgggaaccuaccgaccugaagcaguucaagcaagaugcuaaauacagccauggaauugacgucacagaucuguuucccgcccagccuggccucaccuccgccgugaucgaggcucugcccagaaauaugguccuuacgugucaggggucugacgauauuaagcgccugcucgacagccagggacggagagauaucaaacugauugacaucgcgcuguccaaggccgauucucgccgguucgaaaacgcugugugggaccaaugcaaagaucuuugucacaugcauacaggcguuguggucgagaagaagaaaagagggggcaaggaggaaaucacaccccacugcgcccucauggacuguauuauguaugaugccgcugugagcggaggccugaauaucccuguucugcgcgccgugcucccgcgggacauggucuuuagaaccuccagccccaaaguggugcugugaggacuaguuauaagacugacuagcccgaugggccucccaacgggcccuccuccccuccuugcaccgagauuaauaaaaaaaaaaaaaaaaaaaaaaaaaaaaaaaaaaaaaaaaaaaaaaaaaaaaaaaaaaaaaaaaaaaaaaaaaaaaaaaaaaaaaaaaaaaaaaaaaaaa

SEQ ID NO: 22030 - RNA, 1950 nt, Artificial Sequence
  mRNA product Design i-3 (A100) comprising derived and/or modified sequence from LASV(LASV035-NIG-2009;Clade II)__AIT17589__SP-IgE_NP(2-569) (opt5)
aggagaaagcuuaccauggacuggaccuggauccuguuccucguggccgcugccacaagaguccacagcagcgccuccaaggaggugaaaucuuuccuguggacccagagccucagacgggaacuguccggcuacugcucuagcaucaaacuucaagucguuaaagacgcucaggcccugcuccacgggcuggauuuuuccgaggugucuaacgugcagcgccuuaugagaaagcagaaacgggacgauagcgaccugaagcgccucagagaucugaaucaagcggucaacaaucugguggaacucaaguccacacagcagaaaagcauucugcggguuggaacgcuuaccucugacgaucugcucacacuggcugccgaccuugagaagcugaaauccaaggugauccgcaccgaaagaccccucagcucuggcgucuauauggggaaccuguccgcccagcaacuggagcagcggcgcgcucuccugaauaugauuggaauggugggcggggcccagggaacacagccuggcagagauggcguugugcgggucugggacgugaaaaacccggaucuucugaauaaccaauucgggaccaugcccagccucacacuggcuugucuuaccaagcagggacagguggaccugaaugaugccguccucgcgcugacggaccugggccucaucuacaccgccaaguauccuaacucuuccgaccuggaucgccuuagccaaucccaucccauucugaauaugguugacacaaagaagucuagccucaacaucuccggguacaauuuuagccugggagcugccgugaaagcuggcgccugcaugcuugaugggggaaacaugcuggagaccaucaaggugacaccucagaccauggacggcauucucaaaucuauccugaaggucaaaagaucccugggcauguucgugagcgauacgcccggggaacggaauccuuaugagaacauucucuacaagaucugucugucuggagacggcuggccguauauugcgagccgcacauccaucguugggagagccugggaaaacaccacaguggaucuugagucugacggaaagccccagaaagucggcaccaccgggagcaauaagucccugcagagcgcuggauuuccuacaggccucacguacucucaacugaugacccugaaagauuccaugaugcagcuugaccccagcgccaagacauggauugauaucgagggccggccugaagaccccguggagaucgcucucuaccagccgaugucugggugcuauauucacuucuuuagagaaccuaccgaccugaaacaguucaagcaagaugccaaguacucccauggaaucgacguugccgaucuguuucccgcucagccuggccucacaagcgcggugauugaggcccugccccgcaacaugguccuuaccugucagggguccgacgauaucaaaaagcugcucgacucucagggacggagagauauuaaacugaucgacaucgcucugagcaaggccgauucccgcaaauucgaaaaugccgugugggaccaaugcaaggaucuuugucacaugcauacgggcgucgugguugagaagaaaaagagagggggcaaagaggaaauuacaccccacugcgcucucauggacuguaucauguaugaugccgcggugucuggaggccugaacauuccuguccugcgggcugugcucccgcgcgacaugguuuuucggaccagcucccccaaggugguccugugaggacuaguuauaagacugacuagcccgaugggccucccaacgggcccuccuccccuccuugcaccgagauuaauaaaaaaaaaaaaaaaaaaaaaaaaaaaaaaaaaaaaaaaaaaaaaaaaaaaaaaaaaaaaaaaaaaaaaaaaaaaaaaaaaaaaaaaaaaaaaaaaaaaa

SEQ ID NO: 22031 - RNA, 1950 nt, Artificial Sequence
  mRNA product Design i-3 (A100) comprising derived and/or modified sequence from LASV(LASV1000-NIG-2009;Clade II)__AIT17783__SP-IgE_NP(2-569) (opt5)
aggagaaagcuuaccauggacuggaccuggauccuguuccucguggccgcugccacaagaguccacagcagcgccuccaaggaggugaaaucuuuccuguggacccagagccucagacgggaacuguccggcuacugcucuaacaucaaacuucaagucguuaaggacgcucaggcccugcuccacgggcuggauuuuagcgagguguccaaugugcagcgccuuaugagaaagcagaaacgggacgauucugaccugaagcgccucagagaucugaaccaagcggucaauaaccugguggaacucaagagcacacagcagaaauccauucugcggguuggaacgcuuaccagcgacgaucugcucacacuggcugccgaccuugagaagcugaaaucuaaggugauccgcaccgaaagaccccucuccagcggcgucuauauggggaaucugucuacacagcaacuggagcagcggcgcgcccuccugaacaugauuggaauggugggcggggcucagggaacccagccuggcagagauggcguugugcgggucugggacgugaaaaauccggaucuucugaacaaucaauucgggacaaugcccucccucacccuggccugucuuacgaagcagggacagguggaccugaacgaugucguucucgcucugaccgaccugggccucaucuacacagccaaguauccuaauagcucugaccuggaucgccuuucccaaagccaucccauucugaacaugguggacaccaaaaaguccucucucaauaucagcggguacaacuuuucccugggagcggccgugaaagcuggcgccugcaugcuugaugggggaaauaugcuggagacaaucaaggucaccccucagacgauggacggcauucucaaaagcauccugaaggugaaaaagucucugggcauguucguuuccgauacacccggggaaagaaacccuuaugagaacauucucuacaagaucugucugagcggagacggcuggccguauauugcuucucggaccagcaucguggggcgcgccugggaaaauacaaccgucgaucuugaguccgacggaaaaccccagaaggugggcaccgcggggucuaacaaaagccugcaguccgccggauuuccuacaggccucacguacagccaacugaugacccugaaggauucuaugaugcagcuugaccccuccgcuaaaacauggauugauaucgagggcagaccugaagaccccguugagaucgcccucuaccagccggugagcgggugcuauauucacuucuuucgggaaccuaccgaccugaagcaguucaagcaagaugcuaaauacucucauggaaucgacgucgccgaucuguuucccgcccagccuggccucacauccgcugugauugaggcgcugcccagaaauaugguccuuaccugucaggggagcgacgauaucaagcgccugcucgacucccagggacggagagauauuaaacugaucgacaucgcccugucuaaggcugauagccgccgguucgaaaacgccgugugggaccaaugcaaagaucuuugucacaugcauacgggcguuguggucgagaagaagaaaagagggggcaaggaggaaauuacaccccacugcgcccucauggacuguaucauguaugaugcugccguguccggaggccugaauauuccuguucugcgcgcggugcucccgcgggacauggucuuuagaaccucuagccccaaaguggugcugugaggacuaguuauaagacugacuagcccgaugggccucccaacgggcccuccuccccuccuugcaccgagauuaauaaaaaaaaaaaaaaaaaaaaaaaaaaaaaaaaaaaaaaaaaaaaaaaaaaaaaaaaaaaaaaaaaaaaaaaaaaaaaaaaaaaaaaaaaaaaaaaaaaaa

SEQ ID NO: 22032 - RNA, 1950 nt, Artificial Sequence
  mRNA product Design i-3 (A100) comprising derived and/or modified sequence from LASV(LASV221-NIG-2010;Clade II)__AIT17625__SP-IgE_NP(2-569) (opt5)
aggagaaagcuuaccauggacuggaccuggauccuguuccucguggccgcugccacaagaguccacagcagcgccuccaaggaggugaaaucuuuccuguggacccagagccucagacgggaacuguccggcuacugcucuagcaucaaacuucaagucguuaaggacgcucaggcccugcuccacgggcuggauuuuuccgaggugucuaacgugcagcgccuuaugagaaagcagcggcgcgacgauagcgaccugaaaagacuccgggaucugaaucaagcggucaacaaucugguggaacucaaguccacacagcaaaagagcauucugcgcguuggaacgcuuaccucugacgaucugcucacacuggcugccgaccuugagaaacugaaguccaaagugaucagaaccgaacggccccucagcucuggcgucuauauggggaaccuguccacacagcagcuggagcagcgcagagcccuccugaauaugauuggaauggugggcggggcucagggaacccagccuggccgggauggcguugugcgcgucugggacgugaagaacccggaucuucugaauaaccaauucgggacaaugcccagccucacccuggccugucuuacgaaacagggacagguggaccugaaugaugcuguccucgcccugaccgaccugggccucaucuacacagcgaaguauccuaacucuuccgaccuggauagacuuagccaaucccaucccauucugaauaugguugacaccaagaaaucuagccucaacaucuccggguacaauuuuagccugggagccgcugugaaggccggcgcuugcaugcuugaugggggaaacaugcuggagacaaucaaagugaccccucagacggucgacggcauucucaagucuauccugaaagugaagcggucccugggcauguucguuagcgauacacccggggaacgcaauccuuaugagaacauucucuacaaaaucugucugucuggagacggcuggccguauauugccagcagaaccuccaucguggggcgggcgugggaaaacacaaccgucgaucuugagucugacggaaagccccagaaggugggcaccgccgggagcaauaaaucccugcagagcgcuggauuuccuacaggccucacguacucucaacugaugacccugaaggauuccaugaugcagcuugaccccagcgccaaaacauggauugauaucgagggcagaccugaagaccccguugagaucgcucucuaccagccgaugucugggugcuauauucacuucuuucgcgaaccuaccgaccugaagcaguucaaacaagaugccaaguacucccauggaaucgacguggccgaucuguuucccgcucagccuggccucacaagcgcggucauugaggcccugccccggaacauggugcuuaccugucagggguccgacgauaucaagagacugcucgacucucagggacgccgggauauuaaacugaucgacaucgcucugagcaaggccgauuccagaaaauucgaaaaugccgucugggaccaaugcaaggaucuuugucacaugcauacgggcgugguuguggagaaaaagaagcgcgggggcaaagaggaaauuacaccccacugcgcucucauggacuguaucauguaugaugccgcggucucuggaggccugaacauuccugugcugcgggcuguucucccgagagacaugguguuucgcaccagcucccccaaggucgugcugugaggacuaguuauaagacugacuagcccgaugggccucccaacgggcccuccuccccuccuugcaccgagauuaauaaaaaaaaaaaaaaaaaaaaaaaaaaaaaaaaaaaaaaaaaaaaaaaaaaaaaaaaaaaaaaaaaaaaaaaaaaaaaaaaaaaaaaaaaaaaaaaaaaaa

SEQ ID NO: 22033 - RNA, 1950 nt, Artificial Sequence
  mRNA product Design i-3 (A100) comprising derived and/or modified sequence from LASV(LASV237-NIG-2010;Clade II)__AIT17639__SP-IgE_NP(2-569) (opt5)
aggagaaagcuuaccauggacuggaccuggauccuguuccucguggccgcugccacaagaguccacagcagcgccuccaaggaggugaaaucuuuccuguggacccagagccucagacgggaacuguccggcuacugcucuaacaucaaacuucaagucguuaaggacgcucaggcccugcuccacgggcuggauuuuagcgagguguccaaugugcagcgccuuaugagaaagcagaaacgggacgauucugaccugaagcgccucagagaucugaaccaagcggucaauaaccugguggaacucaagagcacacagcagaaauccauucugcggguuggaacgcuuaccagcgacgaucugcucacacuggcugccgaccuugagaagcugaaaucuaaggugauccgcaccgaaagaccccucuccagcggcgucuauauggggaaucugucuacacagcaacuggagcagcggcgcgcccuccugaacaugauuggaauggugggcggggcucagggaacccagccuggcagagauggcguugugcgggucugggacgugaaaaauccggaucuucugaacaaucaauucgggacaaugcccucccucacccuggccugucuuacgaagcagggacagguggaccugaacgaugcuguccucgcccugaccgaccugggccucaucuacacagcgaaguauccuaauagcucugaccuggaucgccuuucccaaagccaucccauucugaacaugguugacaucaaaaaguccucucucaauaucagcggguacaacuuuucccugggagccgcugugaaagccggcgcuugcaugcuugaugggggaaauaugcuggagaccauuaaggugacaccucagaccauggacggcauccucaaaagcauucugaaggucaaaagaucucugggcauguucguguccgauacgcccggggaacggaacccuuaugagaacauccucuacaagauuugucugagcggagacggcuggccguauaucgccucucgcacaagcauuguugggagagcgugggaaaauaccacaguggaucuugaguccgacggaaagccccagaaagucggcucugccgggagcaacaagucccugcagagcgcuggauuuccuaccggccucaccuacucucaacugaugacacugaaagauuccaugaugcagcuugaccccagcgccaagacguggaucgauaucgagggccggccugaagaccccguggagauugcucucuaccagccgaugucugggugcuauauccacuucuuuagagaaccuaccgaccugaaacaguucaagcaagaugccaaguacucccauggaauugacguugccgaucuguuucccgcucagccuggccucacaagcgcggugaucgaggcccugccccgcaauaugguccuuaccugucagggguccgacgauauuaaacggcugcucgacucucagggaagacgcgauaucaagcugaucgacauugcucugagcaaagccgauucccggagauucgaaaacgccgugugggaccaaugcaaggaucuuugucacaugcauacaggcgucgugguugagaaaaagaagcgcgggggcaaagaggaaaucacgccccacugcgcucucauggacuguauuauguaugaugccgcggugucuggaggccugaauaucccuguccugcgggcugugcucccgagagacaugguuuuucgcaccagcucccccaaggugguccugugaggacuaguuauaagacugacuagcccgaugggccucccaacgggcccuccuccccuccuugcaccgagauuaauaaaaaaaaaaaaaaaaaaaaaaaaaaaaaaaaaaaaaaaaaaaaaaaaaaaaaaaaaaaaaaaaaaaaaaaaaaaaaaaaaaaaaaaaaaaaaaaaaaaa

SEQ ID NO: 22034 - RNA, 1950 nt, Artificial Sequence
  mRNA product Design i-3 (A100) comprising derived and/or modified sequence from LASV(LASV253-NIG-2011;Clade II)__AIT17671__SP-IgE_NP(2-569) (opt5)
aggagaaagcuuaccauggacuggaccuggauccuguuccucguggccgcugccacaagaguccacagcagcgccuccaaggaggugaaaucuuuccuguggacccagagccucagacgggaacuguccggcuacugcucuagcaucaaacuucaagucguuaaggacgcucaggcccugcuccacgggcuggauuuuuccgaggugucuaacgugcagcgccuuaugagaaagcagaaacgggacgauagcgaccugaagcgccucagagaucugaaucaagcggucaacaaucugguggaacucaaguccacccagcagaaaagcguucugcgggugggaacgcuuaccucugacgaucugcucacacuggcugccgaccuugagaagcugaaauccaaggucauucgcaccgaaagaccccucagcucuggcguguauauggggaaccuguccacacagcaacuggagcagcggcgcgcccuccugaauaugaucggaaugguuggcggggcucagggaacccagccuggcagagauggcgugguccgggugugggacgugaaaaacccggaucuucugaauaaccaauucgggacaaugcccagccucacccuggccugucuuacgaagcagggacaggucgaccugaaugauguugugcucgcucugaccgaccugggccucauuuacacagccaaguauccuaacucuuccgaccuggaucgccuuagccaaucccaucccauccugaauaugguggacaccaaaaagucuagccucaacauuuccggguacaauuuuagccugggagcggccgucaaagcuggcgccugcaugcuugaugggggaaacaugcuggagacaaucaaggugaccccucagacgauggacggcauccucaaaucuauucugaagguuaaaaagucccugggcauguucgugagcgauacacccggggaaagaaauccuuaugagaacauccucuacaagauuugucugucuggagacggcuggccguauaucgcuagccggaccuccauugucgggcgcgccugggaaaacacaaccguggaucuugagucugacggaaaaccccagaagguuggcaccgcggggagcaauaaaucccugcagagcgccggauuuccuacaggccucacguacucucaacugaugacccugaaggauuccaugaugcagcuugaccccagcgcuaaaacauggaucgauauugagggcagaccugaagaccccguggagaucgcccucuaccagccgaugucugggugcuauauccacuucuuucgggaaccuaccgaccugaagcaguucaagcaagaugcuaaauacucccauggaauugacgucacagaucuguuucccgcccagccuggccucaccagcgccgugaucgaggcucugcccagaaacaugguccuuacgugucagggguccgacgauauuaagcgccugcucgacucucagggacggagagauaucaaacugauugacaucgcgcugagcaaggccgauucccgccgguucgaaaaugcugugugggaccaaugcaaagaucuuugucacaugcauacaggcguuguggucgagaagaagaaaagagggggcaaggaggaaaucacaccccacugcgcccucauggacuguauuauguaugaugccgcugugucuggaggccugaacaucccuguucugcgcgccgugcucccgcgggacauggucuuuagaaccagcucccccaaaguggugcugugaggacuaguuauaagacugacuagcccgaugggccucccaacgggcccuccuccccuccuugcaccgagauuaauaaaaaaaaaaaaaaaaaaaaaaaaaaaaaaaaaaaaaaaaaaaaaaaaaaaaaaaaaaaaaaaaaaaaaaaaaaaaaaaaaaaaaaaaaaaaaaaaaaaa

SEQ ID NO: 22035 - RNA, 1950 nt, Artificial Sequence
  mRNA product Design i-3 (A100) comprising derived and/or modified sequence from LASV(LASV254-NIG-2011;Clade II)__AIT17675__SP-IgE_NP(2-569) (opt5)
aggagaaagcuuaccauggacuggaccuggauccuguuccucguggccgcugccacaagaguccacagcagcgccuccaaggaggugaaaucuuuccuguggacccagagccucagacgggaacuguccggcuacugcucuagcaucaaacuucaagucguuaaggacgcucaggcccugcuccacgggcuggauuuuuccgaggugucuaacgugcagcgccuuaugagaaagcagaaacgggacgauagcgaccugaagcgccucagagaucugaaucaagcggucaacaaucugguggaacucaaguccacacagcagaaaagcguucugcgggugggaacgcuuaccucugacgaucugcucacacuggcugccgaccuugagaagcugaaauccaaggucauucgcaccgaaagaccccucagcucuggcguguauauggggaaccuguccacacagcaacuggagcagcggcgcgcccuccugaauaugaucggaaugguuggcggggcucagggaacccagccuggcagagauggcgugguccgggugugggacgugaaaaacccggaucuucugaauaaccaauucgggacaaugcccagccucacccuggccugucuuacgaagcagggacaggucgaccugaaugaugcuguucucgcccugaccgaccugggccucauuuacacagcgaaguauccuaacucuuccgaccuggaucgccuuagccaaucccaucccauccugaauaugguggacaccaaaaagucuagccucaacauuuccggguacaauuuuagccugggagccgcugugaaagccggcgcuugcaugcuugaugggggaaacaugcuggagacaaucaaggucaccccucagacgauggacggcauccucaaaucuauucugaaggugaaaaagucccugggcauguucguuagcgauacacccggggaaagaaauccuuaugagaacauccucuacaagauuugucugucuggagacggcuggccguauaucgccagccggaccuccauuguggggcgcgcgugggaaaacacaaucgucgaucuugagucugacggaaaaccccagaaggugggcaccgccgggagcaauaaaucccugcagagcgcuggauuuccuaccggccucacauacucucaacugaugacgcugaaggauuccaugaugcagcuugaccccagcgccaaaaccuggauugauaucgagggcagaccugaagaccccguugagaucgcucucuaccagccgaugucugggugcuauauucacuucuuucgggaaccuacagaccugaagcaguucaagcaagaugccaaauacucccauggaaucgacguggccgaucuguuucccgcucagccuggccucaccagcgcggucauugaggcccugcccagaaacauggugcuuacaugucagggguccgacgauaucaagcgccugcucgacucucagggacggagagauauuaaacugaucgacaucgcucugagcaaggccgauucccgccgguucgaaaaugccgucugggaccaaugcaaagaucuuugucacaugcauaccggcgugguuguggagaagaagaaaagagggggcaaggaggaaauuacgccccacugcgcucucauggacuguaucauguaugaugccgcggucucuggaggccugaacauuccugugcugcgcgcuguucucccgcgggacaugguguuuagaacaagcucccccaaagucgugcugugaggacuaguuauaagacugacuagcccgaugggccucccaacgggcccuccuccccuccuugcaccgagauuaauaaaaaaaaaaaaaaaaaaaaaaaaaaaaaaaaaaaaaaaaaaaaaaaaaaaaaaaaaaaaaaaaaaaaaaaaaaaaaaaaaaaaaaaaaaaaaaaaaaaa

SEQ ID NO: 22036 - RNA, 1950 nt, Artificial Sequence
  mRNA product Design i-3 (A100) comprising derived and/or modified sequence from LASV(Nig08-04;Clade II)__ADU56611__SP-IgE_NP(2-569) (opt5)
aggagaaagcuuaccauggacuggaccuggauccuguuccucguggccgcugccacaagaguccacagcagcgccuccaaggaggugaaaucuuuccuguggacccagagccucagacgggaacuguccggcuacugcucuaacaucaaacuucaagucguuaaggacgcucaggcccugcuccacgggcuggauuuuagcgagguguccaaugugcagcgccuuaugagaaagcagaaacgggacgauggagaccugaagcgccucagagaucugaaccaagcggucaauaaccugguggaacucaagucuacccagcagaaaagcguucugcgggugggcacgcuuaccuccgacgaucugcucacacuggcugccgaccuugagaagcugaaaagcaaggucauucgcaccgaaagaccccucucuuccgggguguauaugggaaaucugagcacacagcaacuggagcagcggaaagcccuccugucuaugaucggcaugguugggggagcucagggcacccagccuggccgcgaugggguggucagagugugggacgugaagaacccggaucuucugaauaaccaauucggaacaaugcccucccucacccuggccugucuuacgaagcagggccaggucgaccugaaugaugcuguucucgcccugaccgaccuggggcucauuuacacagcgaaauauccuaacagcucugaccuggaucggcuuucccaaagccaucccauccugaauaugguggacaccaagaaauccucucucaacauuagcggauacaauuuuucccugggcgccgcugugaaggccggggcuugcaugcuugauggaggcaacaugcuggagacaaucaaagucaccccucagacgauggacggcauccucaagagcauucugaaagugaagcgcucucuggggauguucguuuccgauacacccggagaaagaaauccuuaugagaacauccucuacaagauuugucugagcggcgacggguggccguauaucgccucucggaccagcauugugggacgcgcgugggaaaacacaaccgucgaucuugaguccgacggcaaaccccagaagguggggaccgccggaucuaauaaaagccugcaguccgcuggcuuuccuacaggccucacguacagccaacugaugacccugaaggauucuaugaugcagcuugaccccuccgccaaaacauggaucgauauugaggggagaccugaagaccccguugagaucgcucucuaccagccgaugagcggaugcuauauccacuucuuucgggaaccuaccgaccugaagcaguucaagcaagaugccaaauacucucauggcauugacgugacagaucuguuuuccgcccagcccgggcucaccagcgcugucaucgaggcgcugccuagaaacauggugcuuacgugucagggauccgacgauauuaagaaacugcucgacucucagggccgccgggauaucaagcugauugacaucagccugaauaaagccgauuccagacgcuucgaaaacgcugucugggaccaaugcaaggaucuuugucacaugcauacaggggugguuguggagaagaaaaagcggggcggaaaagaggaaaucacaccccacugcgcccucauggacuguauuauguuugaugccgcugucucuggcgggcugaauauccccauucugagagccgugcucccucgcgacaugguuuuccggaccagcuccccgaaggugguccugugaggacuaguuauaagacugacuagcccgaugggccucccaacgggcccuccuccccuccuugcaccgagauuaauaaaaaaaaaaaaaaaaaaaaaaaaaaaaaaaaaaaaaaaaaaaaaaaaaaaaaaaaaaaaaaaaaaaaaaaaaaaaaaaaaaaaaaaaaaaaaaaaaaaa

SEQ ID NO: 22037 - RNA, 1953 nt, Artificial Sequence
  mRNA product Design i-3 (A100) comprising derived and/or modified sequence from LASV(GA391;Clade III)__AAA46284__SP-IgE_NP(2-570) (opt5)
aggagaaagcuuaccauggacuggaccuggauccuguuccucguggccgcugccacaagaguccacagcagcgccuccaaggaggugagaucuugccuguggacccagagccuccggcgcgaacuguccggcuacuguucuaacaucaaacuucaagucguuaaggacgcucaggcccugcuccacgggcuggauuucagcgagguguccaaugugcagagacuuaugcggaaacagaagcgcgacgauggagaccugaaaagacuccgggaucugaaccaagcggucaauaaccugguggaacucaagucuacacagcagaaaagcguucugcgcgugggcacgcuuuccagcgacgaucugcucauucuggcugccgaccuugagaaacugaagucuaaagucaccagaacagaacggccccucuccagcgggguguauaugggaaaucugucuucccagcaacuggaucagcgcagagcccuccugaacaugaucggcaugaccgggguuagcggaggcggcaagggggcuucuaauggaauugugcgggucugggacgugaaaaacgccgagcuucugaauaaccaguuuggcacaaugccuucccucacccuggcuugccuuacaaagcaggggcaaguggaucugaaugacgccguccaggcgcucaccgaucugggacugaucuacacggccaaguauccgaacagcuccgaccucgaccgccugucucagagccaucccauucuuaauaugaucgauaccaaaaaguccagccugaacaucucuggcuacaauuucucccucggggcugccguuaaagcuggagccuguaugcuggacggcggcaacaugcuugagacaauuaaggugagcccucaaaccauggaugggauccugaaaucuauucucaaggugaaaaagagccugggaauguuugucuccgacacacccggcgaaagaaacccuuaugagaauauccuguacaagauuugccucucuggggauggauggagcuauaucgcgucccggaccagcauugugggccgcgccugggaaaacacgguuguggaccuggagcaggauaauaaaccccagaagaucgggaacggaggcucuaauaaaucccuucagagcgcuggcuucgccgcugggcugaucuacucucaacucaugacacugaaggacuuuaaauguuucaaccugauuccuaaugccaagaccuggauggauaucgagggaagaccggaagaccccgucgagauugcccuuuaccagccuuccagcggcugcuaugugcacuuuuuccgggaacccacagaucucaagcaguuuaaacaggacgcuaaguacucccaugggagagacguuaccgaucuguucgcggcccaaccuggacugaccucugcugugaucgaggcccucccccgcaacauggucauuacaugucagggcagcgaagacauccggaaacugcuugagucccaggggagacgcgauaucaagcugauugacaucacgcucucuaaagccgauagccggaaguuugagaaugcugugugggaccaguucaaggaucugugccacaugcauaccggcgucgugguugaaaagaagaaaagaggaggcaaggaggaaauuacaccgcacugugcccugauggacugcaucauguuugaugcggcuguguccgggggacuugacgccaaaguccuccgcgugguucugccucgggauaugguguucagaaccagcacacccaaggucgugcugugaggacuaguuauaagacugacuagcccgaugggccucccaacgggcccuccuccccuccuugcaccgagauuaauaaaaaaaaaaaaaaaaaaaaaaaaaaaaaaaaaaaaaaaaaaaaaaaaaaaaaaaaaaaaaaaaaaaaaaaaaaaaaaaaaaaaaaaaaaaaaaaaaaaa

SEQ ID NO: 22038 - RNA, 1950 nt, Artificial Sequence
  mRNA product Design i-3 (A100) comprising derived and/or modified sequence from LASV(Nig08-A19;Clade III)__ADU56619__SP-IgE_NP(2-569) (opt5)
aggagaaagcuuaccauggacuggaccuggauccuguuccucguggccgcugccacaagaguccacagcagcgccuccaaggaggugaaaucuuuccuguggacccagagccucagacgggaacuguccggcuacugcucuaacaucaaacuucaagucguuaaggacgcucaggcccugcuccacgggcuggauuuuagcgagguguccaaugugcagcgccuuaugagaaagcagaaacgggacgauggagaccugaagcgccucagagaucugaaccaagcggucaauaaccugguggaacucaagucuacacagcagaaaagcguucugcgggugggcacgcuuuccagcgacgaucugcucguccuggcugccgaccuugagaagcugaaaucuaaggugguucgcaccgaaagaccccucuccagcgggauuuauaugggaaaucugucuucccagcaacuggaucagcggaaagcccuccugaacaugaucggcaugacagggggaaauggcggccgcaacaccacaagcgacgggauugugagagucugggaugugaagaaugcugagcuucugaacaaucaguucggaaccaugccuucucucacacuggccugucuuaccaagcagggccaaguggaccugaacgaugcuguccaggcccucacggaccuggggcugaucuacaccgcgaaauaucccaauuccagcgaccucgaucggcuggcccagucccauccgauucuuaacaugaucgacacaaagaaaucuagccugaauaucuccggauacaacuuuagccucggcgcugccguuaaggcuggggccugcaugcuggauggaggcaacaugcuugagaccauuaaagugucuccucaaacaauggacggcauccugaaguccauucucaaagugaagcgcagccuggggauguucaucucugauacccccggagaaagaaauccuuaugagaacauucuguacaagaucugucucagcggcgacggguggcccuauauugcgucccggacgucuaucgucggacgcgccugggaaaauacagugguugaucuggagagcgacaacaaaccucagaagaccggcaaugggggauccaacaaaagccuucagucugcuggcuuugccgcuggccugacauacucccagcucaugacccugaaggauagcaugcugcaacuugacccgaaugccaaaaccuggauggauaucgaggggagacccgaagacccuguggagauugcccucuaccagcccucuuccggaugcuauauccacuucuuucgggaaccuacagaccugaagcaguucaagcaggaugcuaaauacagccauggcauugacgucacggaucuguuugcggcccaacccgggcucaccuccgcugugaucgaggcccugccgagaaacaugguuauuacaugucagggaucugaagacauccgcaaacuucuggagagccagggccggagagauaucaagcucauugacaucucccugucuaagguggauagccgcaaauucgagaaugccgucugggaccaguuuaaggaucugugccacaugcauaccgggauuguggucgaaaagaaaaagcggggcggaaaagaggaaaucacaccucacugugcucuuauggacugcauuauguucgaugccgcgguguccggcgggguugacgcuaaggugcucagagccguccugccccgcgauaugguguuucggaccagcacgccuaaaguugugcugugaggacuaguuauaagacugacuagcccgaugggccucccaacgggcccuccuccccuccuugcaccgagauuaauaaaaaaaaaaaaaaaaaaaaaaaaaaaaaaaaaaaaaaaaaaaaaaaaaaaaaaaaaaaaaaaaaaaaaaaaaaaaaaaaaaaaaaaaaaaaaaaaaaaa

SEQ ID NO: 22039 - RNA, 1950 nt, Artificial Sequence
  mRNA product Design i-3 (A100) comprising derived and/or modified sequence from LASV(G1180-SLE-2010;Clade IV)__AIT17169__SP-IgE_NP(2-569) (opt5)
aggagaaagcuuaccauggacuggaccuggauccuguuccucguggccgcugccacaagaguccacagcagcgccuccaaggagaucaaaucuuuccuguggacccagagccucagacgggaacuguccggcuacugcucuaacauuaagcugcaaguggucaaagacgcucaggcccugcuccacgggcuggauuuuagcgagguuuccaaugugcagcgccuuaugagaaaggaacggcgcgacgauaacgaccugaaaagacuccgggaucugaaucaggcggugaacaaucuggucgagcucaagucuacacaacaaaagagcauccugcgcgugggaacgcuuaccuccgacgaucugcucauucuggcugccgaccuugaaaaacuuaagagcaaaguuaucagaacagagcggccccucucugccggcguguauauggggaaccuguccagccagcagcuggaucagcgcagagcucuccugucuaugauuggaauguccagcggcaaucagcgggcccaggcugggcgcgacggagucgugagaguuugggaugugaagaacgucgagcuucugaauaaccaguucggcaccaugccuucucucacacuggccugucuuaccaaacaaggccagguggaccugaaugaugcggugcaggcccucacagaccuggggcugaucuacaccgcuaaguauccgaacacguccgaccucgaucggcugacccaaagccaucccauccuuaauaugauugacacaaagaaauccucucugaacaucagcggauacaauuuuucccucggcgccgcugucaaggccggggcgugcaugcuggauggaggcaacaugcuugaaaccauuaaaguuagcccucagacaauggacgggauccugaagucuauucucaaagugaagaaagcccugggaauguucaucuccgauacccccggcgagcgcaacccuuaugaaaauauucuguacaagaucugucucagcggcgacggguggcccuauaucgcuucuagaacgagcauuacaggacgggccugggagaacaccguggucgaucuggaguccgacggcaagccucagaaagcugggucuaauaacagcaauaagucccuucagagcgugggauuuacagccggccugaccuacucucaacucaugacccugaaagaugccaugcugcagcuugacccgaacgcuaagacauggauggauaucgaagggagacccgaggacccuguugaaauugcgcucuaccagcccuccagcggaugcuauauccacuucuuucgcgagccuacggaccugaaacaguucaagcaagaugccaaguacucucauggcauugacgugaccgaucuguuugcugcccagcccggccucacauccgccgucaucgacgcucugccgcggaauauggugaucaccugucaggggagcgaugacauuagaaaacuucuggaaucccagggacgcaaggauaucaaacucauugacaucgcccugucuaagacagauagccggaaauaugagaacgcgguuugggaccaauacaaggaucugugccacaugcauaccggcguggucguggagaagaaaaagagagggggaaaagaagagauuacgccucacugugcucuuauggacugcaucauguucgaugccgccgucuccggcgggcucaauacaucugugcugcgcgcuguucugccccgggacaugguguuuagaaccagcaccccucgcgucgugcucugaggacuaguuauaagacugacuagcccgaugggccucccaacgggcccuccuccccuccuugcaccgagauuaauaaaaaaaaaaaaaaaaaaaaaaaaaaaaaaaaaaaaaaaaaaaaaaaaaaaaaaaaaaaaaaaaaaaaaaaaaaaaaaaaaaaaaaaaaaaaaaaaaaaa

SEQ ID NO: 22040 - RNA, 1950 nt, Artificial Sequence
  mRNA product Design i-3 (A100) comprising derived and/or modified sequence from LASV(G1442-SLE-2011;Clade IV)__AIT17181__SP-IgE_NP(2-569) (opt5)
aggagaaagcuuaccauggacuggaccuggauccuguuccucguggccgcugccacaagaguccacagcagcgccuccaaggaggugaaaucuuuccuguggacccagagccucagacgggaacuguccggcuacugcucuaacaucaaacuucaagucguuaaggacgcucaggcccugcuccacgggcuggauuuuagcgagguguccaaugugcagcgccuuaugagaaagcagcggcgcgacgauaacgaccugaaaagacuccgggaucugaaucaagcggucaacaaucugguggaacucaagucuacacagcaaaagagcguucugcgcgugggaacgcuuaccuccgacgaucugcucguccuggcugccgaccuugagaaacuuaagagcaaagugauuagaacagaacggccccucucugccggcguuuauauggggaaccuguccagccagcagcuggaucagcgcagagcucuccugaauaugaucggaaugucuggcgggauucagggaacccggacaggccgcgacggcguggucagagugugggaugugaagaacgccgaccuucugaauaaccaguucgggaccaugccuucccucacacuggcuugucuuaccaaacaaggacaggucgaucugaaugacguugugcaggcccucacggaccugggccugaucuacaccgcgaaguauccgaacgccagcgaucucgaccggcugacacaaucucaucccauucuuaauaugaucgauaccaagaaauccagccugaacaucuccggguacaauuuuucucucggagcugccgugaaggcuggcgccugcaugcuggacgggggaaacaugcuugagacaauuaaagucagcccucagaccauggauggcauccugaaguccauucucaaagugaagaaaacgcugggcauguucaucagcgacacacccggggagcgcaacccuuaugaaaauauucuguacaagaucugucucucuggagauggcuggcccuauauugcguccagaaccagcaucacagggcgggccugggagaacaccguuguggaccuggaaucugauggaaagccucagaaagcuggcagcaauaacuccaauaagucucuucagagcgccggguuugcugccggacugaccuacucccaacucaugacacugaaagacgccaugcugcagcuugauccgaacgcuaagacguggauggacaucgagggcagacccgaggacccugucgaaauugcgcucuaccagcccagcucuggcugcuauauccacuucuuucgcgagccuaccgaucugaaacaguucaagcaagacgccaaguacucccaugggauugaugugacagaccuguuugcugcccagcccggacucaccagcgccguuaucgaagcucugccgcggaauauggugauuacaugucagggcucugaugacaucaaaaagcugcuggagucccaggggagaaaagauaucaagcucauugacaucgcccugagcaaaaccgauucccgcaaguaugaaaacgcggucugggaccaauacaaggaucugugccacaugcauacgggaguggucguggagaaaaagaaacggggcgggaaggaggaaauuacaccucacugugcucuuauggacugcaucauguucgaugccgccguuucuggcggacucaauacccuggugcugagagcuguccucccccgcgacaugguguuucggaccagcacaccuagaguugugcugugaggacuaguuauaagacugacuagcccgaugggccucccaacgggcccuccuccccuccuugcaccgagauuaauaaaaaaaaaaaaaaaaaaaaaaaaaaaaaaaaaaaaaaaaaaaaaaaaaaaaaaaaaaaaaaaaaaaaaaaaaaaaaaaaaaaaaaaaaaaaaaaaaaaa

SEQ ID NO: 22041 - RNA, 1950 nt, Artificial Sequence
  mRNA product Design i-3 (A100) comprising derived and/or modified sequence from LASV(G3010-SLE-2013;Clade IV)__AIT17345__SP-IgE_NP(2-569) (opt5)
aggagaaagcuuaccauggacuggaccuggauccuguuccucguggccgcugccacaagaguccacagcagcgccuccaaggagaucaaaucuuuccuguggacccagagccucagacgggaacuguccggcuacugcucuaacauuaaacuucaaguggucaaagacgcucaggcccugcuccacgggcuggauuuuagcgagguuuccaaugugcagcgccuuaugagaaaggaacggcgcgacgauaacgaccugaaaagacuccgggaucugaaucaggcggugaacaaucuggucgagcucaagucuacacaacaaaagagcauccugcgcgugggaacgcuuaccuccgacgaucugcucauucuggcugccgaccuugaaaaacuuaagagcaaaguuacaagaaccgagcggccccucucugccggcguguauauggggaaccuguccagccagcagcuggaucagcgcagagcucuccugucuaugaucggaauguccagcggcguccagggggcccgggcuggacgcgacggcgugguuagagugugggaugucaagaaugccgagcuucugaacaaucaguucggcacaaugccuucucucacccuggcgugucuuacaaaacaggggcaaguggaccugaacgaugugguccaggcccucaccgaccugggacugauuuacacggcuaaguauccgaauaccuccgaccucgaucggcugacacagagccaucccauccuuaacaugaucgacaccaagaaauccucucugaauauuagcggcuacaacuuuucccucggggccgcuguuaaggccggagcgugcaugcuggauggcgggaauaugcuugaaacaaucaaagugagcccucaaaccauggacggcauucugaagucuauccucaaagugaagaaagcccugggaauguucauuuccgagacgcccggcgaacgcaacccuuaugagaacauccuguacaagauuugucucagcggggauggauggcccuauaucgcuucuagaacaagcaucaccggccgggccugggagaauacagucguggaccuggaauccgaugggaagccucagaaagcuggaucuaacaauagcaacaagucccuucagagcgccggcuuuaccgccgggcugaccuacucucagcucaugacacugaaagacgcuaugcugcaacuugauccgaaugcgaagacguggauggacauugagggaagacccgaagauccuguugagguggcccucuaccagcccuccagcggcugcuauauccacuucuuucgcgaaccuaccgaccugaaacaguucaagcaggacgcuaaguacucucauggcauugaugucacagaccuguuugccgcccaacccgggcucaccuccgcugugaucgaugcccugccgcggaacaugguuauuacaugucagggaagcgacgauaucaaaaagcugcuggagucccagggcagaaaagacaucaagcucauugauaucgcgcugucuaaaaccgacagccgcaaguaugagaaugcugugugggaucaguacaaggaccugugccacaugcauacgggggucguggucgaaaagaagaaacggggaggcaaggaggaaauuacaccucacugugcccuuauggauugcaucauguucgacgccgcuguguccgggggccucaacaccucuguucugagagccgugcugccccgcgauauggucuuucggaccagcacaccuagagugguucucugaggacuaguuauaagacugacuagcccgaugggccucccaacgggcccuccuccccuccuugcaccgagauuaauaaaaaaaaaaaaaaaaaaaaaaaaaaaaaaaaaaaaaaaaaaaaaaaaaaaaaaaaaaaaaaaaaaaaaaaaaaaaaaaaaaaaaaaaaaaaaaaaaaaa

SEQ ID NO: 22042 - RNA, 1950 nt, Artificial Sequence
  mRNA product Design i-3 (A100) comprising derived and/or modified sequence from LASV(G502-SLE-2009;Clade IV)__AIT17127__SP-IgE_NP(2-569) (opt5)
aggagaaagcuuaccauggacuggaccuggauccuguuccucguggccgcugccacaagaguccacagcagcgccuccaaggagaucaaaucuuuccuguggacccagagccucagacgggaacuguccggcuacugcucuaacauuaagcugcaaguggucaaagacgcucaggcccugcuccacgggcuggauuuuagcgagguuuccaaugugcagcgccuuaugagaaaggaacggcgcgacgauaacgaccugaaaagacuccgggaucugaaucaggcggugaacaaucuggucgagcucaagucuacacaacaaaagagcauccugcgcgugggaacgcuuaccuccgacgaucugcucauucuggcugccgaccuugaaaaacuuaagagcaaaguuaucagaacagagcggccccucucugccggcguguauauggggaaccuguccagccagcagcuggaucagcgcagagcucuccugucuaugauuggaauguccggcgggaaucagggaguccgggccggcaaggacggcgugguucgcgugugggaugucaaaaacgcugagcuucugaauaaccaguucgggaccaugccuagccucacacuggccugucuuaccaagcagggacaaguggaccugaaugaugcggugcaggcccucacagaccugggccugaucuacaccgcuaaguauccgaacacgucugaccucgauagacugacccagucccaucccauccuuaauaugauugacaccaaaaagagcucccugaacaucucuggguacaauuuuagccucggagccgcugucaaagccggcgcgugcaugcuggaugggggaaacaugcuugaaacaauuaagguuuccccucaaacaauggacggcauccugaaaagcauucucaaggugaaaaaggcccugggcauguucaucucugauacccccggggagcggaacccuuaugaaaauauucuguacaagaucugucucuccggagacggcuggcccuauaucgcuagccgcacgucuauuacagggagagccugggagaacaccguggucgaucuggagagcgacggaaaaccucagaaggcuggcuccaauaacucuaauaaaagccuucaguccgccggguuuacagccggacugaccuacagccagcucaugacccugaaggaugcuaugcugcaacuugacccgaacacaaaaacguggauggauaucgaaggccggcccgaggacccuguggaaauugcgcucuaccagcccucuuccggcugcuauauccacuucuuuagagagccuaccgaccugaagcaguucaagcaggaugccaaauacagccaugggauugacguuacagaucuguuugcugcccaacccggacucaccucugccgugaucgacgcucugccgcgcaauauggucaucacaugucagggcuccgaugacauucggaaacuucuggaaagccaggggagaaaggauaucaagcucauugacaucgcccugaacaaaaccgauucccgcaaguaugagaaugcggugugggaccaguacaaggaucugugccacaugcauacgggaguuguggucgagaaaaagaaacggggcgggaaggaagagauuacaccucacugugcucuuauggacugcaucauguucgaugccgccgugucuggcggacucaacaccagcguccugagagcugugcugccccgcgacaugguuuuucggaccuccacaccuagagugguccucugaggacuaguuauaagacugacuagcccgaugggccucccaacgggcccuccuccccuccuugcaccgagauuaauaaaaaaaaaaaaaaaaaaaaaaaaaaaaaaaaaaaaaaaaaaaaaaaaaaaaaaaaaaaaaaaaaaaaaaaaaaaaaaaaaaaaaaaaaaaaaaaaaaaa

SEQ ID NO: 22043 - RNA, 1950 nt, Artificial Sequence
  mRNA product Design i-3 (A100) comprising derived and/or modified sequence from LASV(G733-SLE-2010;Clade IV)__AIT17155__SP-IgE_NP(2-569) (opt5)
aggagaaagcuuaccauggacuggaccuggauccuguuccucguggccgcugccacaagaguccacagcagcgccuccaaggagaucaaaucuuuccuguggacccagagccucagacgggaacuguccggcuacugcucuaacauuaagcugcaaguggucaaagacgcucaggcccugcuccacgggcuggauuuuagcgagguuuccaaugugcagcgccuuaugagaaaggaacggcgcgacgauaacgaccugaaaagacuccgggaucugaaucaggcggugaacaaucuggucgagcucaagucuacacaacaaaagagcgugcugcgcguuggaacgcuuaccuccgacgaacugcucgugcuggcugccgaucuugagaaacuuaagagcaaagucaucagaacagagcggccccucucugccggcguguauauggggaaccuguccagccagcagcuggaccagcgcagagcucuccugucuaugauuggaauguccggcgggaaucagggagcccggaccggccgcgauggcguugugagagucugggacgugaagaacgcugaacuucugaauaaccaguucgggacaaugccuagccucacccuggccugucuuacaaaacagggacaaguggaucugaaugacgcgguccaggcccucaccgaucugggccugaucuacacggcuaaguauccgaacaccucugaccucgaccggcugacacagucccaucccauucuuaauaugaucgauaccaagaaaagcucccugaacaucucuggguacaauuuuagccucggagccgcuguuaaggccggcgcgugcaugcuggacgggggaaacaugcuugagacaauuaaaguguccccucaaaccauggauggcauccucaagagcauucugaaagugaagaaagcccugggcauguucaucucugacacgcccggggaacgcaacccuuaugagaauauucuguacaagaucugucucuccggagauggcuggcccuauauugcuagcagaacaucuaucaccgggcgggccugggagaacacagucguggaccuggaaagcgauggaaagccucagaaagcuggcuccaauaacucuaauaagagccuucaguccgccggguuuaccgccggacugaccuacagccagcucaugacacugaaagacgcuaugcugcaacuugauccgaacgcgaagacguggauggacaucgagggcagacccgaagauccuguugagauugcccucuaccagcccucuuccggcugcuauauccacuucuuucgcgaaccuaccgaccugaaacaguucaagcaggacgcuaaguacagccaugggauugaugugacagaccuguuugccgcccaacccggacucaccucugcugucaucgaugcccugccgcggaauauggugauuacaugucagggcuccgacgauaucagaaaacuucuggagagccaggggcgcaaggacaucaaacucauugauaucgcgcuguccaagauugacucucggaaauaugagaacgcuguuugggaucaguacaaggaccugugccacaugcauaccggaguggucguggaaaagaaaaagagaggcgggaaagaggaaaucacgccucacugugcccuuauggauugcauuauguucgacgccgcugucagcggcggacucaauucccuggugcugcgcgccguucucccccgggauaugguguuuagaacaucuaccccucgcgucgugcugugaggacuaguuauaagacugacuagcccgaugggccucccaacgggcccuccuccccuccuugcaccgagauuaauaaaaaaaaaaaaaaaaaaaaaaaaaaaaaaaaaaaaaaaaaaaaaaaaaaaaaaaaaaaaaaaaaaaaaaaaaaaaaaaaaaaaaaaaaaaaaaaaaaaa

SEQ ID NO: 22044 - RNA, 1950 nt, Artificial Sequence
  mRNA product Design i-3 (A100) comprising derived and/or modified sequence from MOPV/LASV reassortant(IGS-1;Clade IV)__AFY05578__SP-IgE_NP(2-569) (opt5)
aggagaaagcuuaccauggacuggaccuggauccuguuccucguggccgcugccacaagaguccacagcagcgccuccaaggagaucaaaucuuuccuguggacccagagccucagacgggaacuguccggcuacugcucuaacauuaaacuucaaguggucaaggacgcucaggcccugcuccacgggcuggauuuuagcgagguuuccaaugugcagcgccuuaugagaaaggaacggcgcgacgauaacgaccugaaaagacuccgggaucugaaucaggcggugaacaaucuggucgagcucaagucuacacaacaaaagagcauccugcgcgugggaacgcuuaccuccgacgaucugcucauucuggcugccgaccuugaaaaacugagaagcaagguuauccggacagagcgcccccucucugccggcguguauauggggaaccuguccagccagcagcuggaucagagacgggcucuccugaauaugauuggaaugucuggcgggaaccagggagcccgcgcuggcagagacggcgucgugcggguuugggaugugaaaaaugccgagcuucuguccaaccaguucgggaccaugccuagccucacacuggcgugucuuaccaagcagggacaagucgaccugaaugaugccgugcaggcucucacagaccugggccugaucuacaccgccaaauauccgaacacgucugaccucgaucgccugacccagucccaucccauccuuaauaugauugacacaaagaaaagcucccugaacaucucuggguacaauuuuagccucggagcugccgugaaggcgggcgccugcaugcuggaugggggaaacaugcuugaaaccauuaaggucuccccucaaacaauggacggcauccugaaaagcauucucaagguuaaaaaggcucugggcauguucaucucugauacccccggggagagaaacccuuaugaaaauauucuguacaaaaucugucucuccggagacggcuggcccuauaucgccagccggacgucuauuacagggagagcuugggagaacaccgugguggaucuggagagcgacggaaagccucagaaggccgauuccaauaacucuagcaaaucccuucagagcgccggcuuuacagcugggcugaccuacucucagcucaugacccugaaggacgcgaugcugcaacuugauccgaaugccaaaacauggauggacaucgaaggacgccccgaggacccugucgaaauugcucucuaccagcccuccagcggcugcuauauccacuucuuucgggagccuacggaucugaagcaguucaaacaggacgccaaguacucucauggcauugaugugaccgaccuguuugccacacaacccgggcucaccuccgcuguuaucgaugcccugccgagaaacauggugaucacaugucagggaagcgacgauauucgcaaacuucuggaaucccagggccggaaggacaucaagcucauugauaucgaccugucuaaaaccgauagcagaaaguaugagaaugcggucugggaccaguacaaagaucugugccacaugcauacgggggugguuguggagaagaagaaacgcggaggcaaggaagagauuacaccucacugugcucuuauggacugcaucauguucgacgccgccgucuccgggggccucaacaccucugugcugcgggcuguccugcccagagauaugguguuucgcaccagcacaccucggguugugcucugaggacuaguuauaagacugacuagcccgaugggccucccaacgggcccuccuccccuccuugcaccgagauuaauaaaaaaaaaaaaaaaaaaaaaaaaaaaaaaaaaaaaaaaaaaaaaaaaaaaaaaaaaaaaaaaaaaaaaaaaaaaaaaaaaaaaaaaaaaaaaaaaaaaa

SEQ ID NO: 22045 - RNA, 1950 nt, Artificial Sequence
  mRNA product Design i-3 (A100) comprising derived and/or modified sequence from LASV(LM765-SLE-2012;Clade IV)__AIT17815__SP-IgE_NP(2-569) (opt5)
aggagaaagcuuaccauggacuggaccuggauccuguuccucguggccgcugccacaagaguccacagcagcgccuccaaggagaucaaaucuuuccuguggacccagagccucagacgggaacuguccggcuacugcucuaacauuaagcugcaaguggucaaagacgcucaggcccugcuccacgggcuggauuuuagcgagguuuccaaugugcagcgccuuaugagaaaggaacggcgcgacgauaacgaccugaaaagacuccgggaucugaaucaggcggugaacaaucuggucgagcucaagucuacacaacaaaagagcauccugcgcgugggaacgcuuaccuccgacgaucugcucauucuggcugccgaccuugaaaaacuuaagagcaaaguuacaagaaccgagcggccccucucugccggcguguauauggggaaccuguccagccagcagcuggaucagcgcagagcucuccuggacaugaucggaaugucuggcuccaaucagggggcccgggcuggacgcgauggcgucgugagaguuugggacgugaagaacgccgagcuucugaauaaccaguucggcacaaugccuagccucacccuggcgugucuuacaaaacaggggcaagucgaucugaaugacgccgugcaggcucucaccgaccugggacugauuuacacggccaaguauccgaacaccucugaucucgaccggcugacacagucccaucccauccuuaauaugaucgauaccaagaaaagcucccugaacauuucuggcuacaauuuuagccucggggcugccgugaaggcgggagccugcaugcuggacggcgggaacaugcuugaaacaaucaaagucuccccucaaaccauggauggcauucucaagagcauccugaaaguuaagaaagcucugggaauguucauuucugacgcccccggcgagcgcaacccuuaugaaaauauccuguacaagauuugucucuccggggauggauggcccuauaucgcuagcagaacgucuaucacaggccgggccugggagaacaccgugguggaccuggagagcgaugggaagccucagaaagccggauccaauggcucuaacaagagccuucaguccgcuggguuuacagcgggacugaccuacagccagcucaugacccugaaagacgccaugcugcaacuugauccgaaugcuaagacauggauggacauugaaggcagacccgaggacccugucgaaaucgcccucuaccagcccucuuccggcugcuauauucacuucuuucgcgagccuacggaucugaaacaguucaagcaggacgccaaguacagccaugggaucgaugugaccgaccuguuugcugcccaacccggacucacaucugcgguuauugaugcucugccgcggaacauggugaucaccugucagggcuccgacgauaucagaaaacuuuucgaaagccaggggcgcaaggacauuaaacugaucgauauugcccucuccaagacagacucucggaaauaugagaaugccgucugggaucaguacaaggaccugugccacaugcauaccggaaucgugguugagaagaaaaagagaggcgggaaagaagagauuacgccucacugugcucugauggauugcaucauguuugacgccgcugugagcggcggacuuaacacauccguccuccgcgccgugcugccccgggacauggucuucagaaccucuaccccucgcgugguucugugaggacuaguuauaagacugacuagcccgaugggccucccaacgggcccuccuccccuccuugcaccgagauuaauaaaaaaaaaaaaaaaaaaaaaaaaaaaaaaaaaaaaaaaaaaaaaaaaaaaaaaaaaaaaaaaaaaaaaaaaaaaaaaaaaaaaaaaaaaaaaaaaaaaa

SEQ ID NO: 22046 - RNA, 1950 nt, Artificial Sequence
  mRNA product Design i-3 (A100) comprising derived and/or modified sequence from LASV(LM776-SLE-2012;Clade IV)__AIT17825__SP-IgE_NP(2-569) (opt5)
aggagaaagcuuaccauggacuggaccuggauccuguuccucguggccgcugccacaagaguccacagcagcgccuccaaggagaucaaaucuuuccuguggacccagagccucagacgggaacuguccucuuacugcagcaacauuaaacuucaaguggucaaggacgcucaggcccugcuccacggccuggauuuuuccgagguuucuaaugugcagcgccuuaugagaaaggaacggcgcgacgauaacgaccugaaaagacuccgggaucugaaucaggcggugaacaaucuggucgagcucaagagcacacaacagaaguccauccugcgcguggggacgcuuaccagcgacgaucugcucauucuggcugccgaccuugaaaaacugaagucuaaaguuacaagaaccgagcggccccucuccgccggaguguauaugggcaaccugagcucucagcagcuggaucaacgcagagcucuccuguccaugaucgggaugagcggaucuaaucagggcgcccgggcugggcgcgacggagucgugagaguuugggaugugaagaacgccgagcuucugaauaaccaguucggcacaaugccuucccucacccuggcgugucuuacaaaacagggccaagucgaccugaaugaugccgugcaggcucucaccgaccuggggcugauuuacacggccaaguauccgaacaccagcgaccucgaucggcugacacagucccaucccauccuuaauaugaucgacaccaagaaaucuagccugaacauuuccggauacaauuuuagccucggcgcugccgugaaggcgggggccugcaugcuggauggaggcaacaugcuugaaacaaucaaagucucuccucaaaccauggacgggauucugaaguccauccucaaaguuaagaaagcucugggaauguucauuagcgauacgcccggcgagcgcaacccuuaugaaaauauccuguacaagauuugucucucuggcgacggguggcccuauaucgccagcagaacauccaucaccggacgggcuugggagaacacagugguggaucuggagucugacggcaagccucagaaagccgggagcaauaacuccaauaagagccuucagucugccggauuuaccgcuggccugaccuacucccagcucaugacacugaaagaugcgaugcugcaacuugacccgaacgccaagacguggauggauauugaagggagacccgaggacccugucgaaguggcucucuaccagcccagcucuggaugcuauauccacuucuuucgcgagccuaccgaccugaaacaguucaagcaggaugccaaguacucccauggcauugacguuacagaucuguuugccgcucaacccggccucaccagcgccgugaucgacgcgcugccgcggaauauggucauuacaugucagggguccgaugacaucagaaaacuucuggaaucucagggacgcaaggauaucaaacucauugacaucgcucugagcaagaccgauucccggaaauaugagaacgccgugugggaccaguacaaggaucugugccacaugcauacgggcguuguggucgagaagaaaaagagagggggaaaagaagagauuacaccucacugugcccuuauggacugcaucauguucgaugcugccgugucuggcgggcucaauaccagcguccugcgcgcugugcugccccgggacaugguuuuuagaaccuccacaccucgcgugguccucugaggacuaguuauaagacugacuagcccgaugggccucccaacgggcccuccuccccuccuugcaccgagauuaauaaaaaaaaaaaaaaaaaaaaaaaaaaaaaaaaaaaaaaaaaaaaaaaaaaaaaaaaaaaaaaaaaaaaaaaaaaaaaaaaaaaaaaaaaaaaaaaaaaaa

SEQ ID NO: 22047 - RNA, 1950 nt, Artificial Sequence
  mRNA product Design i-3 (A100) comprising derived and/or modified sequence from LASV(Mad39;Clade IV)__ANH09723__SP-IgE_NP(2-569) (opt5)
aggagaaagcuuaccauggacuggaccuggauccuguuccucguggccgcugccacaagaguccacagcagcgccuccaaggagaucaaaucuuuccuguggacccagagccucagacgggaacuguccggcuacugcucuaacauuaagcugcaaguggucaaagacgcucaggcccugcuccacgggcuggauuuuagcgagguuuccaaugugcagcgccuuaugagaaagcagcggcgcgacgauaacgaccugaaaagacuccgggaucugaaucaagcggugaacaaucuggucgaacucaagucuacacagcaaaagagcgugcugcgcguuggaacgcuuaccuccgacgaucugcucacacuggcugccgaccuugagaaacuuaagagcaaagugaccagaacagaacggccccucaccgccggcgucuauauggggaaccugucuucccagcagcuggaucagcgcagagcucuccugaauaugaucggaaugagcggcgggaaccagggagcccggacaggccgcgacggcgugguuagagugugggaugucaagaaugcugagcuucugaacaaucaguucgggaccaugccuucucucacgcuggccugucuuaccaaacaaggacagguggaccugaacgaugugguccaggcgcucacagaccugggccugauuuacaccgccaaguauccgaauacauccgaccucgaucggcugacccaaagccaucccauccuuaacaugauugacacgaauaagucuucccugaacaucagcggguacaacuuuucccucggagcugccguuaaagcuggcgccugcaugcuggaugggggaaauaugcuugagacaaucaaggugucuccucagaccauggacggcauucugaaaagcauccucaaggugaaaaagucccugggcauguucauuagcgauacacccggggaacgcaacccuuaugagaauauccuguacaaaauuugucucucuggagacggcuggcccuauaucgcguccagaaccagcauuaccgggcgggccugggaaaacacagucguggaucuggagucuggaggcaagccucagaaggcugggagcaauaacuccaauaaaucucuucagagcgccggauuugcugccggccugacguacucccaacucaugacccugaaggacgccaugcugcagcuugauccgaacgcuaaaacauggauggacaucgagggcagacccgaagauccuguugagaucgcgcucuaccagcccauuagcgggugcuauauccacuucuuucgcgaaccuaccgaccugaagcaguucaaacaagacgccaaguacucucauggaauugaugugacagaccuguuugcugcccagcccggccucaccuccgccgucaucgaggcucugccgcggaauauggugauuacgugucaggggagcgaugacaucagaaaacuuuucgaaucucagggacgcaaggauaucaagcugauugacaucgcccucuccaaaacagauagccggaaguaugagaacgcgguuugggaccaauacaaagaucugugccacaugcauaccggcguggucguggagaagaagaaaaagggcgggaaagaagagauuaccccucacugugcucugauggacugcaucauguuugaugccgccgucuccggaggccuuaauacacucgugcugagagcuguucugccccgcgacaugguguuccggaccucuacaccuaaggucgugcucugaggacuaguuauaagacugacuagcccgaugggccucccaacgggcccuccuccccuccuugcaccgagauuaauaaaaaaaaaaaaaaaaaaaaaaaaaaaaaaaaaaaaaaaaaaaaaaaaaaaaaaaaaaaaaaaaaaaaaaaaaaaaaaaaaaaaaaaaaaaaaaaaaaaa

SEQ ID NO: 22048 - RNA, 1950 nt, Artificial Sequence
  mRNA product Design i-3 (A100) comprising derived and/or modified sequence from LASV(Z0947-SLE-2011;Clade IV)__AIT17841__SP-IgE_NP(2-569) (opt5)
aggagaaagcuuaccauggacuggaccuggauccuguuccucguggccgcugccacaagaguccacagcagcgccuccaaggagaucaaaucuuuccuguggacccagagccucagacgggaacuguccggcuacugcucuaacauuaagcugcaaguggucaaagacgcucaggcccugcuccacgggcuggauuuuagcgagguuuccaaugugcagcgccuuaugagaaaggaacggcgcgacgauaacgaccugaaaagacuccgggaucugaaucaggcggugaacaaucuggucgagcucaagucuacacaacaaaagagcauccugcgcgugggaacgcuuaccuccgacgaucugcucauucuggcugccgaccuugaaaaacuuaagagcaaaguuacaagaaccgagcggccccucucugccggcguguauauggggaaccuguccagccagcagcuggaucagcgcagagcucuccugaauaugaucggaaugucuggcuccaaccagggggcccggacaggacgcgacggcgucgugagaguuugggaugugaagaaugcugagcuucugaacaaucaguucggcaccaugccuagccucacacuggccugucuuaccaaacaggggcaagucgaccugaacgaugcggugcaggcccucacggaccugggacugauuuacaccgcuaaguauccgaauacaucugaccucgaucggcugacccagucccaucccauccuuaacaugaucgacacaaagaaaagcucccugaauauuucuggcuacaacuuuagccucggggccgcugugaaggccggagcgugcaugcuggauggcgggaacaugcuugaaaccaucaaagucuccccucaaacgauggacggcauucucaagagcauccugaaaguuaagaaagcccugggaauguucauuucugaugcucccggcgagcgcaauccuuaugaaaacauccuguacaagauuugucucuccggggacggauggcccuauaucgccagcagaacaucuaucaccggccgggcuugggagaauacagugguggaucuggagagcgacgggaagccucagaaagccggauccaacggcucuaauaagagccuucaguccgccggguuuaccgcuggacugaccuacagccagcucaugacacugaaagaugcgaugcugcaacuugacccgaacgccaagacguggauggauauugaaggcagacccgaggacccugucgaaaucgcucucuaccagcccucuuccggcugcuauauucacuucuuucgcgagccuaccgaccugaaacaguucaagcaggaugccaaguacagccaugggaucgacgugacagaucuguuugccgcucaacccggacucaccucugccguuauugacgcgcugccgcggaauauggugaucacaugucagggcuccgaugacaucagaaaacuuuucgaaagccaggggcgcaaggauauuaaacugaucgacauugcucucuccaagaccgauucucggaaauaugagaacgccgucugggaccaguacaaggaucugugccacaugcauacgggaaucgugguugagaagaaaaagagaggcgggaaagaagagauuacaccucacugugcccugauggacugcaucauguuugaugcugccgugagcggcggacuuaauaccuccguccuccgcgcugugcugccccgggacauggucuucagaaccucuacaccucgcgugguucugugaggacuaguuauaagacugacuagcccgaugggccucccaacgggcccuccuccccuccuugcaccgagauuaauaaaaaaaaaaaaaaaaaaaaaaaaaaaaaaaaaaaaaaaaaaaaaaaaaaaaaaaaaaaaaaaaaaaaaaaaaaaaaaaaaaaaaaaaaaaaaaaaaaaa

SEQ ID NO: 22049 - RNA, 541 nt, Artificial Sequence
  mRNA product Design a-1 (hSL-A64-N5) comprising derived and/or modified sequence from LASV(Josiah;Clade IV)__ADY11072/NP_694871__Z (opt1)
aggagagucccgcagucggcguccagcggcucugcuuguucgugugugugucguugcaggccuuauucaagcuuaccaugggcaacaagcaggccaaggcccccgagagcaaggacuccccgcgcgcgagccugauccccgacgccacccaccucgggccccaguucugcaaguccugcugguucgagaacaagggccugguggagugcaacaaccacuaccugugccucaacugccugacccugcuccugagcgucuccaaccggugccccaucugcaagaugccgcugcccacgaagcuccgccccagcgccgcccccaccgccccgcccaccggggcggccgacuccauccggcccccgcccuacagccccugaggacuagucccuguucccagagcccacuuuuuuuucuuuuuuugaaauaaaauagccugucuuucagaucucaaaggcucuuuucagagccaccaaaaaaaaaaaaaaaaaaaaaaaaaaaaaaaaaaaaaaaaaaaaaaaaaaaaaaaaaaaaaaaaagaauu

SEQ ID NO: 22050 - RNA, 544 nt, Artificial Sequence
  mRNA product Design a-1 (hSL-A64-N5) comprising derived and/or modified sequence from LASV(Pinneo-NIG-1969;Clade I)__AIT17834__Z (opt1)
aggagagucccgcagucggcguccagcggcucugcuuguucgugugugugucguugcaggccuuauucaagcuuaccaugggcaacaagcagacccgcagcccgcccaagcccgagcacccccggcccacccugcuccccgacgccucccaccuggggccccaguucugcaagagcugcugguucgagaacaagggccugguggagugcaacaaccacuaccucugccugaacugccugacgcuccugcuguccgucagcgaccgcugccccaucugcaagaugccccuccccaccaagcuggccgugcggacccagcccuccgcgccgccccugaaccaggggaacacccagagcagcccgccgcccuacucccccugaggacuagucccuguucccagagcccacuuuuuuuucuuuuuuugaaauaaaauagccugucuuucagaucucaaaggcucuuuucagagccaccaaaaaaaaaaaaaaaaaaaaaaaaaaaaaaaaaaaaaaaaaaaaaaaaaaaaaaaaaaaaaaaaagaauu

SEQ ID NO: 22051 - RNA, 541 nt, Artificial Sequence
  mRNA product Design a-1 (hSL-A64-N5) comprising derived and/or modified sequence from LASV(Nig08-04;Clade II)__ADU56612__Z (opt1)
aggagagucccgcagucggcguccagcggcucugcuuguucgugugugugucguugcaggccuuauucaagcuuaccaugggcaaccgccagacccggcccaccgaggccacggagcagagccgcgcccaccuggugccggacgccucccaccucgggccccaguucugcaagagcugcugguucgagaaccggggccuggucgagugcaacaaccacuaccugugccucaacugccugucccugcuccugagcguguccagccgcugccccaucugcaagaugccccugccgacccggcucaaggccuccgcccagcccagcgccccgcccaccgaggcgccccagaacaccacgcccccgcccuacacccccugaggacuagucccuguucccagagcccacuuuuuuuucuuuuuuugaaauaaaauagccugucuuucagaucucaaaggcucuuuucagagccaccaaaaaaaaaaaaaaaaaaaaaaaaaaaaaaaaaaaaaaaaaaaaaaaaaaaaaaaaaaaaaaaaagaauu

SEQ ID NO: 22052 - RNA, 541 nt, Artificial Sequence
  mRNA product Design a-1 (hSL-A64-N5) comprising derived and/or modified sequence from LASV(Nig08-A19;Clade III)__ADU56620__Z (opt1)
aggagagucccgcagucggcguccagcggcucugcuuguucgugugugugucguugcaggccuuauucaagcuuaccaugggcgggaagcacaccaagccccagcgcgagagcaacuccccgcgggccagccugauccccgacgccacccaccucggcccccaguucugcaaguccugcugguucgagaacaaggggcugguggagugcaacaaccacuaccugugccucaacugccugacgcugcuccugagcguguccaaccgcugccccaucugcaagaugccccugcccacccggcuccgcgccagcaccaaccccaccgcgccccagguggagcaggucggcccgacgaacccgccgcccuacucccccugaggacuagucccuguucccagagcccacuuuuuuuucuuuuuuugaaauaaaauagccugucuuucagaucucaaaggcucuuuucagagccaccaaaaaaaaaaaaaaaaaaaaaaaaaaaaaaaaaaaaaaaaaaaaaaaaaaaaaaaaaaaaaaaaagaauu

SEQ ID NO: 22053 - RNA, 541 nt, Artificial Sequence
  mRNA product Design a-1 (hSL-A64-N5) comprising derived and/or modified sequence from LASV(AV;Clade V)__CCA30312__Z (opt1)
aggagagucccgcagucggcguccagcggcucugcuuguucgugugugugucguugcaggccuuauucaagcuuaccaugggcaaccgccaggccaagaaccccgagguggagaacagcccccgggccucccugauccccgacgcgacccaccucgggccccaguucugcaagagcugcugguucgagaacaagggccuggucgagugcaacaaccacuaccugugccucaacugccugucccugcuccugagcguguccaaccgcugccccaucugcaagaugccgcugcccacccggcuccgccccacgaccacccccaccgccccgcagaucaucaaggagaacacgaccaacccgccgcccuacacccccugaggacuagucccuguucccagagcccacuuuuuuuucuuuuuuugaaauaaaauagccugucuuucagaucucaaaggcucuuuucagagccaccaaaaaaaaaaaaaaaaaaaaaaaaaaaaaaaaaaaaaaaaaaaaaaaaaaaaaaaaaaaaaaaaagaauu

SEQ ID NO: 22054 - RNA, 541 nt, Artificial Sequence
  mRNA product Design a-1 (hSL-A64-N5) comprising derived and/or modified sequence from LASV(Togo/2016/7082;Clade VI)__AMR44579__Z (opt1)
aggagagucccgcagucggcguccagcggcucugcuuguucgugugugugucguugcaggccuuauucaagcuuaccaugggcgcccgccagaccaagcagccccagaucgaggggagcccccgggccucccuggugcccgacgcgagccaccucggcccccaguucugcaaguccugcugguucgagaacaaggggcuggucgagugcaacaaccacuaccugugccucaacugccugagccugcuccuguccgugagcaaccgcugccccaucugcaagaugccgcugcccaccaagcuccggguguccagcgcccccuccgcgcccccggccgccacggcccagcccggcaccccgccgcccuacagccccugaggacuagucccuguucccagagcccacuuuuuuuucuuuuuuugaaauaaaauagccugucuuucagaucucaaaggcucuuuucagagccaccaaaaaaaaaaaaaaaaaaaaaaaaaaaaaaaaaaaaaaaaaaaaaaaaaaaaaaaaaaaaaaaaagaauu

SEQ ID NO: 22055 - RNA, 541 nt, Artificial Sequence
  mRNA product Design a-1 (hSL-A64-N5) comprising derived and/or modified sequence from LASV(KAK-428;Clade n.d. (VII))__ANH09761__Z (opt1)
aggagagucccgcagucggcguccagcggcucugcuuguucgugugugugucguugcaggccuuauucaagcuuaccaugggcaacaaggggaccaagcccacccagaacagcgagcccucccgcgccaaccuggugcccgacgccagcuaccucggcccccaguucugcaaguccugcugguucgagaacaaggggcuggucgagugcaacaaccacuaccugugccucaacugccugacgaugcugcucagcguguccaaccggugccccaucugcaagaugccgcugcccaccaagaucaaggccagcggcucccccagcgcgcccccgaccgaggccaacuccgccgugagcccgccgcccuacacccccugaggacuagucccuguucccagagcccacuuuuuuuucuuuuuuugaaauaaaauagccugucuuucagaucucaaaggcucuuuucagagccaccaaaaaaaaaaaaaaaaaaaaaaaaaaaaaaaaaaaaaaaaaaaaaaaaaaaaaaaaaaaaaaaaagaauu

SEQ ID NO: 22056 - RNA, 541 nt, Artificial Sequence
  mRNA product Design a-1 (hSL-A64-N5) comprising derived and/or modified sequence from LASV(ISTH0009-NIG-2011;Clade II)__AIT17402__Z (opt1)
aggagagucccgcagucggcguccagcggcucugcuuguucgugugugugucguugcaggccuuauucaagcuuaccaugggcaaccgccaggccaagagcaccaagguggacgagcaccagcgggcccaccugguccccgacgcgucccaccucgggccccaguucugcaagagcugcugguucgagaaccgcggccugguggagugcaacaaccacuaccugugccucaacugccugucccugcuccugagcguguccagccggugccccaucugcaagaugccccugcccaccaagcucaaggccgccgcccagccguccgcccccagcacggagaccauccagaacaccaccccgccgcccuacacgcccugaggacuagucccuguucccagagcccacuuuuuuuucuuuuuuugaaauaaaauagccugucuuucagaucucaaaggcucuuuucagagccaccaaaaaaaaaaaaaaaaaaaaaaaaaaaaaaaaaaaaaaaaaaaaaaaaaaaaaaaaaaaaaaaaagaauu

SEQ ID NO: 22057 - RNA, 541 nt, Artificial Sequence
  mRNA product Design a-1 (hSL-A64-N5) comprising derived and/or modified sequence from LASV(ISTH2010-NIG-2012;Clade II)__AIT17480__Z (opt1)
aggagagucccgcagucggcguccagcggcucugcuuguucgugugugugucguugcaggccuuauucaagcuuaccaugggcaaccgccacgccaagagcaccaagguggacgagcaccagcgggcccaccugguccccgacgcgucccaccucgggccccaguucugcaagagcugcugguucgagaaccgcggccugguggagugcaacaaccacuaccugugccucaacugccugucccugcuccugagcguguccagccggugccccaucugcaagaugccccugcccaccaagcucaaggccgccgcccagccguccgcccccagcacggaggucauccaguccaccaccccgccgcccuacacccccugaggacuagucccuguucccagagcccacuuuuuuuucuuuuuuugaaauaaaauagccugucuuucagaucucaaaggcucuuuucagagccaccaaaaaaaaaaaaaaaaaaaaaaaaaaaaaaaaaaaaaaaaaaaaaaaaaaaaaaaaaaaaaaaaagaauu

SEQ ID NO: 22058 - RNA, 541 nt, Artificial Sequence
  mRNA product Design a-1 (hSL-A64-N5) comprising derived and/or modified sequence from LASV(Lassa virus/H.sapiens-wt/NGA/2016/ISTH_0017;Clade II)__AVO03713__Z (opt1)
aggagagucccgcagucggcguccagcggcucugcuuguucgugugugugucguugcaggccuuauucaagcuuaccaugggcaaccgccaggccaagagcaccaagguggacgagcaccagcgggcccaccugguccccgacgcgucccaccucgggccccaguucugcaagagcugcugguucgagaaccgcggccugguggagugcaacaaccacuaccugugccucaacugccugucccugcuccugagcguguccagccggugccccaucugcaagaugccccugcccaccaagcucaaggccgccacgcagccguccgcccccagcaccgaggucaaccagaacaccaccccgccgcccuacacgcccugaggacuagucccuguucccagagcccacuuuuuuuucuuuuuuugaaauaaaauagccugucuuucagaucucaaaggcucuuuucagagccaccaaaaaaaaaaaaaaaaaaaaaaaaaaaaaaaaaaaaaaaaaaaaaaaaaaaaaaaaaaaaaaaaagaauu

SEQ ID NO: 22059 - RNA, 541 nt, Artificial Sequence
  mRNA product Design a-1 (hSL-A64-N5) comprising derived and/or modified sequence from LASV(Lassa virus/H.sapiens-wt/NGA/2018/ISTH_0959;Clade II)__AVV65084__Z (opt1)
aggagagucccgcagucggcguccagcggcucugcuuguucgugugugugucguugcaggccuuauucaagcuuaccaugggcaacaagcaggccaagagcaccaagguggacgagcaccagcgcgcccaccugguccccgacgcgucccaccucgggccccaguucugcaagagcugcugguucgagaaccggggccugguggagugcaacaaccacuaccugugccucaacugccugucccugcuccugagcguguccagccgcugccccaucugcaagaugccccugcccaccaagcucaaggccgccgcccagccguccgcccccagcacggaggcgauccaguccaccaccccgccgcccuacacccccugaggacuagucccuguucccagagcccacuuuuuuuucuuuuuuugaaauaaaauagccugucuuucagaucucaaaggcucuuuucagagccaccaaaaaaaaaaaaaaaaaaaaaaaaaaaaaaaaaaaaaaaaaaaaaaaaaaaaaaaaaaaaaaaaagaauu

SEQ ID NO: 22060 - RNA, 541 nt, Artificial Sequence
  mRNA product Design a-1 (hSL-A64-N5) comprising derived and/or modified sequence from LASV(LASV003-NIG-2008;Clade II)__AIT17578__Z (opt1)
aggagagucccgcagucggcguccagcggcucugcuuguucgugugugugucguugcaggccuuauucaagcuuaccaugggcaaccgccaggccaagagcaccaagguggacgagcaccagcgggcccaccugguccccgacgcgucccaccucgggccccaguucugcaagagcugcugguucgagaacaagggccugguggagugcaacaaccacuaccugugccucaacugccugucccugcuccugagcguguccagccgcugccccaucugcaagaugccccugcccaccaagcuccgggccgccgcccagccguccgcccccagcacggaguccgcgcagaacaccgccccgccgcccuacgcccccugaggacuagucccuguucccagagcccacuuuuuuuucuuuuuuugaaauaaaauagccugucuuucagaucucaaaggcucuuuucagagccaccaaaaaaaaaaaaaaaaaaaaaaaaaaaaaaaaaaaaaaaaaaaaaaaaaaaaaaaaaaaaaaaaagaauu

SEQ ID NO: 22061 - RNA, 541 nt, Artificial Sequence
  mRNA product Design a-1 (hSL-A64-N5) comprising derived and/or modified sequence from LASV(LASV035-NIG-2009;Clade II)__AIT17586__Z (opt1)
aggagagucccgcagucggcguccagcggcucugcuuguucgugugugugucguugcaggccuuauucaagcuuaccaugggcaacaagcaggccaagagcaccaagguggacgagcaccagcgcgcccaccugguccccgacgcgucccaccucgggccccaguucugcaagagcugcugguucgagaaccggggccugguggagugcaacaaccacuaccugugccucaacugccugucccugcuccugagcguguccagccgcugccccaucugcaagaugccccugcccacccggcucaaggccgccgcccagccguccgcccccagcacggaggucacccagaacaccaccccgccgcccuacacgcccugaggacuagucccuguucccagagcccacuuuuuuuucuuuuuuugaaauaaaauagccugucuuucagaucucaaaggcucuuuucagagccaccaaaaaaaaaaaaaaaaaaaaaaaaaaaaaaaaaaaaaaaaaaaaaaaaaaaaaaaaaaaaaaaaagaauu

SEQ ID NO: 22062 - RNA, 541 nt, Artificial Sequence
  mRNA product Design a-1 (hSL-A64-N5) comprising derived and/or modified sequence from LASV(LASV1000-NIG-2009;Clade II)__AIT17780__Z (opt1)
aggagagucccgcagucggcguccagcggcucugcuuguucgugugugugucguugcaggccuuauucaagcuuaccaugggcaaccgccagaccaagagcaccaagguggacgagcaccagcgggccuaccugguccccgacgccucccuccuggggccccaguucugcaagagcugcugguucgagaacaagggccugguggagugcaacaaccacuaccucugccugaacugccugucccuccugcugagcguguccagccgcugccccaucugcaagaugccccuccccacgcggcugaaggcggccgcccagcccuccgccccgcccaccgaggccauccagaacaccacgccgccgcccuacacccccugaggacuagucccuguucccagagcccacuuuuuuuucuuuuuuugaaauaaaauagccugucuuucagaucucaaaggcucuuuucagagccaccaaaaaaaaaaaaaaaaaaaaaaaaaaaaaaaaaaaaaaaaaaaaaaaaaaaaaaaaaaaaaaaaagaauu

SEQ ID NO: 22063 - RNA, 541 nt, Artificial Sequence
  mRNA product Design a-1 (hSL-A64-N5) comprising derived and/or modified sequence from LASV(LASV221-NIG-2010;Clade II)__AIT17622__Z (opt1)
aggagagucccgcagucggcguccagcggcucugcuuguucgugugugugucguugcaggccuuauucaagcuuaccaugggcaaccgccaggccaagagcaccaagguggacgagcaccagcgggcccaccugguccccgacgcgucccaccucgggccccaguucugcaagagcugcugguucgagaaccgcggccugguggagugcaacaaccacuaccugugccucaacugccugucccugcuccugagcguguccagccggugccccaucugcaagaugccccugcccaccaagcucaaggccgccacgcagccguccgcccccagcaccgaggucacccagaacaccaucccgccgcccuacucccccugaggacuagucccuguucccagagcccacuuuuuuuucuuuuuuugaaauaaaauagccugucuuucagaucucaaaggcucuuuucagagccaccaaaaaaaaaaaaaaaaaaaaaaaaaaaaaaaaaaaaaaaaaaaaaaaaaaaaaaaaaaaaaaaaagaauu

SEQ ID NO: 22064 - RNA, 541 nt, Artificial Sequence
  mRNA product Design a-1 (hSL-A64-N5) comprising derived and/or modified sequence from LASV(LASV237-NIG-2010;Clade II)__AIT17636__Z (opt1)
aggagagucccgcagucggcguccagcggcucugcuuguucgugugugugucguugcaggccuuauucaagcuuaccaugggcaaccgccaggccaagagcaccaagguggacgagcaccagcgggcccaccugguccccgacgcgucccaccucgggccccaguucugcaagagcugcugguucgagaaccgcggccugguggagugcaacaaccacuaccugugccucaacugccugucccugcuccugagcguguccagccggugccccaucugcaagaugccccugcccaccaagcucaaggccgccgcccagccguccgcccccagcaucgagacgauccagaacaccaccccgccgcccuacacccccugaggacuagucccuguucccagagcccacuuuuuuuucuuuuuuugaaauaaaauagccugucuuucagaucucaaaggcucuuuucagagccaccaaaaaaaaaaaaaaaaaaaaaaaaaaaaaaaaaaaaaaaaaaaaaaaaaaaaaaaaaaaaaaaaagaauu

SEQ ID NO: 22065 - RNA, 541 nt, Artificial Sequence
  mRNA product Design a-1 (hSL-A64-N5) comprising derived and/or modified sequence from LASV(LASV253-NIG-2011;Clade II)__AIT17668__Z (opt1)
aggagagucccgcagucggcguccagcggcucugcuuguucgugugugugucguugcaggccuuauucaagcuuaccaugggcaaccgccaggccaagagcaccaagguggacgagcaccagcgggcccaccugguccccgacgcgucccaccucgggccccaguucugcaagagcugcugguucgagaacaagggccugguggagugcaacaaccacuaccugugccucaacugccugucccugcuccugagcguguccagccgcugccccaucugcaagaugccccugcccaccaagcucaagacgaccgcccagccguccgccccgcccaccgaggccgccaagaacaccgcgcccccgcccuacgcccccugaggacuagucccuguucccagagcccacuuuuuuuucuuuuuuugaaauaaaauagccugucuuucagaucucaaaggcucuuuucagagccaccaaaaaaaaaaaaaaaaaaaaaaaaaaaaaaaaaaaaaaaaaaaaaaaaaaaaaaaaaaaaaaaaagaauu

SEQ ID NO: 22066 - RNA, 541 nt, Artificial Sequence
  mRNA product Design a-1 (hSL-A64-N5) comprising derived and/or modified sequence from LASV(G1180-SLE-2010;Clade IV)__AIT17166__Z (opt1)
aggagagucccgcagucggcguccagcggcucugcuuguucgugugugugucguugcaggccuuauucaagcuuaccaugggcaacaagcaggccaaggcccccgaggcgaaggacagcccgcgcgccucccugauccccgacgccacccaccucgggccccaguucugcaagagcugcugguucgagaccaagggccugguggagugcaacaaccacuaccugugccucaacugccugacgcugcuccuguccgucagcaaccggugccccaucugcaagaugccgcugcccaccaagcuccgccccuccgccacccccaccgccccgcccacggaggcggccgacagcaucgggcccccgcccuacucccccugaggacuagucccuguucccagagcccacuuuuuuuucuuuuuuugaaauaaaauagccugucuuucagaucucaaaggcucuuuucagagccaccaaaaaaaaaaaaaaaaaaaaaaaaaaaaaaaaaaaaaaaaaaaaaaaaaaaaaaaaaaaaaaaaagaauu

SEQ ID NO: 22067 - RNA, 541 nt, Artificial Sequence
  mRNA product Design a-1 (hSL-A64-N5) comprising derived and/or modified sequence from LASV(G1442-SLE-2011;Clade IV)__AIT17178__Z (opt1)
aggagagucccgcagucggcguccagcggcucugcuuguucgugugugugucguugcaggccuuauucaagcuuaccaugggcaacaagcaggccaaggccagcgaggcgaaggacagcccccgcgccucccugaucccggacgccacccaccucgggccccaguucugcaaguccugcugguucgagaacaagggccugguggagugcaacaaccacuaccugugccucaacugccugagccugcuccuguccgucagcucccggugccccaucugcaagaugccccugccgacccgccuccggcccagcacggcccccaccgcgcccccggcccgcgccggggacaacaucaagcccccgcccuacucccccugaggacuagucccuguucccagagcccacuuuuuuuucuuuuuuugaaauaaaauagccugucuuucagaucucaaaggcucuuuucagagccaccaaaaaaaaaaaaaaaaaaaaaaaaaaaaaaaaaaaaaaaaaaaaaaaaaaaaaaaaaaaaaaaaagaauu

SEQ ID NO: 22068 - RNA, 541 nt, Artificial Sequence
  mRNA product Design a-1 (hSL-A64-N5) comprising derived and/or modified sequence from LASV(G502-SLE-2009;Clade IV)__AIT17124__Z (opt1)
aggagagucccgcagucggcguccagcggcucugcuuguucgugugugugucguugcaggccuuauucaagcuuaccaugggcaacaagcaggucaagacccccgaggccaaggacagcccccgcgccucccugauccccgacgcgacccaccucgggccccaguucugcaagagcugcugguucgagaacaagggccugguggagugcaacaaccacuaccugugccucaacugccugacgcugcuccuguccguggggaaccggugccccaucugcaagaugccgcugcccaccaagcuccgccccagcgugacccccaccgccccgcccacgcgggccgccgacuccaucggcccgccgcccuacagccccugaggacuagucccuguucccagagcccacuuuuuuuucuuuuuuugaaauaaaauagccugucuuucagaucucaaaggcucuuuucagagccaccaaaaaaaaaaaaaaaaaaaaaaaaaaaaaaaaaaaaaaaaaaaaaaaaaaaaaaaaaaaaaaaaagaauu

SEQ ID NO: 22069 - RNA, 541 nt, Artificial Sequence
  mRNA product Design a-1 (hSL-A64-N5) comprising derived and/or modified sequence from LASV(G733-SLE-2010;Clade IV)__AIT17152__Z (opt1)
aggagagucccgcagucggcguccagcggcucugcuuguucgugugugugucguugcaggccuuauucaagcuuaccaugggcaacaagcaggccaagacccccgagaccaaggacagcccgcgcgccucccugauccccgacgcgacgcaccucgggccccaguucugcaagagcugcugguucgagaacaagggccugguggagugcaacaaccacuaccugugccucaacugccugacccugcuccuguccgucagcaaccggugccccaucugcaagaugccgcugcccaccaagcuccgccccuccaccgcccccacggccccgcccgccggggccgcggacaacacccggcccccgcccuacagccccugaggacuagucccuguucccagagcccacuuuuuuuucuuuuuuugaaauaaaauagccugucuuucagaucucaaaggcucuuuucagagccaccaaaaaaaaaaaaaaaaaaaaaaaaaaaaaaaaaaaaaaaaaaaaaaaaaaaaaaaaaaaaaaaaagaauu

SEQ ID NO: 22070 - RNA, 553 nt, Artificial Sequence
  mRNA product Design a-1 (hSL-A64-N5) comprising derived and/or modified sequence from MOPV/LASV reassortant(IGS-1;Clade IV)__AFY05533__Z (opt1)
aggagagucccgcagucggcguccagcggcucugcuuguucgugugugugucguugcaggccuuauucaagcuuaccaugggcaagacccagagcaaggggcagcccuccaccaaccugcucaaggagacggagccccgccaccccgugauccccgacgcccggggcaccgggcccgaguucugcaagagcugcugguucgagcgccggggccugguccgcugcaacgaccacuaccugugccucaacugccugacccugcuccacaccguguccgaccggugccccaucugcaagcacaagcugcccuuccgccuggagcuccagacgcagcccaccgccccgcccgagaucccgcccagccagaacccgccgcccuacucccccugaggacuagucccuguucccagagcccacuuuuuuuucuuuuuuugaaauaaaauagccugucuuucagaucucaaaggcucuuuucagagccaccaaaaaaaaaaaaaaaaaaaaaaaaaaaaaaaaaaaaaaaaaaaaaaaaaaaaaaaaaaaaaaaaagaauu

SEQ ID NO: 22071 - RNA, 541 nt, Artificial Sequence
  mRNA product Design a-1 (hSL-A64-N5) comprising derived and/or modified sequence from LASV(LM776-SLE-2012;Clade IV)__AIT17824__Z (opt1)
aggagagucccgcagucggcguccagcggcucugcuuguucgugugugugucguugcaggccuuauucaagcuuaccaugggcaacaagcaggccaaggccagcgaggagaagaacagcccccgcgccucccugaucccggacgccacccaccucgggccccaguucugcaaguccugcugguucgagaacaagggccugguggagugcaacaaccacuaccugugccucaacugccugacccugcuccugagcgucuccaaccggugccccaucugcaagaugccccugccgacgaagcuccgccccagcaccacccccaccgcgcccccgacgggggccgccgacuccauccggcccccgcccuacagccccugaggacuagucccuguucccagagcccacuuuuuuuucuuuuuuugaaauaaaauagccugucuuucagaucucaaaggcucuuuucagagccaccaaaaaaaaaaaaaaaaaaaaaaaaaaaaaaaaaaaaaaaaaaaaaaaaaaaaaaaaaaaaaaaaagaauu

SEQ ID NO: 22072 - RNA, 541 nt, Artificial Sequence
  mRNA product Design a-1 (hSL-A64-N5) comprising derived and/or modified sequence from LASV(Mad39;Clade IV)__ANH09743__Z (opt1)
aggagagucccgcagucggcguccagcggcucugcuuguucgugugugugucguugcaggccuuauucaagcuuaccaugggcaacaagcaggccaaggccagcgagguggaggacgggccccgcgccucccugauccccgacgccacccaccucggcccccaguucugcaagagcugcugguucgagaacaagucccuggucgagugcaacaaccacuaccugugccucaacugccugacccugcuccugagcguguccaaccggugccccaucugcaagaugccccugccgacgcgccucaagcccagcgugguccccaccgcgcccccgacccgggccggggacggcacccgcccgccgcccuacucccccugaggacuagucccuguucccagagcccacuuuuuuuucuuuuuuugaaauaaaauagccugucuuucagaucucaaaggcucuuuucagagccaccaaaaaaaaaaaaaaaaaaaaaaaaaaaaaaaaaaaaaaaaaaaaaaaaaaaaaaaaaaaaaaaaagaauu

SEQ ID NO: 22073 - RNA, 541 nt, Artificial Sequence
  mRNA product Design a-1 (hSL-A64-N5) comprising derived and/or modified sequence from LASV(Z0947-SLE-2011;Clade IV)__AIT17838__Z (opt1)
aggagagucccgcagucggcguccagcggcucugcuuguucgugugugugucguugcaggccuuauucaagcuuaccaugggcaacaagcaggccaaggugcccgagagcaaggacuccccgcgcgccagccugauccccgacgcgacccaccucgggccccaguucugcaaguccugcugguucgagaacaagggccuggucgagugcaacaaccacuaccugugccucaacugccugacccugcuccugagcguguccaaccgcugccccaucugcaagaugccgcugcccacgaagcucaagcccagcgccgcccccaccgccccgcccaccggggccgcggacuccauccggcccccgcccuacagccccugaggacuagucccuguucccagagcccacuuuuuuuucuuuuuuugaaauaaaauagccugucuuucagaucucaaaggcucuuuucagagccaccaaaaaaaaaaaaaaaaaaaaaaaaaaaaaaaaaaaaaaaaaaaaaaaaaaaaaaaaaaaaaaaaagaauu

SEQ ID NO: 22074 - RNA, 541 nt, Artificial Sequence
  mRNA product Design a-1 (hSL-A64-N5) comprising derived and/or modified sequence from LASV(Josiah;Clade IV)__ADY11072/NP_694871__Z (opt4)
aggagagucccgcagucggcguccagcggcucugcuuguucgugugugugucguugcaggccuuauucaagcuuaccaugggcaacaagcaggccaaggcccccgagagcaaggacagccccagagccagccugauccccgacgccacccaccugggcccccaguucugcaagagcugcugguucgagaacaagggccugguggagugcaacaaccacuaccugugccugaacugccugacccugcugcugagcgugagcaacagaugccccaucugcaagaugccccugcccaccaagcugagacccagcgccgcccccaccgccccccccaccggcgccgccgacagcaucagacccccccccuacagccccugaggacuagucccuguucccagagcccacuuuuuuuucuuuuuuugaaauaaaauagccugucuuucagaucucaaaggcucuuuucagagccaccaaaaaaaaaaaaaaaaaaaaaaaaaaaaaaaaaaaaaaaaaaaaaaaaaaaaaaaaaaaaaaaaagaauu

SEQ ID NO: 22075 - RNA, 544 nt, Artificial Sequence
  mRNA product Design a-1 (hSL-A64-N5) comprising derived and/or modified sequence from LASV(Pinneo-NIG-1969;Clade I)__AIT17834__Z (opt4)
aggagagucccgcagucggcguccagcggcucugcuuguucgugugugugucguugcaggccuuauucaagcuuaccaugggcaacaagcagaccagaagcccccccaagcccgagcaccccagacccacccugcugcccgacgccagccaccugggcccccaguucugcaagagcugcugguucgagaacaagggccugguggagugcaacaaccacuaccugugccugaacugccugacccugcugcugagcgugagcgacagaugccccaucugcaagaugccccugcccaccaagcuggccgugagaacccagcccagcgcccccccccugaaccagggcaacacccagagcagccccccccccuacagccccugaggacuagucccuguucccagagcccacuuuuuuuucuuuuuuugaaauaaaauagccugucuuucagaucucaaaggcucuuuucagagccaccaaaaaaaaaaaaaaaaaaaaaaaaaaaaaaaaaaaaaaaaaaaaaaaaaaaaaaaaaaaaaaaaagaauu

SEQ ID NO: 22076 - RNA, 541 nt, Artificial Sequence
  mRNA product Design a-1 (hSL-A64-N5) comprising derived and/or modified sequence from LASV(Nig08-04;Clade II)__ADU56612__Z (opt4)
aggagagucccgcagucggcguccagcggcucugcuuguucgugugugugucguugcaggccuuauucaagcuuaccaugggcaacagacagaccagacccaccgaggccaccgagcagagcagagcccaccuggugcccgacgccagccaccugggcccccaguucugcaagagcugcugguucgagaacagaggccugguggagugcaacaaccacuaccugugccugaacugccugagccugcugcugagcgugagcagcagaugccccaucugcaagaugccccugcccaccagacugaaggccagcgcccagcccagcgccccccccaccgaggccccccagaacaccacccccccccccuacacccccugaggacuagucccuguucccagagcccacuuuuuuuucuuuuuuugaaauaaaauagccugucuuucagaucucaaaggcucuuuucagagccaccaaaaaaaaaaaaaaaaaaaaaaaaaaaaaaaaaaaaaaaaaaaaaaaaaaaaaaaaaaaaaaaaagaauu

SEQ ID NO: 22077 - RNA, 541 nt, Artificial Sequence
  mRNA product Design a-1 (hSL-A64-N5) comprising derived and/or modified sequence from LASV(Nig08-A19;Clade III)__ADU56620__Z (opt4)
aggagagucccgcagucggcguccagcggcucugcuuguucgugugugugucguugcaggccuuauucaagcuuaccaugggcggcaagcacaccaagccccagagagagagcaacagccccagagccagccugauccccgacgccacccaccugggcccccaguucugcaagagcugcugguucgagaacaagggccugguggagugcaacaaccacuaccugugccugaacugccugacccugcugcugagcgugagcaacagaugccccaucugcaagaugccccugcccaccagacugagagccagcaccaaccccaccgccccccagguggagcaggugggccccaccaaccccccccccuacagccccugaggacuagucccuguucccagagcccacuuuuuuuucuuuuuuugaaauaaaauagccugucuuucagaucucaaaggcucuuuucagagccaccaaaaaaaaaaaaaaaaaaaaaaaaaaaaaaaaaaaaaaaaaaaaaaaaaaaaaaaaaaaaaaaaagaauu

SEQ ID NO: 22078 - RNA, 541 nt, Artificial Sequence
  mRNA product Design a-1 (hSL-A64-N5) comprising derived and/or modified sequence from LASV(AV;Clade V)__CCA30312__Z (opt4)
aggagagucccgcagucggcguccagcggcucugcuuguucgugugugugucguugcaggccuuauucaagcuuaccaugggcaacagacaggccaagaaccccgagguggagaacagccccagagccagccugauccccgacgccacccaccugggcccccaguucugcaagagcugcugguucgagaacaagggccugguggagugcaacaaccacuaccugugccugaacugccugagccugcugcugagcgugagcaacagaugccccaucugcaagaugccccugcccaccagacugagacccaccaccacccccaccgccccccagaucaucaaggagaacaccaccaaccccccccccuacacccccugaggacuagucccuguucccagagcccacuuuuuuuucuuuuuuugaaauaaaauagccugucuuucagaucucaaaggcucuuuucagagccaccaaaaaaaaaaaaaaaaaaaaaaaaaaaaaaaaaaaaaaaaaaaaaaaaaaaaaaaaaaaaaaaaagaauu

SEQ ID NO: 22079 - RNA, 541 nt, Artificial Sequence
  mRNA product Design a-1 (hSL-A64-N5) comprising derived and/or modified sequence from LASV(Togo/2016/7082;Clade VI)__AMR44579__Z (opt4)
aggagagucccgcagucggcguccagcggcucugcuuguucgugugugugucguugcaggccuuauucaagcuuaccaugggcgccagacagaccaagcagccccagaucgagggcagccccagagccagccuggugcccgacgccagccaccugggcccccaguucugcaagagcugcugguucgagaacaagggccugguggagugcaacaaccacuaccugugccugaacugccugagccugcugcugagcgugagcaacagaugccccaucugcaagaugccccugcccaccaagcugagagugagcagcgcccccagcgccccccccgccgccaccgcccagcccggcacccccccccccuacagccccugaggacuagucccuguucccagagcccacuuuuuuuucuuuuuuugaaauaaaauagccugucuuucagaucucaaaggcucuuuucagagccaccaaaaaaaaaaaaaaaaaaaaaaaaaaaaaaaaaaaaaaaaaaaaaaaaaaaaaaaaaaaaaaaaagaauu

SEQ ID NO: 22080 - RNA, 541 nt, Artificial Sequence
  mRNA product Design a-1 (hSL-A64-N5) comprising derived and/or modified sequence from LASV(KAK-428;Clade n.d. (VII))__ANH09761__Z (opt4)
aggagagucccgcagucggcguccagcggcucugcuuguucgugugugugucguugcaggccuuauucaagcuuaccaugggcaacaagggcaccaagcccacccagaacagcgagcccagcagagccaaccuggugcccgacgccagcuaccugggcccccaguucugcaagagcugcugguucgagaacaagggccugguggagugcaacaaccacuaccugugccugaacugccugaccaugcugcugagcgugagcaacagaugccccaucugcaagaugccccugcccaccaagaucaaggccagcggcagccccagcgccccccccaccgaggccaacagcgccgugagccccccccccuacacccccugaggacuagucccuguucccagagcccacuuuuuuuucuuuuuuugaaauaaaauagccugucuuucagaucucaaaggcucuuuucagagccaccaaaaaaaaaaaaaaaaaaaaaaaaaaaaaaaaaaaaaaaaaaaaaaaaaaaaaaaaaaaaaaaaagaauu

SEQ ID NO: 22081 - RNA, 541 nt, Artificial Sequence
  mRNA product Design a-1 (hSL-A64-N5) comprising derived and/or modified sequence from LASV(ISTH0009-NIG-2011;Clade II)__AIT17402__Z (opt4)
aggagagucccgcagucggcguccagcggcucugcuuguucgugugugugucguugcaggccuuauucaagcuuaccaugggcaacagacaggccaagagcaccaagguggacgagcaccagagagcccaccuggugcccgacgccagccaccugggcccccaguucugcaagagcugcugguucgagaacagaggccugguggagugcaacaaccacuaccugugccugaacugccugagccugcugcugagcgugagcagcagaugccccaucugcaagaugccccugcccaccaagcugaaggccgccgcccagcccagcgcccccagcaccgagaccauccagaacaccacccccccccccuacacccccugaggacuagucccuguucccagagcccacuuuuuuuucuuuuuuugaaauaaaauagccugucuuucagaucucaaaggcucuuuucagagccaccaaaaaaaaaaaaaaaaaaaaaaaaaaaaaaaaaaaaaaaaaaaaaaaaaaaaaaaaaaaaaaaaagaauu

SEQ ID NO: 22082 - RNA, 541 nt, Artificial Sequence
  mRNA product Design a-1 (hSL-A64-N5) comprising derived and/or modified sequence from LASV(ISTH2010-NIG-2012;Clade II)__AIT17480__Z (opt4)
aggagagucccgcagucggcguccagcggcucugcuuguucgugugugugucguugcaggccuuauucaagcuuaccaugggcaacagacacgccaagagcaccaagguggacgagcaccagagagcccaccuggugcccgacgccagccaccugggcccccaguucugcaagagcugcugguucgagaacagaggccugguggagugcaacaaccacuaccugugccugaacugccugagccugcugcugagcgugagcagcagaugccccaucugcaagaugccccugcccaccaagcugaaggccgccgcccagcccagcgcccccagcaccgaggugauccagagcaccacccccccccccuacacccccugaggacuagucccuguucccagagcccacuuuuuuuucuuuuuuugaaauaaaauagccugucuuucagaucucaaaggcucuuuucagagccaccaaaaaaaaaaaaaaaaaaaaaaaaaaaaaaaaaaaaaaaaaaaaaaaaaaaaaaaaaaaaaaaaagaauu

SEQ ID NO: 22083 - RNA, 541 nt, Artificial Sequence
  mRNA product Design a-1 (hSL-A64-N5) comprising derived and/or modified sequence from LASV(Lassa virus/H.sapiens-wt/NGA/2016/ISTH_0017;Clade II)__AVO03713__Z (opt4)
aggagagucccgcagucggcguccagcggcucugcuuguucgugugugugucguugcaggccuuauucaagcuuaccaugggcaacagacaggccaagagcaccaagguggacgagcaccagagagcccaccuggugcccgacgccagccaccugggcccccaguucugcaagagcugcugguucgagaacagaggccugguggagugcaacaaccacuaccugugccugaacugccugagccugcugcugagcgugagcagcagaugccccaucugcaagaugccccugcccaccaagcugaaggccgccacccagcccagcgcccccagcaccgaggugaaccagaacaccacccccccccccuacacccccugaggacuagucccuguucccagagcccacuuuuuuuucuuuuuuugaaauaaaauagccugucuuucagaucucaaaggcucuuuucagagccaccaaaaaaaaaaaaaaaaaaaaaaaaaaaaaaaaaaaaaaaaaaaaaaaaaaaaaaaaaaaaaaaaagaauu

SEQ ID NO: 22084 - RNA, 541 nt, Artificial Sequence
  mRNA product Design a-1 (hSL-A64-N5) comprising derived and/or modified sequence from LASV(Lassa virus/H.sapiens-wt/NGA/2018/ISTH_0959;Clade II)__AVV65084__Z (opt4)
aggagagucccgcagucggcguccagcggcucugcuuguucgugugugugucguugcaggccuuauucaagcuuaccaugggcaacaagcaggccaagagcaccaagguggacgagcaccagagagcccaccuggugcccgacgccagccaccugggcccccaguucugcaagagcugcugguucgagaacagaggccugguggagugcaacaaccacuaccugugccugaacugccugagccugcugcugagcgugagcagcagaugccccaucugcaagaugccccugcccaccaagcugaaggccgccgcccagcccagcgcccccagcaccgaggccauccagagcaccacccccccccccuacacccccugaggacuagucccuguucccagagcccacuuuuuuuucuuuuuuugaaauaaaauagccugucuuucagaucucaaaggcucuuuucagagccaccaaaaaaaaaaaaaaaaaaaaaaaaaaaaaaaaaaaaaaaaaaaaaaaaaaaaaaaaaaaaaaaaagaauu

SEQ ID NO: 22085 - RNA, 541 nt, Artificial Sequence
  mRNA product Design a-1 (hSL-A64-N5) comprising derived and/or modified sequence from LASV(LASV003-NIG-2008;Clade II)__AIT17578__Z (opt4)
aggagagucccgcagucggcguccagcggcucugcuuguucgugugugugucguugcaggccuuauucaagcuuaccaugggcaacagacaggccaagagcaccaagguggacgagcaccagagagcccaccuggugcccgacgccagccaccugggcccccaguucugcaagagcugcugguucgagaacaagggccugguggagugcaacaaccacuaccugugccugaacugccugagccugcugcugagcgugagcagcagaugccccaucugcaagaugccccugcccaccaagcugagagccgccgcccagcccagcgcccccagcaccgagagcgcccagaacaccgcccccccccccuacgcccccugaggacuagucccuguucccagagcccacuuuuuuuucuuuuuuugaaauaaaauagccugucuuucagaucucaaaggcucuuuucagagccaccaaaaaaaaaaaaaaaaaaaaaaaaaaaaaaaaaaaaaaaaaaaaaaaaaaaaaaaaaaaaaaaaagaauu

SEQ ID NO: 22086 - RNA, 541 nt, Artificial Sequence
  mRNA product Design a-1 (hSL-A64-N5) comprising derived and/or modified sequence from LASV(LASV035-NIG-2009;Clade II)__AIT17586__Z (opt4)
aggagagucccgcagucggcguccagcggcucugcuuguucgugugugugucguugcaggccuuauucaagcuuaccaugggcaacaagcaggccaagagcaccaagguggacgagcaccagagagcccaccuggugcccgacgccagccaccugggcccccaguucugcaagagcugcugguucgagaacagaggccugguggagugcaacaaccacuaccugugccugaacugccugagccugcugcugagcgugagcagcagaugccccaucugcaagaugccccugcccaccagacugaaggccgccgcccagcccagcgcccccagcaccgaggugacccagaacaccacccccccccccuacacccccugaggacuagucccuguucccagagcccacuuuuuuuucuuuuuuugaaauaaaauagccugucuuucagaucucaaaggcucuuuucagagccaccaaaaaaaaaaaaaaaaaaaaaaaaaaaaaaaaaaaaaaaaaaaaaaaaaaaaaaaaaaaaaaaaagaauu

SEQ ID NO: 22087 - RNA, 541 nt, Artificial Sequence
  mRNA product Design a-1 (hSL-A64-N5) comprising derived and/or modified sequence from LASV(LASV1000-NIG-2009;Clade II)__AIT17780__Z (opt4)
aggagagucccgcagucggcguccagcggcucugcuuguucgugugugugucguugcaggccuuauucaagcuuaccaugggcaacagacagaccaagagcaccaagguggacgagcaccagagagccuaccuggugcccgacgccagccugcugggcccccaguucugcaagagcugcugguucgagaacaagggccugguggagugcaacaaccacuaccugugccugaacugccugagccugcugcugagcgugagcagcagaugccccaucugcaagaugccccugcccaccagacugaaggccgccgcccagcccagcgccccccccaccgaggccauccagaacaccacccccccccccuacacccccugaggacuagucccuguucccagagcccacuuuuuuuucuuuuuuugaaauaaaauagccugucuuucagaucucaaaggcucuuuucagagccaccaaaaaaaaaaaaaaaaaaaaaaaaaaaaaaaaaaaaaaaaaaaaaaaaaaaaaaaaaaaaaaaaagaauu

SEQ ID NO: 22088 - RNA, 541 nt, Artificial Sequence
  mRNA product Design a-1 (hSL-A64-N5) comprising derived and/or modified sequence from LASV(LASV221-NIG-2010;Clade II)__AIT17622__Z (opt4)
aggagagucccgcagucggcguccagcggcucugcuuguucgugugugugucguugcaggccuuauucaagcuuaccaugggcaacagacaggccaagagcaccaagguggacgagcaccagagagcccaccuggugcccgacgccagccaccugggcccccaguucugcaagagcugcugguucgagaacagaggccugguggagugcaacaaccacuaccugugccugaacugccugagccugcugcugagcgugagcagcagaugccccaucugcaagaugccccugcccaccaagcugaaggccgccacccagcccagcgcccccagcaccgaggugacccagaacaccauccccccccccuacagccccugaggacuagucccuguucccagagcccacuuuuuuuucuuuuuuugaaauaaaauagccugucuuucagaucucaaaggcucuuuucagagccaccaaaaaaaaaaaaaaaaaaaaaaaaaaaaaaaaaaaaaaaaaaaaaaaaaaaaaaaaaaaaaaaaagaauu

SEQ ID NO: 22089 - RNA, 541 nt, Artificial Sequence
  mRNA product Design a-1 (hSL-A64-N5) comprising derived and/or modified sequence from LASV(LASV237-NIG-2010;Clade II)__AIT17636__Z (opt4)
aggagagucccgcagucggcguccagcggcucugcuuguucgugugugugucguugcaggccuuauucaagcuuaccaugggcaacagacaggccaagagcaccaagguggacgagcaccagagagcccaccuggugcccgacgccagccaccugggcccccaguucugcaagagcugcugguucgagaacagaggccugguggagugcaacaaccacuaccugugccugaacugccugagccugcugcugagcgugagcagcagaugccccaucugcaagaugccccugcccaccaagcugaaggccgccgcccagcccagcgcccccagcaucgagaccauccagaacaccacccccccccccuacacccccugaggacuagucccuguucccagagcccacuuuuuuuucuuuuuuugaaauaaaauagccugucuuucagaucucaaaggcucuuuucagagccaccaaaaaaaaaaaaaaaaaaaaaaaaaaaaaaaaaaaaaaaaaaaaaaaaaaaaaaaaaaaaaaaaagaauu

SEQ ID NO: 22090 - RNA, 541 nt, Artificial Sequence
  mRNA product Design a-1 (hSL-A64-N5) comprising derived and/or modified sequence from LASV(LASV253-NIG-2011;Clade II)__AIT17668__Z (opt4)
aggagagucccgcagucggcguccagcggcucugcuuguucgugugugugucguugcaggccuuauucaagcuuaccaugggcaacagacaggccaagagcaccaagguggacgagcaccagagagcccaccuggugcccgacgccagccaccugggcccccaguucugcaagagcugcugguucgagaacaagggccugguggagugcaacaaccacuaccugugccugaacugccugagccugcugcugagcgugagcagcagaugccccaucugcaagaugccccugcccaccaagcugaagaccaccgcccagcccagcgccccccccaccgaggccgccaagaacaccgcccccccccccuacgcccccugaggacuagucccuguucccagagcccacuuuuuuuucuuuuuuugaaauaaaauagccugucuuucagaucucaaaggcucuuuucagagccaccaaaaaaaaaaaaaaaaaaaaaaaaaaaaaaaaaaaaaaaaaaaaaaaaaaaaaaaaaaaaaaaaagaauu

SEQ ID NO: 22091 - RNA, 541 nt, Artificial Sequence
  mRNA product Design a-1 (hSL-A64-N5) comprising derived and/or modified sequence from LASV(G1180-SLE-2010;Clade IV)__AIT17166__Z (opt4)
aggagagucccgcagucggcguccagcggcucugcuuguucgugugugugucguugcaggccuuauucaagcuuaccaugggcaacaagcaggccaaggcccccgaggccaaggacagccccagagccagccugauccccgacgccacccaccugggcccccaguucugcaagagcugcugguucgagaccaagggccugguggagugcaacaaccacuaccugugccugaacugccugacccugcugcugagcgugagcaacagaugccccaucugcaagaugccccugcccaccaagcugagacccagcgccacccccaccgccccccccaccgaggccgccgacagcaucggccccccccccuacagccccugaggacuagucccuguucccagagcccacuuuuuuuucuuuuuuugaaauaaaauagccugucuuucagaucucaaaggcucuuuucagagccaccaaaaaaaaaaaaaaaaaaaaaaaaaaaaaaaaaaaaaaaaaaaaaaaaaaaaaaaaaaaaaaaaagaauu

SEQ ID NO: 22092 - RNA, 541 nt, Artificial Sequence
  mRNA product Design a-1 (hSL-A64-N5) comprising derived and/or modified sequence from LASV(G1442-SLE-2011;Clade IV)__AIT17178__Z (opt4)
aggagagucccgcagucggcguccagcggcucugcuuguucgugugugugucguugcaggccuuauucaagcuuaccaugggcaacaagcaggccaaggccagcgaggccaaggacagccccagagccagccugauccccgacgccacccaccugggcccccaguucugcaagagcugcugguucgagaacaagggccugguggagugcaacaaccacuaccugugccugaacugccugagccugcugcugagcgugagcagcagaugccccaucugcaagaugccccugcccaccagacugagacccagcaccgcccccaccgccccccccgccagagccggcgacaacaucaagcccccccccuacagccccugaggacuagucccuguucccagagcccacuuuuuuuucuuuuuuugaaauaaaauagccugucuuucagaucucaaaggcucuuuucagagccaccaaaaaaaaaaaaaaaaaaaaaaaaaaaaaaaaaaaaaaaaaaaaaaaaaaaaaaaaaaaaaaaaagaauu

SEQ ID NO: 22093 - RNA, 541 nt, Artificial Sequence
  mRNA product Design a-1 (hSL-A64-N5) comprising derived and/or modified sequence from LASV(G502-SLE-2009;Clade IV)__AIT17124__Z (opt4)
aggagagucccgcagucggcguccagcggcucugcuuguucgugugugugucguugcaggccuuauucaagcuuaccaugggcaacaagcaggugaagacccccgaggccaaggacagccccagagccagccugauccccgacgccacccaccugggcccccaguucugcaagagcugcugguucgagaacaagggccugguggagugcaacaaccacuaccugugccugaacugccugacccugcugcugagcgugggcaacagaugccccaucugcaagaugccccugcccaccaagcugagacccagcgugacccccaccgccccccccaccagagccgccgacagcaucggccccccccccuacagccccugaggacuagucccuguucccagagcccacuuuuuuuucuuuuuuugaaauaaaauagccugucuuucagaucucaaaggcucuuuucagagccaccaaaaaaaaaaaaaaaaaaaaaaaaaaaaaaaaaaaaaaaaaaaaaaaaaaaaaaaaaaaaaaaaagaauu

SEQ ID NO: 22094 - RNA, 541 nt, Artificial Sequence
  mRNA product Design a-1 (hSL-A64-N5) comprising derived and/or modified sequence from LASV(G733-SLE-2010;Clade IV)__AIT17152__Z (opt4)
aggagagucccgcagucggcguccagcggcucugcuuguucgugugugugucguugcaggccuuauucaagcuuaccaugggcaacaagcaggccaagacccccgagaccaaggacagccccagagccagccugauccccgacgccacccaccugggcccccaguucugcaagagcugcugguucgagaacaagggccugguggagugcaacaaccacuaccugugccugaacugccugacccugcugcugagcgugagcaacagaugccccaucugcaagaugccccugcccaccaagcugagacccagcaccgcccccaccgccccccccgccggcgccgccgacaacaccagacccccccccuacagccccugaggacuagucccuguucccagagcccacuuuuuuuucuuuuuuugaaauaaaauagccugucuuucagaucucaaaggcucuuuucagagccaccaaaaaaaaaaaaaaaaaaaaaaaaaaaaaaaaaaaaaaaaaaaaaaaaaaaaaaaaaaaaaaaaagaauu

SEQ ID NO: 22095 - RNA, 553 nt, Artificial Sequence
  mRNA product Design a-1 (hSL-A64-N5) comprising derived and/or modified sequence from MOPV/LASV reassortant(IGS-1;Clade IV)__AFY05533__Z (opt4)
aggagagucccgcagucggcguccagcggcucugcuuguucgugugugugucguugcaggccuuauucaagcuuaccaugggcaagacccagagcaagggccagcccagcaccaaccugcugaaggagaccgagcccagacaccccgugauccccgacgccagaggcaccggccccgaguucugcaagagcugcugguucgagagaagaggccuggugagaugcaacgaccacuaccugugccugaacugccugacccugcugcacaccgugagcgacagaugccccaucugcaagcacaagcugcccuucagacuggagcugcagacccagcccaccgccccccccgagaucccccccagccagaaccccccccccuacagccccugaggacuagucccuguucccagagcccacuuuuuuuucuuuuuuugaaauaaaauagccugucuuucagaucucaaaggcucuuuucagagccaccaaaaaaaaaaaaaaaaaaaaaaaaaaaaaaaaaaaaaaaaaaaaaaaaaaaaaaaaaaaaaaaaagaauu

SEQ ID NO: 22096 - RNA, 541 nt, Artificial Sequence
  mRNA product Design a-1 (hSL-A64-N5) comprising derived and/or modified sequence from LASV(LM776-SLE-2012;Clade IV)__AIT17824__Z (opt4)
aggagagucccgcagucggcguccagcggcucugcuuguucgugugugugucguugcaggccuuauucaagcuuaccaugggcaacaagcaggccaaggccagcgaggagaagaacagccccagagccagccugauccccgacgccacccaccugggcccccaguucugcaagagcugcugguucgagaacaagggccugguggagugcaacaaccacuaccugugccugaacugccugacccugcugcugagcgugagcaacagaugccccaucugcaagaugccccugcccaccaagcugagacccagcaccacccccaccgccccccccaccggcgccgccgacagcaucagacccccccccuacagccccugaggacuagucccuguucccagagcccacuuuuuuuucuuuuuuugaaauaaaauagccugucuuucagaucucaaaggcucuuuucagagccaccaaaaaaaaaaaaaaaaaaaaaaaaaaaaaaaaaaaaaaaaaaaaaaaaaaaaaaaaaaaaaaaaagaauu

SEQ ID NO: 22097 - RNA, 541 nt, Artificial Sequence
  mRNA product Design a-1 (hSL-A64-N5) comprising derived and/or modified sequence from LASV(Mad39;Clade IV)__ANH09743__Z (opt4)
aggagagucccgcagucggcguccagcggcucugcuuguucgugugugugucguugcaggccuuauucaagcuuaccaugggcaacaagcaggccaaggccagcgagguggaggacggccccagagccagccugauccccgacgccacccaccugggcccccaguucugcaagagcugcugguucgagaacaagagccugguggagugcaacaaccacuaccugugccugaacugccugacccugcugcugagcgugagcaacagaugccccaucugcaagaugccccugcccaccagacugaagcccagcguggugcccaccgccccccccaccagagccggcgacggcaccagacccccccccuacagccccugaggacuagucccuguucccagagcccacuuuuuuuucuuuuuuugaaauaaaauagccugucuuucagaucucaaaggcucuuuucagagccaccaaaaaaaaaaaaaaaaaaaaaaaaaaaaaaaaaaaaaaaaaaaaaaaaaaaaaaaaaaaaaaaaagaauu

SEQ ID NO: 22098 - RNA, 541 nt, Artificial Sequence
  mRNA product Design a-1 (hSL-A64-N5) comprising derived and/or modified sequence from LASV(Z0947-SLE-2011;Clade IV)__AIT17838__Z (opt4)
aggagagucccgcagucggcguccagcggcucugcuuguucgugugugugucguugcaggccuuauucaagcuuaccaugggcaacaagcaggccaaggugcccgagagcaaggacagccccagagccagccugauccccgacgccacccaccugggcccccaguucugcaagagcugcugguucgagaacaagggccugguggagugcaacaaccacuaccugugccugaacugccugacccugcugcugagcgugagcaacagaugccccaucugcaagaugccccugcccaccaagcugaagcccagcgccgcccccaccgccccccccaccggcgccgccgacagcaucagacccccccccuacagccccugaggacuagucccuguucccagagcccacuuuuuuuucuuuuuuugaaauaaaauagccugucuuucagaucucaaaggcucuuuucagagccaccaaaaaaaaaaaaaaaaaaaaaaaaaaaaaaaaaaaaaaaaaaaaaaaaaaaaaaaaaaaaaaaaagaauu

SEQ ID NO: 22099 - RNA, 541 nt, Artificial Sequence
  mRNA product Design a-1 (hSL-A64-N5) comprising derived and/or modified sequence from LASV(Josiah;Clade IV)__ADY11072/NP_694871__Z (opt5)
aggagagucccgcagucggcguccagcggcucugcuuguucgugugugugucguugcaggccuuauucaagcuuaccaugggcaacaagcaggccaaagcucccgagagcaaggacuccccuagagccucucugaucccggaugcgacccaccucgggccccaauucugcaaaagcuguugguuugaaaauaagggacugguggagugcaacaaucauuaccuuugucugaacugccucacacugcuucuguccgucucuaaucgguguccuauuugcaaaaugccccucccuacgaagcugcgccccagcgcugccccuaccgccccgcccacaggcgcugccgacuccaucagaccucccccuuauucucccugaggacuagucccuguucccagagcccacuuuuuuuucuuuuuuugaaauaaaauagccugucuuucagaucucaaaggcucuuuucagagccaccaaaaaaaaaaaaaaaaaaaaaaaaaaaaaaaaaaaaaaaaaaaaaaaaaaaaaaaaaaaaaaaaagaauu

SEQ ID NO: 22100 - RNA, 544 nt, Artificial Sequence
  mRNA product Design a-1 (hSL-A64-N5) comprising derived and/or modified sequence from LASV(Pinneo-NIG-1969;Clade I)__AIT17834__Z (opt5)
aggagagucccgcagucggcguccagcggcucugcuuguucgugugugugucguugcaggccuuauucaagcuuaccaugggcaacaagcagaccagaagcccucccaaaccggagcacccccggccuacacugcuccccgacgccucccaucuggggccucaauucugcaagucuuguugguuugaaaauaaaggacuuguggagugcaacaaucacuaccugugucucaacugccugacgcuucugcucagcgucuccgaucgcugucccaucugcaagaugccucugccgaccaaacuggcuguuagaacacagcccucugccccuccccucaaucagggcaacacccagagcuccccucccccguauucuccuugaggacuagucccuguucccagagcccacuuuuuuuucuuuuuuugaaauaaaauagccugucuuucagaucucaaaggcucuuuucagagccaccaaaaaaaaaaaaaaaaaaaaaaaaaaaaaaaaaaaaaaaaaaaaaaaaaaaaaaaaaaaaaaaaagaauu

SEQ ID NO: 22101 - RNA, 541 nt, Artificial Sequence
  mRNA product Design a-1 (hSL-A64-N5) comprising derived and/or modified sequence from LASV(Nig08-04;Clade II)__ADU56612__Z (opt5)
aggagagucccgcagucggcguccagcggcucugcuuguucgugugugugucguugcaggccuuauucaagcuuaccaugggcaacagacagacccggcccacagaggccacggaacaaagccgcgcccaccuggugccugacgccucccaucucgggccgcaguucugcaagucuuguugguuugagaauagaggacuggucgaaugcaacaaucacuaccuuugucugaacugccucagccugcuucuguccguuucuagccggugucccaucugcaaaaugccucuccccacccgccugaaggcguccgcucagccuucugcucccccuacagaggccccgcagaauaccacacccccucccuauaccccuugaggacuagucccuguucccagagcccacuuuuuuuucuuuuuuugaaauaaaauagccugucuuucagaucucaaaggcucuuuucagagccaccaaaaaaaaaaaaaaaaaaaaaaaaaaaaaaaaaaaaaaaaaaaaaaaaaaaaaaaaaaaaaaaaagaauu

SEQ ID NO: 22102 - RNA, 541 nt, Artificial Sequence
  mRNA product Design a-1 (hSL-A64-N5) comprising derived and/or modified sequence from LASV(Nig08-A19;Clade III)__ADU56620__Z (opt5)
aggagagucccgcagucggcguccagcggcucugcuuguucgugugugugucguugcaggccuuauucaagcuuaccaugggcgggaagcacaccaaaccccagagagagagcaacuccccucgggccucucugaucccggacgcuacacaucucggaccccaauucugcaagagcuguugguuugaaaauaaaggccugguggagugcaacaaucacuaccuuugucugaacugccucacgcugcuucuguccgucucuaaucgcuguccuauuugcaagaugccccucccuaccagacugcgggccagcacaaaccccaccgcgccucagguugaacagguggggccgacaaaucccccucccuauuccccuugaggacuagucccuguucccagagcccacuuuuuuuucuuuuuuugaaauaaaauagccugucuuucagaucucaaaggcucuuuucagagccaccaaaaaaaaaaaaaaaaaaaaaaaaaaaaaaaaaaaaaaaaaaaaaaaaaaaaaaaaaaaaaaaaagaauu

SEQ ID NO: 22103 - RNA, 541 nt, Artificial Sequence
  mRNA product Design a-1 (hSL-A64-N5) comprising derived and/or modified sequence from LASV(AV;Clade V)__CCA30312__Z (opt5)
aggagagucccgcagucggcguccagcggcucugcuuguucgugugugugucguugcaggccuuauucaagcuuaccaugggcaacagacaggccaagaaucccgagguggaaaacagcccucgggcuucccugaucccggacgccacccaccucgggccccaauucugcaaaucuuguugguuugagaauaagggacuggucgaaugcaacaaucauuaccuuugucugaacugccucagccugcuucuguccguuucuaaucgcuguccuauuugcaaaaugccccucccuacaagacugcggcccacgaccacaccuaccgcgccgcagaucauuaaggagaacacaaccaaucccccucccuauacaccuugaggacuagucccuguucccagagcccacuuuuuuuucuuuuuuugaaauaaaauagccugucuuucagaucucaaaggcucuuuucagagccaccaaaaaaaaaaaaaaaaaaaaaaaaaaaaaaaaaaaaaaaaaaaaaaaaaaaaaaaaaaaaaaaaagaauu

SEQ ID NO: 22104 - RNA, 541 nt, Artificial Sequence
  mRNA product Design a-1 (hSL-A64-N5) comprising derived and/or modified sequence from LASV(Togo/2016/7082;Clade VI)__AMR44579__Z (opt5)
aggagagucccgcagucggcguccagcggcucugcuuguucgugugugugucguugcaggccuuauucaagcuuaccaugggcgccagacagaccaagcaaccccagaucgaggggagcccucgggcuucccuggugccggacgccucucaccucggaccccaguucugcaaaagcuguugguuugaaaacaagggccuggucgagugcaauaaccauuaccuuugucugaauugccucucccugcuucugucuguuagcaaccgcuguccuauuugcaaaaugccccucccuacaaagcugagaguguccucugcgcccagcgcuccuccggccgccacggcucagcccgggaccccucccccuuauucccccugaggacuagucccuguucccagagcccacuuuuuuuucuuuuuuugaaauaaaauagccugucuuucagaucucaaaggcucuuuucagagccaccaaaaaaaaaaaaaaaaaaaaaaaaaaaaaaaaaaaaaaaaaaaaaaaaaaaaaaaaaaaaaaaaagaauu

SEQ ID NO: 22105 - RNA, 541 nt, Artificial Sequence
  mRNA product Design a-1 (hSL-A64-N5) comprising derived and/or modified sequence from LASV(KAK-428;Clade n.d. (VII))__ANH09761__Z (opt5)
aggagagucccgcagucggcguccagcggcucugcuuguucgugugugugucguugcaggccuuauucaagcuuaccaugggcaacaaggggaccaaacccacacagaauagcgagccuuccagagccaaccuggugccggacgcuucuuaccucggaccccaauucugcaagagcuguugguuugaaaauaaaggccuggucgagugcaacaaucacuaucuuugucugaacugccucacgaugcugcuuuccguuuccaaucgguguccuaucugcaagaugccccugccuaccaaaauuaaggccagcgggucccccucugcgccuccgacagaagcuaacagcgccgugucucccccucccuacaccccuugaggacuagucccuguucccagagcccacuuuuuuuucuuuuuuugaaauaaaauagccugucuuucagaucucaaaggcucuuuucagagccaccaaaaaaaaaaaaaaaaaaaaaaaaaaaaaaaaaaaaaaaaaaaaaaaaaaaaaaaaaaaaaaaaagaauu

SEQ ID NO: 22106 - RNA, 541 nt, Artificial Sequence
  mRNA product Design a-1 (hSL-A64-N5) comprising derived and/or modified sequence from LASV(ISTH0009-NIG-2011;Clade II)__AIT17402__Z (opt5)
aggagagucccgcagucggcguccagcggcucugcuuguucgugugugugucguugcaggccuuauucaagcuuaccaugggcaacagacaggccaagagcaccaaaguggacgagcaccaacgggcucaucugguccccgaugccucccaccucgggccucaguucugcaagucuuguugguuugaaaaucgcggacugguugagugcaacaaucauuaccuuugucugaacugccucagccugcuucuguccgugucuagcagauguccgaucugcaaaaugccccucccuacaaagcugaaagcggcugcccagcccuccgccccuucuacggaaaccauucagaauacaacacccccuccguauacccccugaggacuagucccuguucccagagcccacuuuuuuuucuuuuuuugaaauaaaauagccugucuuucagaucucaaaggcucuuuucagagccaccaaaaaaaaaaaaaaaaaaaaaaaaaaaaaaaaaaaaaaaaaaaaaaaaaaaaaaaaaaaaaaaaagaauu

SEQ ID NO: 22107 - RNA, 541 nt, Artificial Sequence
  mRNA product Design a-1 (hSL-A64-N5) comprising derived and/or modified sequence from LASV(ISTH2010-NIG-2012;Clade II)__AIT17480__Z (opt5)
aggagagucccgcagucggcguccagcggcucugcuuguucgugugugugucguugcaggccuuauucaagcuuaccaugggcaacagacacgccaagagcaccaaaguggacgagcaucagcgggcucaccugguccccgaugccucccaucucgggccucaauucugcaagucuuguugguuugaaaaucgcggacugguugagugcaacaaucacuaccuuugucugaacugccucagccugcuucuguccgugucuagcagauguccgaucugcaaaaugccccucccuacaaagcugaaagcggcugcccagcccuccgccccuucuacggaagugauucagagcaccacacccccuccguauacccccugaggacuagucccuguucccagagcccacuuuuuuuucuuuuuuugaaauaaaauagccugucuuucagaucucaaaggcucuuuucagagccaccaaaaaaaaaaaaaaaaaaaaaaaaaaaaaaaaaaaaaaaaaaaaaaaaaaaaaaaaaaaaaaaaagaauu

SEQ ID NO: 22108 - RNA, 541 nt, Artificial Sequence
  mRNA product Design a-1 (hSL-A64-N5) comprising derived and/or modified sequence from LASV(Lassa virus/H.sapiens-wt/NGA/2016/ISTH_0017;Clade II)__AVO03713__Z (opt5)
aggagagucccgcagucggcguccagcggcucugcuuguucgugugugugucguugcaggccuuauucaagcuuaccaugggcaacagacaggccaagagcaccaaaguggacgagcaccaacgggcucaucugguccccgaugccucccaccucgggccucaguucugcaagucuuguugguuugaaaaucgcggacugguugagugcaacaaucauuaccuuugucugaacugccucagccugcuucuguccgugucuagcagauguccgaucugcaaaaugccccucccuacaaagcugaaagcggcuacgcagcccuccgccccuucuaccgaagugaaucagaacacaacacccccuccguauacccccugaggacuagucccuguucccagagcccacuuuuuuuucuuuuuuugaaauaaaauagccugucuuucagaucucaaaggcucuuuucagagccaccaaaaaaaaaaaaaaaaaaaaaaaaaaaaaaaaaaaaaaaaaaaaaaaaaaaaaaaaaaaaaaaaagaauu

SEQ ID NO: 22109 - RNA, 541 nt, Artificial Sequence
  mRNA product Design a-1 (hSL-A64-N5) comprising derived and/or modified sequence from LASV(Lassa virus/H.sapiens-wt/NGA/2018/ISTH_0959;Clade II)__AVV65084__Z (opt5)
aggagagucccgcagucggcguccagcggcucugcuuguucgugugugugucguugcaggccuuauucaagcuuaccaugggcaacaagcaggccaaaagcaccaagguggacgagcaccaaagagcucaucugguccccgaugccucccaccucgggccucaguucugcaaaucuuguugguuugaaaaucggggacugguugagugcaacaaucauuaccuuugucugaacugccucagccugcuucuguccgugucuagccgcuguccgaucugcaagaugccccucccuacaaaacugaaggcggcugcccagcccuccgccccuucuacggaagcuauucagagcaccacacccccuccguauacccccugaggacuagucccuguucccagagcccacuuuuuuuucuuuuuuugaaauaaaauagccugucuuucagaucucaaaggcucuuuucagagccaccaaaaaaaaaaaaaaaaaaaaaaaaaaaaaaaaaaaaaaaaaaaaaaaaaaaaaaaaaaaaaaaaagaauu

SEQ ID NO: 22110 - RNA, 541 nt, Artificial Sequence
  mRNA product Design a-1 (hSL-A64-N5) comprising derived and/or modified sequence from LASV(LASV003-NIG-2008;Clade II)__AIT17578__Z (opt5)
aggagagucccgcagucggcguccagcggcucugcuuguucgugugugugucguugcaggccuuauucaagcuuaccaugggcaacagacaggccaagagcaccaaaguggacgagcaccaacgggcucaucugguccccgaugccucccaccucgggccucaguucugcaagucuuguugguuugaaaauaaaggacugguugagugcaacaaucauuaccuuugucugaacugccucagccugcuucuguccgugucuagccgcuguccgaucugcaagaugccccucccuacaaaacugagagcggcugcccagcccuccgccccuucuacggaaagcgcucagaauaccgcucccccuccguaugcccccugaggacuagucccuguucccagagcccacuuuuuuuucuuuuuuugaaauaaaauagccugucuuucagaucucaaaggcucuuuucagagccaccaaaaaaaaaaaaaaaaaaaaaaaaaaaaaaaaaaaaaaaaaaaaaaaaaaaaaaaaaaaaaaaaagaauu

SEQ ID NO: 22111 - RNA, 541 nt, Artificial Sequence
  mRNA product Design a-1 (hSL-A64-N5) comprising derived and/or modified sequence from LASV(LASV035-NIG-2009;Clade II)__AIT17586__Z (opt5)
aggagagucccgcagucggcguccagcggcucugcuuguucgugugugugucguugcaggccuuauucaagcuuaccaugggcaacaagcaggccaaaagcaccaagguggacgagcaccaaagagcucaucugguccccgaugccucccaccucgggccucaguucugcaaaucuuguugguuugaaaaucggggacugguugagugcaacaaucauuaccuuugucugaacugccucagccugcuucuguccgugucuagccgcuguccgaucugcaagaugccccucccuacaagacugaaagcggcugcccagcccuccgccccuucuacggaagugacccagaauacaacacccccuccguauacccccugaggacuagucccuguucccagagcccacuuuuuuuucuuuuuuugaaauaaaauagccugucuuucagaucucaaaggcucuuuucagagccaccaaaaaaaaaaaaaaaaaaaaaaaaaaaaaaaaaaaaaaaaaaaaaaaaaaaaaaaaaaaaaaaaagaauu

SEQ ID NO: 22112 - RNA, 541 nt, Artificial Sequence
  mRNA product Design a-1 (hSL-A64-N5) comprising derived and/or modified sequence from LASV(LASV1000-NIG-2009;Clade II)__AIT17780__Z (opt5)
aggagagucccgcagucggcguccagcggcucugcuuguucgugugugugucguugcaggccuuauucaagcuuaccaugggcaacagacagaccaagagcacaaaaguggacgagcaccaacgggccuaccugguccccgaugcuucccuccuggggccucaguucugcaagucuuguugguuugaaaauaaaggacuuguugagugcaacaaucauuaucugugucucaacugccugagccuucugcucuccgugucuagccgcuguccgaucugcaagaugccccugccuacgagacugaaagccgcggcucagcccuccgccccucccaccgaagccauucagaauacaaccccuccgcccuacacaccuugaggacuagucccuguucccagagcccacuuuuuuuucuuuuuuugaaauaaaauagccugucuuucagaucucaaaggcucuuuucagagccaccaaaaaaaaaaaaaaaaaaaaaaaaaaaaaaaaaaaaaaaaaaaaaaaaaaaaaaaaaaaaaaaaagaauu

SEQ ID NO: 22113 - RNA, 541 nt, Artificial Sequence
  mRNA product Design a-1 (hSL-A64-N5) comprising derived and/or modified sequence from LASV(LASV221-NIG-2010;Clade II)__AIT17622__Z (opt5)
aggagagucccgcagucggcguccagcggcucugcuuguucgugugugugucguugcaggccuuauucaagcuuaccaugggcaacagacaggccaagagcaccaaaguggacgagcaccaacgggcucaucugguccccgaugccucccaccucgggccucaguucugcaagucuuguugguuugaaaaucgcggacugguugagugcaacaaucauuaccuuugucugaacugccucagccugcuucuguccgugucuagcagauguccgaucugcaaaaugccccucccuacaaagcugaaagcggcuacgcagcccuccgccccuucuaccgaagugacacagaauaccauucccccuccguauagccccugaggacuagucccuguucccagagcccacuuuuuuuucuuuuuuugaaauaaaauagccugucuuucagaucucaaaggcucuuuucagagccaccaaaaaaaaaaaaaaaaaaaaaaaaaaaaaaaaaaaaaaaaaaaaaaaaaaaaaaaaaaaaaaaaagaauu

SEQ ID NO: 22114 - RNA, 541 nt, Artificial Sequence
  mRNA product Design a-1 (hSL-A64-N5) comprising derived and/or modified sequence from LASV(LASV237-NIG-2010;Clade II)__AIT17636__Z (opt5)
aggagagucccgcagucggcguccagcggcucugcuuguucgugugugugucguugcaggccuuauucaagcuuaccaugggcaacagacaggccaagagcaccaaaguggacgagcaccaacgggcucaucugguccccgaugccucccaccucgggccucaguucugcaagucuuguugguuugaaaaucgcggacugguugagugcaacaaucauuaccuuugucugaacugccucagccugcuucuguccgugucuagcagauguccgaucugcaaaaugccccucccuacaaagcugaaagcggcugcccagcccuccgccccuucuauugaaacgauccagaauaccacacccccuccguauacccccugaggacuagucccuguucccagagcccacuuuuuuuucuuuuuuugaaauaaaauagccugucuuucagaucucaaaggcucuuuucagagccaccaaaaaaaaaaaaaaaaaaaaaaaaaaaaaaaaaaaaaaaaaaaaaaaaaaaaaaaaaaaaaaaaagaauu

SEQ ID NO: 22115 - RNA, 541 nt, Artificial Sequence
  mRNA product Design a-1 (hSL-A64-N5) comprising derived and/or modified sequence from LASV(LASV253-NIG-2011;Clade II)__AIT17668__Z (opt5)
aggagagucccgcagucggcguccagcggcucugcuuguucgugugugugucguugcaggccuuauucaagcuuaccaugggcaacagacaggccaagagcaccaaaguggacgagcaccaacgggcucaucugguccccgaugccucccaccucgggccucaguucugcaagucuuguugguuugaaaauaaaggacugguugagugcaacaaucauuaccuuugucugaacugccucagccugcuucuguccgugucuagccgcuguccgaucugcaagaugccccucccuacaaaacugaagacgaccgcgcagcccuccgcuccucccacagaagccgccaagaauaccgcuccuccgcccuaugccccuugaggacuagucccuguucccagagcccacuuuuuuuucuuuuuuugaaauaaaauagccugucuuucagaucucaaaggcucuuuucagagccaccaaaaaaaaaaaaaaaaaaaaaaaaaaaaaaaaaaaaaaaaaaaaaaaaaaaaaaaaaaaaaaaaagaauu

SEQ ID NO: 22116 - RNA, 541 nt, Artificial Sequence
  mRNA product Design a-1 (hSL-A64-N5) comprising derived and/or modified sequence from LASV(G1180-SLE-2010;Clade IV)__AIT17166__Z (opt5)
aggagagucccgcagucggcguccagcggcucugcuuguucgugugugugucguugcaggccuuauucaagcuuaccaugggcaacaagcaggccaaagcucccgaggccaaggacagcccuagagcgucccugaucccggaugcuacccaccucgggccccaauucugcaaaucuuguugguuugaaacaaagggacugguggagugcaauaaccauuaccuuugucugaauugccucacgcugcuucugagcgucuccaaccgguguccuauuugcaaaaugccccucccuaccaagcugcgccccucugccacaccuaccgccccgcccacagaagcugccgacagcaucggcccucccccuuauucccccugaggacuagucccuguucccagagcccacuuuuuuuucuuuuuuugaaauaaaauagccugucuuucagaucucaaaggcucuuuucagagccaccaaaaaaaaaaaaaaaaaaaaaaaaaaaaaaaaaaaaaaaaaaaaaaaaaaaaaaaaaaaaaaaaagaauu

SEQ ID NO: 22117 - RNA, 541 nt, Artificial Sequence
  mRNA product Design a-1 (hSL-A64-N5) comprising derived and/or modified sequence from LASV(G1442-SLE-2011;Clade IV)__AIT17178__Z (opt5)
aggagagucccgcagucggcguccagcggcucugcuuguucgugugugugucguugcaggccuuauucaagcuuaccaugggcaacaagcaggccaaagcuagcgaggccaaggacucccccagagcgucucugaucccugaugcuacccaccucgggccgcaauucugcaaaagcuguugguuugaaaauaagggacugguggagugcaacaaucauuaccuuugucugaacugccucucccugcuucugucugucagcucccggugucccauuugcaaaaugccucuccccacacgccugagaccuucuacggcccccaccgccccuccggcucgggccggcgacaauaucaagcccccucccuauagcccuugaggacuagucccuguucccagagcccacuuuuuuuucuuuuuuugaaauaaaauagccugucuuucagaucucaaaggcucuuuucagagccaccaaaaaaaaaaaaaaaaaaaaaaaaaaaaaaaaaaaaaaaaaaaaaaaaaaaaaaaaaaaaaaaaagaauu

SEQ ID NO: 22118 - RNA, 541 nt, Artificial Sequence
  mRNA product Design a-1 (hSL-A64-N5) comprising derived and/or modified sequence from LASV(G502-SLE-2009;Clade IV)__AIT17124__Z (opt5)
aggagagucccgcagucggcguccagcggcucugcuuguucgugugugugucguugcaggccuuauucaagcuuaccaugggcaacaaacaggugaagacccccgaggccaaggacagcccuagagcuucccugaucccggaugccacacaccucgggccccaauucugcaaaucuuguugguuugaaaauaagggacuggucgagugcaacaaucauuaccuuugucugaacugccucacgcugcuucugagcguuggcaaucgguguccuauuugcaaaaugccccucccuaccaagcugcgccccuccgugacaccuaccgcgccgcccacaagagcugccgacucuaucgggccucccccuuauagccccugaggacuagucccuguucccagagcccacuuuuuuuucuuuuuuugaaauaaaauagccugucuuucagaucucaaaggcucuuuucagagccaccaaaaaaaaaaaaaaaaaaaaaaaaaaaaaaaaaaaaaaaaaaaaaaaaaaaaaaaaaaaaaaaaagaauu

SEQ ID NO: 22119 - RNA, 541 nt, Artificial Sequence
  mRNA product Design a-1 (hSL-A64-N5) comprising derived and/or modified sequence from LASV(G733-SLE-2010;Clade IV)__AIT17152__Z (opt5)
aggagagucccgcagucggcguccagcggcucugcuuguucgugugugugucguugcaggccuuauucaagcuuaccaugggcaacaagcaggccaaaacccccgagacaaaggacagcccuagagcuucccugaucccggaugccacgcaccucgggccccaauucugcaaaucuuguugguuugaaaauaagggacugguggagugcaacaaucauuaccuuugucugaacugccucacccugcuucugagcgucuccaaucgguguccuauuugcaaaaugccccucccuacaaagcugcgccccucuaccgcgccuacagcuccgcccgccggcgccgcugacaacaccagaccucccccuuauagccccugaggacuagucccuguucccagagcccacuuuuuuuucuuuuuuugaaauaaaauagccugucuuucagaucucaaaggcucuuuucagagccaccaaaaaaaaaaaaaaaaaaaaaaaaaaaaaaaaaaaaaaaaaaaaaaaaaaaaaaaaaaaaaaaaagaauu

SEQ ID NO: 22120 - RNA, 553 nt, Artificial Sequence
  mRNA product Design a-1 (hSL-A64-N5) comprising derived and/or modified sequence from MOPV/LASV reassortant(IGS-1;Clade IV)__AFY05533__Z (opt5)
aggagagucccgcagucggcguccagcggcucugcuuguucgugugugugucguugcaggccuuauucaagcuuaccaugggcaagacccagagcaaagggcaacccuccacaaaccugcucaaggagacggaaccuagacacccggugauccccgacgcccggggaaccggcccugaguucugcaaaucuuguugguuugaacgcagagggcugguccggugcaaugaucauuaccuuugucugaacugccucacacugcuucacaccguuagcgaccgcugucccaucugcaagcauaaacugccuuucagacucgagcugcagacacagcccaccgcuccuccggaaauucccccuucccagaaucccccucccuauucuccgugaggacuagucccuguucccagagcccacuuuuuuuucuuuuuuugaaauaaaauagccugucuuucagaucucaaaggcucuuuucagagccaccaaaaaaaaaaaaaaaaaaaaaaaaaaaaaaaaaaaaaaaaaaaaaaaaaaaaaaaaaaaaaaaaagaauu

SEQ ID NO: 22121 - RNA, 541 nt, Artificial Sequence
  mRNA product Design a-1 (hSL-A64-N5) comprising derived and/or modified sequence from LASV(LM776-SLE-2012;Clade IV)__AIT17824__Z (opt5)
aggagagucccgcagucggcguccagcggcucugcuuguucgugugugugucguugcaggccuuauucaagcuuaccaugggcaacaagcaggccaaagcuagcgaggaaaagaacucccccagagccucucugaucccugacgcgacccaccucgggccgcaauucugcaaaagcuguugguuugagaauaagggacugguggaaugcaauaaccauuaccuuugucugaauugccucacacugcuucuguccgucucuaaccggugucccauuugcaaaaugccucuccccacgaagcugcgcccuagcaccacacccaccgcuccuccgacaggcgccgccgauuccaucagacccccucccuauucuccuugaggacuagucccuguucccagagcccacuuuuuuuucuuuuuuugaaauaaaauagccugucuuucagaucucaaaggcucuuuucagagccaccaaaaaaaaaaaaaaaaaaaaaaaaaaaaaaaaaaaaaaaaaaaaaaaaaaaaaaaaaaaaaaaaagaauu

SEQ ID NO: 22122 - RNA, 541 nt, Artificial Sequence
  mRNA product Design a-1 (hSL-A64-N5) comprising derived and/or modified sequence from LASV(Mad39;Clade IV)__ANH09743__Z (opt5)
aggagagucccgcagucggcguccagcggcucugcuuguucgugugugugucguugcaggccuuauucaagcuuaccaugggcaacaagcaggccaaagcuagcgagguggaagacgggcccagagccucccugaucccugaugcgacccaccucggaccgcaauucugcaagucuuguugguuugagaauaaaagccuggucgaaugcaacaaucauuaccuuugucugaacugccucacacugcuucuguccguuucuaaucggugucccauuugcaagaugccucuccccacgcgccugaaaccuagcguggugcccaccgcuccuccgacaagagccggcgacgggacccggcccccucccuauuccccuugaggacuagucccuguucccagagcccacuuuuuuuucuuuuuuugaaauaaaauagccugucuuucagaucucaaaggcucuuuucagagccaccaaaaaaaaaaaaaaaaaaaaaaaaaaaaaaaaaaaaaaaaaaaaaaaaaaaaaaaaaaaaaaaaagaauu

SEQ ID NO: 22123 - RNA, 541 nt, Artificial Sequence
  mRNA product Design a-1 (hSL-A64-N5) comprising derived and/or modified sequence from LASV(Z0947-SLE-2011;Clade IV)__AIT17838__Z (opt5)
aggagagucccgcagucggcguccagcggcucugcuuguucgugugugugucguugcaggccuuauucaagcuuaccaugggcaacaagcaggccaaagugcccgagagcaaggacuccccuagagcuucucugaucccggaugccacccaccucgggccccaauucugcaaaagcuguugguuugaaaauaagggacuggucgagugcaacaaucauuaccuuugucugaacugccucacacugcuucuguccguuucuaaucgguguccuauuugcaaaaugccccucccuacgaagcugaagcccagcgcggcuccuaccgccccgcccacaggcgccgcugacuccauccgcccucccccuuauucucccugaggacuagucccuguucccagagcccacuuuuuuuucuuuuuuugaaauaaaauagccugucuuucagaucucaaaggcucuuuucagagccaccaaaaaaaaaaaaaaaaaaaaaaaaaaaaaaaaaaaaaaaaaaaaaaaaaaaaaaaaaaaaaaaaagaauu

SEQ ID NO: 22124 - RNA, 572 nt, Artificial Sequence
  mRNA product Design a-1 (hSL-A100) comprising derived and/or modified sequence from LASV(Josiah;Clade IV)__ADY11072/NP_694871__Z (opt1)
aggagagucccgcagucggcguccagcggcucugcuuguucgugugugugucguugcaggccuuauucaagcuuaccaugggcaacaagcaggccaaggcccccgagagcaaggacuccccgcgcgcgagccugauccccgacgccacccaccucgggccccaguucugcaaguccugcugguucgagaacaagggccugguggagugcaacaaccacuaccugugccucaacugccugacccugcuccugagcgucuccaaccggugccccaucugcaagaugccgcugcccacgaagcuccgccccagcgccgcccccaccgccccgcccaccggggcggccgacuccauccggcccccgcccuacagccccugaggacuagucccuguucccagagcccacuuuuuuuucuuuuuuugaaauaaaauagccugucuuucagaucucaaaggcucuuuucagagccaccaaaaaaaaaaaaaaaaaaaaaaaaaaaaaaaaaaaaaaaaaaaaaaaaaaaaaaaaaaaaaaaaaaaaaaaaaaaaaaaaaaaaaaaaaaaaaaaaaaaaa

SEQ ID NO: 22125 - RNA, 575 nt, Artificial Sequence
  mRNA product Design a-1 (hSL-A100) comprising derived and/or modified sequence from LASV(Pinneo-NIG-1969;Clade I)__AIT17834__Z (opt1)
aggagagucccgcagucggcguccagcggcucugcuuguucgugugugugucguugcaggccuuauucaagcuuaccaugggcaacaagcagacccgcagcccgcccaagcccgagcacccccggcccacccugcuccccgacgccucccaccuggggccccaguucugcaagagcugcugguucgagaacaagggccugguggagugcaacaaccacuaccucugccugaacugccugacgcuccugcuguccgucagcgaccgcugccccaucugcaagaugccccuccccaccaagcuggccgugcggacccagcccuccgcgccgccccugaaccaggggaacacccagagcagcccgccgcccuacucccccugaggacuagucccuguucccagagcccacuuuuuuuucuuuuuuugaaauaaaauagccugucuuucagaucucaaaggcucuuuucagagccaccaaaaaaaaaaaaaaaaaaaaaaaaaaaaaaaaaaaaaaaaaaaaaaaaaaaaaaaaaaaaaaaaaaaaaaaaaaaaaaaaaaaaaaaaaaaaaaaaaaaaa

SEQ ID NO: 22126 - RNA, 572 nt, Artificial Sequence
  mRNA product Design a-1 (hSL-A100) comprising derived and/or modified sequence from LASV(Nig08-04;Clade II)__ADU56612__Z (opt1)
aggagagucccgcagucggcguccagcggcucugcuuguucgugugugugucguugcaggccuuauucaagcuuaccaugggcaaccgccagacccggcccaccgaggccacggagcagagccgcgcccaccuggugccggacgccucccaccucgggccccaguucugcaagagcugcugguucgagaaccggggccuggucgagugcaacaaccacuaccugugccucaacugccugucccugcuccugagcguguccagccgcugccccaucugcaagaugccccugccgacccggcucaaggccuccgcccagcccagcgccccgcccaccgaggcgccccagaacaccacgcccccgcccuacacccccugaggacuagucccuguucccagagcccacuuuuuuuucuuuuuuugaaauaaaauagccugucuuucagaucucaaaggcucuuuucagagccaccaaaaaaaaaaaaaaaaaaaaaaaaaaaaaaaaaaaaaaaaaaaaaaaaaaaaaaaaaaaaaaaaaaaaaaaaaaaaaaaaaaaaaaaaaaaaaaaaaaaaa

SEQ ID NO: 22127 - RNA, 572 nt, Artificial Sequence
  mRNA product Design a-1 (hSL-A100) comprising derived and/or modified sequence from LASV(Nig08-A19;Clade III)__ADU56620__Z (opt1)
aggagagucccgcagucggcguccagcggcucugcuuguucgugugugugucguugcaggccuuauucaagcuuaccaugggcgggaagcacaccaagccccagcgcgagagcaacuccccgcgggccagccugauccccgacgccacccaccucggcccccaguucugcaaguccugcugguucgagaacaaggggcugguggagugcaacaaccacuaccugugccucaacugccugacgcugcuccugagcguguccaaccgcugccccaucugcaagaugccccugcccacccggcuccgcgccagcaccaaccccaccgcgccccagguggagcaggucggcccgacgaacccgccgcccuacucccccugaggacuagucccuguucccagagcccacuuuuuuuucuuuuuuugaaauaaaauagccugucuuucagaucucaaaggcucuuuucagagccaccaaaaaaaaaaaaaaaaaaaaaaaaaaaaaaaaaaaaaaaaaaaaaaaaaaaaaaaaaaaaaaaaaaaaaaaaaaaaaaaaaaaaaaaaaaaaaaaaaaaaa

SEQ ID NO: 22128 - RNA, 572 nt, Artificial Sequence
  mRNA product Design a-1 (hSL-A100) comprising derived and/or modified sequence from LASV(AV;Clade V)__CCA30312__Z (opt1)
aggagagucccgcagucggcguccagcggcucugcuuguucgugugugugucguugcaggccuuauucaagcuuaccaugggcaaccgccaggccaagaaccccgagguggagaacagcccccgggccucccugauccccgacgcgacccaccucgggccccaguucugcaagagcugcugguucgagaacaagggccuggucgagugcaacaaccacuaccugugccucaacugccugucccugcuccugagcguguccaaccgcugccccaucugcaagaugccgcugcccacccggcuccgccccacgaccacccccaccgccccgcagaucaucaaggagaacacgaccaacccgccgcccuacacccccugaggacuagucccuguucccagagcccacuuuuuuuucuuuuuuugaaauaaaauagccugucuuucagaucucaaaggcucuuuucagagccaccaaaaaaaaaaaaaaaaaaaaaaaaaaaaaaaaaaaaaaaaaaaaaaaaaaaaaaaaaaaaaaaaaaaaaaaaaaaaaaaaaaaaaaaaaaaaaaaaaaaaa

SEQ ID NO: 22129 - RNA, 572 nt, Artificial Sequence
  mRNA product Design a-1 (hSL-A100) comprising derived and/or modified sequence from LASV(Togo/2016/7082;Clade VI)__AMR44579__Z (opt1)
aggagagucccgcagucggcguccagcggcucugcuuguucgugugugugucguugcaggccuuauucaagcuuaccaugggcgcccgccagaccaagcagccccagaucgaggggagcccccgggccucccuggugcccgacgcgagccaccucggcccccaguucugcaaguccugcugguucgagaacaaggggcuggucgagugcaacaaccacuaccugugccucaacugccugagccugcuccuguccgugagcaaccgcugccccaucugcaagaugccgcugcccaccaagcuccggguguccagcgcccccuccgcgcccccggccgccacggcccagcccggcaccccgccgcccuacagccccugaggacuagucccuguucccagagcccacuuuuuuuucuuuuuuugaaauaaaauagccugucuuucagaucucaaaggcucuuuucagagccaccaaaaaaaaaaaaaaaaaaaaaaaaaaaaaaaaaaaaaaaaaaaaaaaaaaaaaaaaaaaaaaaaaaaaaaaaaaaaaaaaaaaaaaaaaaaaaaaaaaaaa

SEQ ID NO: 22130 - RNA, 572 nt, Artificial Sequence
  mRNA product Design a-1 (hSL-A100) comprising derived and/or modified sequence from LASV(KAK-428;Clade n.d. (VII))__ANH09761__Z (opt1)
aggagagucccgcagucggcguccagcggcucugcuuguucgugugugugucguugcaggccuuauucaagcuuaccaugggcaacaaggggaccaagcccacccagaacagcgagcccucccgcgccaaccuggugcccgacgccagcuaccucggcccccaguucugcaaguccugcugguucgagaacaaggggcuggucgagugcaacaaccacuaccugugccucaacugccugacgaugcugcucagcguguccaaccggugccccaucugcaagaugccgcugcccaccaagaucaaggccagcggcucccccagcgcgcccccgaccgaggccaacuccgccgugagcccgccgcccuacacccccugaggacuagucccuguucccagagcccacuuuuuuuucuuuuuuugaaauaaaauagccugucuuucagaucucaaaggcucuuuucagagccaccaaaaaaaaaaaaaaaaaaaaaaaaaaaaaaaaaaaaaaaaaaaaaaaaaaaaaaaaaaaaaaaaaaaaaaaaaaaaaaaaaaaaaaaaaaaaaaaaaaaaa

SEQ ID NO: 22131 - RNA, 572 nt, Artificial Sequence
  mRNA product Design a-1 (hSL-A100) comprising derived and/or modified sequence from LASV(ISTH0009-NIG-2011;Clade II)__AIT17402__Z (opt1)
aggagagucccgcagucggcguccagcggcucugcuuguucgugugugugucguugcaggccuuauucaagcuuaccaugggcaaccgccaggccaagagcaccaagguggacgagcaccagcgggcccaccugguccccgacgcgucccaccucgggccccaguucugcaagagcugcugguucgagaaccgcggccugguggagugcaacaaccacuaccugugccucaacugccugucccugcuccugagcguguccagccggugccccaucugcaagaugccccugcccaccaagcucaaggccgccgcccagccguccgcccccagcacggagaccauccagaacaccaccccgccgcccuacacgcccugaggacuagucccuguucccagagcccacuuuuuuuucuuuuuuugaaauaaaauagccugucuuucagaucucaaaggcucuuuucagagccaccaaaaaaaaaaaaaaaaaaaaaaaaaaaaaaaaaaaaaaaaaaaaaaaaaaaaaaaaaaaaaaaaaaaaaaaaaaaaaaaaaaaaaaaaaaaaaaaaaaaaa

SEQ ID NO: 22132 - RNA, 572 nt, Artificial Sequence
  mRNA product Design a-1 (hSL-A100) comprising derived and/or modified sequence from LASV(ISTH2010-NIG-2012;Clade II)__AIT17480__Z (opt1)
aggagagucccgcagucggcguccagcggcucugcuuguucgugugugugucguugcaggccuuauucaagcuuaccaugggcaaccgccacgccaagagcaccaagguggacgagcaccagcgggcccaccugguccccgacgcgucccaccucgggccccaguucugcaagagcugcugguucgagaaccgcggccugguggagugcaacaaccacuaccugugccucaacugccugucccugcuccugagcguguccagccggugccccaucugcaagaugccccugcccaccaagcucaaggccgccgcccagccguccgcccccagcacggaggucauccaguccaccaccccgccgcccuacacccccugaggacuagucccuguucccagagcccacuuuuuuuucuuuuuuugaaauaaaauagccugucuuucagaucucaaaggcucuuuucagagccaccaaaaaaaaaaaaaaaaaaaaaaaaaaaaaaaaaaaaaaaaaaaaaaaaaaaaaaaaaaaaaaaaaaaaaaaaaaaaaaaaaaaaaaaaaaaaaaaaaaaaa

SEQ ID NO: 22133 - RNA, 572 nt, Artificial Sequence
  mRNA product Design a-1 (hSL-A100) comprising derived and/or modified sequence from LASV(Lassa virus/H.sapiens-wt/NGA/2016/ISTH_0017;Clade II)__AVO03713__Z (opt1)
aggagagucccgcagucggcguccagcggcucugcuuguucgugugugugucguugcaggccuuauucaagcuuaccaugggcaaccgccaggccaagagcaccaagguggacgagcaccagcgggcccaccugguccccgacgcgucccaccucgggccccaguucugcaagagcugcugguucgagaaccgcggccugguggagugcaacaaccacuaccugugccucaacugccugucccugcuccugagcguguccagccggugccccaucugcaagaugccccugcccaccaagcucaaggccgccacgcagccguccgcccccagcaccgaggucaaccagaacaccaccccgccgcccuacacgcccugaggacuagucccuguucccagagcccacuuuuuuuucuuuuuuugaaauaaaauagccugucuuucagaucucaaaggcucuuuucagagccaccaaaaaaaaaaaaaaaaaaaaaaaaaaaaaaaaaaaaaaaaaaaaaaaaaaaaaaaaaaaaaaaaaaaaaaaaaaaaaaaaaaaaaaaaaaaaaaaaaaaaa

SEQ ID NO: 22134 - RNA, 572 nt, Artificial Sequence
  mRNA product Design a-1 (hSL-A100) comprising derived and/or modified sequence from LASV(Lassa virus/H.sapiens-wt/NGA/2018/ISTH_0959;Clade II)__AVV65084__Z (opt1)
aggagagucccgcagucggcguccagcggcucugcuuguucgugugugugucguugcaggccuuauucaagcuuaccaugggcaacaagcaggccaagagcaccaagguggacgagcaccagcgcgcccaccugguccccgacgcgucccaccucgggccccaguucugcaagagcugcugguucgagaaccggggccugguggagugcaacaaccacuaccugugccucaacugccugucccugcuccugagcguguccagccgcugccccaucugcaagaugccccugcccaccaagcucaaggccgccgcccagccguccgcccccagcacggaggcgauccaguccaccaccccgccgcccuacacccccugaggacuagucccuguucccagagcccacuuuuuuuucuuuuuuugaaauaaaauagccugucuuucagaucucaaaggcucuuuucagagccaccaaaaaaaaaaaaaaaaaaaaaaaaaaaaaaaaaaaaaaaaaaaaaaaaaaaaaaaaaaaaaaaaaaaaaaaaaaaaaaaaaaaaaaaaaaaaaaaaaaaaa

SEQ ID NO: 22135 - RNA, 572 nt, Artificial Sequence
  mRNA product Design a-1 (hSL-A100) comprising derived and/or modified sequence from LASV(LASV003-NIG-2008;Clade II)__AIT17578__Z (opt1)
aggagagucccgcagucggcguccagcggcucugcuuguucgugugugugucguugcaggccuuauucaagcuuaccaugggcaaccgccaggccaagagcaccaagguggacgagcaccagcgggcccaccugguccccgacgcgucccaccucgggccccaguucugcaagagcugcugguucgagaacaagggccugguggagugcaacaaccacuaccugugccucaacugccugucccugcuccugagcguguccagccgcugccccaucugcaagaugccccugcccaccaagcuccgggccgccgcccagccguccgcccccagcacggaguccgcgcagaacaccgccccgccgcccuacgcccccugaggacuagucccuguucccagagcccacuuuuuuuucuuuuuuugaaauaaaauagccugucuuucagaucucaaaggcucuuuucagagccaccaaaaaaaaaaaaaaaaaaaaaaaaaaaaaaaaaaaaaaaaaaaaaaaaaaaaaaaaaaaaaaaaaaaaaaaaaaaaaaaaaaaaaaaaaaaaaaaaaaaaa

SEQ ID NO: 22136 - RNA, 572 nt, Artificial Sequence
  mRNA product Design a-1 (hSL-A100) comprising derived and/or modified sequence from LASV(LASV035-NIG-2009;Clade II)__AIT17586__Z (opt1)
aggagagucccgcagucggcguccagcggcucugcuuguucgugugugugucguugcaggccuuauucaagcuuaccaugggcaacaagcaggccaagagcaccaagguggacgagcaccagcgcgcccaccugguccccgacgcgucccaccucgggccccaguucugcaagagcugcugguucgagaaccggggccugguggagugcaacaaccacuaccugugccucaacugccugucccugcuccugagcguguccagccgcugccccaucugcaagaugccccugcccacccggcucaaggccgccgcccagccguccgcccccagcacggaggucacccagaacaccaccccgccgcccuacacgcccugaggacuagucccuguucccagagcccacuuuuuuuucuuuuuuugaaauaaaauagccugucuuucagaucucaaaggcucuuuucagagccaccaaaaaaaaaaaaaaaaaaaaaaaaaaaaaaaaaaaaaaaaaaaaaaaaaaaaaaaaaaaaaaaaaaaaaaaaaaaaaaaaaaaaaaaaaaaaaaaaaaaaa

SEQ ID NO: 22137 - RNA, 572 nt, Artificial Sequence
  mRNA product Design a-1 (hSL-A100) comprising derived and/or modified sequence from LASV(LASV1000-NIG-2009;Clade II)__AIT17780__Z (opt1)
aggagagucccgcagucggcguccagcggcucugcuuguucgugugugugucguugcaggccuuauucaagcuuaccaugggcaaccgccagaccaagagcaccaagguggacgagcaccagcgggccuaccugguccccgacgccucccuccuggggccccaguucugcaagagcugcugguucgagaacaagggccugguggagugcaacaaccacuaccucugccugaacugccugucccuccugcugagcguguccagccgcugccccaucugcaagaugccccuccccacgcggcugaaggcggccgcccagcccuccgccccgcccaccgaggccauccagaacaccacgccgccgcccuacacccccugaggacuagucccuguucccagagcccacuuuuuuuucuuuuuuugaaauaaaauagccugucuuucagaucucaaaggcucuuuucagagccaccaaaaaaaaaaaaaaaaaaaaaaaaaaaaaaaaaaaaaaaaaaaaaaaaaaaaaaaaaaaaaaaaaaaaaaaaaaaaaaaaaaaaaaaaaaaaaaaaaaaaa

SEQ ID NO: 22138 - RNA, 572 nt, Artificial Sequence
  mRNA product Design a-1 (hSL-A100) comprising derived and/or modified sequence from LASV(LASV221-NIG-2010;Clade II)__AIT17622__Z (opt1)
aggagagucccgcagucggcguccagcggcucugcuuguucgugugugugucguugcaggccuuauucaagcuuaccaugggcaaccgccaggccaagagcaccaagguggacgagcaccagcgggcccaccugguccccgacgcgucccaccucgggccccaguucugcaagagcugcugguucgagaaccgcggccugguggagugcaacaaccacuaccugugccucaacugccugucccugcuccugagcguguccagccggugccccaucugcaagaugccccugcccaccaagcucaaggccgccacgcagccguccgcccccagcaccgaggucacccagaacaccaucccgccgcccuacucccccugaggacuagucccuguucccagagcccacuuuuuuuucuuuuuuugaaauaaaauagccugucuuucagaucucaaaggcucuuuucagagccaccaaaaaaaaaaaaaaaaaaaaaaaaaaaaaaaaaaaaaaaaaaaaaaaaaaaaaaaaaaaaaaaaaaaaaaaaaaaaaaaaaaaaaaaaaaaaaaaaaaaaa

SEQ ID NO: 22139 - RNA, 572 nt, Artificial Sequence
  mRNA product Design a-1 (hSL-A100) comprising derived and/or modified sequence from LASV(LASV237-NIG-2010;Clade II)__AIT17636__Z (opt1)
aggagagucccgcagucggcguccagcggcucugcuuguucgugugugugucguugcaggccuuauucaagcuuaccaugggcaaccgccaggccaagagcaccaagguggacgagcaccagcgggcccaccugguccccgacgcgucccaccucgggccccaguucugcaagagcugcugguucgagaaccgcggccugguggagugcaacaaccacuaccugugccucaacugccugucccugcuccugagcguguccagccggugccccaucugcaagaugccccugcccaccaagcucaaggccgccgcccagccguccgcccccagcaucgagacgauccagaacaccaccccgccgcccuacacccccugaggacuagucccuguucccagagcccacuuuuuuuucuuuuuuugaaauaaaauagccugucuuucagaucucaaaggcucuuuucagagccaccaaaaaaaaaaaaaaaaaaaaaaaaaaaaaaaaaaaaaaaaaaaaaaaaaaaaaaaaaaaaaaaaaaaaaaaaaaaaaaaaaaaaaaaaaaaaaaaaaaaaa

SEQ ID NO: 22140 - RNA, 572 nt, Artificial Sequence
  mRNA product Design a-1 (hSL-A100) comprising derived and/or modified sequence from LASV(LASV253-NIG-2011;Clade II)__AIT17668__Z (opt1)
aggagagucccgcagucggcguccagcggcucugcuuguucgugugugugucguugcaggccuuauucaagcuuaccaugggcaaccgccaggccaagagcaccaagguggacgagcaccagcgggcccaccugguccccgacgcgucccaccucgggccccaguucugcaagagcugcugguucgagaacaagggccugguggagugcaacaaccacuaccugugccucaacugccugucccugcuccugagcguguccagccgcugccccaucugcaagaugccccugcccaccaagcucaagacgaccgcccagccguccgccccgcccaccgaggccgccaagaacaccgcgcccccgcccuacgcccccugaggacuagucccuguucccagagcccacuuuuuuuucuuuuuuugaaauaaaauagccugucuuucagaucucaaaggcucuuuucagagccaccaaaaaaaaaaaaaaaaaaaaaaaaaaaaaaaaaaaaaaaaaaaaaaaaaaaaaaaaaaaaaaaaaaaaaaaaaaaaaaaaaaaaaaaaaaaaaaaaaaaaa

SEQ ID NO: 22141 - RNA, 572 nt, Artificial Sequence
  mRNA product Design a-1 (hSL-A100) comprising derived and/or modified sequence from LASV(G1180-SLE-2010;Clade IV)__AIT17166__Z (opt1)
aggagagucccgcagucggcguccagcggcucugcuuguucgugugugugucguugcaggccuuauucaagcuuaccaugggcaacaagcaggccaaggcccccgaggcgaaggacagcccgcgcgccucccugauccccgacgccacccaccucgggccccaguucugcaagagcugcugguucgagaccaagggccugguggagugcaacaaccacuaccugugccucaacugccugacgcugcuccuguccgucagcaaccggugccccaucugcaagaugccgcugcccaccaagcuccgccccuccgccacccccaccgccccgcccacggaggcggccgacagcaucgggcccccgcccuacucccccugaggacuagucccuguucccagagcccacuuuuuuuucuuuuuuugaaauaaaauagccugucuuucagaucucaaaggcucuuuucagagccaccaaaaaaaaaaaaaaaaaaaaaaaaaaaaaaaaaaaaaaaaaaaaaaaaaaaaaaaaaaaaaaaaaaaaaaaaaaaaaaaaaaaaaaaaaaaaaaaaaaaaa

SEQ ID NO: 22142 - RNA, 572 nt, Artificial Sequence
  mRNA product Design a-1 (hSL-A100) comprising derived and/or modified sequence from LASV(G1442-SLE-2011;Clade IV)__AIT17178__Z (opt1)
aggagagucccgcagucggcguccagcggcucugcuuguucgugugugugucguugcaggccuuauucaagcuuaccaugggcaacaagcaggccaaggccagcgaggcgaaggacagcccccgcgccucccugaucccggacgccacccaccucgggccccaguucugcaaguccugcugguucgagaacaagggccugguggagugcaacaaccacuaccugugccucaacugccugagccugcuccuguccgucagcucccggugccccaucugcaagaugccccugccgacccgccuccggcccagcacggcccccaccgcgcccccggcccgcgccggggacaacaucaagcccccgcccuacucccccugaggacuagucccuguucccagagcccacuuuuuuuucuuuuuuugaaauaaaauagccugucuuucagaucucaaaggcucuuuucagagccaccaaaaaaaaaaaaaaaaaaaaaaaaaaaaaaaaaaaaaaaaaaaaaaaaaaaaaaaaaaaaaaaaaaaaaaaaaaaaaaaaaaaaaaaaaaaaaaaaaaaaa

SEQ ID NO: 22143 - RNA, 572 nt, Artificial Sequence
  mRNA product Design a-1 (hSL-A100) comprising derived and/or modified sequence from LASV(G502-SLE-2009;Clade IV)__AIT17124__Z (opt1)
aggagagucccgcagucggcguccagcggcucugcuuguucgugugugugucguugcaggccuuauucaagcuuaccaugggcaacaagcaggucaagacccccgaggccaaggacagcccccgcgccucccugauccccgacgcgacccaccucgggccccaguucugcaagagcugcugguucgagaacaagggccugguggagugcaacaaccacuaccugugccucaacugccugacgcugcuccuguccguggggaaccggugccccaucugcaagaugccgcugcccaccaagcuccgccccagcgugacccccaccgccccgcccacgcgggccgccgacuccaucggcccgccgcccuacagccccugaggacuagucccuguucccagagcccacuuuuuuuucuuuuuuugaaauaaaauagccugucuuucagaucucaaaggcucuuuucagagccaccaaaaaaaaaaaaaaaaaaaaaaaaaaaaaaaaaaaaaaaaaaaaaaaaaaaaaaaaaaaaaaaaaaaaaaaaaaaaaaaaaaaaaaaaaaaaaaaaaaaaa

SEQ ID NO: 22144 - RNA, 572 nt, Artificial Sequence
  mRNA product Design a-1 (hSL-A100) comprising derived and/or modified sequence from LASV(G733-SLE-2010;Clade IV)__AIT17152__Z (opt1)
aggagagucccgcagucggcguccagcggcucugcuuguucgugugugugucguugcaggccuuauucaagcuuaccaugggcaacaagcaggccaagacccccgagaccaaggacagcccgcgcgccucccugauccccgacgcgacgcaccucgggccccaguucugcaagagcugcugguucgagaacaagggccugguggagugcaacaaccacuaccugugccucaacugccugacccugcuccuguccgucagcaaccggugccccaucugcaagaugccgcugcccaccaagcuccgccccuccaccgcccccacggccccgcccgccggggccgcggacaacacccggcccccgcccuacagccccugaggacuagucccuguucccagagcccacuuuuuuuucuuuuuuugaaauaaaauagccugucuuucagaucucaaaggcucuuuucagagccaccaaaaaaaaaaaaaaaaaaaaaaaaaaaaaaaaaaaaaaaaaaaaaaaaaaaaaaaaaaaaaaaaaaaaaaaaaaaaaaaaaaaaaaaaaaaaaaaaaaaaa

SEQ ID NO: 22145 - RNA, 584 nt, Artificial Sequence
  mRNA product Design a-1 (hSL-A100) comprising derived and/or modified sequence from MOPV/LASV reassortant(IGS-1;Clade IV)__AFY05533__Z (opt1)
aggagagucccgcagucggcguccagcggcucugcuuguucgugugugugucguugcaggccuuauucaagcuuaccaugggcaagacccagagcaaggggcagcccuccaccaaccugcucaaggagacggagccccgccaccccgugauccccgacgcccggggcaccgggcccgaguucugcaagagcugcugguucgagcgccggggccugguccgcugcaacgaccacuaccugugccucaacugccugacccugcuccacaccguguccgaccggugccccaucugcaagcacaagcugcccuuccgccuggagcuccagacgcagcccaccgccccgcccgagaucccgcccagccagaacccgccgcccuacucccccugaggacuagucccuguucccagagcccacuuuuuuuucuuuuuuugaaauaaaauagccugucuuucagaucucaaaggcucuuuucagagccaccaaaaaaaaaaaaaaaaaaaaaaaaaaaaaaaaaaaaaaaaaaaaaaaaaaaaaaaaaaaaaaaaaaaaaaaaaaaaaaaaaaaaaaaaaaaaaaaaaaaaa

SEQ ID NO: 22146 - RNA, 572 nt, Artificial Sequence
  mRNA product Design a-1 (hSL-A100) comprising derived and/or modified sequence from LASV(LM776-SLE-2012;Clade IV)__AIT17824__Z (opt1)
aggagagucccgcagucggcguccagcggcucugcuuguucgugugugugucguugcaggccuuauucaagcuuaccaugggcaacaagcaggccaaggccagcgaggagaagaacagcccccgcgccucccugaucccggacgccacccaccucgggccccaguucugcaaguccugcugguucgagaacaagggccugguggagugcaacaaccacuaccugugccucaacugccugacccugcuccugagcgucuccaaccggugccccaucugcaagaugccccugccgacgaagcuccgccccagcaccacccccaccgcgcccccgacgggggccgccgacuccauccggcccccgcccuacagccccugaggacuagucccuguucccagagcccacuuuuuuuucuuuuuuugaaauaaaauagccugucuuucagaucucaaaggcucuuuucagagccaccaaaaaaaaaaaaaaaaaaaaaaaaaaaaaaaaaaaaaaaaaaaaaaaaaaaaaaaaaaaaaaaaaaaaaaaaaaaaaaaaaaaaaaaaaaaaaaaaaaaaa

SEQ ID NO: 22147 - RNA, 572 nt, Artificial Sequence
  mRNA product Design a-1 (hSL-A100) comprising derived and/or modified sequence from LASV(Mad39;Clade IV)__ANH09743__Z (opt1)
aggagagucccgcagucggcguccagcggcucugcuuguucgugugugugucguugcaggccuuauucaagcuuaccaugggcaacaagcaggccaaggccagcgagguggaggacgggccccgcgccucccugauccccgacgccacccaccucggcccccaguucugcaagagcugcugguucgagaacaagucccuggucgagugcaacaaccacuaccugugccucaacugccugacccugcuccugagcguguccaaccggugccccaucugcaagaugccccugccgacgcgccucaagcccagcgugguccccaccgcgcccccgacccgggccggggacggcacccgcccgccgcccuacucccccugaggacuagucccuguucccagagcccacuuuuuuuucuuuuuuugaaauaaaauagccugucuuucagaucucaaaggcucuuuucagagccaccaaaaaaaaaaaaaaaaaaaaaaaaaaaaaaaaaaaaaaaaaaaaaaaaaaaaaaaaaaaaaaaaaaaaaaaaaaaaaaaaaaaaaaaaaaaaaaaaaaaaa

SEQ ID NO: 22148 - RNA, 572 nt, Artificial Sequence
  mRNA product Design a-1 (hSL-A100) comprising derived and/or modified sequence from LASV(Z0947-SLE-2011;Clade IV)__AIT17838__Z (opt1)
aggagagucccgcagucggcguccagcggcucugcuuguucgugugugugucguugcaggccuuauucaagcuuaccaugggcaacaagcaggccaaggugcccgagagcaaggacuccccgcgcgccagccugauccccgacgcgacccaccucgggccccaguucugcaaguccugcugguucgagaacaagggccuggucgagugcaacaaccacuaccugugccucaacugccugacccugcuccugagcguguccaaccgcugccccaucugcaagaugccgcugcccacgaagcucaagcccagcgccgcccccaccgccccgcccaccggggccgcggacuccauccggcccccgcccuacagccccugaggacuagucccuguucccagagcccacuuuuuuuucuuuuuuugaaauaaaauagccugucuuucagaucucaaaggcucuuuucagagccaccaaaaaaaaaaaaaaaaaaaaaaaaaaaaaaaaaaaaaaaaaaaaaaaaaaaaaaaaaaaaaaaaaaaaaaaaaaaaaaaaaaaaaaaaaaaaaaaaaaaaa

SEQ ID NO: 22149 - RNA, 572 nt, Artificial Sequence
  mRNA product Design a-1 (hSL-A100) comprising derived and/or modified sequence from LASV(Josiah;Clade IV)__ADY11072/NP_694871__Z (opt4)
aggagagucccgcagucggcguccagcggcucugcuuguucgugugugugucguugcaggccuuauucaagcuuaccaugggcaacaagcaggccaaggcccccgagagcaaggacagccccagagccagccugauccccgacgccacccaccugggcccccaguucugcaagagcugcugguucgagaacaagggccugguggagugcaacaaccacuaccugugccugaacugccugacccugcugcugagcgugagcaacagaugccccaucugcaagaugccccugcccaccaagcugagacccagcgccgcccccaccgccccccccaccggcgccgccgacagcaucagacccccccccuacagccccugaggacuagucccuguucccagagcccacuuuuuuuucuuuuuuugaaauaaaauagccugucuuucagaucucaaaggcucuuuucagagccaccaaaaaaaaaaaaaaaaaaaaaaaaaaaaaaaaaaaaaaaaaaaaaaaaaaaaaaaaaaaaaaaaaaaaaaaaaaaaaaaaaaaaaaaaaaaaaaaaaaaaa

SEQ ID NO: 22150 - RNA, 575 nt, Artificial Sequence
  mRNA product Design a-1 (hSL-A100) comprising derived and/or modified sequence from LASV(Pinneo-NIG-1969;Clade I)__AIT17834__Z (opt4)
aggagagucccgcagucggcguccagcggcucugcuuguucgugugugugucguugcaggccuuauucaagcuuaccaugggcaacaagcagaccagaagcccccccaagcccgagcaccccagacccacccugcugcccgacgccagccaccugggcccccaguucugcaagagcugcugguucgagaacaagggccugguggagugcaacaaccacuaccugugccugaacugccugacccugcugcugagcgugagcgacagaugccccaucugcaagaugccccugcccaccaagcuggccgugagaacccagcccagcgcccccccccugaaccagggcaacacccagagcagccccccccccuacagccccugaggacuagucccuguucccagagcccacuuuuuuuucuuuuuuugaaauaaaauagccugucuuucagaucucaaaggcucuuuucagagccaccaaaaaaaaaaaaaaaaaaaaaaaaaaaaaaaaaaaaaaaaaaaaaaaaaaaaaaaaaaaaaaaaaaaaaaaaaaaaaaaaaaaaaaaaaaaaaaaaaaaaa

SEQ ID NO: 22151 - RNA, 572 nt, Artificial Sequence
  mRNA product Design a-1 (hSL-A100) comprising derived and/or modified sequence from LASV(Nig08-04;Clade II)__ADU56612__Z (opt4)
aggagagucccgcagucggcguccagcggcucugcuuguucgugugugugucguugcaggccuuauucaagcuuaccaugggcaacagacagaccagacccaccgaggccaccgagcagagcagagcccaccuggugcccgacgccagccaccugggcccccaguucugcaagagcugcugguucgagaacagaggccugguggagugcaacaaccacuaccugugccugaacugccugagccugcugcugagcgugagcagcagaugccccaucugcaagaugccccugcccaccagacugaaggccagcgcccagcccagcgccccccccaccgaggccccccagaacaccacccccccccccuacacccccugaggacuagucccuguucccagagcccacuuuuuuuucuuuuuuugaaauaaaauagccugucuuucagaucucaaaggcucuuuucagagccaccaaaaaaaaaaaaaaaaaaaaaaaaaaaaaaaaaaaaaaaaaaaaaaaaaaaaaaaaaaaaaaaaaaaaaaaaaaaaaaaaaaaaaaaaaaaaaaaaaaaaa

SEQ ID NO: 22152 - RNA, 572 nt, Artificial Sequence
  mRNA product Design a-1 (hSL-A100) comprising derived and/or modified sequence from LASV(Nig08-A19;Clade III)__ADU56620__Z (opt4)
aggagagucccgcagucggcguccagcggcucugcuuguucgugugugugucguugcaggccuuauucaagcuuaccaugggcggcaagcacaccaagccccagagagagagcaacagccccagagccagccugauccccgacgccacccaccugggcccccaguucugcaagagcugcugguucgagaacaagggccugguggagugcaacaaccacuaccugugccugaacugccugacccugcugcugagcgugagcaacagaugccccaucugcaagaugccccugcccaccagacugagagccagcaccaaccccaccgccccccagguggagcaggugggccccaccaaccccccccccuacagccccugaggacuagucccuguucccagagcccacuuuuuuuucuuuuuuugaaauaaaauagccugucuuucagaucucaaaggcucuuuucagagccaccaaaaaaaaaaaaaaaaaaaaaaaaaaaaaaaaaaaaaaaaaaaaaaaaaaaaaaaaaaaaaaaaaaaaaaaaaaaaaaaaaaaaaaaaaaaaaaaaaaaaa

SEQ ID NO: 22153 - RNA, 572 nt, Artificial Sequence
  mRNA product Design a-1 (hSL-A100) comprising derived and/or modified sequence from LASV(AV;Clade V)__CCA30312__Z (opt4)
aggagagucccgcagucggcguccagcggcucugcuuguucgugugugugucguugcaggccuuauucaagcuuaccaugggcaacagacaggccaagaaccccgagguggagaacagccccagagccagccugauccccgacgccacccaccugggcccccaguucugcaagagcugcugguucgagaacaagggccugguggagugcaacaaccacuaccugugccugaacugccugagccugcugcugagcgugagcaacagaugccccaucugcaagaugccccugcccaccagacugagacccaccaccacccccaccgccccccagaucaucaaggagaacaccaccaaccccccccccuacacccccugaggacuagucccuguucccagagcccacuuuuuuuucuuuuuuugaaauaaaauagccugucuuucagaucucaaaggcucuuuucagagccaccaaaaaaaaaaaaaaaaaaaaaaaaaaaaaaaaaaaaaaaaaaaaaaaaaaaaaaaaaaaaaaaaaaaaaaaaaaaaaaaaaaaaaaaaaaaaaaaaaaaaa

SEQ ID NO: 22154 - RNA, 572 nt, Artificial Sequence
  mRNA product Design a-1 (hSL-A100) comprising derived and/or modified sequence from LASV(Togo/2016/7082;Clade VI)__AMR44579__Z (opt4)
aggagagucccgcagucggcguccagcggcucugcuuguucgugugugugucguugcaggccuuauucaagcuuaccaugggcgccagacagaccaagcagccccagaucgagggcagccccagagccagccuggugcccgacgccagccaccugggcccccaguucugcaagagcugcugguucgagaacaagggccugguggagugcaacaaccacuaccugugccugaacugccugagccugcugcugagcgugagcaacagaugccccaucugcaagaugccccugcccaccaagcugagagugagcagcgcccccagcgccccccccgccgccaccgcccagcccggcacccccccccccuacagccccugaggacuagucccuguucccagagcccacuuuuuuuucuuuuuuugaaauaaaauagccugucuuucagaucucaaaggcucuuuucagagccaccaaaaaaaaaaaaaaaaaaaaaaaaaaaaaaaaaaaaaaaaaaaaaaaaaaaaaaaaaaaaaaaaaaaaaaaaaaaaaaaaaaaaaaaaaaaaaaaaaaaaa

SEQ ID NO: 22155 - RNA, 572 nt, Artificial Sequence
  mRNA product Design a-1 (hSL-A100) comprising derived and/or modified sequence from LASV(KAK-428;Clade n.d. (VII))__ANH09761__Z (opt4)
aggagagucccgcagucggcguccagcggcucugcuuguucgugugugugucguugcaggccuuauucaagcuuaccaugggcaacaagggcaccaagcccacccagaacagcgagcccagcagagccaaccuggugcccgacgccagcuaccugggcccccaguucugcaagagcugcugguucgagaacaagggccugguggagugcaacaaccacuaccugugccugaacugccugaccaugcugcugagcgugagcaacagaugccccaucugcaagaugccccugcccaccaagaucaaggccagcggcagccccagcgccccccccaccgaggccaacagcgccgugagccccccccccuacacccccugaggacuagucccuguucccagagcccacuuuuuuuucuuuuuuugaaauaaaauagccugucuuucagaucucaaaggcucuuuucagagccaccaaaaaaaaaaaaaaaaaaaaaaaaaaaaaaaaaaaaaaaaaaaaaaaaaaaaaaaaaaaaaaaaaaaaaaaaaaaaaaaaaaaaaaaaaaaaaaaaaaaaa

SEQ ID NO: 22156 - RNA, 572 nt, Artificial Sequence
  mRNA product Design a-1 (hSL-A100) comprising derived and/or modified sequence from LASV(ISTH0009-NIG-2011;Clade II)__AIT17402__Z (opt4)
aggagagucccgcagucggcguccagcggcucugcuuguucgugugugugucguugcaggccuuauucaagcuuaccaugggcaacagacaggccaagagcaccaagguggacgagcaccagagagcccaccuggugcccgacgccagccaccugggcccccaguucugcaagagcugcugguucgagaacagaggccugguggagugcaacaaccacuaccugugccugaacugccugagccugcugcugagcgugagcagcagaugccccaucugcaagaugccccugcccaccaagcugaaggccgccgcccagcccagcgcccccagcaccgagaccauccagaacaccacccccccccccuacacccccugaggacuagucccuguucccagagcccacuuuuuuuucuuuuuuugaaauaaaauagccugucuuucagaucucaaaggcucuuuucagagccaccaaaaaaaaaaaaaaaaaaaaaaaaaaaaaaaaaaaaaaaaaaaaaaaaaaaaaaaaaaaaaaaaaaaaaaaaaaaaaaaaaaaaaaaaaaaaaaaaaaaaa

SEQ ID NO: 22157 - RNA, 572 nt, Artificial Sequence
  mRNA product Design a-1 (hSL-A100) comprising derived and/or modified sequence from LASV(ISTH2010-NIG-2012;Clade II)__AIT17480__Z (opt4)
aggagagucccgcagucggcguccagcggcucugcuuguucgugugugugucguugcaggccuuauucaagcuuaccaugggcaacagacacgccaagagcaccaagguggacgagcaccagagagcccaccuggugcccgacgccagccaccugggcccccaguucugcaagagcugcugguucgagaacagaggccugguggagugcaacaaccacuaccugugccugaacugccugagccugcugcugagcgugagcagcagaugccccaucugcaagaugccccugcccaccaagcugaaggccgccgcccagcccagcgcccccagcaccgaggugauccagagcaccacccccccccccuacacccccugaggacuagucccuguucccagagcccacuuuuuuuucuuuuuuugaaauaaaauagccugucuuucagaucucaaaggcucuuuucagagccaccaaaaaaaaaaaaaaaaaaaaaaaaaaaaaaaaaaaaaaaaaaaaaaaaaaaaaaaaaaaaaaaaaaaaaaaaaaaaaaaaaaaaaaaaaaaaaaaaaaaaa

SEQ ID NO: 22158 - RNA, 572 nt, Artificial Sequence
  mRNA product Design a-1 (hSL-A100) comprising derived and/or modified sequence from LASV(Lassa virus/H.sapiens-wt/NGA/2016/ISTH_0017;Clade II)__AVO03713__Z (opt4)
aggagagucccgcagucggcguccagcggcucugcuuguucgugugugugucguugcaggccuuauucaagcuuaccaugggcaacagacaggccaagagcaccaagguggacgagcaccagagagcccaccuggugcccgacgccagccaccugggcccccaguucugcaagagcugcugguucgagaacagaggccugguggagugcaacaaccacuaccugugccugaacugccugagccugcugcugagcgugagcagcagaugccccaucugcaagaugccccugcccaccaagcugaaggccgccacccagcccagcgcccccagcaccgaggugaaccagaacaccacccccccccccuacacccccugaggacuagucccuguucccagagcccacuuuuuuuucuuuuuuugaaauaaaauagccugucuuucagaucucaaaggcucuuuucagagccaccaaaaaaaaaaaaaaaaaaaaaaaaaaaaaaaaaaaaaaaaaaaaaaaaaaaaaaaaaaaaaaaaaaaaaaaaaaaaaaaaaaaaaaaaaaaaaaaaaaaaa

SEQ ID NO: 22159 - RNA, 572 nt, Artificial Sequence
  mRNA product Design a-1 (hSL-A100) comprising derived and/or modified sequence from LASV(Lassa virus/H.sapiens-wt/NGA/2018/ISTH_0959;Clade II)__AVV65084__Z (opt4)
aggagagucccgcagucggcguccagcggcucugcuuguucgugugugugucguugcaggccuuauucaagcuuaccaugggcaacaagcaggccaagagcaccaagguggacgagcaccagagagcccaccuggugcccgacgccagccaccugggcccccaguucugcaagagcugcugguucgagaacagaggccugguggagugcaacaaccacuaccugugccugaacugccugagccugcugcugagcgugagcagcagaugccccaucugcaagaugccccugcccaccaagcugaaggccgccgcccagcccagcgcccccagcaccgaggccauccagagcaccacccccccccccuacacccccugaggacuagucccuguucccagagcccacuuuuuuuucuuuuuuugaaauaaaauagccugucuuucagaucucaaaggcucuuuucagagccaccaaaaaaaaaaaaaaaaaaaaaaaaaaaaaaaaaaaaaaaaaaaaaaaaaaaaaaaaaaaaaaaaaaaaaaaaaaaaaaaaaaaaaaaaaaaaaaaaaaaaa

SEQ ID NO: 22160 - RNA, 572 nt, Artificial Sequence
  mRNA product Design a-1 (hSL-A100) comprising derived and/or modified sequence from LASV(LASV003-NIG-2008;Clade II)__AIT17578__Z (opt4)
aggagagucccgcagucggcguccagcggcucugcuuguucgugugugugucguugcaggccuuauucaagcuuaccaugggcaacagacaggccaagagcaccaagguggacgagcaccagagagcccaccuggugcccgacgccagccaccugggcccccaguucugcaagagcugcugguucgagaacaagggccugguggagugcaacaaccacuaccugugccugaacugccugagccugcugcugagcgugagcagcagaugccccaucugcaagaugccccugcccaccaagcugagagccgccgcccagcccagcgcccccagcaccgagagcgcccagaacaccgcccccccccccuacgcccccugaggacuagucccuguucccagagcccacuuuuuuuucuuuuuuugaaauaaaauagccugucuuucagaucucaaaggcucuuuucagagccaccaaaaaaaaaaaaaaaaaaaaaaaaaaaaaaaaaaaaaaaaaaaaaaaaaaaaaaaaaaaaaaaaaaaaaaaaaaaaaaaaaaaaaaaaaaaaaaaaaaaaa

SEQ ID NO: 22161 - RNA, 572 nt, Artificial Sequence
  mRNA product Design a-1 (hSL-A100) comprising derived and/or modified sequence from LASV(LASV035-NIG-2009;Clade II)__AIT17586__Z (opt4)
aggagagucccgcagucggcguccagcggcucugcuuguucgugugugugucguugcaggccuuauucaagcuuaccaugggcaacaagcaggccaagagcaccaagguggacgagcaccagagagcccaccuggugcccgacgccagccaccugggcccccaguucugcaagagcugcugguucgagaacagaggccugguggagugcaacaaccacuaccugugccugaacugccugagccugcugcugagcgugagcagcagaugccccaucugcaagaugccccugcccaccagacugaaggccgccgcccagcccagcgcccccagcaccgaggugacccagaacaccacccccccccccuacacccccugaggacuagucccuguucccagagcccacuuuuuuuucuuuuuuugaaauaaaauagccugucuuucagaucucaaaggcucuuuucagagccaccaaaaaaaaaaaaaaaaaaaaaaaaaaaaaaaaaaaaaaaaaaaaaaaaaaaaaaaaaaaaaaaaaaaaaaaaaaaaaaaaaaaaaaaaaaaaaaaaaaaaa

SEQ ID NO: 22162 - RNA, 572 nt, Artificial Sequence
  mRNA product Design a-1 (hSL-A100) comprising derived and/or modified sequence from LASV(LASV1000-NIG-2009;Clade II)__AIT17780__Z (opt4)
aggagagucccgcagucggcguccagcggcucugcuuguucgugugugugucguugcaggccuuauucaagcuuaccaugggcaacagacagaccaagagcaccaagguggacgagcaccagagagccuaccuggugcccgacgccagccugcugggcccccaguucugcaagagcugcugguucgagaacaagggccugguggagugcaacaaccacuaccugugccugaacugccugagccugcugcugagcgugagcagcagaugccccaucugcaagaugccccugcccaccagacugaaggccgccgcccagcccagcgccccccccaccgaggccauccagaacaccacccccccccccuacacccccugaggacuagucccuguucccagagcccacuuuuuuuucuuuuuuugaaauaaaauagccugucuuucagaucucaaaggcucuuuucagagccaccaaaaaaaaaaaaaaaaaaaaaaaaaaaaaaaaaaaaaaaaaaaaaaaaaaaaaaaaaaaaaaaaaaaaaaaaaaaaaaaaaaaaaaaaaaaaaaaaaaaaa

SEQ ID NO: 22163 - RNA, 572 nt, Artificial Sequence
  mRNA product Design a-1 (hSL-A100) comprising derived and/or modified sequence from LASV(LASV221-NIG-2010;Clade II)__AIT17622__Z (opt4)
aggagagucccgcagucggcguccagcggcucugcuuguucgugugugugucguugcaggccuuauucaagcuuaccaugggcaacagacaggccaagagcaccaagguggacgagcaccagagagcccaccuggugcccgacgccagccaccugggcccccaguucugcaagagcugcugguucgagaacagaggccugguggagugcaacaaccacuaccugugccugaacugccugagccugcugcugagcgugagcagcagaugccccaucugcaagaugccccugcccaccaagcugaaggccgccacccagcccagcgcccccagcaccgaggugacccagaacaccauccccccccccuacagccccugaggacuagucccuguucccagagcccacuuuuuuuucuuuuuuugaaauaaaauagccugucuuucagaucucaaaggcucuuuucagagccaccaaaaaaaaaaaaaaaaaaaaaaaaaaaaaaaaaaaaaaaaaaaaaaaaaaaaaaaaaaaaaaaaaaaaaaaaaaaaaaaaaaaaaaaaaaaaaaaaaaaaa

SEQ ID NO: 22164 - RNA, 572 nt, Artificial Sequence
  mRNA product Design a-1 (hSL-A100) comprising derived and/or modified sequence from LASV(LASV237-NIG-2010;Clade II)__AIT17636__Z (opt4)
aggagagucccgcagucggcguccagcggcucugcuuguucgugugugugucguugcaggccuuauucaagcuuaccaugggcaacagacaggccaagagcaccaagguggacgagcaccagagagcccaccuggugcccgacgccagccaccugggcccccaguucugcaagagcugcugguucgagaacagaggccugguggagugcaacaaccacuaccugugccugaacugccugagccugcugcugagcgugagcagcagaugccccaucugcaagaugccccugcccaccaagcugaaggccgccgcccagcccagcgcccccagcaucgagaccauccagaacaccacccccccccccuacacccccugaggacuagucccuguucccagagcccacuuuuuuuucuuuuuuugaaauaaaauagccugucuuucagaucucaaaggcucuuuucagagccaccaaaaaaaaaaaaaaaaaaaaaaaaaaaaaaaaaaaaaaaaaaaaaaaaaaaaaaaaaaaaaaaaaaaaaaaaaaaaaaaaaaaaaaaaaaaaaaaaaaaaa

SEQ ID NO: 22165 - RNA, 572 nt, Artificial Sequence
  mRNA product Design a-1 (hSL-A100) comprising derived and/or modified sequence from LASV(LASV253-NIG-2011;Clade II)__AIT17668__Z (opt4)
aggagagucccgcagucggcguccagcggcucugcuuguucgugugugugucguugcaggccuuauucaagcuuaccaugggcaacagacaggccaagagcaccaagguggacgagcaccagagagcccaccuggugcccgacgccagccaccugggcccccaguucugcaagagcugcugguucgagaacaagggccugguggagugcaacaaccacuaccugugccugaacugccugagccugcugcugagcgugagcagcagaugccccaucugcaagaugccccugcccaccaagcugaagaccaccgcccagcccagcgccccccccaccgaggccgccaagaacaccgcccccccccccuacgcccccugaggacuagucccuguucccagagcccacuuuuuuuucuuuuuuugaaauaaaauagccugucuuucagaucucaaaggcucuuuucagagccaccaaaaaaaaaaaaaaaaaaaaaaaaaaaaaaaaaaaaaaaaaaaaaaaaaaaaaaaaaaaaaaaaaaaaaaaaaaaaaaaaaaaaaaaaaaaaaaaaaaaaa

SEQ ID NO: 22166 - RNA, 572 nt, Artificial Sequence
  mRNA product Design a-1 (hSL-A100) comprising derived and/or modified sequence from LASV(G1180-SLE-2010;Clade IV)__AIT17166__Z (opt4)
aggagagucccgcagucggcguccagcggcucugcuuguucgugugugugucguugcaggccuuauucaagcuuaccaugggcaacaagcaggccaaggcccccgaggccaaggacagccccagagccagccugauccccgacgccacccaccugggcccccaguucugcaagagcugcugguucgagaccaagggccugguggagugcaacaaccacuaccugugccugaacugccugacccugcugcugagcgugagcaacagaugccccaucugcaagaugccccugcccaccaagcugagacccagcgccacccccaccgccccccccaccgaggccgccgacagcaucggccccccccccuacagccccugaggacuagucccuguucccagagcccacuuuuuuuucuuuuuuugaaauaaaauagccugucuuucagaucucaaaggcucuuuucagagccaccaaaaaaaaaaaaaaaaaaaaaaaaaaaaaaaaaaaaaaaaaaaaaaaaaaaaaaaaaaaaaaaaaaaaaaaaaaaaaaaaaaaaaaaaaaaaaaaaaaaaa

SEQ ID NO: 22167 - RNA, 572 nt, Artificial Sequence
  mRNA product Design a-1 (hSL-A100) comprising derived and/or modified sequence from LASV(G1442-SLE-2011;Clade IV)__AIT17178__Z (opt4)
aggagagucccgcagucggcguccagcggcucugcuuguucgugugugugucguugcaggccuuauucaagcuuaccaugggcaacaagcaggccaaggccagcgaggccaaggacagccccagagccagccugauccccgacgccacccaccugggcccccaguucugcaagagcugcugguucgagaacaagggccugguggagugcaacaaccacuaccugugccugaacugccugagccugcugcugagcgugagcagcagaugccccaucugcaagaugccccugcccaccagacugagacccagcaccgcccccaccgccccccccgccagagccggcgacaacaucaagcccccccccuacagccccugaggacuagucccuguucccagagcccacuuuuuuuucuuuuuuugaaauaaaauagccugucuuucagaucucaaaggcucuuuucagagccaccaaaaaaaaaaaaaaaaaaaaaaaaaaaaaaaaaaaaaaaaaaaaaaaaaaaaaaaaaaaaaaaaaaaaaaaaaaaaaaaaaaaaaaaaaaaaaaaaaaaaa

SEQ ID NO: 22168 - RNA, 572 nt, Artificial Sequence
  mRNA product Design a-1 (hSL-A100) comprising derived and/or modified sequence from LASV(G502-SLE-2009;Clade IV)__AIT17124__Z (opt4)
aggagagucccgcagucggcguccagcggcucugcuuguucgugugugugucguugcaggccuuauucaagcuuaccaugggcaacaagcaggugaagacccccgaggccaaggacagccccagagccagccugauccccgacgccacccaccugggcccccaguucugcaagagcugcugguucgagaacaagggccugguggagugcaacaaccacuaccugugccugaacugccugacccugcugcugagcgugggcaacagaugccccaucugcaagaugccccugcccaccaagcugagacccagcgugacccccaccgccccccccaccagagccgccgacagcaucggccccccccccuacagccccugaggacuagucccuguucccagagcccacuuuuuuuucuuuuuuugaaauaaaauagccugucuuucagaucucaaaggcucuuuucagagccaccaaaaaaaaaaaaaaaaaaaaaaaaaaaaaaaaaaaaaaaaaaaaaaaaaaaaaaaaaaaaaaaaaaaaaaaaaaaaaaaaaaaaaaaaaaaaaaaaaaaaa

SEQ ID NO: 22169 - RNA, 572 nt, Artificial Sequence
  mRNA product Design a-1 (hSL-A100) comprising derived and/or modified sequence from LASV(G733-SLE-2010;Clade IV)__AIT17152__Z (opt4)
aggagagucccgcagucggcguccagcggcucugcuuguucgugugugugucguugcaggccuuauucaagcuuaccaugggcaacaagcaggccaagacccccgagaccaaggacagccccagagccagccugauccccgacgccacccaccugggcccccaguucugcaagagcugcugguucgagaacaagggccugguggagugcaacaaccacuaccugugccugaacugccugacccugcugcugagcgugagcaacagaugccccaucugcaagaugccccugcccaccaagcugagacccagcaccgcccccaccgccccccccgccggcgccgccgacaacaccagacccccccccuacagccccugaggacuagucccuguucccagagcccacuuuuuuuucuuuuuuugaaauaaaauagccugucuuucagaucucaaaggcucuuuucagagccaccaaaaaaaaaaaaaaaaaaaaaaaaaaaaaaaaaaaaaaaaaaaaaaaaaaaaaaaaaaaaaaaaaaaaaaaaaaaaaaaaaaaaaaaaaaaaaaaaaaaaa

SEQ ID NO: 22170 - RNA, 584 nt, Artificial Sequence
  mRNA product Design a-1 (hSL-A100) comprising derived and/or modified sequence from MOPV/LASV reassortant(IGS-1;Clade IV)__AFY05533__Z (opt4)
aggagagucccgcagucggcguccagcggcucugcuuguucgugugugugucguugcaggccuuauucaagcuuaccaugggcaagacccagagcaagggccagcccagcaccaaccugcugaaggagaccgagcccagacaccccgugauccccgacgccagaggcaccggccccgaguucugcaagagcugcugguucgagagaagaggccuggugagaugcaacgaccacuaccugugccugaacugccugacccugcugcacaccgugagcgacagaugccccaucugcaagcacaagcugcccuucagacuggagcugcagacccagcccaccgccccccccgagaucccccccagccagaaccccccccccuacagccccugaggacuagucccuguucccagagcccacuuuuuuuucuuuuuuugaaauaaaauagccugucuuucagaucucaaaggcucuuuucagagccaccaaaaaaaaaaaaaaaaaaaaaaaaaaaaaaaaaaaaaaaaaaaaaaaaaaaaaaaaaaaaaaaaaaaaaaaaaaaaaaaaaaaaaaaaaaaaaaaaaaaaa

SEQ ID NO: 22171 - RNA, 572 nt, Artificial Sequence
  mRNA product Design a-1 (hSL-A100) comprising derived and/or modified sequence from LASV(LM776-SLE-2012;Clade IV)__AIT17824__Z (opt4)
aggagagucccgcagucggcguccagcggcucugcuuguucgugugugugucguugcaggccuuauucaagcuuaccaugggcaacaagcaggccaaggccagcgaggagaagaacagccccagagccagccugauccccgacgccacccaccugggcccccaguucugcaagagcugcugguucgagaacaagggccugguggagugcaacaaccacuaccugugccugaacugccugacccugcugcugagcgugagcaacagaugccccaucugcaagaugccccugcccaccaagcugagacccagcaccacccccaccgccccccccaccggcgccgccgacagcaucagacccccccccuacagccccugaggacuagucccuguucccagagcccacuuuuuuuucuuuuuuugaaauaaaauagccugucuuucagaucucaaaggcucuuuucagagccaccaaaaaaaaaaaaaaaaaaaaaaaaaaaaaaaaaaaaaaaaaaaaaaaaaaaaaaaaaaaaaaaaaaaaaaaaaaaaaaaaaaaaaaaaaaaaaaaaaaaaa

SEQ ID NO: 22172 - RNA, 572 nt, Artificial Sequence
  mRNA product Design a-1 (hSL-A100) comprising derived and/or modified sequence from LASV(Mad39;Clade IV)__ANH09743__Z (opt4)
aggagagucccgcagucggcguccagcggcucugcuuguucgugugugugucguugcaggccuuauucaagcuuaccaugggcaacaagcaggccaaggccagcgagguggaggacggccccagagccagccugauccccgacgccacccaccugggcccccaguucugcaagagcugcugguucgagaacaagagccugguggagugcaacaaccacuaccugugccugaacugccugacccugcugcugagcgugagcaacagaugccccaucugcaagaugccccugcccaccagacugaagcccagcguggugcccaccgccccccccaccagagccggcgacggcaccagacccccccccuacagccccugaggacuagucccuguucccagagcccacuuuuuuuucuuuuuuugaaauaaaauagccugucuuucagaucucaaaggcucuuuucagagccaccaaaaaaaaaaaaaaaaaaaaaaaaaaaaaaaaaaaaaaaaaaaaaaaaaaaaaaaaaaaaaaaaaaaaaaaaaaaaaaaaaaaaaaaaaaaaaaaaaaaaa

SEQ ID NO: 22173 - RNA, 572 nt, Artificial Sequence
  mRNA product Design a-1 (hSL-A100) comprising derived and/or modified sequence from LASV(Z0947-SLE-2011;Clade IV)__AIT17838__Z (opt4)
aggagagucccgcagucggcguccagcggcucugcuuguucgugugugugucguugcaggccuuauucaagcuuaccaugggcaacaagcaggccaaggugcccgagagcaaggacagccccagagccagccugauccccgacgccacccaccugggcccccaguucugcaagagcugcugguucgagaacaagggccugguggagugcaacaaccacuaccugugccugaacugccugacccugcugcugagcgugagcaacagaugccccaucugcaagaugccccugcccaccaagcugaagcccagcgccgcccccaccgccccccccaccggcgccgccgacagcaucagacccccccccuacagccccugaggacuagucccuguucccagagcccacuuuuuuuucuuuuuuugaaauaaaauagccugucuuucagaucucaaaggcucuuuucagagccaccaaaaaaaaaaaaaaaaaaaaaaaaaaaaaaaaaaaaaaaaaaaaaaaaaaaaaaaaaaaaaaaaaaaaaaaaaaaaaaaaaaaaaaaaaaaaaaaaaaaaa

SEQ ID NO: 22174 - RNA, 572 nt, Artificial Sequence
  mRNA product Design a-1 (hSL-A100) comprising derived and/or modified sequence from LASV(Josiah;Clade IV)__ADY11072/NP_694871__Z (opt5)
aggagagucccgcagucggcguccagcggcucugcuuguucgugugugugucguugcaggccuuauucaagcuuaccaugggcaacaagcaggccaaagcucccgagagcaaggacuccccuagagccucucugaucccggaugcgacccaccucgggccccaauucugcaaaagcuguugguuugaaaauaagggacugguggagugcaacaaucauuaccuuugucugaacugccucacacugcuucuguccgucucuaaucgguguccuauuugcaaaaugccccucccuacgaagcugcgccccagcgcugccccuaccgccccgcccacaggcgcugccgacuccaucagaccucccccuuauucucccugaggacuagucccuguucccagagcccacuuuuuuuucuuuuuuugaaauaaaauagccugucuuucagaucucaaaggcucuuuucagagccaccaaaaaaaaaaaaaaaaaaaaaaaaaaaaaaaaaaaaaaaaaaaaaaaaaaaaaaaaaaaaaaaaaaaaaaaaaaaaaaaaaaaaaaaaaaaaaaaaaaaaa

SEQ ID NO: 22175 - RNA, 575 nt, Artificial Sequence
  mRNA product Design a-1 (hSL-A100) comprising derived and/or modified sequence from LASV(Pinneo-NIG-1969;Clade I)__AIT17834__Z (opt5)
aggagagucccgcagucggcguccagcggcucugcuuguucgugugugugucguugcaggccuuauucaagcuuaccaugggcaacaagcagaccagaagcccucccaaaccggagcacccccggccuacacugcuccccgacgccucccaucuggggccucaauucugcaagucuuguugguuugaaaauaaaggacuuguggagugcaacaaucacuaccugugucucaacugccugacgcuucugcucagcgucuccgaucgcugucccaucugcaagaugccucugccgaccaaacuggcuguuagaacacagcccucugccccuccccucaaucagggcaacacccagagcuccccucccccguauucuccuugaggacuagucccuguucccagagcccacuuuuuuuucuuuuuuugaaauaaaauagccugucuuucagaucucaaaggcucuuuucagagccaccaaaaaaaaaaaaaaaaaaaaaaaaaaaaaaaaaaaaaaaaaaaaaaaaaaaaaaaaaaaaaaaaaaaaaaaaaaaaaaaaaaaaaaaaaaaaaaaaaaaaa

SEQ ID NO: 22176 - RNA, 572 nt, Artificial Sequence
  mRNA product Design a-1 (hSL-A100) comprising derived and/or modified sequence from LASV(Nig08-04;Clade II)__ADU56612__Z (opt5)
aggagagucccgcagucggcguccagcggcucugcuuguucgugugugugucguugcaggccuuauucaagcuuaccaugggcaacagacagacccggcccacagaggccacggaacaaagccgcgcccaccuggugccugacgccucccaucucgggccgcaguucugcaagucuuguugguuugagaauagaggacuggucgaaugcaacaaucacuaccuuugucugaacugccucagccugcuucuguccguuucuagccggugucccaucugcaaaaugccucuccccacccgccugaaggcguccgcucagccuucugcucccccuacagaggccccgcagaauaccacacccccucccuauaccccuugaggacuagucccuguucccagagcccacuuuuuuuucuuuuuuugaaauaaaauagccugucuuucagaucucaaaggcucuuuucagagccaccaaaaaaaaaaaaaaaaaaaaaaaaaaaaaaaaaaaaaaaaaaaaaaaaaaaaaaaaaaaaaaaaaaaaaaaaaaaaaaaaaaaaaaaaaaaaaaaaaaaaa

SEQ ID NO: 22177 - RNA, 572 nt, Artificial Sequence
  mRNA product Design a-1 (hSL-A100) comprising derived and/or modified sequence from LASV(Nig08-A19;Clade III)__ADU56620__Z (opt5)
aggagagucccgcagucggcguccagcggcucugcuuguucgugugugugucguugcaggccuuauucaagcuuaccaugggcgggaagcacaccaaaccccagagagagagcaacuccccucgggccucucugaucccggacgcuacacaucucggaccccaauucugcaagagcuguugguuugaaaauaaaggccugguggagugcaacaaucacuaccuuugucugaacugccucacgcugcuucuguccgucucuaaucgcuguccuauuugcaagaugccccucccuaccagacugcgggccagcacaaaccccaccgcgccucagguugaacagguggggccgacaaaucccccucccuauuccccuugaggacuagucccuguucccagagcccacuuuuuuuucuuuuuuugaaauaaaauagccugucuuucagaucucaaaggcucuuuucagagccaccaaaaaaaaaaaaaaaaaaaaaaaaaaaaaaaaaaaaaaaaaaaaaaaaaaaaaaaaaaaaaaaaaaaaaaaaaaaaaaaaaaaaaaaaaaaaaaaaaaaaa

SEQ ID NO: 22178 - RNA, 572 nt, Artificial Sequence
  mRNA product Design a-1 (hSL-A100) comprising derived and/or modified sequence from LASV(AV;Clade V)__CCA30312__Z (opt5)
aggagagucccgcagucggcguccagcggcucugcuuguucgugugugugucguugcaggccuuauucaagcuuaccaugggcaacagacaggccaagaaucccgagguggaaaacagcccucgggcuucccugaucccggacgccacccaccucgggccccaauucugcaaaucuuguugguuugagaauaagggacuggucgaaugcaacaaucauuaccuuugucugaacugccucagccugcuucuguccguuucuaaucgcuguccuauuugcaaaaugccccucccuacaagacugcggcccacgaccacaccuaccgcgccgcagaucauuaaggagaacacaaccaaucccccucccuauacaccuugaggacuagucccuguucccagagcccacuuuuuuuucuuuuuuugaaauaaaauagccugucuuucagaucucaaaggcucuuuucagagccaccaaaaaaaaaaaaaaaaaaaaaaaaaaaaaaaaaaaaaaaaaaaaaaaaaaaaaaaaaaaaaaaaaaaaaaaaaaaaaaaaaaaaaaaaaaaaaaaaaaaaa

SEQ ID NO: 22179 - RNA, 572 nt, Artificial Sequence
  mRNA product Design a-1 (hSL-A100) comprising derived and/or modified sequence from LASV(Togo/2016/7082;Clade VI)__AMR44579__Z (opt5)
aggagagucccgcagucggcguccagcggcucugcuuguucgugugugugucguugcaggccuuauucaagcuuaccaugggcgccagacagaccaagcaaccccagaucgaggggagcccucgggcuucccuggugccggacgccucucaccucggaccccaguucugcaaaagcuguugguuugaaaacaagggccuggucgagugcaauaaccauuaccuuugucugaauugccucucccugcuucugucuguuagcaaccgcuguccuauuugcaaaaugccccucccuacaaagcugagaguguccucugcgcccagcgcuccuccggccgccacggcucagcccgggaccccucccccuuauucccccugaggacuagucccuguucccagagcccacuuuuuuuucuuuuuuugaaauaaaauagccugucuuucagaucucaaaggcucuuuucagagccaccaaaaaaaaaaaaaaaaaaaaaaaaaaaaaaaaaaaaaaaaaaaaaaaaaaaaaaaaaaaaaaaaaaaaaaaaaaaaaaaaaaaaaaaaaaaaaaaaaaaaa

SEQ ID NO: 22180 - RNA, 572 nt, Artificial Sequence
  mRNA product Design a-1 (hSL-A100) comprising derived and/or modified sequence from LASV(KAK-428;Clade n.d. (VII))__ANH09761__Z (opt5)
aggagagucccgcagucggcguccagcggcucugcuuguucgugugugugucguugcaggccuuauucaagcuuaccaugggcaacaaggggaccaaacccacacagaauagcgagccuuccagagccaaccuggugccggacgcuucuuaccucggaccccaauucugcaagagcuguugguuugaaaauaaaggccuggucgagugcaacaaucacuaucuuugucugaacugccucacgaugcugcuuuccguuuccaaucgguguccuaucugcaagaugccccugccuaccaaaauuaaggccagcgggucccccucugcgccuccgacagaagcuaacagcgccgugucucccccucccuacaccccuugaggacuagucccuguucccagagcccacuuuuuuuucuuuuuuugaaauaaaauagccugucuuucagaucucaaaggcucuuuucagagccaccaaaaaaaaaaaaaaaaaaaaaaaaaaaaaaaaaaaaaaaaaaaaaaaaaaaaaaaaaaaaaaaaaaaaaaaaaaaaaaaaaaaaaaaaaaaaaaaaaaaaa

SEQ ID NO: 22181 - RNA, 572 nt, Artificial Sequence
  mRNA product Design a-1 (hSL-A100) comprising derived and/or modified sequence from LASV(ISTH0009-NIG-2011;Clade II)__AIT17402__Z (opt5)
aggagagucccgcagucggcguccagcggcucugcuuguucgugugugugucguugcaggccuuauucaagcuuaccaugggcaacagacaggccaagagcaccaaaguggacgagcaccaacgggcucaucugguccccgaugccucccaccucgggccucaguucugcaagucuuguugguuugaaaaucgcggacugguugagugcaacaaucauuaccuuugucugaacugccucagccugcuucuguccgugucuagcagauguccgaucugcaaaaugccccucccuacaaagcugaaagcggcugcccagcccuccgccccuucuacggaaaccauucagaauacaacacccccuccguauacccccugaggacuagucccuguucccagagcccacuuuuuuuucuuuuuuugaaauaaaauagccugucuuucagaucucaaaggcucuuuucagagccaccaaaaaaaaaaaaaaaaaaaaaaaaaaaaaaaaaaaaaaaaaaaaaaaaaaaaaaaaaaaaaaaaaaaaaaaaaaaaaaaaaaaaaaaaaaaaaaaaaaaaa

SEQ ID NO: 22182 - RNA, 572 nt, Artificial Sequence
  mRNA product Design a-1 (hSL-A100) comprising derived and/or modified sequence from LASV(ISTH2010-NIG-2012;Clade II)__AIT17480__Z (opt5)
aggagagucccgcagucggcguccagcggcucugcuuguucgugugugugucguugcaggccuuauucaagcuuaccaugggcaacagacacgccaagagcaccaaaguggacgagcaucagcgggcucaccugguccccgaugccucccaucucgggccucaauucugcaagucuuguugguuugaaaaucgcggacugguugagugcaacaaucacuaccuuugucugaacugccucagccugcuucuguccgugucuagcagauguccgaucugcaaaaugccccucccuacaaagcugaaagcggcugcccagcccuccgccccuucuacggaagugauucagagcaccacacccccuccguauacccccugaggacuagucccuguucccagagcccacuuuuuuuucuuuuuuugaaauaaaauagccugucuuucagaucucaaaggcucuuuucagagccaccaaaaaaaaaaaaaaaaaaaaaaaaaaaaaaaaaaaaaaaaaaaaaaaaaaaaaaaaaaaaaaaaaaaaaaaaaaaaaaaaaaaaaaaaaaaaaaaaaaaaa

SEQ ID NO: 22183 - RNA, 572 nt, Artificial Sequence
  mRNA product Design a-1 (hSL-A100) comprising derived and/or modified sequence from LASV(Lassa virus/H.sapiens-wt/NGA/2016/ISTH_0017;Clade II)__AVO03713__Z (opt5)
aggagagucccgcagucggcguccagcggcucugcuuguucgugugugugucguugcaggccuuauucaagcuuaccaugggcaacagacaggccaagagcaccaaaguggacgagcaccaacgggcucaucugguccccgaugccucccaccucgggccucaguucugcaagucuuguugguuugaaaaucgcggacugguugagugcaacaaucauuaccuuugucugaacugccucagccugcuucuguccgugucuagcagauguccgaucugcaaaaugccccucccuacaaagcugaaagcggcuacgcagcccuccgccccuucuaccgaagugaaucagaacacaacacccccuccguauacccccugaggacuagucccuguucccagagcccacuuuuuuuucuuuuuuugaaauaaaauagccugucuuucagaucucaaaggcucuuuucagagccaccaaaaaaaaaaaaaaaaaaaaaaaaaaaaaaaaaaaaaaaaaaaaaaaaaaaaaaaaaaaaaaaaaaaaaaaaaaaaaaaaaaaaaaaaaaaaaaaaaaaaa

SEQ ID NO: 22184 - RNA, 572 nt, Artificial Sequence
  mRNA product Design a-1 (hSL-A100) comprising derived and/or modified sequence from LASV(Lassa virus/H.sapiens-wt/NGA/2018/ISTH_0959;Clade II)__AVV65084__Z (opt5)
aggagagucccgcagucggcguccagcggcucugcuuguucgugugugugucguugcaggccuuauucaagcuuaccaugggcaacaagcaggccaaaagcaccaagguggacgagcaccaaagagcucaucugguccccgaugccucccaccucgggccucaguucugcaaaucuuguugguuugaaaaucggggacugguugagugcaacaaucauuaccuuugucugaacugccucagccugcuucuguccgugucuagccgcuguccgaucugcaagaugccccucccuacaaaacugaaggcggcugcccagcccuccgccccuucuacggaagcuauucagagcaccacacccccuccguauacccccugaggacuagucccuguucccagagcccacuuuuuuuucuuuuuuugaaauaaaauagccugucuuucagaucucaaaggcucuuuucagagccaccaaaaaaaaaaaaaaaaaaaaaaaaaaaaaaaaaaaaaaaaaaaaaaaaaaaaaaaaaaaaaaaaaaaaaaaaaaaaaaaaaaaaaaaaaaaaaaaaaaaaa

SEQ ID NO: 22185 - RNA, 572 nt, Artificial Sequence
  mRNA product Design a-1 (hSL-A100) comprising derived and/or modified sequence from LASV(LASV003-NIG-2008;Clade II)__AIT17578__Z (opt5)
aggagagucccgcagucggcguccagcggcucugcuuguucgugugugugucguugcaggccuuauucaagcuuaccaugggcaacagacaggccaagagcaccaaaguggacgagcaccaacgggcucaucugguccccgaugccucccaccucgggccucaguucugcaagucuuguugguuugaaaauaaaggacugguugagugcaacaaucauuaccuuugucugaacugccucagccugcuucuguccgugucuagccgcuguccgaucugcaagaugccccucccuacaaaacugagagcggcugcccagcccuccgccccuucuacggaaagcgcucagaauaccgcucccccuccguaugcccccugaggacuagucccuguucccagagcccacuuuuuuuucuuuuuuugaaauaaaauagccugucuuucagaucucaaaggcucuuuucagagccaccaaaaaaaaaaaaaaaaaaaaaaaaaaaaaaaaaaaaaaaaaaaaaaaaaaaaaaaaaaaaaaaaaaaaaaaaaaaaaaaaaaaaaaaaaaaaaaaaaaaaa

SEQ ID NO: 22186 - RNA, 572 nt, Artificial Sequence
  mRNA product Design a-1 (hSL-A100) comprising derived and/or modified sequence from LASV(LASV035-NIG-2009;Clade II)__AIT17586__Z (opt5)
aggagagucccgcagucggcguccagcggcucugcuuguucgugugugugucguugcaggccuuauucaagcuuaccaugggcaacaagcaggccaaaagcaccaagguggacgagcaccaaagagcucaucugguccccgaugccucccaccucgggccucaguucugcaaaucuuguugguuugaaaaucggggacugguugagugcaacaaucauuaccuuugucugaacugccucagccugcuucuguccgugucuagccgcuguccgaucugcaagaugccccucccuacaagacugaaagcggcugcccagcccuccgccccuucuacggaagugacccagaauacaacacccccuccguauacccccugaggacuagucccuguucccagagcccacuuuuuuuucuuuuuuugaaauaaaauagccugucuuucagaucucaaaggcucuuuucagagccaccaaaaaaaaaaaaaaaaaaaaaaaaaaaaaaaaaaaaaaaaaaaaaaaaaaaaaaaaaaaaaaaaaaaaaaaaaaaaaaaaaaaaaaaaaaaaaaaaaaaaa

SEQ ID NO: 22187 - RNA, 572 nt, Artificial Sequence
  mRNA product Design a-1 (hSL-A100) comprising derived and/or modified sequence from LASV(LASV1000-NIG-2009;Clade II)__AIT17780__Z (opt5)
aggagagucccgcagucggcguccagcggcucugcuuguucgugugugugucguugcaggccuuauucaagcuuaccaugggcaacagacagaccaagagcacaaaaguggacgagcaccaacgggccuaccugguccccgaugcuucccuccuggggccucaguucugcaagucuuguugguuugaaaauaaaggacuuguugagugcaacaaucauuaucugugucucaacugccugagccuucugcucuccgugucuagccgcuguccgaucugcaagaugccccugccuacgagacugaaagccgcggcucagcccuccgccccucccaccgaagccauucagaauacaaccccuccgcccuacacaccuugaggacuagucccuguucccagagcccacuuuuuuuucuuuuuuugaaauaaaauagccugucuuucagaucucaaaggcucuuuucagagccaccaaaaaaaaaaaaaaaaaaaaaaaaaaaaaaaaaaaaaaaaaaaaaaaaaaaaaaaaaaaaaaaaaaaaaaaaaaaaaaaaaaaaaaaaaaaaaaaaaaaaa

SEQ ID NO: 22188 - RNA, 572 nt, Artificial Sequence
  mRNA product Design a-1 (hSL-A100) comprising derived and/or modified sequence from LASV(LASV221-NIG-2010;Clade II)__AIT17622__Z (opt5)
aggagagucccgcagucggcguccagcggcucugcuuguucgugugugugucguugcaggccuuauucaagcuuaccaugggcaacagacaggccaagagcaccaaaguggacgagcaccaacgggcucaucugguccccgaugccucccaccucgggccucaguucugcaagucuuguugguuugaaaaucgcggacugguugagugcaacaaucauuaccuuugucugaacugccucagccugcuucuguccgugucuagcagauguccgaucugcaaaaugccccucccuacaaagcugaaagcggcuacgcagcccuccgccccuucuaccgaagugacacagaauaccauucccccuccguauagccccugaggacuagucccuguucccagagcccacuuuuuuuucuuuuuuugaaauaaaauagccugucuuucagaucucaaaggcucuuuucagagccaccaaaaaaaaaaaaaaaaaaaaaaaaaaaaaaaaaaaaaaaaaaaaaaaaaaaaaaaaaaaaaaaaaaaaaaaaaaaaaaaaaaaaaaaaaaaaaaaaaaaaa

SEQ ID NO: 22189 - RNA, 572 nt, Artificial Sequence
  mRNA product Design a-1 (hSL-A100) comprising derived and/or modified sequence from LASV(LASV237-NIG-2010;Clade II)__AIT17636__Z (opt5)
aggagagucccgcagucggcguccagcggcucugcuuguucgugugugugucguugcaggccuuauucaagcuuaccaugggcaacagacaggccaagagcaccaaaguggacgagcaccaacgggcucaucugguccccgaugccucccaccucgggccucaguucugcaagucuuguugguuugaaaaucgcggacugguugagugcaacaaucauuaccuuugucugaacugccucagccugcuucuguccgugucuagcagauguccgaucugcaaaaugccccucccuacaaagcugaaagcggcugcccagcccuccgccccuucuauugaaacgauccagaauaccacacccccuccguauacccccugaggacuagucccuguucccagagcccacuuuuuuuucuuuuuuugaaauaaaauagccugucuuucagaucucaaaggcucuuuucagagccaccaaaaaaaaaaaaaaaaaaaaaaaaaaaaaaaaaaaaaaaaaaaaaaaaaaaaaaaaaaaaaaaaaaaaaaaaaaaaaaaaaaaaaaaaaaaaaaaaaaaaa

SEQ ID NO: 22190 - RNA, 572 nt, Artificial Sequence
  mRNA product Design a-1 (hSL-A100) comprising derived and/or modified sequence from LASV(LASV253-NIG-2011;Clade II)__AIT17668__Z (opt5)
aggagagucccgcagucggcguccagcggcucugcuuguucgugugugugucguugcaggccuuauucaagcuuaccaugggcaacagacaggccaagagcaccaaaguggacgagcaccaacgggcucaucugguccccgaugccucccaccucgggccucaguucugcaagucuuguugguuugaaaauaaaggacugguugagugcaacaaucauuaccuuugucugaacugccucagccugcuucuguccgugucuagccgcuguccgaucugcaagaugccccucccuacaaaacugaagacgaccgcgcagcccuccgcuccucccacagaagccgccaagaauaccgcuccuccgcccuaugccccuugaggacuagucccuguucccagagcccacuuuuuuuucuuuuuuugaaauaaaauagccugucuuucagaucucaaaggcucuuuucagagccaccaaaaaaaaaaaaaaaaaaaaaaaaaaaaaaaaaaaaaaaaaaaaaaaaaaaaaaaaaaaaaaaaaaaaaaaaaaaaaaaaaaaaaaaaaaaaaaaaaaaaa

SEQ ID NO: 22191 - RNA, 572 nt, Artificial Sequence
  mRNA product Design a-1 (hSL-A100) comprising derived and/or modified sequence from LASV(G1180-SLE-2010;Clade IV)__AIT17166__Z (opt5)
aggagagucccgcagucggcguccagcggcucugcuuguucgugugugugucguugcaggccuuauucaagcuuaccaugggcaacaagcaggccaaagcucccgaggccaaggacagcccuagagcgucccugaucccggaugcuacccaccucgggccccaauucugcaaaucuuguugguuugaaacaaagggacugguggagugcaauaaccauuaccuuugucugaauugccucacgcugcuucugagcgucuccaaccgguguccuauuugcaaaaugccccucccuaccaagcugcgccccucugccacaccuaccgccccgcccacagaagcugccgacagcaucggcccucccccuuauucccccugaggacuagucccuguucccagagcccacuuuuuuuucuuuuuuugaaauaaaauagccugucuuucagaucucaaaggcucuuuucagagccaccaaaaaaaaaaaaaaaaaaaaaaaaaaaaaaaaaaaaaaaaaaaaaaaaaaaaaaaaaaaaaaaaaaaaaaaaaaaaaaaaaaaaaaaaaaaaaaaaaaaaa

SEQ ID NO: 22192 - RNA, 572 nt, Artificial Sequence
  mRNA product Design a-1 (hSL-A100) comprising derived and/or modified sequence from LASV(G1442-SLE-2011;Clade IV)__AIT17178__Z (opt5)
aggagagucccgcagucggcguccagcggcucugcuuguucgugugugugucguugcaggccuuauucaagcuuaccaugggcaacaagcaggccaaagcuagcgaggccaaggacucccccagagcgucucugaucccugaugcuacccaccucgggccgcaauucugcaaaagcuguugguuugaaaauaagggacugguggagugcaacaaucauuaccuuugucugaacugccucucccugcuucugucugucagcucccggugucccauuugcaaaaugccucuccccacacgccugagaccuucuacggcccccaccgccccuccggcucgggccggcgacaauaucaagcccccucccuauagcccuugaggacuagucccuguucccagagcccacuuuuuuuucuuuuuuugaaauaaaauagccugucuuucagaucucaaaggcucuuuucagagccaccaaaaaaaaaaaaaaaaaaaaaaaaaaaaaaaaaaaaaaaaaaaaaaaaaaaaaaaaaaaaaaaaaaaaaaaaaaaaaaaaaaaaaaaaaaaaaaaaaaaaa

SEQ ID NO: 22193 - RNA, 572 nt, Artificial Sequence
  mRNA product Design a-1 (hSL-A100) comprising derived and/or modified sequence from LASV(G502-SLE-2009;Clade IV)__AIT17124__Z (opt5)
aggagagucccgcagucggcguccagcggcucugcuuguucgugugugugucguugcaggccuuauucaagcuuaccaugggcaacaaacaggugaagacccccgaggccaaggacagcccuagagcuucccugaucccggaugccacacaccucgggccccaauucugcaaaucuuguugguuugaaaauaagggacuggucgagugcaacaaucauuaccuuugucugaacugccucacgcugcuucugagcguuggcaaucgguguccuauuugcaaaaugccccucccuaccaagcugcgccccuccgugacaccuaccgcgccgcccacaagagcugccgacucuaucgggccucccccuuauagccccugaggacuagucccuguucccagagcccacuuuuuuuucuuuuuuugaaauaaaauagccugucuuucagaucucaaaggcucuuuucagagccaccaaaaaaaaaaaaaaaaaaaaaaaaaaaaaaaaaaaaaaaaaaaaaaaaaaaaaaaaaaaaaaaaaaaaaaaaaaaaaaaaaaaaaaaaaaaaaaaaaaaaa

SEQ ID NO: 22194 - RNA, 572 nt, Artificial Sequence
  mRNA product Design a-1 (hSL-A100) comprising derived and/or modified sequence from LASV(G733-SLE-2010;Clade IV)__AIT17152__Z (opt5)
aggagagucccgcagucggcguccagcggcucugcuuguucgugugugugucguugcaggccuuauucaagcuuaccaugggcaacaagcaggccaaaacccccgagacaaaggacagcccuagagcuucccugaucccggaugccacgcaccucgggccccaauucugcaaaucuuguugguuugaaaauaagggacugguggagugcaacaaucauuaccuuugucugaacugccucacccugcuucugagcgucuccaaucgguguccuauuugcaaaaugccccucccuacaaagcugcgccccucuaccgcgccuacagcuccgcccgccggcgccgcugacaacaccagaccucccccuuauagccccugaggacuagucccuguucccagagcccacuuuuuuuucuuuuuuugaaauaaaauagccugucuuucagaucucaaaggcucuuuucagagccaccaaaaaaaaaaaaaaaaaaaaaaaaaaaaaaaaaaaaaaaaaaaaaaaaaaaaaaaaaaaaaaaaaaaaaaaaaaaaaaaaaaaaaaaaaaaaaaaaaaaaa

SEQ ID NO: 22195 - RNA, 584 nt, Artificial Sequence
  mRNA product Design a-1 (hSL-A100) comprising derived and/or modified sequence from MOPV/LASV reassortant(IGS-1;Clade IV)__AFY05533__Z (opt5)
aggagagucccgcagucggcguccagcggcucugcuuguucgugugugugucguugcaggccuuauucaagcuuaccaugggcaagacccagagcaaagggcaacccuccacaaaccugcucaaggagacggaaccuagacacccggugauccccgacgcccggggaaccggcccugaguucugcaaaucuuguugguuugaacgcagagggcugguccggugcaaugaucauuaccuuugucugaacugccucacacugcuucacaccguuagcgaccgcugucccaucugcaagcauaaacugccuuucagacucgagcugcagacacagcccaccgcuccuccggaaauucccccuucccagaaucccccucccuauucuccgugaggacuagucccuguucccagagcccacuuuuuuuucuuuuuuugaaauaaaauagccugucuuucagaucucaaaggcucuuuucagagccaccaaaaaaaaaaaaaaaaaaaaaaaaaaaaaaaaaaaaaaaaaaaaaaaaaaaaaaaaaaaaaaaaaaaaaaaaaaaaaaaaaaaaaaaaaaaaaaaaaaaaa

SEQ ID NO: 22196 - RNA, 572 nt, Artificial Sequence
  mRNA product Design a-1 (hSL-A100) comprising derived and/or modified sequence from LASV(LM776-SLE-2012;Clade IV)__AIT17824__Z (opt5)
aggagagucccgcagucggcguccagcggcucugcuuguucgugugugugucguugcaggccuuauucaagcuuaccaugggcaacaagcaggccaaagcuagcgaggaaaagaacucccccagagccucucugaucccugacgcgacccaccucgggccgcaauucugcaaaagcuguugguuugagaauaagggacugguggaaugcaauaaccauuaccuuugucugaauugccucacacugcuucuguccgucucuaaccggugucccauuugcaaaaugccucuccccacgaagcugcgcccuagcaccacacccaccgcuccuccgacaggcgccgccgauuccaucagacccccucccuauucuccuugaggacuagucccuguucccagagcccacuuuuuuuucuuuuuuugaaauaaaauagccugucuuucagaucucaaaggcucuuuucagagccaccaaaaaaaaaaaaaaaaaaaaaaaaaaaaaaaaaaaaaaaaaaaaaaaaaaaaaaaaaaaaaaaaaaaaaaaaaaaaaaaaaaaaaaaaaaaaaaaaaaaaa

SEQ ID NO: 22197 - RNA, 572 nt, Artificial Sequence
  mRNA product Design a-1 (hSL-A100) comprising derived and/or modified sequence from LASV(Mad39;Clade IV)__ANH09743__Z (opt5)
aggagagucccgcagucggcguccagcggcucugcuuguucgugugugugucguugcaggccuuauucaagcuuaccaugggcaacaagcaggccaaagcuagcgagguggaagacgggcccagagccucccugaucccugaugcgacccaccucggaccgcaauucugcaagucuuguugguuugagaauaaaagccuggucgaaugcaacaaucauuaccuuugucugaacugccucacacugcuucuguccguuucuaaucggugucccauuugcaagaugccucuccccacgcgccugaaaccuagcguggugcccaccgcuccuccgacaagagccggcgacgggacccggcccccucccuauuccccuugaggacuagucccuguucccagagcccacuuuuuuuucuuuuuuugaaauaaaauagccugucuuucagaucucaaaggcucuuuucagagccaccaaaaaaaaaaaaaaaaaaaaaaaaaaaaaaaaaaaaaaaaaaaaaaaaaaaaaaaaaaaaaaaaaaaaaaaaaaaaaaaaaaaaaaaaaaaaaaaaaaaaa

SEQ ID NO: 22198 - RNA, 572 nt, Artificial Sequence
  mRNA product Design a-1 (hSL-A100) comprising derived and/or modified sequence from LASV(Z0947-SLE-2011;Clade IV)__AIT17838__Z (opt5)
aggagagucccgcagucggcguccagcggcucugcuuguucgugugugugucguugcaggccuuauucaagcuuaccaugggcaacaagcaggccaaagugcccgagagcaaggacuccccuagagcuucucugaucccggaugccacccaccucgggccccaauucugcaaaagcuguugguuugaaaauaagggacuggucgagugcaacaaucauuaccuuugucugaacugccucacacugcuucuguccguuucuaaucgguguccuauuugcaaaaugccccucccuacgaagcugaagcccagcgcggcuccuaccgccccgcccacaggcgccgcugacuccauccgcccucccccuuauucucccugaggacuagucccuguucccagagcccacuuuuuuuucuuuuuuugaaauaaaauagccugucuuucagaucucaaaggcucuuuucagagccaccaaaaaaaaaaaaaaaaaaaaaaaaaaaaaaaaaaaaaaaaaaaaaaaaaaaaaaaaaaaaaaaaaaaaaaaaaaaaaaaaaaaaaaaaaaaaaaaaaaaaa

SEQ ID NO: 22199 - RNA, 548 nt, Artificial Sequence
  mRNA product Design a-1 (A100) comprising derived and/or modified sequence from LASV(Josiah;Clade IV)__ADY11072/NP_694871__Z (opt1)
aggagagucccgcagucggcguccagcggcucugcuuguucgugugugugucguugcaggccuuauucaagcuuaccaugggcaacaagcaggccaaggcccccgagagcaaggacuccccgcgcgcgagccugauccccgacgccacccaccucgggccccaguucugcaaguccugcugguucgagaacaagggccugguggagugcaacaaccacuaccugugccucaacugccugacccugcuccugagcgucuccaaccggugccccaucugcaagaugccgcugcccacgaagcuccgccccagcgccgcccccaccgccccgcccaccggggcggccgacuccauccggcccccgcccuacagccccugaggacuagucccuguucccagagcccacuuuuuuuucuuuuuuugaaauaaaauagccugucuuucagaucuaaaaaaaaaaaaaaaaaaaaaaaaaaaaaaaaaaaaaaaaaaaaaaaaaaaaaaaaaaaaaaaaaaaaaaaaaaaaaaaaaaaaaaaaaaaaaaaaaaaa

SEQ ID NO: 22200 - RNA, 551 nt, Artificial Sequence
  mRNA product Design a-1 (A100) comprising derived and/or modified sequence from LASV(Pinneo-NIG-1969;Clade I)__AIT17834__Z (opt1)
aggagagucccgcagucggcguccagcggcucugcuuguucgugugugugucguugcaggccuuauucaagcuuaccaugggcaacaagcagacccgcagcccgcccaagcccgagcacccccggcccacccugcuccccgacgccucccaccuggggccccaguucugcaagagcugcugguucgagaacaagggccugguggagugcaacaaccacuaccucugccugaacugccugacgcuccugcuguccgucagcgaccgcugccccaucugcaagaugccccuccccaccaagcuggccgugcggacccagcccuccgcgccgccccugaaccaggggaacacccagagcagcccgccgcccuacucccccugaggacuagucccuguucccagagcccacuuuuuuuucuuuuuuugaaauaaaauagccugucuuucagaucuaaaaaaaaaaaaaaaaaaaaaaaaaaaaaaaaaaaaaaaaaaaaaaaaaaaaaaaaaaaaaaaaaaaaaaaaaaaaaaaaaaaaaaaaaaaaaaaaaaaa

SEQ ID NO: 22201 - RNA, 548 nt, Artificial Sequence
  mRNA product Design a-1 (A100) comprising derived and/or modified sequence from LASV(Nig08-04;Clade II)__ADU56612__Z (opt1)
aggagagucccgcagucggcguccagcggcucugcuuguucgugugugugucguugcaggccuuauucaagcuuaccaugggcaaccgccagacccggcccaccgaggccacggagcagagccgcgcccaccuggugccggacgccucccaccucgggccccaguucugcaagagcugcugguucgagaaccggggccuggucgagugcaacaaccacuaccugugccucaacugccugucccugcuccugagcguguccagccgcugccccaucugcaagaugccccugccgacccggcucaaggccuccgcccagcccagcgccccgcccaccgaggcgccccagaacaccacgcccccgcccuacacccccugaggacuagucccuguucccagagcccacuuuuuuuucuuuuuuugaaauaaaauagccugucuuucagaucuaaaaaaaaaaaaaaaaaaaaaaaaaaaaaaaaaaaaaaaaaaaaaaaaaaaaaaaaaaaaaaaaaaaaaaaaaaaaaaaaaaaaaaaaaaaaaaaaaaaa

SEQ ID NO: 22202 - RNA, 548 nt, Artificial Sequence
  mRNA product Design a-1 (A100) comprising derived and/or modified sequence from LASV(Nig08-A19;Clade III)__ADU56620__Z (opt1)
aggagagucccgcagucggcguccagcggcucugcuuguucgugugugugucguugcaggccuuauucaagcuuaccaugggcgggaagcacaccaagccccagcgcgagagcaacuccccgcgggccagccugauccccgacgccacccaccucggcccccaguucugcaaguccugcugguucgagaacaaggggcugguggagugcaacaaccacuaccugugccucaacugccugacgcugcuccugagcguguccaaccgcugccccaucugcaagaugccccugcccacccggcuccgcgccagcaccaaccccaccgcgccccagguggagcaggucggcccgacgaacccgccgcccuacucccccugaggacuagucccuguucccagagcccacuuuuuuuucuuuuuuugaaauaaaauagccugucuuucagaucuaaaaaaaaaaaaaaaaaaaaaaaaaaaaaaaaaaaaaaaaaaaaaaaaaaaaaaaaaaaaaaaaaaaaaaaaaaaaaaaaaaaaaaaaaaaaaaaaaaaa

SEQ ID NO: 22203 - RNA, 548 nt, Artificial Sequence
  mRNA product Design a-1 (A100) comprising derived and/or modified sequence from LASV(AV;Clade V)__CCA30312__Z (opt1)
aggagagucccgcagucggcguccagcggcucugcuuguucgugugugugucguugcaggccuuauucaagcuuaccaugggcaaccgccaggccaagaaccccgagguggagaacagcccccgggccucccugauccccgacgcgacccaccucgggccccaguucugcaagagcugcugguucgagaacaagggccuggucgagugcaacaaccacuaccugugccucaacugccugucccugcuccugagcguguccaaccgcugccccaucugcaagaugccgcugcccacccggcuccgccccacgaccacccccaccgccccgcagaucaucaaggagaacacgaccaacccgccgcccuacacccccugaggacuagucccuguucccagagcccacuuuuuuuucuuuuuuugaaauaaaauagccugucuuucagaucuaaaaaaaaaaaaaaaaaaaaaaaaaaaaaaaaaaaaaaaaaaaaaaaaaaaaaaaaaaaaaaaaaaaaaaaaaaaaaaaaaaaaaaaaaaaaaaaaaaaa

SEQ ID NO: 22204 - RNA, 548 nt, Artificial Sequence
  mRNA product Design a-1 (A100) comprising derived and/or modified sequence from LASV(Togo/2016/7082;Clade VI)__AMR44579__Z (opt1)
aggagagucccgcagucggcguccagcggcucugcuuguucgugugugugucguugcaggccuuauucaagcuuaccaugggcgcccgccagaccaagcagccccagaucgaggggagcccccgggccucccuggugcccgacgcgagccaccucggcccccaguucugcaaguccugcugguucgagaacaaggggcuggucgagugcaacaaccacuaccugugccucaacugccugagccugcuccuguccgugagcaaccgcugccccaucugcaagaugccgcugcccaccaagcuccggguguccagcgcccccuccgcgcccccggccgccacggcccagcccggcaccccgccgcccuacagccccugaggacuagucccuguucccagagcccacuuuuuuuucuuuuuuugaaauaaaauagccugucuuucagaucuaaaaaaaaaaaaaaaaaaaaaaaaaaaaaaaaaaaaaaaaaaaaaaaaaaaaaaaaaaaaaaaaaaaaaaaaaaaaaaaaaaaaaaaaaaaaaaaaaaaa

SEQ ID NO: 22205 - RNA, 548 nt, Artificial Sequence
  mRNA product Design a-1 (A100) comprising derived and/or modified sequence from LASV(KAK-428;Clade n.d. (VII))__ANH09761__Z (opt1)
aggagagucccgcagucggcguccagcggcucugcuuguucgugugugugucguugcaggccuuauucaagcuuaccaugggcaacaaggggaccaagcccacccagaacagcgagcccucccgcgccaaccuggugcccgacgccagcuaccucggcccccaguucugcaaguccugcugguucgagaacaaggggcuggucgagugcaacaaccacuaccugugccucaacugccugacgaugcugcucagcguguccaaccggugccccaucugcaagaugccgcugcccaccaagaucaaggccagcggcucccccagcgcgcccccgaccgaggccaacuccgccgugagcccgccgcccuacacccccugaggacuagucccuguucccagagcccacuuuuuuuucuuuuuuugaaauaaaauagccugucuuucagaucuaaaaaaaaaaaaaaaaaaaaaaaaaaaaaaaaaaaaaaaaaaaaaaaaaaaaaaaaaaaaaaaaaaaaaaaaaaaaaaaaaaaaaaaaaaaaaaaaaaaa

SEQ ID NO: 22206 - RNA, 548 nt, Artificial Sequence
  mRNA product Design a-1 (A100) comprising derived and/or modified sequence from LASV(ISTH0009-NIG-2011;Clade II)__AIT17402__Z (opt1)
aggagagucccgcagucggcguccagcggcucugcuuguucgugugugugucguugcaggccuuauucaagcuuaccaugggcaaccgccaggccaagagcaccaagguggacgagcaccagcgggcccaccugguccccgacgcgucccaccucgggccccaguucugcaagagcugcugguucgagaaccgcggccugguggagugcaacaaccacuaccugugccucaacugccugucccugcuccugagcguguccagccggugccccaucugcaagaugccccugcccaccaagcucaaggccgccgcccagccguccgcccccagcacggagaccauccagaacaccaccccgccgcccuacacgcccugaggacuagucccuguucccagagcccacuuuuuuuucuuuuuuugaaauaaaauagccugucuuucagaucuaaaaaaaaaaaaaaaaaaaaaaaaaaaaaaaaaaaaaaaaaaaaaaaaaaaaaaaaaaaaaaaaaaaaaaaaaaaaaaaaaaaaaaaaaaaaaaaaaaaa

SEQ ID NO: 22207 - RNA, 548 nt, Artificial Sequence
  mRNA product Design a-1 (A100) comprising derived and/or modified sequence from LASV(ISTH2010-NIG-2012;Clade II)__AIT17480__Z (opt1)
aggagagucccgcagucggcguccagcggcucugcuuguucgugugugugucguugcaggccuuauucaagcuuaccaugggcaaccgccacgccaagagcaccaagguggacgagcaccagcgggcccaccugguccccgacgcgucccaccucgggccccaguucugcaagagcugcugguucgagaaccgcggccugguggagugcaacaaccacuaccugugccucaacugccugucccugcuccugagcguguccagccggugccccaucugcaagaugccccugcccaccaagcucaaggccgccgcccagccguccgcccccagcacggaggucauccaguccaccaccccgccgcccuacacccccugaggacuagucccuguucccagagcccacuuuuuuuucuuuuuuugaaauaaaauagccugucuuucagaucuaaaaaaaaaaaaaaaaaaaaaaaaaaaaaaaaaaaaaaaaaaaaaaaaaaaaaaaaaaaaaaaaaaaaaaaaaaaaaaaaaaaaaaaaaaaaaaaaaaaa

SEQ ID NO: 22208 - RNA, 548 nt, Artificial Sequence
  mRNA product Design a-1 (A100) comprising derived and/or modified sequence from LASV(Lassa virus/H.sapiens-wt/NGA/2016/ISTH_0017;Clade II)__AVO03713__Z (opt1)
aggagagucccgcagucggcguccagcggcucugcuuguucgugugugugucguugcaggccuuauucaagcuuaccaugggcaaccgccaggccaagagcaccaagguggacgagcaccagcgggcccaccugguccccgacgcgucccaccucgggccccaguucugcaagagcugcugguucgagaaccgcggccugguggagugcaacaaccacuaccugugccucaacugccugucccugcuccugagcguguccagccggugccccaucugcaagaugccccugcccaccaagcucaaggccgccacgcagccguccgcccccagcaccgaggucaaccagaacaccaccccgccgcccuacacgcccugaggacuagucccuguucccagagcccacuuuuuuuucuuuuuuugaaauaaaauagccugucuuucagaucuaaaaaaaaaaaaaaaaaaaaaaaaaaaaaaaaaaaaaaaaaaaaaaaaaaaaaaaaaaaaaaaaaaaaaaaaaaaaaaaaaaaaaaaaaaaaaaaaaaaa

SEQ ID NO: 22209 - RNA, 548 nt, Artificial Sequence
  mRNA product Design a-1 (A100) comprising derived and/or modified sequence from LASV(Lassa virus/H.sapiens-wt/NGA/2018/ISTH_0959;Clade II)__AVV65084__Z (opt1)
aggagagucccgcagucggcguccagcggcucugcuuguucgugugugugucguugcaggccuuauucaagcuuaccaugggcaacaagcaggccaagagcaccaagguggacgagcaccagcgcgcccaccugguccccgacgcgucccaccucgggccccaguucugcaagagcugcugguucgagaaccggggccugguggagugcaacaaccacuaccugugccucaacugccugucccugcuccugagcguguccagccgcugccccaucugcaagaugccccugcccaccaagcucaaggccgccgcccagccguccgcccccagcacggaggcgauccaguccaccaccccgccgcccuacacccccugaggacuagucccuguucccagagcccacuuuuuuuucuuuuuuugaaauaaaauagccugucuuucagaucuaaaaaaaaaaaaaaaaaaaaaaaaaaaaaaaaaaaaaaaaaaaaaaaaaaaaaaaaaaaaaaaaaaaaaaaaaaaaaaaaaaaaaaaaaaaaaaaaaaaa

SEQ ID NO: 22210 - RNA, 548 nt, Artificial Sequence
  mRNA product Design a-1 (A100) comprising derived and/or modified sequence from LASV(LASV003-NIG-2008;Clade II)__AIT17578__Z (opt1)
aggagagucccgcagucggcguccagcggcucugcuuguucgugugugugucguugcaggccuuauucaagcuuaccaugggcaaccgccaggccaagagcaccaagguggacgagcaccagcgggcccaccugguccccgacgcgucccaccucgggccccaguucugcaagagcugcugguucgagaacaagggccugguggagugcaacaaccacuaccugugccucaacugccugucccugcuccugagcguguccagccgcugccccaucugcaagaugccccugcccaccaagcuccgggccgccgcccagccguccgcccccagcacggaguccgcgcagaacaccgccccgccgcccuacgcccccugaggacuagucccuguucccagagcccacuuuuuuuucuuuuuuugaaauaaaauagccugucuuucagaucuaaaaaaaaaaaaaaaaaaaaaaaaaaaaaaaaaaaaaaaaaaaaaaaaaaaaaaaaaaaaaaaaaaaaaaaaaaaaaaaaaaaaaaaaaaaaaaaaaaaa

SEQ ID NO: 22211 - RNA, 548 nt, Artificial Sequence
  mRNA product Design a-1 (A100) comprising derived and/or modified sequence from LASV(LASV035-NIG-2009;Clade II)__AIT17586__Z (opt1)
aggagagucccgcagucggcguccagcggcucugcuuguucgugugugugucguugcaggccuuauucaagcuuaccaugggcaacaagcaggccaagagcaccaagguggacgagcaccagcgcgcccaccugguccccgacgcgucccaccucgggccccaguucugcaagagcugcugguucgagaaccggggccugguggagugcaacaaccacuaccugugccucaacugccugucccugcuccugagcguguccagccgcugccccaucugcaagaugccccugcccacccggcucaaggccgccgcccagccguccgcccccagcacggaggucacccagaacaccaccccgccgcccuacacgcccugaggacuagucccuguucccagagcccacuuuuuuuucuuuuuuugaaauaaaauagccugucuuucagaucuaaaaaaaaaaaaaaaaaaaaaaaaaaaaaaaaaaaaaaaaaaaaaaaaaaaaaaaaaaaaaaaaaaaaaaaaaaaaaaaaaaaaaaaaaaaaaaaaaaaa

SEQ ID NO: 22212 - RNA, 548 nt, Artificial Sequence
  mRNA product Design a-1 (A100) comprising derived and/or modified sequence from LASV(LASV1000-NIG-2009;Clade II)__AIT17780__Z (opt1)
aggagagucccgcagucggcguccagcggcucugcuuguucgugugugugucguugcaggccuuauucaagcuuaccaugggcaaccgccagaccaagagcaccaagguggacgagcaccagcgggccuaccugguccccgacgccucccuccuggggccccaguucugcaagagcugcugguucgagaacaagggccugguggagugcaacaaccacuaccucugccugaacugccugucccuccugcugagcguguccagccgcugccccaucugcaagaugccccuccccacgcggcugaaggcggccgcccagcccuccgccccgcccaccgaggccauccagaacaccacgccgccgcccuacacccccugaggacuagucccuguucccagagcccacuuuuuuuucuuuuuuugaaauaaaauagccugucuuucagaucuaaaaaaaaaaaaaaaaaaaaaaaaaaaaaaaaaaaaaaaaaaaaaaaaaaaaaaaaaaaaaaaaaaaaaaaaaaaaaaaaaaaaaaaaaaaaaaaaaaaa

SEQ ID NO: 22213 - RNA, 548 nt, Artificial Sequence
  mRNA product Design a-1 (A100) comprising derived and/or modified sequence from LASV(LASV221-NIG-2010;Clade II)__AIT17622__Z (opt1)
aggagagucccgcagucggcguccagcggcucugcuuguucgugugugugucguugcaggccuuauucaagcuuaccaugggcaaccgccaggccaagagcaccaagguggacgagcaccagcgggcccaccugguccccgacgcgucccaccucgggccccaguucugcaagagcugcugguucgagaaccgcggccugguggagugcaacaaccacuaccugugccucaacugccugucccugcuccugagcguguccagccggugccccaucugcaagaugccccugcccaccaagcucaaggccgccacgcagccguccgcccccagcaccgaggucacccagaacaccaucccgccgcccuacucccccugaggacuagucccuguucccagagcccacuuuuuuuucuuuuuuugaaauaaaauagccugucuuucagaucuaaaaaaaaaaaaaaaaaaaaaaaaaaaaaaaaaaaaaaaaaaaaaaaaaaaaaaaaaaaaaaaaaaaaaaaaaaaaaaaaaaaaaaaaaaaaaaaaaaaa

SEQ ID NO: 22214 - RNA, 548 nt, Artificial Sequence
  mRNA product Design a-1 (A100) comprising derived and/or modified sequence from LASV(LASV237-NIG-2010;Clade II)__AIT17636__Z (opt1)
aggagagucccgcagucggcguccagcggcucugcuuguucgugugugugucguugcaggccuuauucaagcuuaccaugggcaaccgccaggccaagagcaccaagguggacgagcaccagcgggcccaccugguccccgacgcgucccaccucgggccccaguucugcaagagcugcugguucgagaaccgcggccugguggagugcaacaaccacuaccugugccucaacugccugucccugcuccugagcguguccagccggugccccaucugcaagaugccccugcccaccaagcucaaggccgccgcccagccguccgcccccagcaucgagacgauccagaacaccaccccgccgcccuacacccccugaggacuagucccuguucccagagcccacuuuuuuuucuuuuuuugaaauaaaauagccugucuuucagaucuaaaaaaaaaaaaaaaaaaaaaaaaaaaaaaaaaaaaaaaaaaaaaaaaaaaaaaaaaaaaaaaaaaaaaaaaaaaaaaaaaaaaaaaaaaaaaaaaaaaa

SEQ ID NO: 22215 - RNA, 548 nt, Artificial Sequence
  mRNA product Design a-1 (A100) comprising derived and/or modified sequence from LASV(LASV253-NIG-2011;Clade II)__AIT17668__Z (opt1)
aggagagucccgcagucggcguccagcggcucugcuuguucgugugugugucguugcaggccuuauucaagcuuaccaugggcaaccgccaggccaagagcaccaagguggacgagcaccagcgggcccaccugguccccgacgcgucccaccucgggccccaguucugcaagagcugcugguucgagaacaagggccugguggagugcaacaaccacuaccugugccucaacugccugucccugcuccugagcguguccagccgcugccccaucugcaagaugccccugcccaccaagcucaagacgaccgcccagccguccgccccgcccaccgaggccgccaagaacaccgcgcccccgcccuacgcccccugaggacuagucccuguucccagagcccacuuuuuuuucuuuuuuugaaauaaaauagccugucuuucagaucuaaaaaaaaaaaaaaaaaaaaaaaaaaaaaaaaaaaaaaaaaaaaaaaaaaaaaaaaaaaaaaaaaaaaaaaaaaaaaaaaaaaaaaaaaaaaaaaaaaaa

SEQ ID NO: 22216 - RNA, 548 nt, Artificial Sequence
  mRNA product Design a-1 (A100) comprising derived and/or modified sequence from LASV(G1180-SLE-2010;Clade IV)__AIT17166__Z (opt1)
aggagagucccgcagucggcguccagcggcucugcuuguucgugugugugucguugcaggccuuauucaagcuuaccaugggcaacaagcaggccaaggcccccgaggcgaaggacagcccgcgcgccucccugauccccgacgccacccaccucgggccccaguucugcaagagcugcugguucgagaccaagggccugguggagugcaacaaccacuaccugugccucaacugccugacgcugcuccuguccgucagcaaccggugccccaucugcaagaugccgcugcccaccaagcuccgccccuccgccacccccaccgccccgcccacggaggcggccgacagcaucgggcccccgcccuacucccccugaggacuagucccuguucccagagcccacuuuuuuuucuuuuuuugaaauaaaauagccugucuuucagaucuaaaaaaaaaaaaaaaaaaaaaaaaaaaaaaaaaaaaaaaaaaaaaaaaaaaaaaaaaaaaaaaaaaaaaaaaaaaaaaaaaaaaaaaaaaaaaaaaaaaa

SEQ ID NO: 22217 - RNA, 548 nt, Artificial Sequence
  mRNA product Design a-1 (A100) comprising derived and/or modified sequence from LASV(G1442-SLE-2011;Clade IV)__AIT17178__Z (opt1)
aggagagucccgcagucggcguccagcggcucugcuuguucgugugugugucguugcaggccuuauucaagcuuaccaugggcaacaagcaggccaaggccagcgaggcgaaggacagcccccgcgccucccugaucccggacgccacccaccucgggccccaguucugcaaguccugcugguucgagaacaagggccugguggagugcaacaaccacuaccugugccucaacugccugagccugcuccuguccgucagcucccggugccccaucugcaagaugccccugccgacccgccuccggcccagcacggcccccaccgcgcccccggcccgcgccggggacaacaucaagcccccgcccuacucccccugaggacuagucccuguucccagagcccacuuuuuuuucuuuuuuugaaauaaaauagccugucuuucagaucuaaaaaaaaaaaaaaaaaaaaaaaaaaaaaaaaaaaaaaaaaaaaaaaaaaaaaaaaaaaaaaaaaaaaaaaaaaaaaaaaaaaaaaaaaaaaaaaaaaaa

SEQ ID NO: 22218 - RNA, 548 nt, Artificial Sequence
  mRNA product Design a-1 (A100) comprising derived and/or modified sequence from LASV(G502-SLE-2009;Clade IV)__AIT17124__Z (opt1)
aggagagucccgcagucggcguccagcggcucugcuuguucgugugugugucguugcaggccuuauucaagcuuaccaugggcaacaagcaggucaagacccccgaggccaaggacagcccccgcgccucccugauccccgacgcgacccaccucgggccccaguucugcaagagcugcugguucgagaacaagggccugguggagugcaacaaccacuaccugugccucaacugccugacgcugcuccuguccguggggaaccggugccccaucugcaagaugccgcugcccaccaagcuccgccccagcgugacccccaccgccccgcccacgcgggccgccgacuccaucggcccgccgcccuacagccccugaggacuagucccuguucccagagcccacuuuuuuuucuuuuuuugaaauaaaauagccugucuuucagaucuaaaaaaaaaaaaaaaaaaaaaaaaaaaaaaaaaaaaaaaaaaaaaaaaaaaaaaaaaaaaaaaaaaaaaaaaaaaaaaaaaaaaaaaaaaaaaaaaaaaa

SEQ ID NO: 22219 - RNA, 548 nt, Artificial Sequence
  mRNA product Design a-1 (A100) comprising derived and/or modified sequence from LASV(G733-SLE-2010;Clade IV)__AIT17152__Z (opt1)
aggagagucccgcagucggcguccagcggcucugcuuguucgugugugugucguugcaggccuuauucaagcuuaccaugggcaacaagcaggccaagacccccgagaccaaggacagcccgcgcgccucccugauccccgacgcgacgcaccucgggccccaguucugcaagagcugcugguucgagaacaagggccugguggagugcaacaaccacuaccugugccucaacugccugacccugcuccuguccgucagcaaccggugccccaucugcaagaugccgcugcccaccaagcuccgccccuccaccgcccccacggccccgcccgccggggccgcggacaacacccggcccccgcccuacagccccugaggacuagucccuguucccagagcccacuuuuuuuucuuuuuuugaaauaaaauagccugucuuucagaucuaaaaaaaaaaaaaaaaaaaaaaaaaaaaaaaaaaaaaaaaaaaaaaaaaaaaaaaaaaaaaaaaaaaaaaaaaaaaaaaaaaaaaaaaaaaaaaaaaaaa

SEQ ID NO: 22220 - RNA, 560 nt, Artificial Sequence
  mRNA product Design a-1 (A100) comprising derived and/or modified sequence from MOPV/LASV reassortant(IGS-1;Clade IV)__AFY05533__Z (opt1)
aggagagucccgcagucggcguccagcggcucugcuuguucgugugugugucguugcaggccuuauucaagcuuaccaugggcaagacccagagcaaggggcagcccuccaccaaccugcucaaggagacggagccccgccaccccgugauccccgacgcccggggcaccgggcccgaguucugcaagagcugcugguucgagcgccggggccugguccgcugcaacgaccacuaccugugccucaacugccugacccugcuccacaccguguccgaccggugccccaucugcaagcacaagcugcccuuccgccuggagcuccagacgcagcccaccgccccgcccgagaucccgcccagccagaacccgccgcccuacucccccugaggacuagucccuguucccagagcccacuuuuuuuucuuuuuuugaaauaaaauagccugucuuucagaucuaaaaaaaaaaaaaaaaaaaaaaaaaaaaaaaaaaaaaaaaaaaaaaaaaaaaaaaaaaaaaaaaaaaaaaaaaaaaaaaaaaaaaaaaaaaaaaaaaaaa

SEQ ID NO: 22221 - RNA, 548 nt, Artificial Sequence
  mRNA product Design a-1 (A100) comprising derived and/or modified sequence from LASV(LM776-SLE-2012;Clade IV)__AIT17824__Z (opt1)
aggagagucccgcagucggcguccagcggcucugcuuguucgugugugugucguugcaggccuuauucaagcuuaccaugggcaacaagcaggccaaggccagcgaggagaagaacagcccccgcgccucccugaucccggacgccacccaccucgggccccaguucugcaaguccugcugguucgagaacaagggccugguggagugcaacaaccacuaccugugccucaacugccugacccugcuccugagcgucuccaaccggugccccaucugcaagaugccccugccgacgaagcuccgccccagcaccacccccaccgcgcccccgacgggggccgccgacuccauccggcccccgcccuacagccccugaggacuagucccuguucccagagcccacuuuuuuuucuuuuuuugaaauaaaauagccugucuuucagaucuaaaaaaaaaaaaaaaaaaaaaaaaaaaaaaaaaaaaaaaaaaaaaaaaaaaaaaaaaaaaaaaaaaaaaaaaaaaaaaaaaaaaaaaaaaaaaaaaaaaa

SEQ ID NO: 22222 - RNA, 548 nt, Artificial Sequence
  mRNA product Design a-1 (A100) comprising derived and/or modified sequence from LASV(Mad39;Clade IV)__ANH09743__Z (opt1)
aggagagucccgcagucggcguccagcggcucugcuuguucgugugugugucguugcaggccuuauucaagcuuaccaugggcaacaagcaggccaaggccagcgagguggaggacgggccccgcgccucccugauccccgacgccacccaccucggcccccaguucugcaagagcugcugguucgagaacaagucccuggucgagugcaacaaccacuaccugugccucaacugccugacccugcuccugagcguguccaaccggugccccaucugcaagaugccccugccgacgcgccucaagcccagcgugguccccaccgcgcccccgacccgggccggggacggcacccgcccgccgcccuacucccccugaggacuagucccuguucccagagcccacuuuuuuuucuuuuuuugaaauaaaauagccugucuuucagaucuaaaaaaaaaaaaaaaaaaaaaaaaaaaaaaaaaaaaaaaaaaaaaaaaaaaaaaaaaaaaaaaaaaaaaaaaaaaaaaaaaaaaaaaaaaaaaaaaaaaa

SEQ ID NO: 22223 - RNA, 548 nt, Artificial Sequence
  mRNA product Design a-1 (A100) comprising derived and/or modified sequence from LASV(Z0947-SLE-2011;Clade IV)__AIT17838__Z (opt1)
aggagagucccgcagucggcguccagcggcucugcuuguucgugugugugucguugcaggccuuauucaagcuuaccaugggcaacaagcaggccaaggugcccgagagcaaggacuccccgcgcgccagccugauccccgacgcgacccaccucgggccccaguucugcaaguccugcugguucgagaacaagggccuggucgagugcaacaaccacuaccugugccucaacugccugacccugcuccugagcguguccaaccgcugccccaucugcaagaugccgcugcccacgaagcucaagcccagcgccgcccccaccgccccgcccaccggggccgcggacuccauccggcccccgcccuacagccccugaggacuagucccuguucccagagcccacuuuuuuuucuuuuuuugaaauaaaauagccugucuuucagaucuaaaaaaaaaaaaaaaaaaaaaaaaaaaaaaaaaaaaaaaaaaaaaaaaaaaaaaaaaaaaaaaaaaaaaaaaaaaaaaaaaaaaaaaaaaaaaaaaaaaa

SEQ ID NO: 22224 - RNA, 548 nt, Artificial Sequence
  mRNA product Design a-1 (A100) comprising derived and/or modified sequence from LASV(Josiah;Clade IV)__ADY11072/NP_694871__Z (opt4)
aggagagucccgcagucggcguccagcggcucugcuuguucgugugugugucguugcaggccuuauucaagcuuaccaugggcaacaagcaggccaaggcccccgagagcaaggacagccccagagccagccugauccccgacgccacccaccugggcccccaguucugcaagagcugcugguucgagaacaagggccugguggagugcaacaaccacuaccugugccugaacugccugacccugcugcugagcgugagcaacagaugccccaucugcaagaugccccugcccaccaagcugagacccagcgccgcccccaccgccccccccaccggcgccgccgacagcaucagacccccccccuacagccccugaggacuagucccuguucccagagcccacuuuuuuuucuuuuuuugaaauaaaauagccugucuuucagaucuaaaaaaaaaaaaaaaaaaaaaaaaaaaaaaaaaaaaaaaaaaaaaaaaaaaaaaaaaaaaaaaaaaaaaaaaaaaaaaaaaaaaaaaaaaaaaaaaaaaa

SEQ ID NO: 22225 - RNA, 551 nt, Artificial Sequence
  mRNA product Design a-1 (A100) comprising derived and/or modified sequence from LASV(Pinneo-NIG-1969;Clade I)__AIT17834__Z (opt4)
aggagagucccgcagucggcguccagcggcucugcuuguucgugugugugucguugcaggccuuauucaagcuuaccaugggcaacaagcagaccagaagcccccccaagcccgagcaccccagacccacccugcugcccgacgccagccaccugggcccccaguucugcaagagcugcugguucgagaacaagggccugguggagugcaacaaccacuaccugugccugaacugccugacccugcugcugagcgugagcgacagaugccccaucugcaagaugccccugcccaccaagcuggccgugagaacccagcccagcgcccccccccugaaccagggcaacacccagagcagccccccccccuacagccccugaggacuagucccuguucccagagcccacuuuuuuuucuuuuuuugaaauaaaauagccugucuuucagaucuaaaaaaaaaaaaaaaaaaaaaaaaaaaaaaaaaaaaaaaaaaaaaaaaaaaaaaaaaaaaaaaaaaaaaaaaaaaaaaaaaaaaaaaaaaaaaaaaaaaa

SEQ ID NO: 22226 - RNA, 548 nt, Artificial Sequence
  mRNA product Design a-1 (A100) comprising derived and/or modified sequence from LASV(Nig08-04;Clade II)__ADU56612__Z (opt4)
aggagagucccgcagucggcguccagcggcucugcuuguucgugugugugucguugcaggccuuauucaagcuuaccaugggcaacagacagaccagacccaccgaggccaccgagcagagcagagcccaccuggugcccgacgccagccaccugggcccccaguucugcaagagcugcugguucgagaacagaggccugguggagugcaacaaccacuaccugugccugaacugccugagccugcugcugagcgugagcagcagaugccccaucugcaagaugccccugcccaccagacugaaggccagcgcccagcccagcgccccccccaccgaggccccccagaacaccacccccccccccuacacccccugaggacuagucccuguucccagagcccacuuuuuuuucuuuuuuugaaauaaaauagccugucuuucagaucuaaaaaaaaaaaaaaaaaaaaaaaaaaaaaaaaaaaaaaaaaaaaaaaaaaaaaaaaaaaaaaaaaaaaaaaaaaaaaaaaaaaaaaaaaaaaaaaaaaaa

SEQ ID NO: 22227 - RNA, 548 nt, Artificial Sequence
  mRNA product Design a-1 (A100) comprising derived and/or modified sequence from LASV(Nig08-A19;Clade III)__ADU56620__Z (opt4)
aggagagucccgcagucggcguccagcggcucugcuuguucgugugugugucguugcaggccuuauucaagcuuaccaugggcggcaagcacaccaagccccagagagagagcaacagccccagagccagccugauccccgacgccacccaccugggcccccaguucugcaagagcugcugguucgagaacaagggccugguggagugcaacaaccacuaccugugccugaacugccugacccugcugcugagcgugagcaacagaugccccaucugcaagaugccccugcccaccagacugagagccagcaccaaccccaccgccccccagguggagcaggugggccccaccaaccccccccccuacagccccugaggacuagucccuguucccagagcccacuuuuuuuucuuuuuuugaaauaaaauagccugucuuucagaucuaaaaaaaaaaaaaaaaaaaaaaaaaaaaaaaaaaaaaaaaaaaaaaaaaaaaaaaaaaaaaaaaaaaaaaaaaaaaaaaaaaaaaaaaaaaaaaaaaaaa

SEQ ID NO: 22228 - RNA, 548 nt, Artificial Sequence
  mRNA product Design a-1 (A100) comprising derived and/or modified sequence from LASV(AV;Clade V)__CCA30312__Z (opt4)
aggagagucccgcagucggcguccagcggcucugcuuguucgugugugugucguugcaggccuuauucaagcuuaccaugggcaacagacaggccaagaaccccgagguggagaacagccccagagccagccugauccccgacgccacccaccugggcccccaguucugcaagagcugcugguucgagaacaagggccugguggagugcaacaaccacuaccugugccugaacugccugagccugcugcugagcgugagcaacagaugccccaucugcaagaugccccugcccaccagacugagacccaccaccacccccaccgccccccagaucaucaaggagaacaccaccaaccccccccccuacacccccugaggacuagucccuguucccagagcccacuuuuuuuucuuuuuuugaaauaaaauagccugucuuucagaucuaaaaaaaaaaaaaaaaaaaaaaaaaaaaaaaaaaaaaaaaaaaaaaaaaaaaaaaaaaaaaaaaaaaaaaaaaaaaaaaaaaaaaaaaaaaaaaaaaaaa

SEQ ID NO: 22229 - RNA, 548 nt, Artificial Sequence
  mRNA product Design a-1 (A100) comprising derived and/or modified sequence from LASV(Togo/2016/7082;Clade VI)__AMR44579__Z (opt4)
aggagagucccgcagucggcguccagcggcucugcuuguucgugugugugucguugcaggccuuauucaagcuuaccaugggcgccagacagaccaagcagccccagaucgagggcagccccagagccagccuggugcccgacgccagccaccugggcccccaguucugcaagagcugcugguucgagaacaagggccugguggagugcaacaaccacuaccugugccugaacugccugagccugcugcugagcgugagcaacagaugccccaucugcaagaugccccugcccaccaagcugagagugagcagcgcccccagcgccccccccgccgccaccgcccagcccggcacccccccccccuacagccccugaggacuagucccuguucccagagcccacuuuuuuuucuuuuuuugaaauaaaauagccugucuuucagaucuaaaaaaaaaaaaaaaaaaaaaaaaaaaaaaaaaaaaaaaaaaaaaaaaaaaaaaaaaaaaaaaaaaaaaaaaaaaaaaaaaaaaaaaaaaaaaaaaaaaa

SEQ ID NO: 22230 - RNA, 548 nt, Artificial Sequence
  mRNA product Design a-1 (A100) comprising derived and/or modified sequence from LASV(KAK-428;Clade n.d. (VII))__ANH09761__Z (opt4)
aggagagucccgcagucggcguccagcggcucugcuuguucgugugugugucguugcaggccuuauucaagcuuaccaugggcaacaagggcaccaagcccacccagaacagcgagcccagcagagccaaccuggugcccgacgccagcuaccugggcccccaguucugcaagagcugcugguucgagaacaagggccugguggagugcaacaaccacuaccugugccugaacugccugaccaugcugcugagcgugagcaacagaugccccaucugcaagaugccccugcccaccaagaucaaggccagcggcagccccagcgccccccccaccgaggccaacagcgccgugagccccccccccuacacccccugaggacuagucccuguucccagagcccacuuuuuuuucuuuuuuugaaauaaaauagccugucuuucagaucuaaaaaaaaaaaaaaaaaaaaaaaaaaaaaaaaaaaaaaaaaaaaaaaaaaaaaaaaaaaaaaaaaaaaaaaaaaaaaaaaaaaaaaaaaaaaaaaaaaaa

SEQ ID NO: 22231 - RNA, 548 nt, Artificial Sequence
  mRNA product Design a-1 (A100) comprising derived and/or modified sequence from LASV(ISTH0009-NIG-2011;Clade II)__AIT17402__Z (opt4)
aggagagucccgcagucggcguccagcggcucugcuuguucgugugugugucguugcaggccuuauucaagcuuaccaugggcaacagacaggccaagagcaccaagguggacgagcaccagagagcccaccuggugcccgacgccagccaccugggcccccaguucugcaagagcugcugguucgagaacagaggccugguggagugcaacaaccacuaccugugccugaacugccugagccugcugcugagcgugagcagcagaugccccaucugcaagaugccccugcccaccaagcugaaggccgccgcccagcccagcgcccccagcaccgagaccauccagaacaccacccccccccccuacacccccugaggacuagucccuguucccagagcccacuuuuuuuucuuuuuuugaaauaaaauagccugucuuucagaucuaaaaaaaaaaaaaaaaaaaaaaaaaaaaaaaaaaaaaaaaaaaaaaaaaaaaaaaaaaaaaaaaaaaaaaaaaaaaaaaaaaaaaaaaaaaaaaaaaaaa

SEQ ID NO: 22232 - RNA, 548 nt, Artificial Sequence
  mRNA product Design a-1 (A100) comprising derived and/or modified sequence from LASV(ISTH2010-NIG-2012;Clade II)__AIT17480__Z (opt4)
aggagagucccgcagucggcguccagcggcucugcuuguucgugugugugucguugcaggccuuauucaagcuuaccaugggcaacagacacgccaagagcaccaagguggacgagcaccagagagcccaccuggugcccgacgccagccaccugggcccccaguucugcaagagcugcugguucgagaacagaggccugguggagugcaacaaccacuaccugugccugaacugccugagccugcugcugagcgugagcagcagaugccccaucugcaagaugccccugcccaccaagcugaaggccgccgcccagcccagcgcccccagcaccgaggugauccagagcaccacccccccccccuacacccccugaggacuagucccuguucccagagcccacuuuuuuuucuuuuuuugaaauaaaauagccugucuuucagaucuaaaaaaaaaaaaaaaaaaaaaaaaaaaaaaaaaaaaaaaaaaaaaaaaaaaaaaaaaaaaaaaaaaaaaaaaaaaaaaaaaaaaaaaaaaaaaaaaaaaa

SEQ ID NO: 22233 - RNA, 548 nt, Artificial Sequence
  mRNA product Design a-1 (A100) comprising derived and/or modified sequence from LASV(Lassa virus/H.sapiens-wt/NGA/2016/ISTH_0017;Clade II)__AVO03713__Z (opt4)
aggagagucccgcagucggcguccagcggcucugcuuguucgugugugugucguugcaggccuuauucaagcuuaccaugggcaacagacaggccaagagcaccaagguggacgagcaccagagagcccaccuggugcccgacgccagccaccugggcccccaguucugcaagagcugcugguucgagaacagaggccugguggagugcaacaaccacuaccugugccugaacugccugagccugcugcugagcgugagcagcagaugccccaucugcaagaugccccugcccaccaagcugaaggccgccacccagcccagcgcccccagcaccgaggugaaccagaacaccacccccccccccuacacccccugaggacuagucccuguucccagagcccacuuuuuuuucuuuuuuugaaauaaaauagccugucuuucagaucuaaaaaaaaaaaaaaaaaaaaaaaaaaaaaaaaaaaaaaaaaaaaaaaaaaaaaaaaaaaaaaaaaaaaaaaaaaaaaaaaaaaaaaaaaaaaaaaaaaaa

SEQ ID NO: 22234 - RNA, 548 nt, Artificial Sequence
  mRNA product Design a-1 (A100) comprising derived and/or modified sequence from LASV(Lassa virus/H.sapiens-wt/NGA/2018/ISTH_0959;Clade II)__AVV65084__Z (opt4)
aggagagucccgcagucggcguccagcggcucugcuuguucgugugugugucguugcaggccuuauucaagcuuaccaugggcaacaagcaggccaagagcaccaagguggacgagcaccagagagcccaccuggugcccgacgccagccaccugggcccccaguucugcaagagcugcugguucgagaacagaggccugguggagugcaacaaccacuaccugugccugaacugccugagccugcugcugagcgugagcagcagaugccccaucugcaagaugccccugcccaccaagcugaaggccgccgcccagcccagcgcccccagcaccgaggccauccagagcaccacccccccccccuacacccccugaggacuagucccuguucccagagcccacuuuuuuuucuuuuuuugaaauaaaauagccugucuuucagaucuaaaaaaaaaaaaaaaaaaaaaaaaaaaaaaaaaaaaaaaaaaaaaaaaaaaaaaaaaaaaaaaaaaaaaaaaaaaaaaaaaaaaaaaaaaaaaaaaaaaa

SEQ ID NO: 22235 - RNA, 548 nt, Artificial Sequence
  mRNA product Design a-1 (A100) comprising derived and/or modified sequence from LASV(LASV003-NIG-2008;Clade II)__AIT17578__Z (opt4)
aggagagucccgcagucggcguccagcggcucugcuuguucgugugugugucguugcaggccuuauucaagcuuaccaugggcaacagacaggccaagagcaccaagguggacgagcaccagagagcccaccuggugcccgacgccagccaccugggcccccaguucugcaagagcugcugguucgagaacaagggccugguggagugcaacaaccacuaccugugccugaacugccugagccugcugcugagcgugagcagcagaugccccaucugcaagaugccccugcccaccaagcugagagccgccgcccagcccagcgcccccagcaccgagagcgcccagaacaccgcccccccccccuacgcccccugaggacuagucccuguucccagagcccacuuuuuuuucuuuuuuugaaauaaaauagccugucuuucagaucuaaaaaaaaaaaaaaaaaaaaaaaaaaaaaaaaaaaaaaaaaaaaaaaaaaaaaaaaaaaaaaaaaaaaaaaaaaaaaaaaaaaaaaaaaaaaaaaaaaaa

SEQ ID NO: 22236 - RNA, 548 nt, Artificial Sequence
  mRNA product Design a-1 (A100) comprising derived and/or modified sequence from LASV(LASV035-NIG-2009;Clade II)__AIT17586__Z (opt4)
aggagagucccgcagucggcguccagcggcucugcuuguucgugugugugucguugcaggccuuauucaagcuuaccaugggcaacaagcaggccaagagcaccaagguggacgagcaccagagagcccaccuggugcccgacgccagccaccugggcccccaguucugcaagagcugcugguucgagaacagaggccugguggagugcaacaaccacuaccugugccugaacugccugagccugcugcugagcgugagcagcagaugccccaucugcaagaugccccugcccaccagacugaaggccgccgcccagcccagcgcccccagcaccgaggugacccagaacaccacccccccccccuacacccccugaggacuagucccuguucccagagcccacuuuuuuuucuuuuuuugaaauaaaauagccugucuuucagaucuaaaaaaaaaaaaaaaaaaaaaaaaaaaaaaaaaaaaaaaaaaaaaaaaaaaaaaaaaaaaaaaaaaaaaaaaaaaaaaaaaaaaaaaaaaaaaaaaaaaa

SEQ ID NO: 22237 - RNA, 548 nt, Artificial Sequence
  mRNA product Design a-1 (A100) comprising derived and/or modified sequence from LASV(LASV1000-NIG-2009;Clade II)__AIT17780__Z (opt4)
aggagagucccgcagucggcguccagcggcucugcuuguucgugugugugucguugcaggccuuauucaagcuuaccaugggcaacagacagaccaagagcaccaagguggacgagcaccagagagccuaccuggugcccgacgccagccugcugggcccccaguucugcaagagcugcugguucgagaacaagggccugguggagugcaacaaccacuaccugugccugaacugccugagccugcugcugagcgugagcagcagaugccccaucugcaagaugccccugcccaccagacugaaggccgccgcccagcccagcgccccccccaccgaggccauccagaacaccacccccccccccuacacccccugaggacuagucccuguucccagagcccacuuuuuuuucuuuuuuugaaauaaaauagccugucuuucagaucuaaaaaaaaaaaaaaaaaaaaaaaaaaaaaaaaaaaaaaaaaaaaaaaaaaaaaaaaaaaaaaaaaaaaaaaaaaaaaaaaaaaaaaaaaaaaaaaaaaaa

SEQ ID NO: 22238 - RNA, 548 nt, Artificial Sequence
  mRNA product Design a-1 (A100) comprising derived and/or modified sequence from LASV(LASV221-NIG-2010;Clade II)__AIT17622__Z (opt4)
aggagagucccgcagucggcguccagcggcucugcuuguucgugugugugucguugcaggccuuauucaagcuuaccaugggcaacagacaggccaagagcaccaagguggacgagcaccagagagcccaccuggugcccgacgccagccaccugggcccccaguucugcaagagcugcugguucgagaacagaggccugguggagugcaacaaccacuaccugugccugaacugccugagccugcugcugagcgugagcagcagaugccccaucugcaagaugccccugcccaccaagcugaaggccgccacccagcccagcgcccccagcaccgaggugacccagaacaccauccccccccccuacagccccugaggacuagucccuguucccagagcccacuuuuuuuucuuuuuuugaaauaaaauagccugucuuucagaucuaaaaaaaaaaaaaaaaaaaaaaaaaaaaaaaaaaaaaaaaaaaaaaaaaaaaaaaaaaaaaaaaaaaaaaaaaaaaaaaaaaaaaaaaaaaaaaaaaaaa

SEQ ID NO: 22239 - RNA, 548 nt, Artificial Sequence
  mRNA product Design a-1 (A100) comprising derived and/or modified sequence from LASV(LASV237-NIG-2010;Clade II)__AIT17636__Z (opt4)
aggagagucccgcagucggcguccagcggcucugcuuguucgugugugugucguugcaggccuuauucaagcuuaccaugggcaacagacaggccaagagcaccaagguggacgagcaccagagagcccaccuggugcccgacgccagccaccugggcccccaguucugcaagagcugcugguucgagaacagaggccugguggagugcaacaaccacuaccugugccugaacugccugagccugcugcugagcgugagcagcagaugccccaucugcaagaugccccugcccaccaagcugaaggccgccgcccagcccagcgcccccagcaucgagaccauccagaacaccacccccccccccuacacccccugaggacuagucccuguucccagagcccacuuuuuuuucuuuuuuugaaauaaaauagccugucuuucagaucuaaaaaaaaaaaaaaaaaaaaaaaaaaaaaaaaaaaaaaaaaaaaaaaaaaaaaaaaaaaaaaaaaaaaaaaaaaaaaaaaaaaaaaaaaaaaaaaaaaaa

SEQ ID NO: 22240 - RNA, 548 nt, Artificial Sequence
  mRNA product Design a-1 (A100) comprising derived and/or modified sequence from LASV(LASV253-NIG-2011;Clade II)__AIT17668__Z (opt4)
aggagagucccgcagucggcguccagcggcucugcuuguucgugugugugucguugcaggccuuauucaagcuuaccaugggcaacagacaggccaagagcaccaagguggacgagcaccagagagcccaccuggugcccgacgccagccaccugggcccccaguucugcaagagcugcugguucgagaacaagggccugguggagugcaacaaccacuaccugugccugaacugccugagccugcugcugagcgugagcagcagaugccccaucugcaagaugccccugcccaccaagcugaagaccaccgcccagcccagcgccccccccaccgaggccgccaagaacaccgcccccccccccuacgcccccugaggacuagucccuguucccagagcccacuuuuuuuucuuuuuuugaaauaaaauagccugucuuucagaucuaaaaaaaaaaaaaaaaaaaaaaaaaaaaaaaaaaaaaaaaaaaaaaaaaaaaaaaaaaaaaaaaaaaaaaaaaaaaaaaaaaaaaaaaaaaaaaaaaaaa

SEQ ID NO: 22241 - RNA, 548 nt, Artificial Sequence
  mRNA product Design a-1 (A100) comprising derived and/or modified sequence from LASV(G1180-SLE-2010;Clade IV)__AIT17166__Z (opt4)
aggagagucccgcagucggcguccagcggcucugcuuguucgugugugugucguugcaggccuuauucaagcuuaccaugggcaacaagcaggccaaggcccccgaggccaaggacagccccagagccagccugauccccgacgccacccaccugggcccccaguucugcaagagcugcugguucgagaccaagggccugguggagugcaacaaccacuaccugugccugaacugccugacccugcugcugagcgugagcaacagaugccccaucugcaagaugccccugcccaccaagcugagacccagcgccacccccaccgccccccccaccgaggccgccgacagcaucggccccccccccuacagccccugaggacuagucccuguucccagagcccacuuuuuuuucuuuuuuugaaauaaaauagccugucuuucagaucuaaaaaaaaaaaaaaaaaaaaaaaaaaaaaaaaaaaaaaaaaaaaaaaaaaaaaaaaaaaaaaaaaaaaaaaaaaaaaaaaaaaaaaaaaaaaaaaaaaaa

SEQ ID NO: 22242 - RNA, 548 nt, Artificial Sequence
  mRNA product Design a-1 (A100) comprising derived and/or modified sequence from LASV(G1442-SLE-2011;Clade IV)__AIT17178__Z (opt4)
aggagagucccgcagucggcguccagcggcucugcuuguucgugugugugucguugcaggccuuauucaagcuuaccaugggcaacaagcaggccaaggccagcgaggccaaggacagccccagagccagccugauccccgacgccacccaccugggcccccaguucugcaagagcugcugguucgagaacaagggccugguggagugcaacaaccacuaccugugccugaacugccugagccugcugcugagcgugagcagcagaugccccaucugcaagaugccccugcccaccagacugagacccagcaccgcccccaccgccccccccgccagagccggcgacaacaucaagcccccccccuacagccccugaggacuagucccuguucccagagcccacuuuuuuuucuuuuuuugaaauaaaauagccugucuuucagaucuaaaaaaaaaaaaaaaaaaaaaaaaaaaaaaaaaaaaaaaaaaaaaaaaaaaaaaaaaaaaaaaaaaaaaaaaaaaaaaaaaaaaaaaaaaaaaaaaaaaa

SEQ ID NO: 22243 - RNA, 548 nt, Artificial Sequence
  mRNA product Design a-1 (A100) comprising derived and/or modified sequence from LASV(G502-SLE-2009;Clade IV)__AIT17124__Z (opt4)
aggagagucccgcagucggcguccagcggcucugcuuguucgugugugugucguugcaggccuuauucaagcuuaccaugggcaacaagcaggugaagacccccgaggccaaggacagccccagagccagccugauccccgacgccacccaccugggcccccaguucugcaagagcugcugguucgagaacaagggccugguggagugcaacaaccacuaccugugccugaacugccugacccugcugcugagcgugggcaacagaugccccaucugcaagaugccccugcccaccaagcugagacccagcgugacccccaccgccccccccaccagagccgccgacagcaucggccccccccccuacagccccugaggacuagucccuguucccagagcccacuuuuuuuucuuuuuuugaaauaaaauagccugucuuucagaucuaaaaaaaaaaaaaaaaaaaaaaaaaaaaaaaaaaaaaaaaaaaaaaaaaaaaaaaaaaaaaaaaaaaaaaaaaaaaaaaaaaaaaaaaaaaaaaaaaaaa

SEQ ID NO: 22244 - RNA, 548 nt, Artificial Sequence
  mRNA product Design a-1 (A100) comprising derived and/or modified sequence from LASV(G733-SLE-2010;Clade IV)__AIT17152__Z (opt4)
aggagagucccgcagucggcguccagcggcucugcuuguucgugugugugucguugcaggccuuauucaagcuuaccaugggcaacaagcaggccaagacccccgagaccaaggacagccccagagccagccugauccccgacgccacccaccugggcccccaguucugcaagagcugcugguucgagaacaagggccugguggagugcaacaaccacuaccugugccugaacugccugacccugcugcugagcgugagcaacagaugccccaucugcaagaugccccugcccaccaagcugagacccagcaccgcccccaccgccccccccgccggcgccgccgacaacaccagacccccccccuacagccccugaggacuagucccuguucccagagcccacuuuuuuuucuuuuuuugaaauaaaauagccugucuuucagaucuaaaaaaaaaaaaaaaaaaaaaaaaaaaaaaaaaaaaaaaaaaaaaaaaaaaaaaaaaaaaaaaaaaaaaaaaaaaaaaaaaaaaaaaaaaaaaaaaaaaa

SEQ ID NO: 22245 - RNA, 560 nt, Artificial Sequence
  mRNA product Design a-1 (A100) comprising derived and/or modified sequence from MOPV/LASV reassortant(IGS-1;Clade IV)__AFY05533__Z (opt4)
aggagagucccgcagucggcguccagcggcucugcuuguucgugugugugucguugcaggccuuauucaagcuuaccaugggcaagacccagagcaagggccagcccagcaccaaccugcugaaggagaccgagcccagacaccccgugauccccgacgccagaggcaccggccccgaguucugcaagagcugcugguucgagagaagaggccuggugagaugcaacgaccacuaccugugccugaacugccugacccugcugcacaccgugagcgacagaugccccaucugcaagcacaagcugcccuucagacuggagcugcagacccagcccaccgccccccccgagaucccccccagccagaaccccccccccuacagccccugaggacuagucccuguucccagagcccacuuuuuuuucuuuuuuugaaauaaaauagccugucuuucagaucuaaaaaaaaaaaaaaaaaaaaaaaaaaaaaaaaaaaaaaaaaaaaaaaaaaaaaaaaaaaaaaaaaaaaaaaaaaaaaaaaaaaaaaaaaaaaaaaaaaaa

SEQ ID NO: 22246 - RNA, 548 nt, Artificial Sequence
  mRNA product Design a-1 (A100) comprising derived and/or modified sequence from LASV(LM776-SLE-2012;Clade IV)__AIT17824__Z (opt4)
aggagagucccgcagucggcguccagcggcucugcuuguucgugugugugucguugcaggccuuauucaagcuuaccaugggcaacaagcaggccaaggccagcgaggagaagaacagccccagagccagccugauccccgacgccacccaccugggcccccaguucugcaagagcugcugguucgagaacaagggccugguggagugcaacaaccacuaccugugccugaacugccugacccugcugcugagcgugagcaacagaugccccaucugcaagaugccccugcccaccaagcugagacccagcaccacccccaccgccccccccaccggcgccgccgacagcaucagacccccccccuacagccccugaggacuagucccuguucccagagcccacuuuuuuuucuuuuuuugaaauaaaauagccugucuuucagaucuaaaaaaaaaaaaaaaaaaaaaaaaaaaaaaaaaaaaaaaaaaaaaaaaaaaaaaaaaaaaaaaaaaaaaaaaaaaaaaaaaaaaaaaaaaaaaaaaaaaa

SEQ ID NO: 22247 - RNA, 548 nt, Artificial Sequence
  mRNA product Design a-1 (A100) comprising derived and/or modified sequence from LASV(Mad39;Clade IV)__ANH09743__Z (opt4)
aggagagucccgcagucggcguccagcggcucugcuuguucgugugugugucguugcaggccuuauucaagcuuaccaugggcaacaagcaggccaaggccagcgagguggaggacggccccagagccagccugauccccgacgccacccaccugggcccccaguucugcaagagcugcugguucgagaacaagagccugguggagugcaacaaccacuaccugugccugaacugccugacccugcugcugagcgugagcaacagaugccccaucugcaagaugccccugcccaccagacugaagcccagcguggugcccaccgccccccccaccagagccggcgacggcaccagacccccccccuacagccccugaggacuagucccuguucccagagcccacuuuuuuuucuuuuuuugaaauaaaauagccugucuuucagaucuaaaaaaaaaaaaaaaaaaaaaaaaaaaaaaaaaaaaaaaaaaaaaaaaaaaaaaaaaaaaaaaaaaaaaaaaaaaaaaaaaaaaaaaaaaaaaaaaaaaa

SEQ ID NO: 22248 - RNA, 548 nt, Artificial Sequence
  mRNA product Design a-1 (A100) comprising derived and/or modified sequence from LASV(Z0947-SLE-2011;Clade IV)__AIT17838__Z (opt4)
aggagagucccgcagucggcguccagcggcucugcuuguucgugugugugucguugcaggccuuauucaagcuuaccaugggcaacaagcaggccaaggugcccgagagcaaggacagccccagagccagccugauccccgacgccacccaccugggcccccaguucugcaagagcugcugguucgagaacaagggccugguggagugcaacaaccacuaccugugccugaacugccugacccugcugcugagcgugagcaacagaugccccaucugcaagaugccccugcccaccaagcugaagcccagcgccgcccccaccgccccccccaccggcgccgccgacagcaucagacccccccccuacagccccugaggacuagucccuguucccagagcccacuuuuuuuucuuuuuuugaaauaaaauagccugucuuucagaucuaaaaaaaaaaaaaaaaaaaaaaaaaaaaaaaaaaaaaaaaaaaaaaaaaaaaaaaaaaaaaaaaaaaaaaaaaaaaaaaaaaaaaaaaaaaaaaaaaaaa

SEQ ID NO: 22249 - RNA, 548 nt, Artificial Sequence
  mRNA product Design a-1 (A100) comprising derived and/or modified sequence from LASV(Josiah;Clade IV)__ADY11072/NP_694871__Z (opt5)
aggagagucccgcagucggcguccagcggcucugcuuguucgugugugugucguugcaggccuuauucaagcuuaccaugggcaacaagcaggccaaagcucccgagagcaaggacuccccuagagccucucugaucccggaugcgacccaccucgggccccaauucugcaaaagcuguugguuugaaaauaagggacugguggagugcaacaaucauuaccuuugucugaacugccucacacugcuucuguccgucucuaaucgguguccuauuugcaaaaugccccucccuacgaagcugcgccccagcgcugccccuaccgccccgcccacaggcgcugccgacuccaucagaccucccccuuauucucccugaggacuagucccuguucccagagcccacuuuuuuuucuuuuuuugaaauaaaauagccugucuuucagaucuaaaaaaaaaaaaaaaaaaaaaaaaaaaaaaaaaaaaaaaaaaaaaaaaaaaaaaaaaaaaaaaaaaaaaaaaaaaaaaaaaaaaaaaaaaaaaaaaaaaa

SEQ ID NO: 22250 - RNA, 551 nt, Artificial Sequence
  mRNA product Design a-1 (A100) comprising derived and/or modified sequence from LASV(Pinneo-NIG-1969;Clade I)__AIT17834__Z (opt5)
aggagagucccgcagucggcguccagcggcucugcuuguucgugugugugucguugcaggccuuauucaagcuuaccaugggcaacaagcagaccagaagcccucccaaaccggagcacccccggccuacacugcuccccgacgccucccaucuggggccucaauucugcaagucuuguugguuugaaaauaaaggacuuguggagugcaacaaucacuaccugugucucaacugccugacgcuucugcucagcgucuccgaucgcugucccaucugcaagaugccucugccgaccaaacuggcuguuagaacacagcccucugccccuccccucaaucagggcaacacccagagcuccccucccccguauucuccuugaggacuagucccuguucccagagcccacuuuuuuuucuuuuuuugaaauaaaauagccugucuuucagaucuaaaaaaaaaaaaaaaaaaaaaaaaaaaaaaaaaaaaaaaaaaaaaaaaaaaaaaaaaaaaaaaaaaaaaaaaaaaaaaaaaaaaaaaaaaaaaaaaaaaa

SEQ ID NO: 22251 - RNA, 548 nt, Artificial Sequence
  mRNA product Design a-1 (A100) comprising derived and/or modified sequence from LASV(Nig08-04;Clade II)__ADU56612__Z (opt5)
aggagagucccgcagucggcguccagcggcucugcuuguucgugugugugucguugcaggccuuauucaagcuuaccaugggcaacagacagacccggcccacagaggccacggaacaaagccgcgcccaccuggugccugacgccucccaucucgggccgcaguucugcaagucuuguugguuugagaauagaggacuggucgaaugcaacaaucacuaccuuugucugaacugccucagccugcuucuguccguuucuagccggugucccaucugcaaaaugccucuccccacccgccugaaggcguccgcucagccuucugcucccccuacagaggccccgcagaauaccacacccccucccuauaccccuugaggacuagucccuguucccagagcccacuuuuuuuucuuuuuuugaaauaaaauagccugucuuucagaucuaaaaaaaaaaaaaaaaaaaaaaaaaaaaaaaaaaaaaaaaaaaaaaaaaaaaaaaaaaaaaaaaaaaaaaaaaaaaaaaaaaaaaaaaaaaaaaaaaaaa

SEQ ID NO: 22252 - RNA, 548 nt, Artificial Sequence
  mRNA product Design a-1 (A100) comprising derived and/or modified sequence from LASV(Nig08-A19;Clade III)__ADU56620__Z (opt5)
aggagagucccgcagucggcguccagcggcucugcuuguucgugugugugucguugcaggccuuauucaagcuuaccaugggcgggaagcacaccaaaccccagagagagagcaacuccccucgggccucucugaucccggacgcuacacaucucggaccccaauucugcaagagcuguugguuugaaaauaaaggccugguggagugcaacaaucacuaccuuugucugaacugccucacgcugcuucuguccgucucuaaucgcuguccuauuugcaagaugccccucccuaccagacugcgggccagcacaaaccccaccgcgccucagguugaacagguggggccgacaaaucccccucccuauuccccuugaggacuagucccuguucccagagcccacuuuuuuuucuuuuuuugaaauaaaauagccugucuuucagaucuaaaaaaaaaaaaaaaaaaaaaaaaaaaaaaaaaaaaaaaaaaaaaaaaaaaaaaaaaaaaaaaaaaaaaaaaaaaaaaaaaaaaaaaaaaaaaaaaaaaa

SEQ ID NO: 22253 - RNA, 548 nt, Artificial Sequence
  mRNA product Design a-1 (A100) comprising derived and/or modified sequence from LASV(AV;Clade V)__CCA30312__Z (opt5)
aggagagucccgcagucggcguccagcggcucugcuuguucgugugugugucguugcaggccuuauucaagcuuaccaugggcaacagacaggccaagaaucccgagguggaaaacagcccucgggcuucccugaucccggacgccacccaccucgggccccaauucugcaaaucuuguugguuugagaauaagggacuggucgaaugcaacaaucauuaccuuugucugaacugccucagccugcuucuguccguuucuaaucgcuguccuauuugcaaaaugccccucccuacaagacugcggcccacgaccacaccuaccgcgccgcagaucauuaaggagaacacaaccaaucccccucccuauacaccuugaggacuagucccuguucccagagcccacuuuuuuuucuuuuuuugaaauaaaauagccugucuuucagaucuaaaaaaaaaaaaaaaaaaaaaaaaaaaaaaaaaaaaaaaaaaaaaaaaaaaaaaaaaaaaaaaaaaaaaaaaaaaaaaaaaaaaaaaaaaaaaaaaaaaa

SEQ ID NO: 22254 - RNA, 548 nt, Artificial Sequence
  mRNA product Design a-1 (A100) comprising derived and/or modified sequence from LASV(Togo/2016/7082;Clade VI)__AMR44579__Z (opt5)
aggagagucccgcagucggcguccagcggcucugcuuguucgugugugugucguugcaggccuuauucaagcuuaccaugggcgccagacagaccaagcaaccccagaucgaggggagcccucgggcuucccuggugccggacgccucucaccucggaccccaguucugcaaaagcuguugguuugaaaacaagggccuggucgagugcaauaaccauuaccuuugucugaauugccucucccugcuucugucuguuagcaaccgcuguccuauuugcaaaaugccccucccuacaaagcugagaguguccucugcgcccagcgcuccuccggccgccacggcucagcccgggaccccucccccuuauucccccugaggacuagucccuguucccagagcccacuuuuuuuucuuuuuuugaaauaaaauagccugucuuucagaucuaaaaaaaaaaaaaaaaaaaaaaaaaaaaaaaaaaaaaaaaaaaaaaaaaaaaaaaaaaaaaaaaaaaaaaaaaaaaaaaaaaaaaaaaaaaaaaaaaaaa

SEQ ID NO: 22255 - RNA, 548 nt, Artificial Sequence
  mRNA product Design a-1 (A100) comprising derived and/or modified sequence from LASV(KAK-428;Clade n.d. (VII))__ANH09761__Z (opt5)
aggagagucccgcagucggcguccagcggcucugcuuguucgugugugugucguugcaggccuuauucaagcuuaccaugggcaacaaggggaccaaacccacacagaauagcgagccuuccagagccaaccuggugccggacgcuucuuaccucggaccccaauucugcaagagcuguugguuugaaaauaaaggccuggucgagugcaacaaucacuaucuuugucugaacugccucacgaugcugcuuuccguuuccaaucgguguccuaucugcaagaugccccugccuaccaaaauuaaggccagcgggucccccucugcgccuccgacagaagcuaacagcgccgugucucccccucccuacaccccuugaggacuagucccuguucccagagcccacuuuuuuuucuuuuuuugaaauaaaauagccugucuuucagaucuaaaaaaaaaaaaaaaaaaaaaaaaaaaaaaaaaaaaaaaaaaaaaaaaaaaaaaaaaaaaaaaaaaaaaaaaaaaaaaaaaaaaaaaaaaaaaaaaaaaa

SEQ ID NO: 22256 - RNA, 548 nt, Artificial Sequence
  mRNA product Design a-1 (A100) comprising derived and/or modified sequence from LASV(ISTH0009-NIG-2011;Clade II)__AIT17402__Z (opt5)
aggagagucccgcagucggcguccagcggcucugcuuguucgugugugugucguugcaggccuuauucaagcuuaccaugggcaacagacaggccaagagcaccaaaguggacgagcaccaacgggcucaucugguccccgaugccucccaccucgggccucaguucugcaagucuuguugguuugaaaaucgcggacugguugagugcaacaaucauuaccuuugucugaacugccucagccugcuucuguccgugucuagcagauguccgaucugcaaaaugccccucccuacaaagcugaaagcggcugcccagcccuccgccccuucuacggaaaccauucagaauacaacacccccuccguauacccccugaggacuagucccuguucccagagcccacuuuuuuuucuuuuuuugaaauaaaauagccugucuuucagaucuaaaaaaaaaaaaaaaaaaaaaaaaaaaaaaaaaaaaaaaaaaaaaaaaaaaaaaaaaaaaaaaaaaaaaaaaaaaaaaaaaaaaaaaaaaaaaaaaaaaa

SEQ ID NO: 22257 - RNA, 548 nt, Artificial Sequence
  mRNA product Design a-1 (A100) comprising derived and/or modified sequence from LASV(ISTH2010-NIG-2012;Clade II)__AIT17480__Z (opt5)
aggagagucccgcagucggcguccagcggcucugcuuguucgugugugugucguugcaggccuuauucaagcuuaccaugggcaacagacacgccaagagcaccaaaguggacgagcaucagcgggcucaccugguccccgaugccucccaucucgggccucaauucugcaagucuuguugguuugaaaaucgcggacugguugagugcaacaaucacuaccuuugucugaacugccucagccugcuucuguccgugucuagcagauguccgaucugcaaaaugccccucccuacaaagcugaaagcggcugcccagcccuccgccccuucuacggaagugauucagagcaccacacccccuccguauacccccugaggacuagucccuguucccagagcccacuuuuuuuucuuuuuuugaaauaaaauagccugucuuucagaucuaaaaaaaaaaaaaaaaaaaaaaaaaaaaaaaaaaaaaaaaaaaaaaaaaaaaaaaaaaaaaaaaaaaaaaaaaaaaaaaaaaaaaaaaaaaaaaaaaaaa

SEQ ID NO: 22258 - RNA, 548 nt, Artificial Sequence
  mRNA product Design a-1 (A100) comprising derived and/or modified sequence from LASV(Lassa virus/H.sapiens-wt/NGA/2016/ISTH_0017;Clade II)__AVO03713__Z (opt5)
aggagagucccgcagucggcguccagcggcucugcuuguucgugugugugucguugcaggccuuauucaagcuuaccaugggcaacagacaggccaagagcaccaaaguggacgagcaccaacgggcucaucugguccccgaugccucccaccucgggccucaguucugcaagucuuguugguuugaaaaucgcggacugguugagugcaacaaucauuaccuuugucugaacugccucagccugcuucuguccgugucuagcagauguccgaucugcaaaaugccccucccuacaaagcugaaagcggcuacgcagcccuccgccccuucuaccgaagugaaucagaacacaacacccccuccguauacccccugaggacuagucccuguucccagagcccacuuuuuuuucuuuuuuugaaauaaaauagccugucuuucagaucuaaaaaaaaaaaaaaaaaaaaaaaaaaaaaaaaaaaaaaaaaaaaaaaaaaaaaaaaaaaaaaaaaaaaaaaaaaaaaaaaaaaaaaaaaaaaaaaaaaaa

SEQ ID NO: 22259 - RNA, 548 nt, Artificial Sequence
  mRNA product Design a-1 (A100) comprising derived and/or modified sequence from LASV(Lassa virus/H.sapiens-wt/NGA/2018/ISTH_0959;Clade II)__AVV65084__Z (opt5)
aggagagucccgcagucggcguccagcggcucugcuuguucgugugugugucguugcaggccuuauucaagcuuaccaugggcaacaagcaggccaaaagcaccaagguggacgagcaccaaagagcucaucugguccccgaugccucccaccucgggccucaguucugcaaaucuuguugguuugaaaaucggggacugguugagugcaacaaucauuaccuuugucugaacugccucagccugcuucuguccgugucuagccgcuguccgaucugcaagaugccccucccuacaaaacugaaggcggcugcccagcccuccgccccuucuacggaagcuauucagagcaccacacccccuccguauacccccugaggacuagucccuguucccagagcccacuuuuuuuucuuuuuuugaaauaaaauagccugucuuucagaucuaaaaaaaaaaaaaaaaaaaaaaaaaaaaaaaaaaaaaaaaaaaaaaaaaaaaaaaaaaaaaaaaaaaaaaaaaaaaaaaaaaaaaaaaaaaaaaaaaaaa

SEQ ID NO: 22260 - RNA, 548 nt, Artificial Sequence
  mRNA product Design a-1 (A100) comprising derived and/or modified sequence from LASV(LASV003-NIG-2008;Clade II)__AIT17578__Z (opt5)
aggagagucccgcagucggcguccagcggcucugcuuguucgugugugugucguugcaggccuuauucaagcuuaccaugggcaacagacaggccaagagcaccaaaguggacgagcaccaacgggcucaucugguccccgaugccucccaccucgggccucaguucugcaagucuuguugguuugaaaauaaaggacugguugagugcaacaaucauuaccuuugucugaacugccucagccugcuucuguccgugucuagccgcuguccgaucugcaagaugccccucccuacaaaacugagagcggcugcccagcccuccgccccuucuacggaaagcgcucagaauaccgcucccccuccguaugcccccugaggacuagucccuguucccagagcccacuuuuuuuucuuuuuuugaaauaaaauagccugucuuucagaucuaaaaaaaaaaaaaaaaaaaaaaaaaaaaaaaaaaaaaaaaaaaaaaaaaaaaaaaaaaaaaaaaaaaaaaaaaaaaaaaaaaaaaaaaaaaaaaaaaaaa

SEQ ID NO: 22261 - RNA, 548 nt, Artificial Sequence
  mRNA product Design a-1 (A100) comprising derived and/or modified sequence from LASV(LASV035-NIG-2009;Clade II)__AIT17586__Z (opt5)
aggagagucccgcagucggcguccagcggcucugcuuguucgugugugugucguugcaggccuuauucaagcuuaccaugggcaacaagcaggccaaaagcaccaagguggacgagcaccaaagagcucaucugguccccgaugccucccaccucgggccucaguucugcaaaucuuguugguuugaaaaucggggacugguugagugcaacaaucauuaccuuugucugaacugccucagccugcuucuguccgugucuagccgcuguccgaucugcaagaugccccucccuacaagacugaaagcggcugcccagcccuccgccccuucuacggaagugacccagaauacaacacccccuccguauacccccugaggacuagucccuguucccagagcccacuuuuuuuucuuuuuuugaaauaaaauagccugucuuucagaucuaaaaaaaaaaaaaaaaaaaaaaaaaaaaaaaaaaaaaaaaaaaaaaaaaaaaaaaaaaaaaaaaaaaaaaaaaaaaaaaaaaaaaaaaaaaaaaaaaaaa

SEQ ID NO: 22262 - RNA, 548 nt, Artificial Sequence
  mRNA product Design a-1 (A100) comprising derived and/or modified sequence from LASV(LASV1000-NIG-2009;Clade II)__AIT17780__Z (opt5)
aggagagucccgcagucggcguccagcggcucugcuuguucgugugugugucguugcaggccuuauucaagcuuaccaugggcaacagacagaccaagagcacaaaaguggacgagcaccaacgggccuaccugguccccgaugcuucccuccuggggccucaguucugcaagucuuguugguuugaaaauaaaggacuuguugagugcaacaaucauuaucugugucucaacugccugagccuucugcucuccgugucuagccgcuguccgaucugcaagaugccccugccuacgagacugaaagccgcggcucagcccuccgccccucccaccgaagccauucagaauacaaccccuccgcccuacacaccuugaggacuagucccuguucccagagcccacuuuuuuuucuuuuuuugaaauaaaauagccugucuuucagaucuaaaaaaaaaaaaaaaaaaaaaaaaaaaaaaaaaaaaaaaaaaaaaaaaaaaaaaaaaaaaaaaaaaaaaaaaaaaaaaaaaaaaaaaaaaaaaaaaaaaa

SEQ ID NO: 22263 - RNA, 548 nt, Artificial Sequence
  mRNA product Design a-1 (A100) comprising derived and/or modified sequence from LASV(LASV221-NIG-2010;Clade II)__AIT17622__Z (opt5)
aggagagucccgcagucggcguccagcggcucugcuuguucgugugugugucguugcaggccuuauucaagcuuaccaugggcaacagacaggccaagagcaccaaaguggacgagcaccaacgggcucaucugguccccgaugccucccaccucgggccucaguucugcaagucuuguugguuugaaaaucgcggacugguugagugcaacaaucauuaccuuugucugaacugccucagccugcuucuguccgugucuagcagauguccgaucugcaaaaugccccucccuacaaagcugaaagcggcuacgcagcccuccgccccuucuaccgaagugacacagaauaccauucccccuccguauagccccugaggacuagucccuguucccagagcccacuuuuuuuucuuuuuuugaaauaaaauagccugucuuucagaucuaaaaaaaaaaaaaaaaaaaaaaaaaaaaaaaaaaaaaaaaaaaaaaaaaaaaaaaaaaaaaaaaaaaaaaaaaaaaaaaaaaaaaaaaaaaaaaaaaaaa

SEQ ID NO: 22264 - RNA, 548 nt, Artificial Sequence
  mRNA product Design a-1 (A100) comprising derived and/or modified sequence from LASV(LASV237-NIG-2010;Clade II)__AIT17636__Z (opt5)
aggagagucccgcagucggcguccagcggcucugcuuguucgugugugugucguugcaggccuuauucaagcuuaccaugggcaacagacaggccaagagcaccaaaguggacgagcaccaacgggcucaucugguccccgaugccucccaccucgggccucaguucugcaagucuuguugguuugaaaaucgcggacugguugagugcaacaaucauuaccuuugucugaacugccucagccugcuucuguccgugucuagcagauguccgaucugcaaaaugccccucccuacaaagcugaaagcggcugcccagcccuccgccccuucuauugaaacgauccagaauaccacacccccuccguauacccccugaggacuagucccuguucccagagcccacuuuuuuuucuuuuuuugaaauaaaauagccugucuuucagaucuaaaaaaaaaaaaaaaaaaaaaaaaaaaaaaaaaaaaaaaaaaaaaaaaaaaaaaaaaaaaaaaaaaaaaaaaaaaaaaaaaaaaaaaaaaaaaaaaaaaa

SEQ ID NO: 22265 - RNA, 548 nt, Artificial Sequence
  mRNA product Design a-1 (A100) comprising derived and/or modified sequence from LASV(LASV253-NIG-2011;Clade II)__AIT17668__Z (opt5)
aggagagucccgcagucggcguccagcggcucugcuuguucgugugugugucguugcaggccuuauucaagcuuaccaugggcaacagacaggccaagagcaccaaaguggacgagcaccaacgggcucaucugguccccgaugccucccaccucgggccucaguucugcaagucuuguugguuugaaaauaaaggacugguugagugcaacaaucauuaccuuugucugaacugccucagccugcuucuguccgugucuagccgcuguccgaucugcaagaugccccucccuacaaaacugaagacgaccgcgcagcccuccgcuccucccacagaagccgccaagaauaccgcuccuccgcccuaugccccuugaggacuagucccuguucccagagcccacuuuuuuuucuuuuuuugaaauaaaauagccugucuuucagaucuaaaaaaaaaaaaaaaaaaaaaaaaaaaaaaaaaaaaaaaaaaaaaaaaaaaaaaaaaaaaaaaaaaaaaaaaaaaaaaaaaaaaaaaaaaaaaaaaaaaa

SEQ ID NO: 22266 - RNA, 548 nt, Artificial Sequence
  mRNA product Design a-1 (A100) comprising derived and/or modified sequence from LASV(G1180-SLE-2010;Clade IV)__AIT17166__Z (opt5)
aggagagucccgcagucggcguccagcggcucugcuuguucgugugugugucguugcaggccuuauucaagcuuaccaugggcaacaagcaggccaaagcucccgaggccaaggacagcccuagagcgucccugaucccggaugcuacccaccucgggccccaauucugcaaaucuuguugguuugaaacaaagggacugguggagugcaauaaccauuaccuuugucugaauugccucacgcugcuucugagcgucuccaaccgguguccuauuugcaaaaugccccucccuaccaagcugcgccccucugccacaccuaccgccccgcccacagaagcugccgacagcaucggcccucccccuuauucccccugaggacuagucccuguucccagagcccacuuuuuuuucuuuuuuugaaauaaaauagccugucuuucagaucuaaaaaaaaaaaaaaaaaaaaaaaaaaaaaaaaaaaaaaaaaaaaaaaaaaaaaaaaaaaaaaaaaaaaaaaaaaaaaaaaaaaaaaaaaaaaaaaaaaaa

SEQ ID NO: 22267 - RNA, 548 nt, Artificial Sequence
  mRNA product Design a-1 (A100) comprising derived and/or modified sequence from LASV(G1442-SLE-2011;Clade IV)__AIT17178__Z (opt5)
aggagagucccgcagucggcguccagcggcucugcuuguucgugugugugucguugcaggccuuauucaagcuuaccaugggcaacaagcaggccaaagcuagcgaggccaaggacucccccagagcgucucugaucccugaugcuacccaccucgggccgcaauucugcaaaagcuguugguuugaaaauaagggacugguggagugcaacaaucauuaccuuugucugaacugccucucccugcuucugucugucagcucccggugucccauuugcaaaaugccucuccccacacgccugagaccuucuacggcccccaccgccccuccggcucgggccggcgacaauaucaagcccccucccuauagcccuugaggacuagucccuguucccagagcccacuuuuuuuucuuuuuuugaaauaaaauagccugucuuucagaucuaaaaaaaaaaaaaaaaaaaaaaaaaaaaaaaaaaaaaaaaaaaaaaaaaaaaaaaaaaaaaaaaaaaaaaaaaaaaaaaaaaaaaaaaaaaaaaaaaaaa

SEQ ID NO: 22268 - RNA, 548 nt, Artificial Sequence
  mRNA product Design a-1 (A100) comprising derived and/or modified sequence from LASV(G502-SLE-2009;Clade IV)__AIT17124__Z (opt5)
aggagagucccgcagucggcguccagcggcucugcuuguucgugugugugucguugcaggccuuauucaagcuuaccaugggcaacaaacaggugaagacccccgaggccaaggacagcccuagagcuucccugaucccggaugccacacaccucgggccccaauucugcaaaucuuguugguuugaaaauaagggacuggucgagugcaacaaucauuaccuuugucugaacugccucacgcugcuucugagcguuggcaaucgguguccuauuugcaaaaugccccucccuaccaagcugcgccccuccgugacaccuaccgcgccgcccacaagagcugccgacucuaucgggccucccccuuauagccccugaggacuagucccuguucccagagcccacuuuuuuuucuuuuuuugaaauaaaauagccugucuuucagaucuaaaaaaaaaaaaaaaaaaaaaaaaaaaaaaaaaaaaaaaaaaaaaaaaaaaaaaaaaaaaaaaaaaaaaaaaaaaaaaaaaaaaaaaaaaaaaaaaaaaa

SEQ ID NO: 22269 - RNA, 548 nt, Artificial Sequence
  mRNA product Design a-1 (A100) comprising derived and/or modified sequence from LASV(G733-SLE-2010;Clade IV)__AIT17152__Z (opt5)
aggagagucccgcagucggcguccagcggcucugcuuguucgugugugugucguugcaggccuuauucaagcuuaccaugggcaacaagcaggccaaaacccccgagacaaaggacagcccuagagcuucccugaucccggaugccacgcaccucgggccccaauucugcaaaucuuguugguuugaaaauaagggacugguggagugcaacaaucauuaccuuugucugaacugccucacccugcuucugagcgucuccaaucgguguccuauuugcaaaaugccccucccuacaaagcugcgccccucuaccgcgccuacagcuccgcccgccggcgccgcugacaacaccagaccucccccuuauagccccugaggacuagucccuguucccagagcccacuuuuuuuucuuuuuuugaaauaaaauagccugucuuucagaucuaaaaaaaaaaaaaaaaaaaaaaaaaaaaaaaaaaaaaaaaaaaaaaaaaaaaaaaaaaaaaaaaaaaaaaaaaaaaaaaaaaaaaaaaaaaaaaaaaaaa

SEQ ID NO: 22270 - RNA, 560 nt, Artificial Sequence
  mRNA product Design a-1 (A100) comprising derived and/or modified sequence from MOPV/LASV reassortant(IGS-1;Clade IV)__AFY05533__Z (opt5)
aggagagucccgcagucggcguccagcggcucugcuuguucgugugugugucguugcaggccuuauucaagcuuaccaugggcaagacccagagcaaagggcaacccuccacaaaccugcucaaggagacggaaccuagacacccggugauccccgacgcccggggaaccggcccugaguucugcaaaucuuguugguuugaacgcagagggcugguccggugcaaugaucauuaccuuugucugaacugccucacacugcuucacaccguuagcgaccgcugucccaucugcaagcauaaacugccuuucagacucgagcugcagacacagcccaccgcuccuccggaaauucccccuucccagaaucccccucccuauucuccgugaggacuagucccuguucccagagcccacuuuuuuuucuuuuuuugaaauaaaauagccugucuuucagaucuaaaaaaaaaaaaaaaaaaaaaaaaaaaaaaaaaaaaaaaaaaaaaaaaaaaaaaaaaaaaaaaaaaaaaaaaaaaaaaaaaaaaaaaaaaaaaaaaaaaa

SEQ ID NO: 22271 - RNA, 548 nt, Artificial Sequence
  mRNA product Design a-1 (A100) comprising derived and/or modified sequence from LASV(LM776-SLE-2012;Clade IV)__AIT17824__Z (opt5)
aggagagucccgcagucggcguccagcggcucugcuuguucgugugugugucguugcaggccuuauucaagcuuaccaugggcaacaagcaggccaaagcuagcgaggaaaagaacucccccagagccucucugaucccugacgcgacccaccucgggccgcaauucugcaaaagcuguugguuugagaauaagggacugguggaaugcaauaaccauuaccuuugucugaauugccucacacugcuucuguccgucucuaaccggugucccauuugcaaaaugccucuccccacgaagcugcgcccuagcaccacacccaccgcuccuccgacaggcgccgccgauuccaucagacccccucccuauucuccuugaggacuagucccuguucccagagcccacuuuuuuuucuuuuuuugaaauaaaauagccugucuuucagaucuaaaaaaaaaaaaaaaaaaaaaaaaaaaaaaaaaaaaaaaaaaaaaaaaaaaaaaaaaaaaaaaaaaaaaaaaaaaaaaaaaaaaaaaaaaaaaaaaaaaa

SEQ ID NO: 22272 - RNA, 548 nt, Artificial Sequence
  mRNA product Design a-1 (A100) comprising derived and/or modified sequence from LASV(Mad39;Clade IV)__ANH09743__Z (opt5)
aggagagucccgcagucggcguccagcggcucugcuuguucgugugugugucguugcaggccuuauucaagcuuaccaugggcaacaagcaggccaaagcuagcgagguggaagacgggcccagagccucccugaucccugaugcgacccaccucggaccgcaauucugcaagucuuguugguuugagaauaaaagccuggucgaaugcaacaaucauuaccuuugucugaacugccucacacugcuucuguccguuucuaaucggugucccauuugcaagaugccucuccccacgcgccugaaaccuagcguggugcccaccgcuccuccgacaagagccggcgacgggacccggcccccucccuauuccccuugaggacuagucccuguucccagagcccacuuuuuuuucuuuuuuugaaauaaaauagccugucuuucagaucuaaaaaaaaaaaaaaaaaaaaaaaaaaaaaaaaaaaaaaaaaaaaaaaaaaaaaaaaaaaaaaaaaaaaaaaaaaaaaaaaaaaaaaaaaaaaaaaaaaaa

SEQ ID NO: 22273 - RNA, 548 nt, Artificial Sequence
  mRNA product Design a-1 (A100) comprising derived and/or modified sequence from LASV(Z0947-SLE-2011;Clade IV)__AIT17838__Z (opt5)
aggagagucccgcagucggcguccagcggcucugcuuguucgugugugugucguugcaggccuuauucaagcuuaccaugggcaacaagcaggccaaagugcccgagagcaaggacuccccuagagcuucucugaucccggaugccacccaccucgggccccaauucugcaaaagcuguugguuugaaaauaagggacuggucgagugcaacaaucauuaccuuugucugaacugccucacacugcuucuguccguuucuaaucgguguccuauuugcaaaaugccccucccuacgaagcugaagcccagcgcggcuccuaccgccccgcccacaggcgccgcugacuccauccgcccucccccuuauucucccugaggacuagucccuguucccagagcccacuuuuuuuucuuuuuuugaaauaaaauagccugucuuucagaucuaaaaaaaaaaaaaaaaaaaaaaaaaaaaaaaaaaaaaaaaaaaaaaaaaaaaaaaaaaaaaaaaaaaaaaaaaaaaaaaaaaaaaaaaaaaaaaaaaaaa

SEQ ID NO: 22274 - RNA, 560 nt, Artificial Sequence
  mRNA product Design a-2 (hSL-A64-N5) comprising derived and/or modified sequence from LASV(Josiah;Clade IV)__ADY11072/NP_694871__Z (opt1)
aggagaguccgcucagccagguugcagaagcggcuuagcguguguccuaaucuucucucugcguguagguaggccugugccgcaaacaagcuuaccaugggcaacaagcaggccaaggcccccgagagcaaggacuccccgcgcgcgagccugauccccgacgccacccaccucgggccccaguucugcaaguccugcugguucgagaacaagggccugguggagugcaacaaccacuaccugugccucaacugccugacccugcuccugagcgucuccaaccggugccccaucugcaagaugccgcugcccacgaagcuccgccccagcgccgcccccaccgccccgcccaccggggcggccgacuccauccggcccccgcccuacagccccugaggacuagucccuguucccagagcccacuuuuuuuucuuuuuuugaaauaaaauagccugucuuucagaucucaaaggcucuuuucagagccaccaaaaaaaaaaaaaaaaaaaaaaaaaaaaaaaaaaaaaaaaaaaaaaaaaaaaaaaaaaaaaaaaagaauu

SEQ ID NO: 22275 - RNA, 563 nt, Artificial Sequence
  mRNA product Design a-2 (hSL-A64-N5) comprising derived and/or modified sequence from LASV(Pinneo-NIG-1969;Clade I)__AIT17834__Z (opt1)
aggagaguccgcucagccagguugcagaagcggcuuagcguguguccuaaucuucucucugcguguagguaggccugugccgcaaacaagcuuaccaugggcaacaagcagacccgcagcccgcccaagcccgagcacccccggcccacccugcuccccgacgccucccaccuggggccccaguucugcaagagcugcugguucgagaacaagggccugguggagugcaacaaccacuaccucugccugaacugccugacgcuccugcuguccgucagcgaccgcugccccaucugcaagaugccccuccccaccaagcuggccgugcggacccagcccuccgcgccgccccugaaccaggggaacacccagagcagcccgccgcccuacucccccugaggacuagucccuguucccagagcccacuuuuuuuucuuuuuuugaaauaaaauagccugucuuucagaucucaaaggcucuuuucagagccaccaaaaaaaaaaaaaaaaaaaaaaaaaaaaaaaaaaaaaaaaaaaaaaaaaaaaaaaaaaaaaaaaagaauu

SEQ ID NO: 22276 - RNA, 560 nt, Artificial Sequence
  mRNA product Design a-2 (hSL-A64-N5) comprising derived and/or modified sequence from LASV(Nig08-04;Clade II)__ADU56612__Z (opt1)
aggagaguccgcucagccagguugcagaagcggcuuagcguguguccuaaucuucucucugcguguagguaggccugugccgcaaacaagcuuaccaugggcaaccgccagacccggcccaccgaggccacggagcagagccgcgcccaccuggugccggacgccucccaccucgggccccaguucugcaagagcugcugguucgagaaccggggccuggucgagugcaacaaccacuaccugugccucaacugccugucccugcuccugagcguguccagccgcugccccaucugcaagaugccccugccgacccggcucaaggccuccgcccagcccagcgccccgcccaccgaggcgccccagaacaccacgcccccgcccuacacccccugaggacuagucccuguucccagagcccacuuuuuuuucuuuuuuugaaauaaaauagccugucuuucagaucucaaaggcucuuuucagagccaccaaaaaaaaaaaaaaaaaaaaaaaaaaaaaaaaaaaaaaaaaaaaaaaaaaaaaaaaaaaaaaaaagaauu

SEQ ID NO: 22277 - RNA, 560 nt, Artificial Sequence
  mRNA product Design a-2 (hSL-A64-N5) comprising derived and/or modified sequence from LASV(Nig08-A19;Clade III)__ADU56620__Z (opt1)
aggagaguccgcucagccagguugcagaagcggcuuagcguguguccuaaucuucucucugcguguagguaggccugugccgcaaacaagcuuaccaugggcgggaagcacaccaagccccagcgcgagagcaacuccccgcgggccagccugauccccgacgccacccaccucggcccccaguucugcaaguccugcugguucgagaacaaggggcugguggagugcaacaaccacuaccugugccucaacugccugacgcugcuccugagcguguccaaccgcugccccaucugcaagaugccccugcccacccggcuccgcgccagcaccaaccccaccgcgccccagguggagcaggucggcccgacgaacccgccgcccuacucccccugaggacuagucccuguucccagagcccacuuuuuuuucuuuuuuugaaauaaaauagccugucuuucagaucucaaaggcucuuuucagagccaccaaaaaaaaaaaaaaaaaaaaaaaaaaaaaaaaaaaaaaaaaaaaaaaaaaaaaaaaaaaaaaaaagaauu

SEQ ID NO: 22278 - RNA, 560 nt, Artificial Sequence
  mRNA product Design a-2 (hSL-A64-N5) comprising derived and/or modified sequence from LASV(AV;Clade V)__CCA30312__Z (opt1)
aggagaguccgcucagccagguugcagaagcggcuuagcguguguccuaaucuucucucugcguguagguaggccugugccgcaaacaagcuuaccaugggcaaccgccaggccaagaaccccgagguggagaacagcccccgggccucccugauccccgacgcgacccaccucgggccccaguucugcaagagcugcugguucgagaacaagggccuggucgagugcaacaaccacuaccugugccucaacugccugucccugcuccugagcguguccaaccgcugccccaucugcaagaugccgcugcccacccggcuccgccccacgaccacccccaccgccccgcagaucaucaaggagaacacgaccaacccgccgcccuacacccccugaggacuagucccuguucccagagcccacuuuuuuuucuuuuuuugaaauaaaauagccugucuuucagaucucaaaggcucuuuucagagccaccaaaaaaaaaaaaaaaaaaaaaaaaaaaaaaaaaaaaaaaaaaaaaaaaaaaaaaaaaaaaaaaaagaauu

SEQ ID NO: 22279 - RNA, 560 nt, Artificial Sequence
  mRNA product Design a-2 (hSL-A64-N5) comprising derived and/or modified sequence from LASV(Togo/2016/7082;Clade VI)__AMR44579__Z (opt1)
aggagaguccgcucagccagguugcagaagcggcuuagcguguguccuaaucuucucucugcguguagguaggccugugccgcaaacaagcuuaccaugggcgcccgccagaccaagcagccccagaucgaggggagcccccgggccucccuggugcccgacgcgagccaccucggcccccaguucugcaaguccugcugguucgagaacaaggggcuggucgagugcaacaaccacuaccugugccucaacugccugagccugcuccuguccgugagcaaccgcugccccaucugcaagaugccgcugcccaccaagcuccggguguccagcgcccccuccgcgcccccggccgccacggcccagcccggcaccccgccgcccuacagccccugaggacuagucccuguucccagagcccacuuuuuuuucuuuuuuugaaauaaaauagccugucuuucagaucucaaaggcucuuuucagagccaccaaaaaaaaaaaaaaaaaaaaaaaaaaaaaaaaaaaaaaaaaaaaaaaaaaaaaaaaaaaaaaaaagaauu

SEQ ID NO: 22280 - RNA, 560 nt, Artificial Sequence
  mRNA product Design a-2 (hSL-A64-N5) comprising derived and/or modified sequence from LASV(KAK-428;Clade n.d. (VII))__ANH09761__Z (opt1)
aggagaguccgcucagccagguugcagaagcggcuuagcguguguccuaaucuucucucugcguguagguaggccugugccgcaaacaagcuuaccaugggcaacaaggggaccaagcccacccagaacagcgagcccucccgcgccaaccuggugcccgacgccagcuaccucggcccccaguucugcaaguccugcugguucgagaacaaggggcuggucgagugcaacaaccacuaccugugccucaacugccugacgaugcugcucagcguguccaaccggugccccaucugcaagaugccgcugcccaccaagaucaaggccagcggcucccccagcgcgcccccgaccgaggccaacuccgccgugagcccgccgcccuacacccccugaggacuagucccuguucccagagcccacuuuuuuuucuuuuuuugaaauaaaauagccugucuuucagaucucaaaggcucuuuucagagccaccaaaaaaaaaaaaaaaaaaaaaaaaaaaaaaaaaaaaaaaaaaaaaaaaaaaaaaaaaaaaaaaaagaauu

SEQ ID NO: 22281 - RNA, 560 nt, Artificial Sequence
  mRNA product Design a-2 (hSL-A64-N5) comprising derived and/or modified sequence from LASV(ISTH0009-NIG-2011;Clade II)__AIT17402__Z (opt1)
aggagaguccgcucagccagguugcagaagcggcuuagcguguguccuaaucuucucucugcguguagguaggccugugccgcaaacaagcuuaccaugggcaaccgccaggccaagagcaccaagguggacgagcaccagcgggcccaccugguccccgacgcgucccaccucgggccccaguucugcaagagcugcugguucgagaaccgcggccugguggagugcaacaaccacuaccugugccucaacugccugucccugcuccugagcguguccagccggugccccaucugcaagaugccccugcccaccaagcucaaggccgccgcccagccguccgcccccagcacggagaccauccagaacaccaccccgccgcccuacacgcccugaggacuagucccuguucccagagcccacuuuuuuuucuuuuuuugaaauaaaauagccugucuuucagaucucaaaggcucuuuucagagccaccaaaaaaaaaaaaaaaaaaaaaaaaaaaaaaaaaaaaaaaaaaaaaaaaaaaaaaaaaaaaaaaaagaauu

SEQ ID NO: 22282 - RNA, 560 nt, Artificial Sequence
  mRNA product Design a-2 (hSL-A64-N5) comprising derived and/or modified sequence from LASV(ISTH2010-NIG-2012;Clade II)__AIT17480__Z (opt1)
aggagaguccgcucagccagguugcagaagcggcuuagcguguguccuaaucuucucucugcguguagguaggccugugccgcaaacaagcuuaccaugggcaaccgccacgccaagagcaccaagguggacgagcaccagcgggcccaccugguccccgacgcgucccaccucgggccccaguucugcaagagcugcugguucgagaaccgcggccugguggagugcaacaaccacuaccugugccucaacugccugucccugcuccugagcguguccagccggugccccaucugcaagaugccccugcccaccaagcucaaggccgccgcccagccguccgcccccagcacggaggucauccaguccaccaccccgccgcccuacacccccugaggacuagucccuguucccagagcccacuuuuuuuucuuuuuuugaaauaaaauagccugucuuucagaucucaaaggcucuuuucagagccaccaaaaaaaaaaaaaaaaaaaaaaaaaaaaaaaaaaaaaaaaaaaaaaaaaaaaaaaaaaaaaaaaagaauu

SEQ ID NO: 22283 - RNA, 560 nt, Artificial Sequence
  mRNA product Design a-2 (hSL-A64-N5) comprising derived and/or modified sequence from LASV(Lassa virus/H.sapiens-wt/NGA/2016/ISTH_0017;Clade II)__AVO03713__Z (opt1)
aggagaguccgcucagccagguugcagaagcggcuuagcguguguccuaaucuucucucugcguguagguaggccugugccgcaaacaagcuuaccaugggcaaccgccaggccaagagcaccaagguggacgagcaccagcgggcccaccugguccccgacgcgucccaccucgggccccaguucugcaagagcugcugguucgagaaccgcggccugguggagugcaacaaccacuaccugugccucaacugccugucccugcuccugagcguguccagccggugccccaucugcaagaugccccugcccaccaagcucaaggccgccacgcagccguccgcccccagcaccgaggucaaccagaacaccaccccgccgcccuacacgcccugaggacuagucccuguucccagagcccacuuuuuuuucuuuuuuugaaauaaaauagccugucuuucagaucucaaaggcucuuuucagagccaccaaaaaaaaaaaaaaaaaaaaaaaaaaaaaaaaaaaaaaaaaaaaaaaaaaaaaaaaaaaaaaaaagaauu

SEQ ID NO: 22284 - RNA, 560 nt, Artificial Sequence
  mRNA product Design a-2 (hSL-A64-N5) comprising derived and/or modified sequence from LASV(Lassa virus/H.sapiens-wt/NGA/2018/ISTH_0959;Clade II)__AVV65084__Z (opt1)
aggagaguccgcucagccagguugcagaagcggcuuagcguguguccuaaucuucucucugcguguagguaggccugugccgcaaacaagcuuaccaugggcaacaagcaggccaagagcaccaagguggacgagcaccagcgcgcccaccugguccccgacgcgucccaccucgggccccaguucugcaagagcugcugguucgagaaccggggccugguggagugcaacaaccacuaccugugccucaacugccugucccugcuccugagcguguccagccgcugccccaucugcaagaugccccugcccaccaagcucaaggccgccgcccagccguccgcccccagcacggaggcgauccaguccaccaccccgccgcccuacacccccugaggacuagucccuguucccagagcccacuuuuuuuucuuuuuuugaaauaaaauagccugucuuucagaucucaaaggcucuuuucagagccaccaaaaaaaaaaaaaaaaaaaaaaaaaaaaaaaaaaaaaaaaaaaaaaaaaaaaaaaaaaaaaaaaagaauu

SEQ ID NO: 22285 - RNA, 560 nt, Artificial Sequence
  mRNA product Design a-2 (hSL-A64-N5) comprising derived and/or modified sequence from LASV(LASV003-NIG-2008;Clade II)__AIT17578__Z (opt1)
aggagaguccgcucagccagguugcagaagcggcuuagcguguguccuaaucuucucucugcguguagguaggccugugccgcaaacaagcuuaccaugggcaaccgccaggccaagagcaccaagguggacgagcaccagcgggcccaccugguccccgacgcgucccaccucgggccccaguucugcaagagcugcugguucgagaacaagggccugguggagugcaacaaccacuaccugugccucaacugccugucccugcuccugagcguguccagccgcugccccaucugcaagaugccccugcccaccaagcuccgggccgccgcccagccguccgcccccagcacggaguccgcgcagaacaccgccccgccgcccuacgcccccugaggacuagucccuguucccagagcccacuuuuuuuucuuuuuuugaaauaaaauagccugucuuucagaucucaaaggcucuuuucagagccaccaaaaaaaaaaaaaaaaaaaaaaaaaaaaaaaaaaaaaaaaaaaaaaaaaaaaaaaaaaaaaaaaagaauu

SEQ ID NO: 22286 - RNA, 560 nt, Artificial Sequence
  mRNA product Design a-2 (hSL-A64-N5) comprising derived and/or modified sequence from LASV(LASV035-NIG-2009;Clade II)__AIT17586__Z (opt1)
aggagaguccgcucagccagguugcagaagcggcuuagcguguguccuaaucuucucucugcguguagguaggccugugccgcaaacaagcuuaccaugggcaacaagcaggccaagagcaccaagguggacgagcaccagcgcgcccaccugguccccgacgcgucccaccucgggccccaguucugcaagagcugcugguucgagaaccggggccugguggagugcaacaaccacuaccugugccucaacugccugucccugcuccugagcguguccagccgcugccccaucugcaagaugccccugcccacccggcucaaggccgccgcccagccguccgcccccagcacggaggucacccagaacaccaccccgccgcccuacacgcccugaggacuagucccuguucccagagcccacuuuuuuuucuuuuuuugaaauaaaauagccugucuuucagaucucaaaggcucuuuucagagccaccaaaaaaaaaaaaaaaaaaaaaaaaaaaaaaaaaaaaaaaaaaaaaaaaaaaaaaaaaaaaaaaaagaauu

SEQ ID NO: 22287 - RNA, 560 nt, Artificial Sequence
  mRNA product Design a-2 (hSL-A64-N5) comprising derived and/or modified sequence from LASV(LASV1000-NIG-2009;Clade II)__AIT17780__Z (opt1)
aggagaguccgcucagccagguugcagaagcggcuuagcguguguccuaaucuucucucugcguguagguaggccugugccgcaaacaagcuuaccaugggcaaccgccagaccaagagcaccaagguggacgagcaccagcgggccuaccugguccccgacgccucccuccuggggccccaguucugcaagagcugcugguucgagaacaagggccugguggagugcaacaaccacuaccucugccugaacugccugucccuccugcugagcguguccagccgcugccccaucugcaagaugccccuccccacgcggcugaaggcggccgcccagcccuccgccccgcccaccgaggccauccagaacaccacgccgccgcccuacacccccugaggacuagucccuguucccagagcccacuuuuuuuucuuuuuuugaaauaaaauagccugucuuucagaucucaaaggcucuuuucagagccaccaaaaaaaaaaaaaaaaaaaaaaaaaaaaaaaaaaaaaaaaaaaaaaaaaaaaaaaaaaaaaaaaagaauu

SEQ ID NO: 22288 - RNA, 560 nt, Artificial Sequence
  mRNA product Design a-2 (hSL-A64-N5) comprising derived and/or modified sequence from LASV(LASV221-NIG-2010;Clade II)__AIT17622__Z (opt1)
aggagaguccgcucagccagguugcagaagcggcuuagcguguguccuaaucuucucucugcguguagguaggccugugccgcaaacaagcuuaccaugggcaaccgccaggccaagagcaccaagguggacgagcaccagcgggcccaccugguccccgacgcgucccaccucgggccccaguucugcaagagcugcugguucgagaaccgcggccugguggagugcaacaaccacuaccugugccucaacugccugucccugcuccugagcguguccagccggugccccaucugcaagaugccccugcccaccaagcucaaggccgccacgcagccguccgcccccagcaccgaggucacccagaacaccaucccgccgcccuacucccccugaggacuagucccuguucccagagcccacuuuuuuuucuuuuuuugaaauaaaauagccugucuuucagaucucaaaggcucuuuucagagccaccaaaaaaaaaaaaaaaaaaaaaaaaaaaaaaaaaaaaaaaaaaaaaaaaaaaaaaaaaaaaaaaaagaauu

SEQ ID NO: 22289 - RNA, 560 nt, Artificial Sequence
  mRNA product Design a-2 (hSL-A64-N5) comprising derived and/or modified sequence from LASV(LASV237-NIG-2010;Clade II)__AIT17636__Z (opt1)
aggagaguccgcucagccagguugcagaagcggcuuagcguguguccuaaucuucucucugcguguagguaggccugugccgcaaacaagcuuaccaugggcaaccgccaggccaagagcaccaagguggacgagcaccagcgggcccaccugguccccgacgcgucccaccucgggccccaguucugcaagagcugcugguucgagaaccgcggccugguggagugcaacaaccacuaccugugccucaacugccugucccugcuccugagcguguccagccggugccccaucugcaagaugccccugcccaccaagcucaaggccgccgcccagccguccgcccccagcaucgagacgauccagaacaccaccccgccgcccuacacccccugaggacuagucccuguucccagagcccacuuuuuuuucuuuuuuugaaauaaaauagccugucuuucagaucucaaaggcucuuuucagagccaccaaaaaaaaaaaaaaaaaaaaaaaaaaaaaaaaaaaaaaaaaaaaaaaaaaaaaaaaaaaaaaaaagaauu

SEQ ID NO: 22290 - RNA, 560 nt, Artificial Sequence
  mRNA product Design a-2 (hSL-A64-N5) comprising derived and/or modified sequence from LASV(LASV253-NIG-2011;Clade II)__AIT17668__Z (opt1)
aggagaguccgcucagccagguugcagaagcggcuuagcguguguccuaaucuucucucugcguguagguaggccugugccgcaaacaagcuuaccaugggcaaccgccaggccaagagcaccaagguggacgagcaccagcgggcccaccugguccccgacgcgucccaccucgggccccaguucugcaagagcugcugguucgagaacaagggccugguggagugcaacaaccacuaccugugccucaacugccugucccugcuccugagcguguccagccgcugccccaucugcaagaugccccugcccaccaagcucaagacgaccgcccagccguccgccccgcccaccgaggccgccaagaacaccgcgcccccgcccuacgcccccugaggacuagucccuguucccagagcccacuuuuuuuucuuuuuuugaaauaaaauagccugucuuucagaucucaaaggcucuuuucagagccaccaaaaaaaaaaaaaaaaaaaaaaaaaaaaaaaaaaaaaaaaaaaaaaaaaaaaaaaaaaaaaaaaagaauu

SEQ ID NO: 22291 - RNA, 560 nt, Artificial Sequence
  mRNA product Design a-2 (hSL-A64-N5) comprising derived and/or modified sequence from LASV(G1180-SLE-2010;Clade IV)__AIT17166__Z (opt1)
aggagaguccgcucagccagguugcagaagcggcuuagcguguguccuaaucuucucucugcguguagguaggccugugccgcaaacaagcuuaccaugggcaacaagcaggccaaggcccccgaggcgaaggacagcccgcgcgccucccugauccccgacgccacccaccucgggccccaguucugcaagagcugcugguucgagaccaagggccugguggagugcaacaaccacuaccugugccucaacugccugacgcugcuccuguccgucagcaaccggugccccaucugcaagaugccgcugcccaccaagcuccgccccuccgccacccccaccgccccgcccacggaggcggccgacagcaucgggcccccgcccuacucccccugaggacuagucccuguucccagagcccacuuuuuuuucuuuuuuugaaauaaaauagccugucuuucagaucucaaaggcucuuuucagagccaccaaaaaaaaaaaaaaaaaaaaaaaaaaaaaaaaaaaaaaaaaaaaaaaaaaaaaaaaaaaaaaaaagaauu

SEQ ID NO: 22292 - RNA, 560 nt, Artificial Sequence
  mRNA product Design a-2 (hSL-A64-N5) comprising derived and/or modified sequence from LASV(G1442-SLE-2011;Clade IV)__AIT17178__Z (opt1)
aggagaguccgcucagccagguugcagaagcggcuuagcguguguccuaaucuucucucugcguguagguaggccugugccgcaaacaagcuuaccaugggcaacaagcaggccaaggccagcgaggcgaaggacagcccccgcgccucccugaucccggacgccacccaccucgggccccaguucugcaaguccugcugguucgagaacaagggccugguggagugcaacaaccacuaccugugccucaacugccugagccugcuccuguccgucagcucccggugccccaucugcaagaugccccugccgacccgccuccggcccagcacggcccccaccgcgcccccggcccgcgccggggacaacaucaagcccccgcccuacucccccugaggacuagucccuguucccagagcccacuuuuuuuucuuuuuuugaaauaaaauagccugucuuucagaucucaaaggcucuuuucagagccaccaaaaaaaaaaaaaaaaaaaaaaaaaaaaaaaaaaaaaaaaaaaaaaaaaaaaaaaaaaaaaaaaagaauu

SEQ ID NO: 22293 - RNA, 560 nt, Artificial Sequence
  mRNA product Design a-2 (hSL-A64-N5) comprising derived and/or modified sequence from LASV(G502-SLE-2009;Clade IV)__AIT17124__Z (opt1)
aggagaguccgcucagccagguugcagaagcggcuuagcguguguccuaaucuucucucugcguguagguaggccugugccgcaaacaagcuuaccaugggcaacaagcaggucaagacccccgaggccaaggacagcccccgcgccucccugauccccgacgcgacccaccucgggccccaguucugcaagagcugcugguucgagaacaagggccugguggagugcaacaaccacuaccugugccucaacugccugacgcugcuccuguccguggggaaccggugccccaucugcaagaugccgcugcccaccaagcuccgccccagcgugacccccaccgccccgcccacgcgggccgccgacuccaucggcccgccgcccuacagccccugaggacuagucccuguucccagagcccacuuuuuuuucuuuuuuugaaauaaaauagccugucuuucagaucucaaaggcucuuuucagagccaccaaaaaaaaaaaaaaaaaaaaaaaaaaaaaaaaaaaaaaaaaaaaaaaaaaaaaaaaaaaaaaaaagaauu

SEQ ID NO: 22294 - RNA, 560 nt, Artificial Sequence
  mRNA product Design a-2 (hSL-A64-N5) comprising derived and/or modified sequence from LASV(G733-SLE-2010;Clade IV)__AIT17152__Z (opt1)
aggagaguccgcucagccagguugcagaagcggcuuagcguguguccuaaucuucucucugcguguagguaggccugugccgcaaacaagcuuaccaugggcaacaagcaggccaagacccccgagaccaaggacagcccgcgcgccucccugauccccgacgcgacgcaccucgggccccaguucugcaagagcugcugguucgagaacaagggccugguggagugcaacaaccacuaccugugccucaacugccugacccugcuccuguccgucagcaaccggugccccaucugcaagaugccgcugcccaccaagcuccgccccuccaccgcccccacggccccgcccgccggggccgcggacaacacccggcccccgcccuacagccccugaggacuagucccuguucccagagcccacuuuuuuuucuuuuuuugaaauaaaauagccugucuuucagaucucaaaggcucuuuucagagccaccaaaaaaaaaaaaaaaaaaaaaaaaaaaaaaaaaaaaaaaaaaaaaaaaaaaaaaaaaaaaaaaaagaauu

SEQ ID NO: 22295 - RNA, 572 nt, Artificial Sequence
  mRNA product Design a-2 (hSL-A64-N5) comprising derived and/or modified sequence from MOPV/LASV reassortant(IGS-1;Clade IV)__AFY05533__Z (opt1)
aggagaguccgcucagccagguugcagaagcggcuuagcguguguccuaaucuucucucugcguguagguaggccugugccgcaaacaagcuuaccaugggcaagacccagagcaaggggcagcccuccaccaaccugcucaaggagacggagccccgccaccccgugauccccgacgcccggggcaccgggcccgaguucugcaagagcugcugguucgagcgccggggccugguccgcugcaacgaccacuaccugugccucaacugccugacccugcuccacaccguguccgaccggugccccaucugcaagcacaagcugcccuuccgccuggagcuccagacgcagcccaccgccccgcccgagaucccgcccagccagaacccgccgcccuacucccccugaggacuagucccuguucccagagcccacuuuuuuuucuuuuuuugaaauaaaauagccugucuuucagaucucaaaggcucuuuucagagccaccaaaaaaaaaaaaaaaaaaaaaaaaaaaaaaaaaaaaaaaaaaaaaaaaaaaaaaaaaaaaaaaaagaauu

SEQ ID NO: 22296 - RNA, 560 nt, Artificial Sequence
  mRNA product Design a-2 (hSL-A64-N5) comprising derived and/or modified sequence from LASV(LM776-SLE-2012;Clade IV)__AIT17824__Z (opt1)
aggagaguccgcucagccagguugcagaagcggcuuagcguguguccuaaucuucucucugcguguagguaggccugugccgcaaacaagcuuaccaugggcaacaagcaggccaaggccagcgaggagaagaacagcccccgcgccucccugaucccggacgccacccaccucgggccccaguucugcaaguccugcugguucgagaacaagggccugguggagugcaacaaccacuaccugugccucaacugccugacccugcuccugagcgucuccaaccggugccccaucugcaagaugccccugccgacgaagcuccgccccagcaccacccccaccgcgcccccgacgggggccgccgacuccauccggcccccgcccuacagccccugaggacuagucccuguucccagagcccacuuuuuuuucuuuuuuugaaauaaaauagccugucuuucagaucucaaaggcucuuuucagagccaccaaaaaaaaaaaaaaaaaaaaaaaaaaaaaaaaaaaaaaaaaaaaaaaaaaaaaaaaaaaaaaaaagaauu

SEQ ID NO: 22297 - RNA, 560 nt, Artificial Sequence
  mRNA product Design a-2 (hSL-A64-N5) comprising derived and/or modified sequence from LASV(Mad39;Clade IV)__ANH09743__Z (opt1)
aggagaguccgcucagccagguugcagaagcggcuuagcguguguccuaaucuucucucugcguguagguaggccugugccgcaaacaagcuuaccaugggcaacaagcaggccaaggccagcgagguggaggacgggccccgcgccucccugauccccgacgccacccaccucggcccccaguucugcaagagcugcugguucgagaacaagucccuggucgagugcaacaaccacuaccugugccucaacugccugacccugcuccugagcguguccaaccggugccccaucugcaagaugccccugccgacgcgccucaagcccagcgugguccccaccgcgcccccgacccgggccggggacggcacccgcccgccgcccuacucccccugaggacuagucccuguucccagagcccacuuuuuuuucuuuuuuugaaauaaaauagccugucuuucagaucucaaaggcucuuuucagagccaccaaaaaaaaaaaaaaaaaaaaaaaaaaaaaaaaaaaaaaaaaaaaaaaaaaaaaaaaaaaaaaaaagaauu

SEQ ID NO: 22298 - RNA, 560 nt, Artificial Sequence
  mRNA product Design a-2 (hSL-A64-N5) comprising derived and/or modified sequence from LASV(Z0947-SLE-2011;Clade IV)__AIT17838__Z (opt1)
aggagaguccgcucagccagguugcagaagcggcuuagcguguguccuaaucuucucucugcguguagguaggccugugccgcaaacaagcuuaccaugggcaacaagcaggccaaggugcccgagagcaaggacuccccgcgcgccagccugauccccgacgcgacccaccucgggccccaguucugcaaguccugcugguucgagaacaagggccuggucgagugcaacaaccacuaccugugccucaacugccugacccugcuccugagcguguccaaccgcugccccaucugcaagaugccgcugcccacgaagcucaagcccagcgccgcccccaccgccccgcccaccggggccgcggacuccauccggcccccgcccuacagccccugaggacuagucccuguucccagagcccacuuuuuuuucuuuuuuugaaauaaaauagccugucuuucagaucucaaaggcucuuuucagagccaccaaaaaaaaaaaaaaaaaaaaaaaaaaaaaaaaaaaaaaaaaaaaaaaaaaaaaaaaaaaaaaaaagaauu

SEQ ID NO: 22299 - RNA, 560 nt, Artificial Sequence
  mRNA product Design a-2 (hSL-A64-N5) comprising derived and/or modified sequence from LASV(Josiah;Clade IV)__ADY11072/NP_694871__Z (opt4)
aggagaguccgcucagccagguugcagaagcggcuuagcguguguccuaaucuucucucugcguguagguaggccugugccgcaaacaagcuuaccaugggcaacaagcaggccaaggcccccgagagcaaggacagccccagagccagccugauccccgacgccacccaccugggcccccaguucugcaagagcugcugguucgagaacaagggccugguggagugcaacaaccacuaccugugccugaacugccugacccugcugcugagcgugagcaacagaugccccaucugcaagaugccccugcccaccaagcugagacccagcgccgcccccaccgccccccccaccggcgccgccgacagcaucagacccccccccuacagccccugaggacuagucccuguucccagagcccacuuuuuuuucuuuuuuugaaauaaaauagccugucuuucagaucucaaaggcucuuuucagagccaccaaaaaaaaaaaaaaaaaaaaaaaaaaaaaaaaaaaaaaaaaaaaaaaaaaaaaaaaaaaaaaaaagaauu

SEQ ID NO: 22300 - RNA, 563 nt, Artificial Sequence
  mRNA product Design a-2 (hSL-A64-N5) comprising derived and/or modified sequence from LASV(Pinneo-NIG-1969;Clade I)__AIT17834__Z (opt4)
aggagaguccgcucagccagguugcagaagcggcuuagcguguguccuaaucuucucucugcguguagguaggccugugccgcaaacaagcuuaccaugggcaacaagcagaccagaagcccccccaagcccgagcaccccagacccacccugcugcccgacgccagccaccugggcccccaguucugcaagagcugcugguucgagaacaagggccugguggagugcaacaaccacuaccugugccugaacugccugacccugcugcugagcgugagcgacagaugccccaucugcaagaugccccugcccaccaagcuggccgugagaacccagcccagcgcccccccccugaaccagggcaacacccagagcagccccccccccuacagccccugaggacuagucccuguucccagagcccacuuuuuuuucuuuuuuugaaauaaaauagccugucuuucagaucucaaaggcucuuuucagagccaccaaaaaaaaaaaaaaaaaaaaaaaaaaaaaaaaaaaaaaaaaaaaaaaaaaaaaaaaaaaaaaaaagaauu

SEQ ID NO: 22301 - RNA, 560 nt, Artificial Sequence
  mRNA product Design a-2 (hSL-A64-N5) comprising derived and/or modified sequence from LASV(Nig08-04;Clade II)__ADU56612__Z (opt4)
aggagaguccgcucagccagguugcagaagcggcuuagcguguguccuaaucuucucucugcguguagguaggccugugccgcaaacaagcuuaccaugggcaacagacagaccagacccaccgaggccaccgagcagagcagagcccaccuggugcccgacgccagccaccugggcccccaguucugcaagagcugcugguucgagaacagaggccugguggagugcaacaaccacuaccugugccugaacugccugagccugcugcugagcgugagcagcagaugccccaucugcaagaugccccugcccaccagacugaaggccagcgcccagcccagcgccccccccaccgaggccccccagaacaccacccccccccccuacacccccugaggacuagucccuguucccagagcccacuuuuuuuucuuuuuuugaaauaaaauagccugucuuucagaucucaaaggcucuuuucagagccaccaaaaaaaaaaaaaaaaaaaaaaaaaaaaaaaaaaaaaaaaaaaaaaaaaaaaaaaaaaaaaaaaagaauu

SEQ ID NO: 22302 - RNA, 560 nt, Artificial Sequence
  mRNA product Design a-2 (hSL-A64-N5) comprising derived and/or modified sequence from LASV(Nig08-A19;Clade III)__ADU56620__Z (opt4)
aggagaguccgcucagccagguugcagaagcggcuuagcguguguccuaaucuucucucugcguguagguaggccugugccgcaaacaagcuuaccaugggcggcaagcacaccaagccccagagagagagcaacagccccagagccagccugauccccgacgccacccaccugggcccccaguucugcaagagcugcugguucgagaacaagggccugguggagugcaacaaccacuaccugugccugaacugccugacccugcugcugagcgugagcaacagaugccccaucugcaagaugccccugcccaccagacugagagccagcaccaaccccaccgccccccagguggagcaggugggccccaccaaccccccccccuacagccccugaggacuagucccuguucccagagcccacuuuuuuuucuuuuuuugaaauaaaauagccugucuuucagaucucaaaggcucuuuucagagccaccaaaaaaaaaaaaaaaaaaaaaaaaaaaaaaaaaaaaaaaaaaaaaaaaaaaaaaaaaaaaaaaaagaauu

SEQ ID NO: 22303 - RNA, 560 nt, Artificial Sequence
  mRNA product Design a-2 (hSL-A64-N5) comprising derived and/or modified sequence from LASV(AV;Clade V)__CCA30312__Z (opt4)
aggagaguccgcucagccagguugcagaagcggcuuagcguguguccuaaucuucucucugcguguagguaggccugugccgcaaacaagcuuaccaugggcaacagacaggccaagaaccccgagguggagaacagccccagagccagccugauccccgacgccacccaccugggcccccaguucugcaagagcugcugguucgagaacaagggccugguggagugcaacaaccacuaccugugccugaacugccugagccugcugcugagcgugagcaacagaugccccaucugcaagaugccccugcccaccagacugagacccaccaccacccccaccgccccccagaucaucaaggagaacaccaccaaccccccccccuacacccccugaggacuagucccuguucccagagcccacuuuuuuuucuuuuuuugaaauaaaauagccugucuuucagaucucaaaggcucuuuucagagccaccaaaaaaaaaaaaaaaaaaaaaaaaaaaaaaaaaaaaaaaaaaaaaaaaaaaaaaaaaaaaaaaaagaauu

SEQ ID NO: 22304 - RNA, 560 nt, Artificial Sequence
  mRNA product Design a-2 (hSL-A64-N5) comprising derived and/or modified sequence from LASV(Togo/2016/7082;Clade VI)__AMR44579__Z (opt4)
aggagaguccgcucagccagguugcagaagcggcuuagcguguguccuaaucuucucucugcguguagguaggccugugccgcaaacaagcuuaccaugggcgccagacagaccaagcagccccagaucgagggcagccccagagccagccuggugcccgacgccagccaccugggcccccaguucugcaagagcugcugguucgagaacaagggccugguggagugcaacaaccacuaccugugccugaacugccugagccugcugcugagcgugagcaacagaugccccaucugcaagaugccccugcccaccaagcugagagugagcagcgcccccagcgccccccccgccgccaccgcccagcccggcacccccccccccuacagccccugaggacuagucccuguucccagagcccacuuuuuuuucuuuuuuugaaauaaaauagccugucuuucagaucucaaaggcucuuuucagagccaccaaaaaaaaaaaaaaaaaaaaaaaaaaaaaaaaaaaaaaaaaaaaaaaaaaaaaaaaaaaaaaaaagaauu

SEQ ID NO: 22305 - RNA, 560 nt, Artificial Sequence
  mRNA product Design a-2 (hSL-A64-N5) comprising derived and/or modified sequence from LASV(KAK-428;Clade n.d. (VII))__ANH09761__Z (opt4)
aggagaguccgcucagccagguugcagaagcggcuuagcguguguccuaaucuucucucugcguguagguaggccugugccgcaaacaagcuuaccaugggcaacaagggcaccaagcccacccagaacagcgagcccagcagagccaaccuggugcccgacgccagcuaccugggcccccaguucugcaagagcugcugguucgagaacaagggccugguggagugcaacaaccacuaccugugccugaacugccugaccaugcugcugagcgugagcaacagaugccccaucugcaagaugccccugcccaccaagaucaaggccagcggcagccccagcgccccccccaccgaggccaacagcgccgugagccccccccccuacacccccugaggacuagucccuguucccagagcccacuuuuuuuucuuuuuuugaaauaaaauagccugucuuucagaucucaaaggcucuuuucagagccaccaaaaaaaaaaaaaaaaaaaaaaaaaaaaaaaaaaaaaaaaaaaaaaaaaaaaaaaaaaaaaaaaagaauu

SEQ ID NO: 22306 - RNA, 560 nt, Artificial Sequence
  mRNA product Design a-2 (hSL-A64-N5) comprising derived and/or modified sequence from LASV(ISTH0009-NIG-2011;Clade II)__AIT17402__Z (opt4)
aggagaguccgcucagccagguugcagaagcggcuuagcguguguccuaaucuucucucugcguguagguaggccugugccgcaaacaagcuuaccaugggcaacagacaggccaagagcaccaagguggacgagcaccagagagcccaccuggugcccgacgccagccaccugggcccccaguucugcaagagcugcugguucgagaacagaggccugguggagugcaacaaccacuaccugugccugaacugccugagccugcugcugagcgugagcagcagaugccccaucugcaagaugccccugcccaccaagcugaaggccgccgcccagcccagcgcccccagcaccgagaccauccagaacaccacccccccccccuacacccccugaggacuagucccuguucccagagcccacuuuuuuuucuuuuuuugaaauaaaauagccugucuuucagaucucaaaggcucuuuucagagccaccaaaaaaaaaaaaaaaaaaaaaaaaaaaaaaaaaaaaaaaaaaaaaaaaaaaaaaaaaaaaaaaaagaauu

SEQ ID NO: 22307 - RNA, 560 nt, Artificial Sequence
  mRNA product Design a-2 (hSL-A64-N5) comprising derived and/or modified sequence from LASV(ISTH2010-NIG-2012;Clade II)__AIT17480__Z (opt4)
aggagaguccgcucagccagguugcagaagcggcuuagcguguguccuaaucuucucucugcguguagguaggccugugccgcaaacaagcuuaccaugggcaacagacacgccaagagcaccaagguggacgagcaccagagagcccaccuggugcccgacgccagccaccugggcccccaguucugcaagagcugcugguucgagaacagaggccugguggagugcaacaaccacuaccugugccugaacugccugagccugcugcugagcgugagcagcagaugccccaucugcaagaugccccugcccaccaagcugaaggccgccgcccagcccagcgcccccagcaccgaggugauccagagcaccacccccccccccuacacccccugaggacuagucccuguucccagagcccacuuuuuuuucuuuuuuugaaauaaaauagccugucuuucagaucucaaaggcucuuuucagagccaccaaaaaaaaaaaaaaaaaaaaaaaaaaaaaaaaaaaaaaaaaaaaaaaaaaaaaaaaaaaaaaaaagaauu

SEQ ID NO: 22308 - RNA, 560 nt, Artificial Sequence
  mRNA product Design a-2 (hSL-A64-N5) comprising derived and/or modified sequence from LASV(Lassa virus/H.sapiens-wt/NGA/2016/ISTH_0017;Clade II)__AVO03713__Z (opt4)
aggagaguccgcucagccagguugcagaagcggcuuagcguguguccuaaucuucucucugcguguagguaggccugugccgcaaacaagcuuaccaugggcaacagacaggccaagagcaccaagguggacgagcaccagagagcccaccuggugcccgacgccagccaccugggcccccaguucugcaagagcugcugguucgagaacagaggccugguggagugcaacaaccacuaccugugccugaacugccugagccugcugcugagcgugagcagcagaugccccaucugcaagaugccccugcccaccaagcugaaggccgccacccagcccagcgcccccagcaccgaggugaaccagaacaccacccccccccccuacacccccugaggacuagucccuguucccagagcccacuuuuuuuucuuuuuuugaaauaaaauagccugucuuucagaucucaaaggcucuuuucagagccaccaaaaaaaaaaaaaaaaaaaaaaaaaaaaaaaaaaaaaaaaaaaaaaaaaaaaaaaaaaaaaaaaagaauu

SEQ ID NO: 22309 - RNA, 560 nt, Artificial Sequence
  mRNA product Design a-2 (hSL-A64-N5) comprising derived and/or modified sequence from LASV(Lassa virus/H.sapiens-wt/NGA/2018/ISTH_0959;Clade II)__AVV65084__Z (opt4)
aggagaguccgcucagccagguugcagaagcggcuuagcguguguccuaaucuucucucugcguguagguaggccugugccgcaaacaagcuuaccaugggcaacaagcaggccaagagcaccaagguggacgagcaccagagagcccaccuggugcccgacgccagccaccugggcccccaguucugcaagagcugcugguucgagaacagaggccugguggagugcaacaaccacuaccugugccugaacugccugagccugcugcugagcgugagcagcagaugccccaucugcaagaugccccugcccaccaagcugaaggccgccgcccagcccagcgcccccagcaccgaggccauccagagcaccacccccccccccuacacccccugaggacuagucccuguucccagagcccacuuuuuuuucuuuuuuugaaauaaaauagccugucuuucagaucucaaaggcucuuuucagagccaccaaaaaaaaaaaaaaaaaaaaaaaaaaaaaaaaaaaaaaaaaaaaaaaaaaaaaaaaaaaaaaaaagaauu

SEQ ID NO: 22310 - RNA, 560 nt, Artificial Sequence
  mRNA product Design a-2 (hSL-A64-N5) comprising derived and/or modified sequence from LASV(LASV003-NIG-2008;Clade II)__AIT17578__Z (opt4)
aggagaguccgcucagccagguugcagaagcggcuuagcguguguccuaaucuucucucugcguguagguaggccugugccgcaaacaagcuuaccaugggcaacagacaggccaagagcaccaagguggacgagcaccagagagcccaccuggugcccgacgccagccaccugggcccccaguucugcaagagcugcugguucgagaacaagggccugguggagugcaacaaccacuaccugugccugaacugccugagccugcugcugagcgugagcagcagaugccccaucugcaagaugccccugcccaccaagcugagagccgccgcccagcccagcgcccccagcaccgagagcgcccagaacaccgcccccccccccuacgcccccugaggacuagucccuguucccagagcccacuuuuuuuucuuuuuuugaaauaaaauagccugucuuucagaucucaaaggcucuuuucagagccaccaaaaaaaaaaaaaaaaaaaaaaaaaaaaaaaaaaaaaaaaaaaaaaaaaaaaaaaaaaaaaaaaagaauu

SEQ ID NO: 22311 - RNA, 560 nt, Artificial Sequence
  mRNA product Design a-2 (hSL-A64-N5) comprising derived and/or modified sequence from LASV(LASV035-NIG-2009;Clade II)__AIT17586__Z (opt4)
aggagaguccgcucagccagguugcagaagcggcuuagcguguguccuaaucuucucucugcguguagguaggccugugccgcaaacaagcuuaccaugggcaacaagcaggccaagagcaccaagguggacgagcaccagagagcccaccuggugcccgacgccagccaccugggcccccaguucugcaagagcugcugguucgagaacagaggccugguggagugcaacaaccacuaccugugccugaacugccugagccugcugcugagcgugagcagcagaugccccaucugcaagaugccccugcccaccagacugaaggccgccgcccagcccagcgcccccagcaccgaggugacccagaacaccacccccccccccuacacccccugaggacuagucccuguucccagagcccacuuuuuuuucuuuuuuugaaauaaaauagccugucuuucagaucucaaaggcucuuuucagagccaccaaaaaaaaaaaaaaaaaaaaaaaaaaaaaaaaaaaaaaaaaaaaaaaaaaaaaaaaaaaaaaaaagaauu

SEQ ID NO: 22312 - RNA, 560 nt, Artificial Sequence
  mRNA product Design a-2 (hSL-A64-N5) comprising derived and/or modified sequence from LASV(LASV1000-NIG-2009;Clade II)__AIT17780__Z (opt4)
aggagaguccgcucagccagguugcagaagcggcuuagcguguguccuaaucuucucucugcguguagguaggccugugccgcaaacaagcuuaccaugggcaacagacagaccaagagcaccaagguggacgagcaccagagagccuaccuggugcccgacgccagccugcugggcccccaguucugcaagagcugcugguucgagaacaagggccugguggagugcaacaaccacuaccugugccugaacugccugagccugcugcugagcgugagcagcagaugccccaucugcaagaugccccugcccaccagacugaaggccgccgcccagcccagcgccccccccaccgaggccauccagaacaccacccccccccccuacacccccugaggacuagucccuguucccagagcccacuuuuuuuucuuuuuuugaaauaaaauagccugucuuucagaucucaaaggcucuuuucagagccaccaaaaaaaaaaaaaaaaaaaaaaaaaaaaaaaaaaaaaaaaaaaaaaaaaaaaaaaaaaaaaaaaagaauu

SEQ ID NO: 22313 - RNA, 560 nt, Artificial Sequence
  mRNA product Design a-2 (hSL-A64-N5) comprising derived and/or modified sequence from LASV(LASV221-NIG-2010;Clade II)__AIT17622__Z (opt4)
aggagaguccgcucagccagguugcagaagcggcuuagcguguguccuaaucuucucucugcguguagguaggccugugccgcaaacaagcuuaccaugggcaacagacaggccaagagcaccaagguggacgagcaccagagagcccaccuggugcccgacgccagccaccugggcccccaguucugcaagagcugcugguucgagaacagaggccugguggagugcaacaaccacuaccugugccugaacugccugagccugcugcugagcgugagcagcagaugccccaucugcaagaugccccugcccaccaagcugaaggccgccacccagcccagcgcccccagcaccgaggugacccagaacaccauccccccccccuacagccccugaggacuagucccuguucccagagcccacuuuuuuuucuuuuuuugaaauaaaauagccugucuuucagaucucaaaggcucuuuucagagccaccaaaaaaaaaaaaaaaaaaaaaaaaaaaaaaaaaaaaaaaaaaaaaaaaaaaaaaaaaaaaaaaaagaauu

SEQ ID NO: 22314 - RNA, 560 nt, Artificial Sequence
  mRNA product Design a-2 (hSL-A64-N5) comprising derived and/or modified sequence from LASV(LASV237-NIG-2010;Clade II)__AIT17636__Z (opt4)
aggagaguccgcucagccagguugcagaagcggcuuagcguguguccuaaucuucucucugcguguagguaggccugugccgcaaacaagcuuaccaugggcaacagacaggccaagagcaccaagguggacgagcaccagagagcccaccuggugcccgacgccagccaccugggcccccaguucugcaagagcugcugguucgagaacagaggccugguggagugcaacaaccacuaccugugccugaacugccugagccugcugcugagcgugagcagcagaugccccaucugcaagaugccccugcccaccaagcugaaggccgccgcccagcccagcgcccccagcaucgagaccauccagaacaccacccccccccccuacacccccugaggacuagucccuguucccagagcccacuuuuuuuucuuuuuuugaaauaaaauagccugucuuucagaucucaaaggcucuuuucagagccaccaaaaaaaaaaaaaaaaaaaaaaaaaaaaaaaaaaaaaaaaaaaaaaaaaaaaaaaaaaaaaaaaagaauu

SEQ ID NO: 22315 - RNA, 560 nt, Artificial Sequence
  mRNA product Design a-2 (hSL-A64-N5) comprising derived and/or modified sequence from LASV(LASV253-NIG-2011;Clade II)__AIT17668__Z (opt4)
aggagaguccgcucagccagguugcagaagcggcuuagcguguguccuaaucuucucucugcguguagguaggccugugccgcaaacaagcuuaccaugggcaacagacaggccaagagcaccaagguggacgagcaccagagagcccaccuggugcccgacgccagccaccugggcccccaguucugcaagagcugcugguucgagaacaagggccugguggagugcaacaaccacuaccugugccugaacugccugagccugcugcugagcgugagcagcagaugccccaucugcaagaugccccugcccaccaagcugaagaccaccgcccagcccagcgccccccccaccgaggccgccaagaacaccgcccccccccccuacgcccccugaggacuagucccuguucccagagcccacuuuuuuuucuuuuuuugaaauaaaauagccugucuuucagaucucaaaggcucuuuucagagccaccaaaaaaaaaaaaaaaaaaaaaaaaaaaaaaaaaaaaaaaaaaaaaaaaaaaaaaaaaaaaaaaaagaauu

SEQ ID NO: 22316 - RNA, 560 nt, Artificial Sequence
  mRNA product Design a-2 (hSL-A64-N5) comprising derived and/or modified sequence from LASV(G1180-SLE-2010;Clade IV)__AIT17166__Z (opt4)
aggagaguccgcucagccagguugcagaagcggcuuagcguguguccuaaucuucucucugcguguagguaggccugugccgcaaacaagcuuaccaugggcaacaagcaggccaaggcccccgaggccaaggacagccccagagccagccugauccccgacgccacccaccugggcccccaguucugcaagagcugcugguucgagaccaagggccugguggagugcaacaaccacuaccugugccugaacugccugacccugcugcugagcgugagcaacagaugccccaucugcaagaugccccugcccaccaagcugagacccagcgccacccccaccgccccccccaccgaggccgccgacagcaucggccccccccccuacagccccugaggacuagucccuguucccagagcccacuuuuuuuucuuuuuuugaaauaaaauagccugucuuucagaucucaaaggcucuuuucagagccaccaaaaaaaaaaaaaaaaaaaaaaaaaaaaaaaaaaaaaaaaaaaaaaaaaaaaaaaaaaaaaaaaagaauu

SEQ ID NO: 22317 - RNA, 560 nt, Artificial Sequence
  mRNA product Design a-2 (hSL-A64-N5) comprising derived and/or modified sequence from LASV(G1442-SLE-2011;Clade IV)__AIT17178__Z (opt4)
aggagaguccgcucagccagguugcagaagcggcuuagcguguguccuaaucuucucucugcguguagguaggccugugccgcaaacaagcuuaccaugggcaacaagcaggccaaggccagcgaggccaaggacagccccagagccagccugauccccgacgccacccaccugggcccccaguucugcaagagcugcugguucgagaacaagggccugguggagugcaacaaccacuaccugugccugaacugccugagccugcugcugagcgugagcagcagaugccccaucugcaagaugccccugcccaccagacugagacccagcaccgcccccaccgccccccccgccagagccggcgacaacaucaagcccccccccuacagccccugaggacuagucccuguucccagagcccacuuuuuuuucuuuuuuugaaauaaaauagccugucuuucagaucucaaaggcucuuuucagagccaccaaaaaaaaaaaaaaaaaaaaaaaaaaaaaaaaaaaaaaaaaaaaaaaaaaaaaaaaaaaaaaaaagaauu

SEQ ID NO: 22318 - RNA, 560 nt, Artificial Sequence
  mRNA product Design a-2 (hSL-A64-N5) comprising derived and/or modified sequence from LASV(G502-SLE-2009;Clade IV)__AIT17124__Z (opt4)
aggagaguccgcucagccagguugcagaagcggcuuagcguguguccuaaucuucucucugcguguagguaggccugugccgcaaacaagcuuaccaugggcaacaagcaggugaagacccccgaggccaaggacagccccagagccagccugauccccgacgccacccaccugggcccccaguucugcaagagcugcugguucgagaacaagggccugguggagugcaacaaccacuaccugugccugaacugccugacccugcugcugagcgugggcaacagaugccccaucugcaagaugccccugcccaccaagcugagacccagcgugacccccaccgccccccccaccagagccgccgacagcaucggccccccccccuacagccccugaggacuagucccuguucccagagcccacuuuuuuuucuuuuuuugaaauaaaauagccugucuuucagaucucaaaggcucuuuucagagccaccaaaaaaaaaaaaaaaaaaaaaaaaaaaaaaaaaaaaaaaaaaaaaaaaaaaaaaaaaaaaaaaaagaauu

SEQ ID NO: 22319 - RNA, 560 nt, Artificial Sequence
  mRNA product Design a-2 (hSL-A64-N5) comprising derived and/or modified sequence from LASV(G733-SLE-2010;Clade IV)__AIT17152__Z (opt4)
aggagaguccgcucagccagguugcagaagcggcuuagcguguguccuaaucuucucucugcguguagguaggccugugccgcaaacaagcuuaccaugggcaacaagcaggccaagacccccgagaccaaggacagccccagagccagccugauccccgacgccacccaccugggcccccaguucugcaagagcugcugguucgagaacaagggccugguggagugcaacaaccacuaccugugccugaacugccugacccugcugcugagcgugagcaacagaugccccaucugcaagaugccccugcccaccaagcugagacccagcaccgcccccaccgccccccccgccggcgccgccgacaacaccagacccccccccuacagccccugaggacuagucccuguucccagagcccacuuuuuuuucuuuuuuugaaauaaaauagccugucuuucagaucucaaaggcucuuuucagagccaccaaaaaaaaaaaaaaaaaaaaaaaaaaaaaaaaaaaaaaaaaaaaaaaaaaaaaaaaaaaaaaaaagaauu

SEQ ID NO: 22320 - RNA, 572 nt, Artificial Sequence
  mRNA product Design a-2 (hSL-A64-N5) comprising derived and/or modified sequence from MOPV/LASV reassortant(IGS-1;Clade IV)__AFY05533__Z (opt4)
aggagaguccgcucagccagguugcagaagcggcuuagcguguguccuaaucuucucucugcguguagguaggccugugccgcaaacaagcuuaccaugggcaagacccagagcaagggccagcccagcaccaaccugcugaaggagaccgagcccagacaccccgugauccccgacgccagaggcaccggccccgaguucugcaagagcugcugguucgagagaagaggccuggugagaugcaacgaccacuaccugugccugaacugccugacccugcugcacaccgugagcgacagaugccccaucugcaagcacaagcugcccuucagacuggagcugcagacccagcccaccgccccccccgagaucccccccagccagaaccccccccccuacagccccugaggacuagucccuguucccagagcccacuuuuuuuucuuuuuuugaaauaaaauagccugucuuucagaucucaaaggcucuuuucagagccaccaaaaaaaaaaaaaaaaaaaaaaaaaaaaaaaaaaaaaaaaaaaaaaaaaaaaaaaaaaaaaaaaagaauu

SEQ ID NO: 22321 - RNA, 560 nt, Artificial Sequence
  mRNA product Design a-2 (hSL-A64-N5) comprising derived and/or modified sequence from LASV(LM776-SLE-2012;Clade IV)__AIT17824__Z (opt4)
aggagaguccgcucagccagguugcagaagcggcuuagcguguguccuaaucuucucucugcguguagguaggccugugccgcaaacaagcuuaccaugggcaacaagcaggccaaggccagcgaggagaagaacagccccagagccagccugauccccgacgccacccaccugggcccccaguucugcaagagcugcugguucgagaacaagggccugguggagugcaacaaccacuaccugugccugaacugccugacccugcugcugagcgugagcaacagaugccccaucugcaagaugccccugcccaccaagcugagacccagcaccacccccaccgccccccccaccggcgccgccgacagcaucagacccccccccuacagccccugaggacuagucccuguucccagagcccacuuuuuuuucuuuuuuugaaauaaaauagccugucuuucagaucucaaaggcucuuuucagagccaccaaaaaaaaaaaaaaaaaaaaaaaaaaaaaaaaaaaaaaaaaaaaaaaaaaaaaaaaaaaaaaaaagaauu

SEQ ID NO: 22322 - RNA, 560 nt, Artificial Sequence
  mRNA product Design a-2 (hSL-A64-N5) comprising derived and/or modified sequence from LASV(Mad39;Clade IV)__ANH09743__Z (opt4)
aggagaguccgcucagccagguugcagaagcggcuuagcguguguccuaaucuucucucugcguguagguaggccugugccgcaaacaagcuuaccaugggcaacaagcaggccaaggccagcgagguggaggacggccccagagccagccugauccccgacgccacccaccugggcccccaguucugcaagagcugcugguucgagaacaagagccugguggagugcaacaaccacuaccugugccugaacugccugacccugcugcugagcgugagcaacagaugccccaucugcaagaugccccugcccaccagacugaagcccagcguggugcccaccgccccccccaccagagccggcgacggcaccagacccccccccuacagccccugaggacuagucccuguucccagagcccacuuuuuuuucuuuuuuugaaauaaaauagccugucuuucagaucucaaaggcucuuuucagagccaccaaaaaaaaaaaaaaaaaaaaaaaaaaaaaaaaaaaaaaaaaaaaaaaaaaaaaaaaaaaaaaaaagaauu

SEQ ID NO: 22323 - RNA, 560 nt, Artificial Sequence
  mRNA product Design a-2 (hSL-A64-N5) comprising derived and/or modified sequence from LASV(Z0947-SLE-2011;Clade IV)__AIT17838__Z (opt4)
aggagaguccgcucagccagguugcagaagcggcuuagcguguguccuaaucuucucucugcguguagguaggccugugccgcaaacaagcuuaccaugggcaacaagcaggccaaggugcccgagagcaaggacagccccagagccagccugauccccgacgccacccaccugggcccccaguucugcaagagcugcugguucgagaacaagggccugguggagugcaacaaccacuaccugugccugaacugccugacccugcugcugagcgugagcaacagaugccccaucugcaagaugccccugcccaccaagcugaagcccagcgccgcccccaccgccccccccaccggcgccgccgacagcaucagacccccccccuacagccccugaggacuagucccuguucccagagcccacuuuuuuuucuuuuuuugaaauaaaauagccugucuuucagaucucaaaggcucuuuucagagccaccaaaaaaaaaaaaaaaaaaaaaaaaaaaaaaaaaaaaaaaaaaaaaaaaaaaaaaaaaaaaaaaaagaauu

SEQ ID NO: 22324 - RNA, 560 nt, Artificial Sequence
  mRNA product Design a-2 (hSL-A64-N5) comprising derived and/or modified sequence from LASV(Josiah;Clade IV)__ADY11072/NP_694871__Z (opt5)
aggagaguccgcucagccagguugcagaagcggcuuagcguguguccuaaucuucucucugcguguagguaggccugugccgcaaacaagcuuaccaugggcaacaagcaggccaaagcucccgagagcaaggacuccccuagagccucucugaucccggaugcgacccaccucgggccccaauucugcaaaagcuguugguuugaaaauaagggacugguggagugcaacaaucauuaccuuugucugaacugccucacacugcuucuguccgucucuaaucgguguccuauuugcaaaaugccccucccuacgaagcugcgccccagcgcugccccuaccgccccgcccacaggcgcugccgacuccaucagaccucccccuuauucucccugaggacuagucccuguucccagagcccacuuuuuuuucuuuuuuugaaauaaaauagccugucuuucagaucucaaaggcucuuuucagagccaccaaaaaaaaaaaaaaaaaaaaaaaaaaaaaaaaaaaaaaaaaaaaaaaaaaaaaaaaaaaaaaaaagaauu

SEQ ID NO: 22325 - RNA, 563 nt, Artificial Sequence
  mRNA product Design a-2 (hSL-A64-N5) comprising derived and/or modified sequence from LASV(Pinneo-NIG-1969;Clade I)__AIT17834__Z (opt5)
aggagaguccgcucagccagguugcagaagcggcuuagcguguguccuaaucuucucucugcguguagguaggccugugccgcaaacaagcuuaccaugggcaacaagcagaccagaagcccucccaaaccggagcacccccggccuacacugcuccccgacgccucccaucuggggccucaauucugcaagucuuguugguuugaaaauaaaggacuuguggagugcaacaaucacuaccugugucucaacugccugacgcuucugcucagcgucuccgaucgcugucccaucugcaagaugccucugccgaccaaacuggcuguuagaacacagcccucugccccuccccucaaucagggcaacacccagagcuccccucccccguauucuccuugaggacuagucccuguucccagagcccacuuuuuuuucuuuuuuugaaauaaaauagccugucuuucagaucucaaaggcucuuuucagagccaccaaaaaaaaaaaaaaaaaaaaaaaaaaaaaaaaaaaaaaaaaaaaaaaaaaaaaaaaaaaaaaaaagaauu

SEQ ID NO: 22326 - RNA, 560 nt, Artificial Sequence
  mRNA product Design a-2 (hSL-A64-N5) comprising derived and/or modified sequence from LASV(Nig08-04;Clade II)__ADU56612__Z (opt5)
aggagaguccgcucagccagguugcagaagcggcuuagcguguguccuaaucuucucucugcguguagguaggccugugccgcaaacaagcuuaccaugggcaacagacagacccggcccacagaggccacggaacaaagccgcgcccaccuggugccugacgccucccaucucgggccgcaguucugcaagucuuguugguuugagaauagaggacuggucgaaugcaacaaucacuaccuuugucugaacugccucagccugcuucuguccguuucuagccggugucccaucugcaaaaugccucuccccacccgccugaaggcguccgcucagccuucugcucccccuacagaggccccgcagaauaccacacccccucccuauaccccuugaggacuagucccuguucccagagcccacuuuuuuuucuuuuuuugaaauaaaauagccugucuuucagaucucaaaggcucuuuucagagccaccaaaaaaaaaaaaaaaaaaaaaaaaaaaaaaaaaaaaaaaaaaaaaaaaaaaaaaaaaaaaaaaaagaauu

SEQ ID NO: 22327 - RNA, 560 nt, Artificial Sequence
  mRNA product Design a-2 (hSL-A64-N5) comprising derived and/or modified sequence from LASV(Nig08-A19;Clade III)__ADU56620__Z (opt5)
aggagaguccgcucagccagguugcagaagcggcuuagcguguguccuaaucuucucucugcguguagguaggccugugccgcaaacaagcuuaccaugggcgggaagcacaccaaaccccagagagagagcaacuccccucgggccucucugaucccggacgcuacacaucucggaccccaauucugcaagagcuguugguuugaaaauaaaggccugguggagugcaacaaucacuaccuuugucugaacugccucacgcugcuucuguccgucucuaaucgcuguccuauuugcaagaugccccucccuaccagacugcgggccagcacaaaccccaccgcgccucagguugaacagguggggccgacaaaucccccucccuauuccccuugaggacuagucccuguucccagagcccacuuuuuuuucuuuuuuugaaauaaaauagccugucuuucagaucucaaaggcucuuuucagagccaccaaaaaaaaaaaaaaaaaaaaaaaaaaaaaaaaaaaaaaaaaaaaaaaaaaaaaaaaaaaaaaaaagaauu

SEQ ID NO: 22328 - RNA, 560 nt, Artificial Sequence
  mRNA product Design a-2 (hSL-A64-N5) comprising derived and/or modified sequence from LASV(AV;Clade V)__CCA30312__Z (opt5)
aggagaguccgcucagccagguugcagaagcggcuuagcguguguccuaaucuucucucugcguguagguaggccugugccgcaaacaagcuuaccaugggcaacagacaggccaagaaucccgagguggaaaacagcccucgggcuucccugaucccggacgccacccaccucgggccccaauucugcaaaucuuguugguuugagaauaagggacuggucgaaugcaacaaucauuaccuuugucugaacugccucagccugcuucuguccguuucuaaucgcuguccuauuugcaaaaugccccucccuacaagacugcggcccacgaccacaccuaccgcgccgcagaucauuaaggagaacacaaccaaucccccucccuauacaccuugaggacuagucccuguucccagagcccacuuuuuuuucuuuuuuugaaauaaaauagccugucuuucagaucucaaaggcucuuuucagagccaccaaaaaaaaaaaaaaaaaaaaaaaaaaaaaaaaaaaaaaaaaaaaaaaaaaaaaaaaaaaaaaaaagaauu

SEQ ID NO: 22329 - RNA, 560 nt, Artificial Sequence
  mRNA product Design a-2 (hSL-A64-N5) comprising derived and/or modified sequence from LASV(Togo/2016/7082;Clade VI)__AMR44579__Z (opt5)
aggagaguccgcucagccagguugcagaagcggcuuagcguguguccuaaucuucucucugcguguagguaggccugugccgcaaacaagcuuaccaugggcgccagacagaccaagcaaccccagaucgaggggagcccucgggcuucccuggugccggacgccucucaccucggaccccaguucugcaaaagcuguugguuugaaaacaagggccuggucgagugcaauaaccauuaccuuugucugaauugccucucccugcuucugucuguuagcaaccgcuguccuauuugcaaaaugccccucccuacaaagcugagaguguccucugcgcccagcgcuccuccggccgccacggcucagcccgggaccccucccccuuauucccccugaggacuagucccuguucccagagcccacuuuuuuuucuuuuuuugaaauaaaauagccugucuuucagaucucaaaggcucuuuucagagccaccaaaaaaaaaaaaaaaaaaaaaaaaaaaaaaaaaaaaaaaaaaaaaaaaaaaaaaaaaaaaaaaaagaauu

SEQ ID NO: 22330 - RNA, 560 nt, Artificial Sequence
  mRNA product Design a-2 (hSL-A64-N5) comprising derived and/or modified sequence from LASV(KAK-428;Clade n.d. (VII))__ANH09761__Z (opt5)
aggagaguccgcucagccagguugcagaagcggcuuagcguguguccuaaucuucucucugcguguagguaggccugugccgcaaacaagcuuaccaugggcaacaaggggaccaaacccacacagaauagcgagccuuccagagccaaccuggugccggacgcuucuuaccucggaccccaauucugcaagagcuguugguuugaaaauaaaggccuggucgagugcaacaaucacuaucuuugucugaacugccucacgaugcugcuuuccguuuccaaucgguguccuaucugcaagaugccccugccuaccaaaauuaaggccagcgggucccccucugcgccuccgacagaagcuaacagcgccgugucucccccucccuacaccccuugaggacuagucccuguucccagagcccacuuuuuuuucuuuuuuugaaauaaaauagccugucuuucagaucucaaaggcucuuuucagagccaccaaaaaaaaaaaaaaaaaaaaaaaaaaaaaaaaaaaaaaaaaaaaaaaaaaaaaaaaaaaaaaaaagaauu

SEQ ID NO: 22331 - RNA, 560 nt, Artificial Sequence
  mRNA product Design a-2 (hSL-A64-N5) comprising derived and/or modified sequence from LASV(ISTH0009-NIG-2011;Clade II)__AIT17402__Z (opt5)
aggagaguccgcucagccagguugcagaagcggcuuagcguguguccuaaucuucucucugcguguagguaggccugugccgcaaacaagcuuaccaugggcaacagacaggccaagagcaccaaaguggacgagcaccaacgggcucaucugguccccgaugccucccaccucgggccucaguucugcaagucuuguugguuugaaaaucgcggacugguugagugcaacaaucauuaccuuugucugaacugccucagccugcuucuguccgugucuagcagauguccgaucugcaaaaugccccucccuacaaagcugaaagcggcugcccagcccuccgccccuucuacggaaaccauucagaauacaacacccccuccguauacccccugaggacuagucccuguucccagagcccacuuuuuuuucuuuuuuugaaauaaaauagccugucuuucagaucucaaaggcucuuuucagagccaccaaaaaaaaaaaaaaaaaaaaaaaaaaaaaaaaaaaaaaaaaaaaaaaaaaaaaaaaaaaaaaaaagaauu

SEQ ID NO: 22332 - RNA, 560 nt, Artificial Sequence
  mRNA product Design a-2 (hSL-A64-N5) comprising derived and/or modified sequence from LASV(ISTH2010-NIG-2012;Clade II)__AIT17480__Z (opt5)
aggagaguccgcucagccagguugcagaagcggcuuagcguguguccuaaucuucucucugcguguagguaggccugugccgcaaacaagcuuaccaugggcaacagacacgccaagagcaccaaaguggacgagcaucagcgggcucaccugguccccgaugccucccaucucgggccucaauucugcaagucuuguugguuugaaaaucgcggacugguugagugcaacaaucacuaccuuugucugaacugccucagccugcuucuguccgugucuagcagauguccgaucugcaaaaugccccucccuacaaagcugaaagcggcugcccagcccuccgccccuucuacggaagugauucagagcaccacacccccuccguauacccccugaggacuagucccuguucccagagcccacuuuuuuuucuuuuuuugaaauaaaauagccugucuuucagaucucaaaggcucuuuucagagccaccaaaaaaaaaaaaaaaaaaaaaaaaaaaaaaaaaaaaaaaaaaaaaaaaaaaaaaaaaaaaaaaaagaauu

SEQ ID NO: 22333 - RNA, 560 nt, Artificial Sequence
  mRNA product Design a-2 (hSL-A64-N5) comprising derived and/or modified sequence from LASV(Lassa virus/H.sapiens-wt/NGA/2016/ISTH_0017;Clade II)__AVO03713__Z (opt5)
aggagaguccgcucagccagguugcagaagcggcuuagcguguguccuaaucuucucucugcguguagguaggccugugccgcaaacaagcuuaccaugggcaacagacaggccaagagcaccaaaguggacgagcaccaacgggcucaucugguccccgaugccucccaccucgggccucaguucugcaagucuuguugguuugaaaaucgcggacugguugagugcaacaaucauuaccuuugucugaacugccucagccugcuucuguccgugucuagcagauguccgaucugcaaaaugccccucccuacaaagcugaaagcggcuacgcagcccuccgccccuucuaccgaagugaaucagaacacaacacccccuccguauacccccugaggacuagucccuguucccagagcccacuuuuuuuucuuuuuuugaaauaaaauagccugucuuucagaucucaaaggcucuuuucagagccaccaaaaaaaaaaaaaaaaaaaaaaaaaaaaaaaaaaaaaaaaaaaaaaaaaaaaaaaaaaaaaaaaagaauu

SEQ ID NO: 22334 - RNA, 560 nt, Artificial Sequence
  mRNA product Design a-2 (hSL-A64-N5) comprising derived and/or modified sequence from LASV(Lassa virus/H.sapiens-wt/NGA/2018/ISTH_0959;Clade II)__AVV65084__Z (opt5)
aggagaguccgcucagccagguugcagaagcggcuuagcguguguccuaaucuucucucugcguguagguaggccugugccgcaaacaagcuuaccaugggcaacaagcaggccaaaagcaccaagguggacgagcaccaaagagcucaucugguccccgaugccucccaccucgggccucaguucugcaaaucuuguugguuugaaaaucggggacugguugagugcaacaaucauuaccuuugucugaacugccucagccugcuucuguccgugucuagccgcuguccgaucugcaagaugccccucccuacaaaacugaaggcggcugcccagcccuccgccccuucuacggaagcuauucagagcaccacacccccuccguauacccccugaggacuagucccuguucccagagcccacuuuuuuuucuuuuuuugaaauaaaauagccugucuuucagaucucaaaggcucuuuucagagccaccaaaaaaaaaaaaaaaaaaaaaaaaaaaaaaaaaaaaaaaaaaaaaaaaaaaaaaaaaaaaaaaaagaauu

SEQ ID NO: 22335 - RNA, 560 nt, Artificial Sequence
  mRNA product Design a-2 (hSL-A64-N5) comprising derived and/or modified sequence from LASV(LASV003-NIG-2008;Clade II)__AIT17578__Z (opt5)
aggagaguccgcucagccagguugcagaagcggcuuagcguguguccuaaucuucucucugcguguagguaggccugugccgcaaacaagcuuaccaugggcaacagacaggccaagagcaccaaaguggacgagcaccaacgggcucaucugguccccgaugccucccaccucgggccucaguucugcaagucuuguugguuugaaaauaaaggacugguugagugcaacaaucauuaccuuugucugaacugccucagccugcuucuguccgugucuagccgcuguccgaucugcaagaugccccucccuacaaaacugagagcggcugcccagcccuccgccccuucuacggaaagcgcucagaauaccgcucccccuccguaugcccccugaggacuagucccuguucccagagcccacuuuuuuuucuuuuuuugaaauaaaauagccugucuuucagaucucaaaggcucuuuucagagccaccaaaaaaaaaaaaaaaaaaaaaaaaaaaaaaaaaaaaaaaaaaaaaaaaaaaaaaaaaaaaaaaaagaauu

SEQ ID NO: 22336 - RNA, 560 nt, Artificial Sequence
  mRNA product Design a-2 (hSL-A64-N5) comprising derived and/or modified sequence from LASV(LASV035-NIG-2009;Clade II)__AIT17586__Z (opt5)
aggagaguccgcucagccagguugcagaagcggcuuagcguguguccuaaucuucucucugcguguagguaggccugugccgcaaacaagcuuaccaugggcaacaagcaggccaaaagcaccaagguggacgagcaccaaagagcucaucugguccccgaugccucccaccucgggccucaguucugcaaaucuuguugguuugaaaaucggggacugguugagugcaacaaucauuaccuuugucugaacugccucagccugcuucuguccgugucuagccgcuguccgaucugcaagaugccccucccuacaagacugaaagcggcugcccagcccuccgccccuucuacggaagugacccagaauacaacacccccuccguauacccccugaggacuagucccuguucccagagcccacuuuuuuuucuuuuuuugaaauaaaauagccugucuuucagaucucaaaggcucuuuucagagccaccaaaaaaaaaaaaaaaaaaaaaaaaaaaaaaaaaaaaaaaaaaaaaaaaaaaaaaaaaaaaaaaaagaauu

SEQ ID NO: 22337 - RNA, 560 nt, Artificial Sequence
  mRNA product Design a-2 (hSL-A64-N5) comprising derived and/or modified sequence from LASV(LASV1000-NIG-2009;Clade II)__AIT17780__Z (opt5)
aggagaguccgcucagccagguugcagaagcggcuuagcguguguccuaaucuucucucugcguguagguaggccugugccgcaaacaagcuuaccaugggcaacagacagaccaagagcacaaaaguggacgagcaccaacgggccuaccugguccccgaugcuucccuccuggggccucaguucugcaagucuuguugguuugaaaauaaaggacuuguugagugcaacaaucauuaucugugucucaacugccugagccuucugcucuccgugucuagccgcuguccgaucugcaagaugccccugccuacgagacugaaagccgcggcucagcccuccgccccucccaccgaagccauucagaauacaaccccuccgcccuacacaccuugaggacuagucccuguucccagagcccacuuuuuuuucuuuuuuugaaauaaaauagccugucuuucagaucucaaaggcucuuuucagagccaccaaaaaaaaaaaaaaaaaaaaaaaaaaaaaaaaaaaaaaaaaaaaaaaaaaaaaaaaaaaaaaaaagaauu

SEQ ID NO: 22338 - RNA, 560 nt, Artificial Sequence
  mRNA product Design a-2 (hSL-A64-N5) comprising derived and/or modified sequence from LASV(LASV221-NIG-2010;Clade II)__AIT17622__Z (opt5)
aggagaguccgcucagccagguugcagaagcggcuuagcguguguccuaaucuucucucugcguguagguaggccugugccgcaaacaagcuuaccaugggcaacagacaggccaagagcaccaaaguggacgagcaccaacgggcucaucugguccccgaugccucccaccucgggccucaguucugcaagucuuguugguuugaaaaucgcggacugguugagugcaacaaucauuaccuuugucugaacugccucagccugcuucuguccgugucuagcagauguccgaucugcaaaaugccccucccuacaaagcugaaagcggcuacgcagcccuccgccccuucuaccgaagugacacagaauaccauucccccuccguauagccccugaggacuagucccuguucccagagcccacuuuuuuuucuuuuuuugaaauaaaauagccugucuuucagaucucaaaggcucuuuucagagccaccaaaaaaaaaaaaaaaaaaaaaaaaaaaaaaaaaaaaaaaaaaaaaaaaaaaaaaaaaaaaaaaaagaauu

SEQ ID NO: 22339 - RNA, 560 nt, Artificial Sequence
  mRNA product Design a-2 (hSL-A64-N5) comprising derived and/or modified sequence from LASV(LASV237-NIG-2010;Clade II)__AIT17636__Z (opt5)
aggagaguccgcucagccagguugcagaagcggcuuagcguguguccuaaucuucucucugcguguagguaggccugugccgcaaacaagcuuaccaugggcaacagacaggccaagagcaccaaaguggacgagcaccaacgggcucaucugguccccgaugccucccaccucgggccucaguucugcaagucuuguugguuugaaaaucgcggacugguugagugcaacaaucauuaccuuugucugaacugccucagccugcuucuguccgugucuagcagauguccgaucugcaaaaugccccucccuacaaagcugaaagcggcugcccagcccuccgccccuucuauugaaacgauccagaauaccacacccccuccguauacccccugaggacuagucccuguucccagagcccacuuuuuuuucuuuuuuugaaauaaaauagccugucuuucagaucucaaaggcucuuuucagagccaccaaaaaaaaaaaaaaaaaaaaaaaaaaaaaaaaaaaaaaaaaaaaaaaaaaaaaaaaaaaaaaaaagaauu

SEQ ID NO: 22340 - RNA, 560 nt, Artificial Sequence
  mRNA product Design a-2 (hSL-A64-N5) comprising derived and/or modified sequence from LASV(LASV253-NIG-2011;Clade II)__AIT17668__Z (opt5)
aggagaguccgcucagccagguugcagaagcggcuuagcguguguccuaaucuucucucugcguguagguaggccugugccgcaaacaagcuuaccaugggcaacagacaggccaagagcaccaaaguggacgagcaccaacgggcucaucugguccccgaugccucccaccucgggccucaguucugcaagucuuguugguuugaaaauaaaggacugguugagugcaacaaucauuaccuuugucugaacugccucagccugcuucuguccgugucuagccgcuguccgaucugcaagaugccccucccuacaaaacugaagacgaccgcgcagcccuccgcuccucccacagaagccgccaagaauaccgcuccuccgcccuaugccccuugaggacuagucccuguucccagagcccacuuuuuuuucuuuuuuugaaauaaaauagccugucuuucagaucucaaaggcucuuuucagagccaccaaaaaaaaaaaaaaaaaaaaaaaaaaaaaaaaaaaaaaaaaaaaaaaaaaaaaaaaaaaaaaaaagaauu

SEQ ID NO: 22341 - RNA, 560 nt, Artificial Sequence
  mRNA product Design a-2 (hSL-A64-N5) comprising derived and/or modified sequence from LASV(G1180-SLE-2010;Clade IV)__AIT17166__Z (opt5)
aggagaguccgcucagccagguugcagaagcggcuuagcguguguccuaaucuucucucugcguguagguaggccugugccgcaaacaagcuuaccaugggcaacaagcaggccaaagcucccgaggccaaggacagcccuagagcgucccugaucccggaugcuacccaccucgggccccaauucugcaaaucuuguugguuugaaacaaagggacugguggagugcaauaaccauuaccuuugucugaauugccucacgcugcuucugagcgucuccaaccgguguccuauuugcaaaaugccccucccuaccaagcugcgccccucugccacaccuaccgccccgcccacagaagcugccgacagcaucggcccucccccuuauucccccugaggacuagucccuguucccagagcccacuuuuuuuucuuuuuuugaaauaaaauagccugucuuucagaucucaaaggcucuuuucagagccaccaaaaaaaaaaaaaaaaaaaaaaaaaaaaaaaaaaaaaaaaaaaaaaaaaaaaaaaaaaaaaaaaagaauu

SEQ ID NO: 22342 - RNA, 560 nt, Artificial Sequence
  mRNA product Design a-2 (hSL-A64-N5) comprising derived and/or modified sequence from LASV(G1442-SLE-2011;Clade IV)__AIT17178__Z (opt5)
aggagaguccgcucagccagguugcagaagcggcuuagcguguguccuaaucuucucucugcguguagguaggccugugccgcaaacaagcuuaccaugggcaacaagcaggccaaagcuagcgaggccaaggacucccccagagcgucucugaucccugaugcuacccaccucgggccgcaauucugcaaaagcuguugguuugaaaauaagggacugguggagugcaacaaucauuaccuuugucugaacugccucucccugcuucugucugucagcucccggugucccauuugcaaaaugccucuccccacacgccugagaccuucuacggcccccaccgccccuccggcucgggccggcgacaauaucaagcccccucccuauagcccuugaggacuagucccuguucccagagcccacuuuuuuuucuuuuuuugaaauaaaauagccugucuuucagaucucaaaggcucuuuucagagccaccaaaaaaaaaaaaaaaaaaaaaaaaaaaaaaaaaaaaaaaaaaaaaaaaaaaaaaaaaaaaaaaaagaauu

SEQ ID NO: 22343 - RNA, 560 nt, Artificial Sequence
  mRNA product Design a-2 (hSL-A64-N5) comprising derived and/or modified sequence from LASV(G502-SLE-2009;Clade IV)__AIT17124__Z (opt5)
aggagaguccgcucagccagguugcagaagcggcuuagcguguguccuaaucuucucucugcguguagguaggccugugccgcaaacaagcuuaccaugggcaacaaacaggugaagacccccgaggccaaggacagcccuagagcuucccugaucccggaugccacacaccucgggccccaauucugcaaaucuuguugguuugaaaauaagggacuggucgagugcaacaaucauuaccuuugucugaacugccucacgcugcuucugagcguuggcaaucgguguccuauuugcaaaaugccccucccuaccaagcugcgccccuccgugacaccuaccgcgccgcccacaagagcugccgacucuaucgggccucccccuuauagccccugaggacuagucccuguucccagagcccacuuuuuuuucuuuuuuugaaauaaaauagccugucuuucagaucucaaaggcucuuuucagagccaccaaaaaaaaaaaaaaaaaaaaaaaaaaaaaaaaaaaaaaaaaaaaaaaaaaaaaaaaaaaaaaaaagaauu

SEQ ID NO: 22344 - RNA, 560 nt, Artificial Sequence
  mRNA product Design a-2 (hSL-A64-N5) comprising derived and/or modified sequence from LASV(G733-SLE-2010;Clade IV)__AIT17152__Z (opt5)
aggagaguccgcucagccagguugcagaagcggcuuagcguguguccuaaucuucucucugcguguagguaggccugugccgcaaacaagcuuaccaugggcaacaagcaggccaaaacccccgagacaaaggacagcccuagagcuucccugaucccggaugccacgcaccucgggccccaauucugcaaaucuuguugguuugaaaauaagggacugguggagugcaacaaucauuaccuuugucugaacugccucacccugcuucugagcgucuccaaucgguguccuauuugcaaaaugccccucccuacaaagcugcgccccucuaccgcgccuacagcuccgcccgccggcgccgcugacaacaccagaccucccccuuauagccccugaggacuagucccuguucccagagcccacuuuuuuuucuuuuuuugaaauaaaauagccugucuuucagaucucaaaggcucuuuucagagccaccaaaaaaaaaaaaaaaaaaaaaaaaaaaaaaaaaaaaaaaaaaaaaaaaaaaaaaaaaaaaaaaaagaauu

SEQ ID NO: 22345 - RNA, 572 nt, Artificial Sequence
  mRNA product Design a-2 (hSL-A64-N5) comprising derived and/or modified sequence from MOPV/LASV reassortant(IGS-1;Clade IV)__AFY05533__Z (opt5)
aggagaguccgcucagccagguugcagaagcggcuuagcguguguccuaaucuucucucugcguguagguaggccugugccgcaaacaagcuuaccaugggcaagacccagagcaaagggcaacccuccacaaaccugcucaaggagacggaaccuagacacccggugauccccgacgcccggggaaccggcccugaguucugcaaaucuuguugguuugaacgcagagggcugguccggugcaaugaucauuaccuuugucugaacugccucacacugcuucacaccguuagcgaccgcugucccaucugcaagcauaaacugccuuucagacucgagcugcagacacagcccaccgcuccuccggaaauucccccuucccagaaucccccucccuauucuccgugaggacuagucccuguucccagagcccacuuuuuuuucuuuuuuugaaauaaaauagccugucuuucagaucucaaaggcucuuuucagagccaccaaaaaaaaaaaaaaaaaaaaaaaaaaaaaaaaaaaaaaaaaaaaaaaaaaaaaaaaaaaaaaaaagaauu

SEQ ID NO: 22346 - RNA, 560 nt, Artificial Sequence
  mRNA product Design a-2 (hSL-A64-N5) comprising derived and/or modified sequence from LASV(LM776-SLE-2012;Clade IV)__AIT17824__Z (opt5)
aggagaguccgcucagccagguugcagaagcggcuuagcguguguccuaaucuucucucugcguguagguaggccugugccgcaaacaagcuuaccaugggcaacaagcaggccaaagcuagcgaggaaaagaacucccccagagccucucugaucccugacgcgacccaccucgggccgcaauucugcaaaagcuguugguuugagaauaagggacugguggaaugcaauaaccauuaccuuugucugaauugccucacacugcuucuguccgucucuaaccggugucccauuugcaaaaugccucuccccacgaagcugcgcccuagcaccacacccaccgcuccuccgacaggcgccgccgauuccaucagacccccucccuauucuccuugaggacuagucccuguucccagagcccacuuuuuuuucuuuuuuugaaauaaaauagccugucuuucagaucucaaaggcucuuuucagagccaccaaaaaaaaaaaaaaaaaaaaaaaaaaaaaaaaaaaaaaaaaaaaaaaaaaaaaaaaaaaaaaaaagaauu

SEQ ID NO: 22347 - RNA, 560 nt, Artificial Sequence
  mRNA product Design a-2 (hSL-A64-N5) comprising derived and/or modified sequence from LASV(Mad39;Clade IV)__ANH09743__Z (opt5)
aggagaguccgcucagccagguugcagaagcggcuuagcguguguccuaaucuucucucugcguguagguaggccugugccgcaaacaagcuuaccaugggcaacaagcaggccaaagcuagcgagguggaagacgggcccagagccucccugaucccugaugcgacccaccucggaccgcaauucugcaagucuuguugguuugagaauaaaagccuggucgaaugcaacaaucauuaccuuugucugaacugccucacacugcuucuguccguuucuaaucggugucccauuugcaagaugccucuccccacgcgccugaaaccuagcguggugcccaccgcuccuccgacaagagccggcgacgggacccggcccccucccuauuccccuugaggacuagucccuguucccagagcccacuuuuuuuucuuuuuuugaaauaaaauagccugucuuucagaucucaaaggcucuuuucagagccaccaaaaaaaaaaaaaaaaaaaaaaaaaaaaaaaaaaaaaaaaaaaaaaaaaaaaaaaaaaaaaaaaagaauu

SEQ ID NO: 22348 - RNA, 560 nt, Artificial Sequence
  mRNA product Design a-2 (hSL-A64-N5) comprising derived and/or modified sequence from LASV(Z0947-SLE-2011;Clade IV)__AIT17838__Z (opt5)
aggagaguccgcucagccagguugcagaagcggcuuagcguguguccuaaucuucucucugcguguagguaggccugugccgcaaacaagcuuaccaugggcaacaagcaggccaaagugcccgagagcaaggacuccccuagagcuucucugaucccggaugccacccaccucgggccccaauucugcaaaagcuguugguuugaaaauaagggacuggucgagugcaacaaucauuaccuuugucugaacugccucacacugcuucuguccguuucuaaucgguguccuauuugcaaaaugccccucccuacgaagcugaagcccagcgcggcuccuaccgccccgcccacaggcgccgcugacuccauccgcccucccccuuauucucccugaggacuagucccuguucccagagcccacuuuuuuuucuuuuuuugaaauaaaauagccugucuuucagaucucaaaggcucuuuucagagccaccaaaaaaaaaaaaaaaaaaaaaaaaaaaaaaaaaaaaaaaaaaaaaaaaaaaaaaaaaaaaaaaaagaauu

SEQ ID NO: 22349 - RNA, 591 nt, Artificial Sequence
  mRNA product Design a-2 (hSL-A100) comprising derived and/or modified sequence from LASV(Josiah;Clade IV)__ADY11072/NP_694871__Z (opt1)
aggagaguccgcucagccagguugcagaagcggcuuagcguguguccuaaucuucucucugcguguagguaggccugugccgcaaacaagcuuaccaugggcaacaagcaggccaaggcccccgagagcaaggacuccccgcgcgcgagccugauccccgacgccacccaccucgggccccaguucugcaaguccugcugguucgagaacaagggccugguggagugcaacaaccacuaccugugccucaacugccugacccugcuccugagcgucuccaaccggugccccaucugcaagaugccgcugcccacgaagcuccgccccagcgccgcccccaccgccccgcccaccggggcggccgacuccauccggcccccgcccuacagccccugaggacuagucccuguucccagagcccacuuuuuuuucuuuuuuugaaauaaaauagccugucuuucagaucucaaaggcucuuuucagagccaccaaaaaaaaaaaaaaaaaaaaaaaaaaaaaaaaaaaaaaaaaaaaaaaaaaaaaaaaaaaaaaaaaaaaaaaaaaaaaaaaaaaaaaaaaaaaaaaaaaaaa

SEQ ID NO: 22350 - RNA, 594 nt, Artificial Sequence
  mRNA product Design a-2 (hSL-A100) comprising derived and/or modified sequence from LASV(Pinneo-NIG-1969;Clade I)__AIT17834__Z (opt1)
aggagaguccgcucagccagguugcagaagcggcuuagcguguguccuaaucuucucucugcguguagguaggccugugccgcaaacaagcuuaccaugggcaacaagcagacccgcagcccgcccaagcccgagcacccccggcccacccugcuccccgacgccucccaccuggggccccaguucugcaagagcugcugguucgagaacaagggccugguggagugcaacaaccacuaccucugccugaacugccugacgcuccugcuguccgucagcgaccgcugccccaucugcaagaugccccuccccaccaagcuggccgugcggacccagcccuccgcgccgccccugaaccaggggaacacccagagcagcccgccgcccuacucccccugaggacuagucccuguucccagagcccacuuuuuuuucuuuuuuugaaauaaaauagccugucuuucagaucucaaaggcucuuuucagagccaccaaaaaaaaaaaaaaaaaaaaaaaaaaaaaaaaaaaaaaaaaaaaaaaaaaaaaaaaaaaaaaaaaaaaaaaaaaaaaaaaaaaaaaaaaaaaaaaaaaaaa

SEQ ID NO: 22351 - RNA, 591 nt, Artificial Sequence
  mRNA product Design a-2 (hSL-A100) comprising derived and/or modified sequence from LASV(Nig08-04;Clade II)__ADU56612__Z (opt1)
aggagaguccgcucagccagguugcagaagcggcuuagcguguguccuaaucuucucucugcguguagguaggccugugccgcaaacaagcuuaccaugggcaaccgccagacccggcccaccgaggccacggagcagagccgcgcccaccuggugccggacgccucccaccucgggccccaguucugcaagagcugcugguucgagaaccggggccuggucgagugcaacaaccacuaccugugccucaacugccugucccugcuccugagcguguccagccgcugccccaucugcaagaugccccugccgacccggcucaaggccuccgcccagcccagcgccccgcccaccgaggcgccccagaacaccacgcccccgcccuacacccccugaggacuagucccuguucccagagcccacuuuuuuuucuuuuuuugaaauaaaauagccugucuuucagaucucaaaggcucuuuucagagccaccaaaaaaaaaaaaaaaaaaaaaaaaaaaaaaaaaaaaaaaaaaaaaaaaaaaaaaaaaaaaaaaaaaaaaaaaaaaaaaaaaaaaaaaaaaaaaaaaaaaaa

SEQ ID NO: 22352 - RNA, 591 nt, Artificial Sequence
  mRNA product Design a-2 (hSL-A100) comprising derived and/or modified sequence from LASV(Nig08-A19;Clade III)__ADU56620__Z (opt1)
aggagaguccgcucagccagguugcagaagcggcuuagcguguguccuaaucuucucucugcguguagguaggccugugccgcaaacaagcuuaccaugggcgggaagcacaccaagccccagcgcgagagcaacuccccgcgggccagccugauccccgacgccacccaccucggcccccaguucugcaaguccugcugguucgagaacaaggggcugguggagugcaacaaccacuaccugugccucaacugccugacgcugcuccugagcguguccaaccgcugccccaucugcaagaugccccugcccacccggcuccgcgccagcaccaaccccaccgcgccccagguggagcaggucggcccgacgaacccgccgcccuacucccccugaggacuagucccuguucccagagcccacuuuuuuuucuuuuuuugaaauaaaauagccugucuuucagaucucaaaggcucuuuucagagccaccaaaaaaaaaaaaaaaaaaaaaaaaaaaaaaaaaaaaaaaaaaaaaaaaaaaaaaaaaaaaaaaaaaaaaaaaaaaaaaaaaaaaaaaaaaaaaaaaaaaaa

SEQ ID NO: 22353 - RNA, 591 nt, Artificial Sequence
  mRNA product Design a-2 (hSL-A100) comprising derived and/or modified sequence from LASV(AV;Clade V)__CCA30312__Z (opt1)
aggagaguccgcucagccagguugcagaagcggcuuagcguguguccuaaucuucucucugcguguagguaggccugugccgcaaacaagcuuaccaugggcaaccgccaggccaagaaccccgagguggagaacagcccccgggccucccugauccccgacgcgacccaccucgggccccaguucugcaagagcugcugguucgagaacaagggccuggucgagugcaacaaccacuaccugugccucaacugccugucccugcuccugagcguguccaaccgcugccccaucugcaagaugccgcugcccacccggcuccgccccacgaccacccccaccgccccgcagaucaucaaggagaacacgaccaacccgccgcccuacacccccugaggacuagucccuguucccagagcccacuuuuuuuucuuuuuuugaaauaaaauagccugucuuucagaucucaaaggcucuuuucagagccaccaaaaaaaaaaaaaaaaaaaaaaaaaaaaaaaaaaaaaaaaaaaaaaaaaaaaaaaaaaaaaaaaaaaaaaaaaaaaaaaaaaaaaaaaaaaaaaaaaaaaa

SEQ ID NO: 22354 - RNA, 591 nt, Artificial Sequence
  mRNA product Design a-2 (hSL-A100) comprising derived and/or modified sequence from LASV(Togo/2016/7082;Clade VI)__AMR44579__Z (opt1)
aggagaguccgcucagccagguugcagaagcggcuuagcguguguccuaaucuucucucugcguguagguaggccugugccgcaaacaagcuuaccaugggcgcccgccagaccaagcagccccagaucgaggggagcccccgggccucccuggugcccgacgcgagccaccucggcccccaguucugcaaguccugcugguucgagaacaaggggcuggucgagugcaacaaccacuaccugugccucaacugccugagccugcuccuguccgugagcaaccgcugccccaucugcaagaugccgcugcccaccaagcuccggguguccagcgcccccuccgcgcccccggccgccacggcccagcccggcaccccgccgcccuacagccccugaggacuagucccuguucccagagcccacuuuuuuuucuuuuuuugaaauaaaauagccugucuuucagaucucaaaggcucuuuucagagccaccaaaaaaaaaaaaaaaaaaaaaaaaaaaaaaaaaaaaaaaaaaaaaaaaaaaaaaaaaaaaaaaaaaaaaaaaaaaaaaaaaaaaaaaaaaaaaaaaaaaaa

SEQ ID NO: 22355 - RNA, 591 nt, Artificial Sequence
  mRNA product Design a-2 (hSL-A100) comprising derived and/or modified sequence from LASV(KAK-428;Clade n.d. (VII))__ANH09761__Z (opt1)
aggagaguccgcucagccagguugcagaagcggcuuagcguguguccuaaucuucucucugcguguagguaggccugugccgcaaacaagcuuaccaugggcaacaaggggaccaagcccacccagaacagcgagcccucccgcgccaaccuggugcccgacgccagcuaccucggcccccaguucugcaaguccugcugguucgagaacaaggggcuggucgagugcaacaaccacuaccugugccucaacugccugacgaugcugcucagcguguccaaccggugccccaucugcaagaugccgcugcccaccaagaucaaggccagcggcucccccagcgcgcccccgaccgaggccaacuccgccgugagcccgccgcccuacacccccugaggacuagucccuguucccagagcccacuuuuuuuucuuuuuuugaaauaaaauagccugucuuucagaucucaaaggcucuuuucagagccaccaaaaaaaaaaaaaaaaaaaaaaaaaaaaaaaaaaaaaaaaaaaaaaaaaaaaaaaaaaaaaaaaaaaaaaaaaaaaaaaaaaaaaaaaaaaaaaaaaaaaa

SEQ ID NO: 22356 - RNA, 591 nt, Artificial Sequence
  mRNA product Design a-2 (hSL-A100) comprising derived and/or modified sequence from LASV(ISTH0009-NIG-2011;Clade II)__AIT17402__Z (opt1)
aggagaguccgcucagccagguugcagaagcggcuuagcguguguccuaaucuucucucugcguguagguaggccugugccgcaaacaagcuuaccaugggcaaccgccaggccaagagcaccaagguggacgagcaccagcgggcccaccugguccccgacgcgucccaccucgggccccaguucugcaagagcugcugguucgagaaccgcggccugguggagugcaacaaccacuaccugugccucaacugccugucccugcuccugagcguguccagccggugccccaucugcaagaugccccugcccaccaagcucaaggccgccgcccagccguccgcccccagcacggagaccauccagaacaccaccccgccgcccuacacgcccugaggacuagucccuguucccagagcccacuuuuuuuucuuuuuuugaaauaaaauagccugucuuucagaucucaaaggcucuuuucagagccaccaaaaaaaaaaaaaaaaaaaaaaaaaaaaaaaaaaaaaaaaaaaaaaaaaaaaaaaaaaaaaaaaaaaaaaaaaaaaaaaaaaaaaaaaaaaaaaaaaaaaa

SEQ ID NO: 22357 - RNA, 591 nt, Artificial Sequence
  mRNA product Design a-2 (hSL-A100) comprising derived and/or modified sequence from LASV(ISTH2010-NIG-2012;Clade II)__AIT17480__Z (opt1)
aggagaguccgcucagccagguugcagaagcggcuuagcguguguccuaaucuucucucugcguguagguaggccugugccgcaaacaagcuuaccaugggcaaccgccacgccaagagcaccaagguggacgagcaccagcgggcccaccugguccccgacgcgucccaccucgggccccaguucugcaagagcugcugguucgagaaccgcggccugguggagugcaacaaccacuaccugugccucaacugccugucccugcuccugagcguguccagccggugccccaucugcaagaugccccugcccaccaagcucaaggccgccgcccagccguccgcccccagcacggaggucauccaguccaccaccccgccgcccuacacccccugaggacuagucccuguucccagagcccacuuuuuuuucuuuuuuugaaauaaaauagccugucuuucagaucucaaaggcucuuuucagagccaccaaaaaaaaaaaaaaaaaaaaaaaaaaaaaaaaaaaaaaaaaaaaaaaaaaaaaaaaaaaaaaaaaaaaaaaaaaaaaaaaaaaaaaaaaaaaaaaaaaaaa

SEQ ID NO: 22358 - RNA, 591 nt, Artificial Sequence
  mRNA product Design a-2 (hSL-A100) comprising derived and/or modified sequence from LASV(Lassa virus/H.sapiens-wt/NGA/2016/ISTH_0017;Clade II)__AVO03713__Z (opt1)
aggagaguccgcucagccagguugcagaagcggcuuagcguguguccuaaucuucucucugcguguagguaggccugugccgcaaacaagcuuaccaugggcaaccgccaggccaagagcaccaagguggacgagcaccagcgggcccaccugguccccgacgcgucccaccucgggccccaguucugcaagagcugcugguucgagaaccgcggccugguggagugcaacaaccacuaccugugccucaacugccugucccugcuccugagcguguccagccggugccccaucugcaagaugccccugcccaccaagcucaaggccgccacgcagccguccgcccccagcaccgaggucaaccagaacaccaccccgccgcccuacacgcccugaggacuagucccuguucccagagcccacuuuuuuuucuuuuuuugaaauaaaauagccugucuuucagaucucaaaggcucuuuucagagccaccaaaaaaaaaaaaaaaaaaaaaaaaaaaaaaaaaaaaaaaaaaaaaaaaaaaaaaaaaaaaaaaaaaaaaaaaaaaaaaaaaaaaaaaaaaaaaaaaaaaaa

SEQ ID NO: 22359 - RNA, 591 nt, Artificial Sequence
  mRNA product Design a-2 (hSL-A100) comprising derived and/or modified sequence from LASV(Lassa virus/H.sapiens-wt/NGA/2018/ISTH_0959;Clade II)__AVV65084__Z (opt1)
aggagaguccgcucagccagguugcagaagcggcuuagcguguguccuaaucuucucucugcguguagguaggccugugccgcaaacaagcuuaccaugggcaacaagcaggccaagagcaccaagguggacgagcaccagcgcgcccaccugguccccgacgcgucccaccucgggccccaguucugcaagagcugcugguucgagaaccggggccugguggagugcaacaaccacuaccugugccucaacugccugucccugcuccugagcguguccagccgcugccccaucugcaagaugccccugcccaccaagcucaaggccgccgcccagccguccgcccccagcacggaggcgauccaguccaccaccccgccgcccuacacccccugaggacuagucccuguucccagagcccacuuuuuuuucuuuuuuugaaauaaaauagccugucuuucagaucucaaaggcucuuuucagagccaccaaaaaaaaaaaaaaaaaaaaaaaaaaaaaaaaaaaaaaaaaaaaaaaaaaaaaaaaaaaaaaaaaaaaaaaaaaaaaaaaaaaaaaaaaaaaaaaaaaaaa

SEQ ID NO: 22360 - RNA, 591 nt, Artificial Sequence
  mRNA product Design a-2 (hSL-A100) comprising derived and/or modified sequence from LASV(LASV003-NIG-2008;Clade II)__AIT17578__Z (opt1)
aggagaguccgcucagccagguugcagaagcggcuuagcguguguccuaaucuucucucugcguguagguaggccugugccgcaaacaagcuuaccaugggcaaccgccaggccaagagcaccaagguggacgagcaccagcgggcccaccugguccccgacgcgucccaccucgggccccaguucugcaagagcugcugguucgagaacaagggccugguggagugcaacaaccacuaccugugccucaacugccugucccugcuccugagcguguccagccgcugccccaucugcaagaugccccugcccaccaagcuccgggccgccgcccagccguccgcccccagcacggaguccgcgcagaacaccgccccgccgcccuacgcccccugaggacuagucccuguucccagagcccacuuuuuuuucuuuuuuugaaauaaaauagccugucuuucagaucucaaaggcucuuuucagagccaccaaaaaaaaaaaaaaaaaaaaaaaaaaaaaaaaaaaaaaaaaaaaaaaaaaaaaaaaaaaaaaaaaaaaaaaaaaaaaaaaaaaaaaaaaaaaaaaaaaaaa

SEQ ID NO: 22361 - RNA, 591 nt, Artificial Sequence
  mRNA product Design a-2 (hSL-A100) comprising derived and/or modified sequence from LASV(LASV035-NIG-2009;Clade II)__AIT17586__Z (opt1)
aggagaguccgcucagccagguugcagaagcggcuuagcguguguccuaaucuucucucugcguguagguaggccugugccgcaaacaagcuuaccaugggcaacaagcaggccaagagcaccaagguggacgagcaccagcgcgcccaccugguccccgacgcgucccaccucgggccccaguucugcaagagcugcugguucgagaaccggggccugguggagugcaacaaccacuaccugugccucaacugccugucccugcuccugagcguguccagccgcugccccaucugcaagaugccccugcccacccggcucaaggccgccgcccagccguccgcccccagcacggaggucacccagaacaccaccccgccgcccuacacgcccugaggacuagucccuguucccagagcccacuuuuuuuucuuuuuuugaaauaaaauagccugucuuucagaucucaaaggcucuuuucagagccaccaaaaaaaaaaaaaaaaaaaaaaaaaaaaaaaaaaaaaaaaaaaaaaaaaaaaaaaaaaaaaaaaaaaaaaaaaaaaaaaaaaaaaaaaaaaaaaaaaaaaa

SEQ ID NO: 22362 - RNA, 591 nt, Artificial Sequence
  mRNA product Design a-2 (hSL-A100) comprising derived and/or modified sequence from LASV(LASV1000-NIG-2009;Clade II)__AIT17780__Z (opt1)
aggagaguccgcucagccagguugcagaagcggcuuagcguguguccuaaucuucucucugcguguagguaggccugugccgcaaacaagcuuaccaugggcaaccgccagaccaagagcaccaagguggacgagcaccagcgggccuaccugguccccgacgccucccuccuggggccccaguucugcaagagcugcugguucgagaacaagggccugguggagugcaacaaccacuaccucugccugaacugccugucccuccugcugagcguguccagccgcugccccaucugcaagaugccccuccccacgcggcugaaggcggccgcccagcccuccgccccgcccaccgaggccauccagaacaccacgccgccgcccuacacccccugaggacuagucccuguucccagagcccacuuuuuuuucuuuuuuugaaauaaaauagccugucuuucagaucucaaaggcucuuuucagagccaccaaaaaaaaaaaaaaaaaaaaaaaaaaaaaaaaaaaaaaaaaaaaaaaaaaaaaaaaaaaaaaaaaaaaaaaaaaaaaaaaaaaaaaaaaaaaaaaaaaaaa

SEQ ID NO: 22363 - RNA, 591 nt, Artificial Sequence
  mRNA product Design a-2 (hSL-A100) comprising derived and/or modified sequence from LASV(LASV221-NIG-2010;Clade II)__AIT17622__Z (opt1)
aggagaguccgcucagccagguugcagaagcggcuuagcguguguccuaaucuucucucugcguguagguaggccugugccgcaaacaagcuuaccaugggcaaccgccaggccaagagcaccaagguggacgagcaccagcgggcccaccugguccccgacgcgucccaccucgggccccaguucugcaagagcugcugguucgagaaccgcggccugguggagugcaacaaccacuaccugugccucaacugccugucccugcuccugagcguguccagccggugccccaucugcaagaugccccugcccaccaagcucaaggccgccacgcagccguccgcccccagcaccgaggucacccagaacaccaucccgccgcccuacucccccugaggacuagucccuguucccagagcccacuuuuuuuucuuuuuuugaaauaaaauagccugucuuucagaucucaaaggcucuuuucagagccaccaaaaaaaaaaaaaaaaaaaaaaaaaaaaaaaaaaaaaaaaaaaaaaaaaaaaaaaaaaaaaaaaaaaaaaaaaaaaaaaaaaaaaaaaaaaaaaaaaaaaa

SEQ ID NO: 22364 - RNA, 591 nt, Artificial Sequence
  mRNA product Design a-2 (hSL-A100) comprising derived and/or modified sequence from LASV(LASV237-NIG-2010;Clade II)__AIT17636__Z (opt1)
aggagaguccgcucagccagguugcagaagcggcuuagcguguguccuaaucuucucucugcguguagguaggccugugccgcaaacaagcuuaccaugggcaaccgccaggccaagagcaccaagguggacgagcaccagcgggcccaccugguccccgacgcgucccaccucgggccccaguucugcaagagcugcugguucgagaaccgcggccugguggagugcaacaaccacuaccugugccucaacugccugucccugcuccugagcguguccagccggugccccaucugcaagaugccccugcccaccaagcucaaggccgccgcccagccguccgcccccagcaucgagacgauccagaacaccaccccgccgcccuacacccccugaggacuagucccuguucccagagcccacuuuuuuuucuuuuuuugaaauaaaauagccugucuuucagaucucaaaggcucuuuucagagccaccaaaaaaaaaaaaaaaaaaaaaaaaaaaaaaaaaaaaaaaaaaaaaaaaaaaaaaaaaaaaaaaaaaaaaaaaaaaaaaaaaaaaaaaaaaaaaaaaaaaaa

SEQ ID NO: 22365 - RNA, 591 nt, Artificial Sequence
  mRNA product Design a-2 (hSL-A100) comprising derived and/or modified sequence from LASV(LASV253-NIG-2011;Clade II)__AIT17668__Z (opt1)
aggagaguccgcucagccagguugcagaagcggcuuagcguguguccuaaucuucucucugcguguagguaggccugugccgcaaacaagcuuaccaugggcaaccgccaggccaagagcaccaagguggacgagcaccagcgggcccaccugguccccgacgcgucccaccucgggccccaguucugcaagagcugcugguucgagaacaagggccugguggagugcaacaaccacuaccugugccucaacugccugucccugcuccugagcguguccagccgcugccccaucugcaagaugccccugcccaccaagcucaagacgaccgcccagccguccgccccgcccaccgaggccgccaagaacaccgcgcccccgcccuacgcccccugaggacuagucccuguucccagagcccacuuuuuuuucuuuuuuugaaauaaaauagccugucuuucagaucucaaaggcucuuuucagagccaccaaaaaaaaaaaaaaaaaaaaaaaaaaaaaaaaaaaaaaaaaaaaaaaaaaaaaaaaaaaaaaaaaaaaaaaaaaaaaaaaaaaaaaaaaaaaaaaaaaaaa

SEQ ID NO: 22366 - RNA, 591 nt, Artificial Sequence
  mRNA product Design a-2 (hSL-A100) comprising derived and/or modified sequence from LASV(G1180-SLE-2010;Clade IV)__AIT17166__Z (opt1)
aggagaguccgcucagccagguugcagaagcggcuuagcguguguccuaaucuucucucugcguguagguaggccugugccgcaaacaagcuuaccaugggcaacaagcaggccaaggcccccgaggcgaaggacagcccgcgcgccucccugauccccgacgccacccaccucgggccccaguucugcaagagcugcugguucgagaccaagggccugguggagugcaacaaccacuaccugugccucaacugccugacgcugcuccuguccgucagcaaccggugccccaucugcaagaugccgcugcccaccaagcuccgccccuccgccacccccaccgccccgcccacggaggcggccgacagcaucgggcccccgcccuacucccccugaggacuagucccuguucccagagcccacuuuuuuuucuuuuuuugaaauaaaauagccugucuuucagaucucaaaggcucuuuucagagccaccaaaaaaaaaaaaaaaaaaaaaaaaaaaaaaaaaaaaaaaaaaaaaaaaaaaaaaaaaaaaaaaaaaaaaaaaaaaaaaaaaaaaaaaaaaaaaaaaaaaaa

SEQ ID NO: 22367 - RNA, 591 nt, Artificial Sequence
  mRNA product Design a-2 (hSL-A100) comprising derived and/or modified sequence from LASV(G1442-SLE-2011;Clade IV)__AIT17178__Z (opt1)
aggagaguccgcucagccagguugcagaagcggcuuagcguguguccuaaucuucucucugcguguagguaggccugugccgcaaacaagcuuaccaugggcaacaagcaggccaaggccagcgaggcgaaggacagcccccgcgccucccugaucccggacgccacccaccucgggccccaguucugcaaguccugcugguucgagaacaagggccugguggagugcaacaaccacuaccugugccucaacugccugagccugcuccuguccgucagcucccggugccccaucugcaagaugccccugccgacccgccuccggcccagcacggcccccaccgcgcccccggcccgcgccggggacaacaucaagcccccgcccuacucccccugaggacuagucccuguucccagagcccacuuuuuuuucuuuuuuugaaauaaaauagccugucuuucagaucucaaaggcucuuuucagagccaccaaaaaaaaaaaaaaaaaaaaaaaaaaaaaaaaaaaaaaaaaaaaaaaaaaaaaaaaaaaaaaaaaaaaaaaaaaaaaaaaaaaaaaaaaaaaaaaaaaaaa

SEQ ID NO: 22368 - RNA, 591 nt, Artificial Sequence
  mRNA product Design a-2 (hSL-A100) comprising derived and/or modified sequence from LASV(G502-SLE-2009;Clade IV)__AIT17124__Z (opt1)
aggagaguccgcucagccagguugcagaagcggcuuagcguguguccuaaucuucucucugcguguagguaggccugugccgcaaacaagcuuaccaugggcaacaagcaggucaagacccccgaggccaaggacagcccccgcgccucccugauccccgacgcgacccaccucgggccccaguucugcaagagcugcugguucgagaacaagggccugguggagugcaacaaccacuaccugugccucaacugccugacgcugcuccuguccguggggaaccggugccccaucugcaagaugccgcugcccaccaagcuccgccccagcgugacccccaccgccccgcccacgcgggccgccgacuccaucggcccgccgcccuacagccccugaggacuagucccuguucccagagcccacuuuuuuuucuuuuuuugaaauaaaauagccugucuuucagaucucaaaggcucuuuucagagccaccaaaaaaaaaaaaaaaaaaaaaaaaaaaaaaaaaaaaaaaaaaaaaaaaaaaaaaaaaaaaaaaaaaaaaaaaaaaaaaaaaaaaaaaaaaaaaaaaaaaaa

SEQ ID NO: 22369 - RNA, 591 nt, Artificial Sequence
  mRNA product Design a-2 (hSL-A100) comprising derived and/or modified sequence from LASV(G733-SLE-2010;Clade IV)__AIT17152__Z (opt1)
aggagaguccgcucagccagguugcagaagcggcuuagcguguguccuaaucuucucucugcguguagguaggccugugccgcaaacaagcuuaccaugggcaacaagcaggccaagacccccgagaccaaggacagcccgcgcgccucccugauccccgacgcgacgcaccucgggccccaguucugcaagagcugcugguucgagaacaagggccugguggagugcaacaaccacuaccugugccucaacugccugacccugcuccuguccgucagcaaccggugccccaucugcaagaugccgcugcccaccaagcuccgccccuccaccgcccccacggccccgcccgccggggccgcggacaacacccggcccccgcccuacagccccugaggacuagucccuguucccagagcccacuuuuuuuucuuuuuuugaaauaaaauagccugucuuucagaucucaaaggcucuuuucagagccaccaaaaaaaaaaaaaaaaaaaaaaaaaaaaaaaaaaaaaaaaaaaaaaaaaaaaaaaaaaaaaaaaaaaaaaaaaaaaaaaaaaaaaaaaaaaaaaaaaaaaa

SEQ ID NO: 22370 - RNA, 603 nt, Artificial Sequence
  mRNA product Design a-2 (hSL-A100) comprising derived and/or modified sequence from MOPV/LASV reassortant(IGS-1;Clade IV)__AFY05533__Z (opt1)
aggagaguccgcucagccagguugcagaagcggcuuagcguguguccuaaucuucucucugcguguagguaggccugugccgcaaacaagcuuaccaugggcaagacccagagcaaggggcagcccuccaccaaccugcucaaggagacggagccccgccaccccgugauccccgacgcccggggcaccgggcccgaguucugcaagagcugcugguucgagcgccggggccugguccgcugcaacgaccacuaccugugccucaacugccugacccugcuccacaccguguccgaccggugccccaucugcaagcacaagcugcccuuccgccuggagcuccagacgcagcccaccgccccgcccgagaucccgcccagccagaacccgccgcccuacucccccugaggacuagucccuguucccagagcccacuuuuuuuucuuuuuuugaaauaaaauagccugucuuucagaucucaaaggcucuuuucagagccaccaaaaaaaaaaaaaaaaaaaaaaaaaaaaaaaaaaaaaaaaaaaaaaaaaaaaaaaaaaaaaaaaaaaaaaaaaaaaaaaaaaaaaaaaaaaaaaaaaaaaa

SEQ ID NO: 22371 - RNA, 591 nt, Artificial Sequence
  mRNA product Design a-2 (hSL-A100) comprising derived and/or modified sequence from LASV(LM776-SLE-2012;Clade IV)__AIT17824__Z (opt1)
aggagaguccgcucagccagguugcagaagcggcuuagcguguguccuaaucuucucucugcguguagguaggccugugccgcaaacaagcuuaccaugggcaacaagcaggccaaggccagcgaggagaagaacagcccccgcgccucccugaucccggacgccacccaccucgggccccaguucugcaaguccugcugguucgagaacaagggccugguggagugcaacaaccacuaccugugccucaacugccugacccugcuccugagcgucuccaaccggugccccaucugcaagaugccccugccgacgaagcuccgccccagcaccacccccaccgcgcccccgacgggggccgccgacuccauccggcccccgcccuacagccccugaggacuagucccuguucccagagcccacuuuuuuuucuuuuuuugaaauaaaauagccugucuuucagaucucaaaggcucuuuucagagccaccaaaaaaaaaaaaaaaaaaaaaaaaaaaaaaaaaaaaaaaaaaaaaaaaaaaaaaaaaaaaaaaaaaaaaaaaaaaaaaaaaaaaaaaaaaaaaaaaaaaaa

SEQ ID NO: 22372 - RNA, 591 nt, Artificial Sequence
  mRNA product Design a-2 (hSL-A100) comprising derived and/or modified sequence from LASV(Mad39;Clade IV)__ANH09743__Z (opt1)
aggagaguccgcucagccagguugcagaagcggcuuagcguguguccuaaucuucucucugcguguagguaggccugugccgcaaacaagcuuaccaugggcaacaagcaggccaaggccagcgagguggaggacgggccccgcgccucccugauccccgacgccacccaccucggcccccaguucugcaagagcugcugguucgagaacaagucccuggucgagugcaacaaccacuaccugugccucaacugccugacccugcuccugagcguguccaaccggugccccaucugcaagaugccccugccgacgcgccucaagcccagcgugguccccaccgcgcccccgacccgggccggggacggcacccgcccgccgcccuacucccccugaggacuagucccuguucccagagcccacuuuuuuuucuuuuuuugaaauaaaauagccugucuuucagaucucaaaggcucuuuucagagccaccaaaaaaaaaaaaaaaaaaaaaaaaaaaaaaaaaaaaaaaaaaaaaaaaaaaaaaaaaaaaaaaaaaaaaaaaaaaaaaaaaaaaaaaaaaaaaaaaaaaaa

SEQ ID NO: 22373 - RNA, 591 nt, Artificial Sequence
  mRNA product Design a-2 (hSL-A100) comprising derived and/or modified sequence from LASV(Z0947-SLE-2011;Clade IV)__AIT17838__Z (opt1)
aggagaguccgcucagccagguugcagaagcggcuuagcguguguccuaaucuucucucugcguguagguaggccugugccgcaaacaagcuuaccaugggcaacaagcaggccaaggugcccgagagcaaggacuccccgcgcgccagccugauccccgacgcgacccaccucgggccccaguucugcaaguccugcugguucgagaacaagggccuggucgagugcaacaaccacuaccugugccucaacugccugacccugcuccugagcguguccaaccgcugccccaucugcaagaugccgcugcccacgaagcucaagcccagcgccgcccccaccgccccgcccaccggggccgcggacuccauccggcccccgcccuacagccccugaggacuagucccuguucccagagcccacuuuuuuuucuuuuuuugaaauaaaauagccugucuuucagaucucaaaggcucuuuucagagccaccaaaaaaaaaaaaaaaaaaaaaaaaaaaaaaaaaaaaaaaaaaaaaaaaaaaaaaaaaaaaaaaaaaaaaaaaaaaaaaaaaaaaaaaaaaaaaaaaaaaaa

SEQ ID NO: 22374 - RNA, 591 nt, Artificial Sequence
  mRNA product Design a-2 (hSL-A100) comprising derived and/or modified sequence from LASV(Josiah;Clade IV)__ADY11072/NP_694871__Z (opt4)
aggagaguccgcucagccagguugcagaagcggcuuagcguguguccuaaucuucucucugcguguagguaggccugugccgcaaacaagcuuaccaugggcaacaagcaggccaaggcccccgagagcaaggacagccccagagccagccugauccccgacgccacccaccugggcccccaguucugcaagagcugcugguucgagaacaagggccugguggagugcaacaaccacuaccugugccugaacugccugacccugcugcugagcgugagcaacagaugccccaucugcaagaugccccugcccaccaagcugagacccagcgccgcccccaccgccccccccaccggcgccgccgacagcaucagacccccccccuacagccccugaggacuagucccuguucccagagcccacuuuuuuuucuuuuuuugaaauaaaauagccugucuuucagaucucaaaggcucuuuucagagccaccaaaaaaaaaaaaaaaaaaaaaaaaaaaaaaaaaaaaaaaaaaaaaaaaaaaaaaaaaaaaaaaaaaaaaaaaaaaaaaaaaaaaaaaaaaaaaaaaaaaaa

SEQ ID NO: 22375 - RNA, 594 nt, Artificial Sequence
  mRNA product Design a-2 (hSL-A100) comprising derived and/or modified sequence from LASV(Pinneo-NIG-1969;Clade I)__AIT17834__Z (opt4)
aggagaguccgcucagccagguugcagaagcggcuuagcguguguccuaaucuucucucugcguguagguaggccugugccgcaaacaagcuuaccaugggcaacaagcagaccagaagcccccccaagcccgagcaccccagacccacccugcugcccgacgccagccaccugggcccccaguucugcaagagcugcugguucgagaacaagggccugguggagugcaacaaccacuaccugugccugaacugccugacccugcugcugagcgugagcgacagaugccccaucugcaagaugccccugcccaccaagcuggccgugagaacccagcccagcgcccccccccugaaccagggcaacacccagagcagccccccccccuacagccccugaggacuagucccuguucccagagcccacuuuuuuuucuuuuuuugaaauaaaauagccugucuuucagaucucaaaggcucuuuucagagccaccaaaaaaaaaaaaaaaaaaaaaaaaaaaaaaaaaaaaaaaaaaaaaaaaaaaaaaaaaaaaaaaaaaaaaaaaaaaaaaaaaaaaaaaaaaaaaaaaaaaaa

SEQ ID NO: 22376 - RNA, 591 nt, Artificial Sequence
  mRNA product Design a-2 (hSL-A100) comprising derived and/or modified sequence from LASV(Nig08-04;Clade II)__ADU56612__Z (opt4)
aggagaguccgcucagccagguugcagaagcggcuuagcguguguccuaaucuucucucugcguguagguaggccugugccgcaaacaagcuuaccaugggcaacagacagaccagacccaccgaggccaccgagcagagcagagcccaccuggugcccgacgccagccaccugggcccccaguucugcaagagcugcugguucgagaacagaggccugguggagugcaacaaccacuaccugugccugaacugccugagccugcugcugagcgugagcagcagaugccccaucugcaagaugccccugcccaccagacugaaggccagcgcccagcccagcgccccccccaccgaggccccccagaacaccacccccccccccuacacccccugaggacuagucccuguucccagagcccacuuuuuuuucuuuuuuugaaauaaaauagccugucuuucagaucucaaaggcucuuuucagagccaccaaaaaaaaaaaaaaaaaaaaaaaaaaaaaaaaaaaaaaaaaaaaaaaaaaaaaaaaaaaaaaaaaaaaaaaaaaaaaaaaaaaaaaaaaaaaaaaaaaaaa

SEQ ID NO: 22377 - RNA, 591 nt, Artificial Sequence
  mRNA product Design a-2 (hSL-A100) comprising derived and/or modified sequence from LASV(Nig08-A19;Clade III)__ADU56620__Z (opt4)
aggagaguccgcucagccagguugcagaagcggcuuagcguguguccuaaucuucucucugcguguagguaggccugugccgcaaacaagcuuaccaugggcggcaagcacaccaagccccagagagagagcaacagccccagagccagccugauccccgacgccacccaccugggcccccaguucugcaagagcugcugguucgagaacaagggccugguggagugcaacaaccacuaccugugccugaacugccugacccugcugcugagcgugagcaacagaugccccaucugcaagaugccccugcccaccagacugagagccagcaccaaccccaccgccccccagguggagcaggugggccccaccaaccccccccccuacagccccugaggacuagucccuguucccagagcccacuuuuuuuucuuuuuuugaaauaaaauagccugucuuucagaucucaaaggcucuuuucagagccaccaaaaaaaaaaaaaaaaaaaaaaaaaaaaaaaaaaaaaaaaaaaaaaaaaaaaaaaaaaaaaaaaaaaaaaaaaaaaaaaaaaaaaaaaaaaaaaaaaaaaa

SEQ ID NO: 22378 - RNA, 591 nt, Artificial Sequence
  mRNA product Design a-2 (hSL-A100) comprising derived and/or modified sequence from LASV(AV;Clade V)__CCA30312__Z (opt4)
aggagaguccgcucagccagguugcagaagcggcuuagcguguguccuaaucuucucucugcguguagguaggccugugccgcaaacaagcuuaccaugggcaacagacaggccaagaaccccgagguggagaacagccccagagccagccugauccccgacgccacccaccugggcccccaguucugcaagagcugcugguucgagaacaagggccugguggagugcaacaaccacuaccugugccugaacugccugagccugcugcugagcgugagcaacagaugccccaucugcaagaugccccugcccaccagacugagacccaccaccacccccaccgccccccagaucaucaaggagaacaccaccaaccccccccccuacacccccugaggacuagucccuguucccagagcccacuuuuuuuucuuuuuuugaaauaaaauagccugucuuucagaucucaaaggcucuuuucagagccaccaaaaaaaaaaaaaaaaaaaaaaaaaaaaaaaaaaaaaaaaaaaaaaaaaaaaaaaaaaaaaaaaaaaaaaaaaaaaaaaaaaaaaaaaaaaaaaaaaaaaa

SEQ ID NO: 22379 - RNA, 591 nt, Artificial Sequence
  mRNA product Design a-2 (hSL-A100) comprising derived and/or modified sequence from LASV(Togo/2016/7082;Clade VI)__AMR44579__Z (opt4)
aggagaguccgcucagccagguugcagaagcggcuuagcguguguccuaaucuucucucugcguguagguaggccugugccgcaaacaagcuuaccaugggcgccagacagaccaagcagccccagaucgagggcagccccagagccagccuggugcccgacgccagccaccugggcccccaguucugcaagagcugcugguucgagaacaagggccugguggagugcaacaaccacuaccugugccugaacugccugagccugcugcugagcgugagcaacagaugccccaucugcaagaugccccugcccaccaagcugagagugagcagcgcccccagcgccccccccgccgccaccgcccagcccggcacccccccccccuacagccccugaggacuagucccuguucccagagcccacuuuuuuuucuuuuuuugaaauaaaauagccugucuuucagaucucaaaggcucuuuucagagccaccaaaaaaaaaaaaaaaaaaaaaaaaaaaaaaaaaaaaaaaaaaaaaaaaaaaaaaaaaaaaaaaaaaaaaaaaaaaaaaaaaaaaaaaaaaaaaaaaaaaaa

SEQ ID NO: 22380 - RNA, 591 nt, Artificial Sequence
  mRNA product Design a-2 (hSL-A100) comprising derived and/or modified sequence from LASV(KAK-428;Clade n.d. (VII))__ANH09761__Z (opt4)
aggagaguccgcucagccagguugcagaagcggcuuagcguguguccuaaucuucucucugcguguagguaggccugugccgcaaacaagcuuaccaugggcaacaagggcaccaagcccacccagaacagcgagcccagcagagccaaccuggugcccgacgccagcuaccugggcccccaguucugcaagagcugcugguucgagaacaagggccugguggagugcaacaaccacuaccugugccugaacugccugaccaugcugcugagcgugagcaacagaugccccaucugcaagaugccccugcccaccaagaucaaggccagcggcagccccagcgccccccccaccgaggccaacagcgccgugagccccccccccuacacccccugaggacuagucccuguucccagagcccacuuuuuuuucuuuuuuugaaauaaaauagccugucuuucagaucucaaaggcucuuuucagagccaccaaaaaaaaaaaaaaaaaaaaaaaaaaaaaaaaaaaaaaaaaaaaaaaaaaaaaaaaaaaaaaaaaaaaaaaaaaaaaaaaaaaaaaaaaaaaaaaaaaaaa

SEQ ID NO: 22381 - RNA, 591 nt, Artificial Sequence
  mRNA product Design a-2 (hSL-A100) comprising derived and/or modified sequence from LASV(ISTH0009-NIG-2011;Clade II)__AIT17402__Z (opt4)
aggagaguccgcucagccagguugcagaagcggcuuagcguguguccuaaucuucucucugcguguagguaggccugugccgcaaacaagcuuaccaugggcaacagacaggccaagagcaccaagguggacgagcaccagagagcccaccuggugcccgacgccagccaccugggcccccaguucugcaagagcugcugguucgagaacagaggccugguggagugcaacaaccacuaccugugccugaacugccugagccugcugcugagcgugagcagcagaugccccaucugcaagaugccccugcccaccaagcugaaggccgccgcccagcccagcgcccccagcaccgagaccauccagaacaccacccccccccccuacacccccugaggacuagucccuguucccagagcccacuuuuuuuucuuuuuuugaaauaaaauagccugucuuucagaucucaaaggcucuuuucagagccaccaaaaaaaaaaaaaaaaaaaaaaaaaaaaaaaaaaaaaaaaaaaaaaaaaaaaaaaaaaaaaaaaaaaaaaaaaaaaaaaaaaaaaaaaaaaaaaaaaaaaa

SEQ ID NO: 22382 - RNA, 591 nt, Artificial Sequence
  mRNA product Design a-2 (hSL-A100) comprising derived and/or modified sequence from LASV(ISTH2010-NIG-2012;Clade II)__AIT17480__Z (opt4)
aggagaguccgcucagccagguugcagaagcggcuuagcguguguccuaaucuucucucugcguguagguaggccugugccgcaaacaagcuuaccaugggcaacagacacgccaagagcaccaagguggacgagcaccagagagcccaccuggugcccgacgccagccaccugggcccccaguucugcaagagcugcugguucgagaacagaggccugguggagugcaacaaccacuaccugugccugaacugccugagccugcugcugagcgugagcagcagaugccccaucugcaagaugccccugcccaccaagcugaaggccgccgcccagcccagcgcccccagcaccgaggugauccagagcaccacccccccccccuacacccccugaggacuagucccuguucccagagcccacuuuuuuuucuuuuuuugaaauaaaauagccugucuuucagaucucaaaggcucuuuucagagccaccaaaaaaaaaaaaaaaaaaaaaaaaaaaaaaaaaaaaaaaaaaaaaaaaaaaaaaaaaaaaaaaaaaaaaaaaaaaaaaaaaaaaaaaaaaaaaaaaaaaaa

SEQ ID NO: 22383 - RNA, 591 nt, Artificial Sequence
  mRNA product Design a-2 (hSL-A100) comprising derived and/or modified sequence from LASV(Lassa virus/H.sapiens-wt/NGA/2016/ISTH_0017;Clade II)__AVO03713__Z (opt4)
aggagaguccgcucagccagguugcagaagcggcuuagcguguguccuaaucuucucucugcguguagguaggccugugccgcaaacaagcuuaccaugggcaacagacaggccaagagcaccaagguggacgagcaccagagagcccaccuggugcccgacgccagccaccugggcccccaguucugcaagagcugcugguucgagaacagaggccugguggagugcaacaaccacuaccugugccugaacugccugagccugcugcugagcgugagcagcagaugccccaucugcaagaugccccugcccaccaagcugaaggccgccacccagcccagcgcccccagcaccgaggugaaccagaacaccacccccccccccuacacccccugaggacuagucccuguucccagagcccacuuuuuuuucuuuuuuugaaauaaaauagccugucuuucagaucucaaaggcucuuuucagagccaccaaaaaaaaaaaaaaaaaaaaaaaaaaaaaaaaaaaaaaaaaaaaaaaaaaaaaaaaaaaaaaaaaaaaaaaaaaaaaaaaaaaaaaaaaaaaaaaaaaaaa

SEQ ID NO: 22384 - RNA, 591 nt, Artificial Sequence
  mRNA product Design a-2 (hSL-A100) comprising derived and/or modified sequence from LASV(Lassa virus/H.sapiens-wt/NGA/2018/ISTH_0959;Clade II)__AVV65084__Z (opt4)
aggagaguccgcucagccagguugcagaagcggcuuagcguguguccuaaucuucucucugcguguagguaggccugugccgcaaacaagcuuaccaugggcaacaagcaggccaagagcaccaagguggacgagcaccagagagcccaccuggugcccgacgccagccaccugggcccccaguucugcaagagcugcugguucgagaacagaggccugguggagugcaacaaccacuaccugugccugaacugccugagccugcugcugagcgugagcagcagaugccccaucugcaagaugccccugcccaccaagcugaaggccgccgcccagcccagcgcccccagcaccgaggccauccagagcaccacccccccccccuacacccccugaggacuagucccuguucccagagcccacuuuuuuuucuuuuuuugaaauaaaauagccugucuuucagaucucaaaggcucuuuucagagccaccaaaaaaaaaaaaaaaaaaaaaaaaaaaaaaaaaaaaaaaaaaaaaaaaaaaaaaaaaaaaaaaaaaaaaaaaaaaaaaaaaaaaaaaaaaaaaaaaaaaaa

SEQ ID NO: 22385 - RNA, 591 nt, Artificial Sequence
  mRNA product Design a-2 (hSL-A100) comprising derived and/or modified sequence from LASV(LASV003-NIG-2008;Clade II)__AIT17578__Z (opt4)
aggagaguccgcucagccagguugcagaagcggcuuagcguguguccuaaucuucucucugcguguagguaggccugugccgcaaacaagcuuaccaugggcaacagacaggccaagagcaccaagguggacgagcaccagagagcccaccuggugcccgacgccagccaccugggcccccaguucugcaagagcugcugguucgagaacaagggccugguggagugcaacaaccacuaccugugccugaacugccugagccugcugcugagcgugagcagcagaugccccaucugcaagaugccccugcccaccaagcugagagccgccgcccagcccagcgcccccagcaccgagagcgcccagaacaccgcccccccccccuacgcccccugaggacuagucccuguucccagagcccacuuuuuuuucuuuuuuugaaauaaaauagccugucuuucagaucucaaaggcucuuuucagagccaccaaaaaaaaaaaaaaaaaaaaaaaaaaaaaaaaaaaaaaaaaaaaaaaaaaaaaaaaaaaaaaaaaaaaaaaaaaaaaaaaaaaaaaaaaaaaaaaaaaaaa

SEQ ID NO: 22386 - RNA, 591 nt, Artificial Sequence
  mRNA product Design a-2 (hSL-A100) comprising derived and/or modified sequence from LASV(LASV035-NIG-2009;Clade II)__AIT17586__Z (opt4)
aggagaguccgcucagccagguugcagaagcggcuuagcguguguccuaaucuucucucugcguguagguaggccugugccgcaaacaagcuuaccaugggcaacaagcaggccaagagcaccaagguggacgagcaccagagagcccaccuggugcccgacgccagccaccugggcccccaguucugcaagagcugcugguucgagaacagaggccugguggagugcaacaaccacuaccugugccugaacugccugagccugcugcugagcgugagcagcagaugccccaucugcaagaugccccugcccaccagacugaaggccgccgcccagcccagcgcccccagcaccgaggugacccagaacaccacccccccccccuacacccccugaggacuagucccuguucccagagcccacuuuuuuuucuuuuuuugaaauaaaauagccugucuuucagaucucaaaggcucuuuucagagccaccaaaaaaaaaaaaaaaaaaaaaaaaaaaaaaaaaaaaaaaaaaaaaaaaaaaaaaaaaaaaaaaaaaaaaaaaaaaaaaaaaaaaaaaaaaaaaaaaaaaaa

SEQ ID NO: 22387 - RNA, 591 nt, Artificial Sequence
  mRNA product Design a-2 (hSL-A100) comprising derived and/or modified sequence from LASV(LASV1000-NIG-2009;Clade II)__AIT17780__Z (opt4)
aggagaguccgcucagccagguugcagaagcggcuuagcguguguccuaaucuucucucugcguguagguaggccugugccgcaaacaagcuuaccaugggcaacagacagaccaagagcaccaagguggacgagcaccagagagccuaccuggugcccgacgccagccugcugggcccccaguucugcaagagcugcugguucgagaacaagggccugguggagugcaacaaccacuaccugugccugaacugccugagccugcugcugagcgugagcagcagaugccccaucugcaagaugccccugcccaccagacugaaggccgccgcccagcccagcgccccccccaccgaggccauccagaacaccacccccccccccuacacccccugaggacuagucccuguucccagagcccacuuuuuuuucuuuuuuugaaauaaaauagccugucuuucagaucucaaaggcucuuuucagagccaccaaaaaaaaaaaaaaaaaaaaaaaaaaaaaaaaaaaaaaaaaaaaaaaaaaaaaaaaaaaaaaaaaaaaaaaaaaaaaaaaaaaaaaaaaaaaaaaaaaaaa

SEQ ID NO: 22388 - RNA, 591 nt, Artificial Sequence
  mRNA product Design a-2 (hSL-A100) comprising derived and/or modified sequence from LASV(LASV221-NIG-2010;Clade II)__AIT17622__Z (opt4)
aggagaguccgcucagccagguugcagaagcggcuuagcguguguccuaaucuucucucugcguguagguaggccugugccgcaaacaagcuuaccaugggcaacagacaggccaagagcaccaagguggacgagcaccagagagcccaccuggugcccgacgccagccaccugggcccccaguucugcaagagcugcugguucgagaacagaggccugguggagugcaacaaccacuaccugugccugaacugccugagccugcugcugagcgugagcagcagaugccccaucugcaagaugccccugcccaccaagcugaaggccgccacccagcccagcgcccccagcaccgaggugacccagaacaccauccccccccccuacagccccugaggacuagucccuguucccagagcccacuuuuuuuucuuuuuuugaaauaaaauagccugucuuucagaucucaaaggcucuuuucagagccaccaaaaaaaaaaaaaaaaaaaaaaaaaaaaaaaaaaaaaaaaaaaaaaaaaaaaaaaaaaaaaaaaaaaaaaaaaaaaaaaaaaaaaaaaaaaaaaaaaaaaa

SEQ ID NO: 22389 - RNA, 591 nt, Artificial Sequence
  mRNA product Design a-2 (hSL-A100) comprising derived and/or modified sequence from LASV(LASV237-NIG-2010;Clade II)__AIT17636__Z (opt4)
aggagaguccgcucagccagguugcagaagcggcuuagcguguguccuaaucuucucucugcguguagguaggccugugccgcaaacaagcuuaccaugggcaacagacaggccaagagcaccaagguggacgagcaccagagagcccaccuggugcccgacgccagccaccugggcccccaguucugcaagagcugcugguucgagaacagaggccugguggagugcaacaaccacuaccugugccugaacugccugagccugcugcugagcgugagcagcagaugccccaucugcaagaugccccugcccaccaagcugaaggccgccgcccagcccagcgcccccagcaucgagaccauccagaacaccacccccccccccuacacccccugaggacuagucccuguucccagagcccacuuuuuuuucuuuuuuugaaauaaaauagccugucuuucagaucucaaaggcucuuuucagagccaccaaaaaaaaaaaaaaaaaaaaaaaaaaaaaaaaaaaaaaaaaaaaaaaaaaaaaaaaaaaaaaaaaaaaaaaaaaaaaaaaaaaaaaaaaaaaaaaaaaaaa

SEQ ID NO: 22390 - RNA, 591 nt, Artificial Sequence
  mRNA product Design a-2 (hSL-A100) comprising derived and/or modified sequence from LASV(LASV253-NIG-2011;Clade II)__AIT17668__Z (opt4)
aggagaguccgcucagccagguugcagaagcggcuuagcguguguccuaaucuucucucugcguguagguaggccugugccgcaaacaagcuuaccaugggcaacagacaggccaagagcaccaagguggacgagcaccagagagcccaccuggugcccgacgccagccaccugggcccccaguucugcaagagcugcugguucgagaacaagggccugguggagugcaacaaccacuaccugugccugaacugccugagccugcugcugagcgugagcagcagaugccccaucugcaagaugccccugcccaccaagcugaagaccaccgcccagcccagcgccccccccaccgaggccgccaagaacaccgcccccccccccuacgcccccugaggacuagucccuguucccagagcccacuuuuuuuucuuuuuuugaaauaaaauagccugucuuucagaucucaaaggcucuuuucagagccaccaaaaaaaaaaaaaaaaaaaaaaaaaaaaaaaaaaaaaaaaaaaaaaaaaaaaaaaaaaaaaaaaaaaaaaaaaaaaaaaaaaaaaaaaaaaaaaaaaaaaa

SEQ ID NO: 22391 - RNA, 591 nt, Artificial Sequence
  mRNA product Design a-2 (hSL-A100) comprising derived and/or modified sequence from LASV(G1180-SLE-2010;Clade IV)__AIT17166__Z (opt4)
aggagaguccgcucagccagguugcagaagcggcuuagcguguguccuaaucuucucucugcguguagguaggccugugccgcaaacaagcuuaccaugggcaacaagcaggccaaggcccccgaggccaaggacagccccagagccagccugauccccgacgccacccaccugggcccccaguucugcaagagcugcugguucgagaccaagggccugguggagugcaacaaccacuaccugugccugaacugccugacccugcugcugagcgugagcaacagaugccccaucugcaagaugccccugcccaccaagcugagacccagcgccacccccaccgccccccccaccgaggccgccgacagcaucggccccccccccuacagccccugaggacuagucccuguucccagagcccacuuuuuuuucuuuuuuugaaauaaaauagccugucuuucagaucucaaaggcucuuuucagagccaccaaaaaaaaaaaaaaaaaaaaaaaaaaaaaaaaaaaaaaaaaaaaaaaaaaaaaaaaaaaaaaaaaaaaaaaaaaaaaaaaaaaaaaaaaaaaaaaaaaaaa

SEQ ID NO: 22392 - RNA, 591 nt, Artificial Sequence
  mRNA product Design a-2 (hSL-A100) comprising derived and/or modified sequence from LASV(G1442-SLE-2011;Clade IV)__AIT17178__Z (opt4)
aggagaguccgcucagccagguugcagaagcggcuuagcguguguccuaaucuucucucugcguguagguaggccugugccgcaaacaagcuuaccaugggcaacaagcaggccaaggccagcgaggccaaggacagccccagagccagccugauccccgacgccacccaccugggcccccaguucugcaagagcugcugguucgagaacaagggccugguggagugcaacaaccacuaccugugccugaacugccugagccugcugcugagcgugagcagcagaugccccaucugcaagaugccccugcccaccagacugagacccagcaccgcccccaccgccccccccgccagagccggcgacaacaucaagcccccccccuacagccccugaggacuagucccuguucccagagcccacuuuuuuuucuuuuuuugaaauaaaauagccugucuuucagaucucaaaggcucuuuucagagccaccaaaaaaaaaaaaaaaaaaaaaaaaaaaaaaaaaaaaaaaaaaaaaaaaaaaaaaaaaaaaaaaaaaaaaaaaaaaaaaaaaaaaaaaaaaaaaaaaaaaaa

SEQ ID NO: 22393 - RNA, 591 nt, Artificial Sequence
  mRNA product Design a-2 (hSL-A100) comprising derived and/or modified sequence from LASV(G502-SLE-2009;Clade IV)__AIT17124__Z (opt4)
aggagaguccgcucagccagguugcagaagcggcuuagcguguguccuaaucuucucucugcguguagguaggccugugccgcaaacaagcuuaccaugggcaacaagcaggugaagacccccgaggccaaggacagccccagagccagccugauccccgacgccacccaccugggcccccaguucugcaagagcugcugguucgagaacaagggccugguggagugcaacaaccacuaccugugccugaacugccugacccugcugcugagcgugggcaacagaugccccaucugcaagaugccccugcccaccaagcugagacccagcgugacccccaccgccccccccaccagagccgccgacagcaucggccccccccccuacagccccugaggacuagucccuguucccagagcccacuuuuuuuucuuuuuuugaaauaaaauagccugucuuucagaucucaaaggcucuuuucagagccaccaaaaaaaaaaaaaaaaaaaaaaaaaaaaaaaaaaaaaaaaaaaaaaaaaaaaaaaaaaaaaaaaaaaaaaaaaaaaaaaaaaaaaaaaaaaaaaaaaaaaa

SEQ ID NO: 22394 - RNA, 591 nt, Artificial Sequence
  mRNA product Design a-2 (hSL-A100) comprising derived and/or modified sequence from LASV(G733-SLE-2010;Clade IV)__AIT17152__Z (opt4)
aggagaguccgcucagccagguugcagaagcggcuuagcguguguccuaaucuucucucugcguguagguaggccugugccgcaaacaagcuuaccaugggcaacaagcaggccaagacccccgagaccaaggacagccccagagccagccugauccccgacgccacccaccugggcccccaguucugcaagagcugcugguucgagaacaagggccugguggagugcaacaaccacuaccugugccugaacugccugacccugcugcugagcgugagcaacagaugccccaucugcaagaugccccugcccaccaagcugagacccagcaccgcccccaccgccccccccgccggcgccgccgacaacaccagacccccccccuacagccccugaggacuagucccuguucccagagcccacuuuuuuuucuuuuuuugaaauaaaauagccugucuuucagaucucaaaggcucuuuucagagccaccaaaaaaaaaaaaaaaaaaaaaaaaaaaaaaaaaaaaaaaaaaaaaaaaaaaaaaaaaaaaaaaaaaaaaaaaaaaaaaaaaaaaaaaaaaaaaaaaaaaaa

SEQ ID NO: 22395 - RNA, 603 nt, Artificial Sequence
  mRNA product Design a-2 (hSL-A100) comprising derived and/or modified sequence from MOPV/LASV reassortant(IGS-1;Clade IV)__AFY05533__Z (opt4)
aggagaguccgcucagccagguugcagaagcggcuuagcguguguccuaaucuucucucugcguguagguaggccugugccgcaaacaagcuuaccaugggcaagacccagagcaagggccagcccagcaccaaccugcugaaggagaccgagcccagacaccccgugauccccgacgccagaggcaccggccccgaguucugcaagagcugcugguucgagagaagaggccuggugagaugcaacgaccacuaccugugccugaacugccugacccugcugcacaccgugagcgacagaugccccaucugcaagcacaagcugcccuucagacuggagcugcagacccagcccaccgccccccccgagaucccccccagccagaaccccccccccuacagccccugaggacuagucccuguucccagagcccacuuuuuuuucuuuuuuugaaauaaaauagccugucuuucagaucucaaaggcucuuuucagagccaccaaaaaaaaaaaaaaaaaaaaaaaaaaaaaaaaaaaaaaaaaaaaaaaaaaaaaaaaaaaaaaaaaaaaaaaaaaaaaaaaaaaaaaaaaaaaaaaaaaaaa

SEQ ID NO: 22396 - RNA, 591 nt, Artificial Sequence
  mRNA product Design a-2 (hSL-A100) comprising derived and/or modified sequence from LASV(LM776-SLE-2012;Clade IV)__AIT17824__Z (opt4)
aggagaguccgcucagccagguugcagaagcggcuuagcguguguccuaaucuucucucugcguguagguaggccugugccgcaaacaagcuuaccaugggcaacaagcaggccaaggccagcgaggagaagaacagccccagagccagccugauccccgacgccacccaccugggcccccaguucugcaagagcugcugguucgagaacaagggccugguggagugcaacaaccacuaccugugccugaacugccugacccugcugcugagcgugagcaacagaugccccaucugcaagaugccccugcccaccaagcugagacccagcaccacccccaccgccccccccaccggcgccgccgacagcaucagacccccccccuacagccccugaggacuagucccuguucccagagcccacuuuuuuuucuuuuuuugaaauaaaauagccugucuuucagaucucaaaggcucuuuucagagccaccaaaaaaaaaaaaaaaaaaaaaaaaaaaaaaaaaaaaaaaaaaaaaaaaaaaaaaaaaaaaaaaaaaaaaaaaaaaaaaaaaaaaaaaaaaaaaaaaaaaaa

SEQ ID NO: 22397 - RNA, 591 nt, Artificial Sequence
  mRNA product Design a-2 (hSL-A100) comprising derived and/or modified sequence from LASV(Mad39;Clade IV)__ANH09743__Z (opt4)
aggagaguccgcucagccagguugcagaagcggcuuagcguguguccuaaucuucucucugcguguagguaggccugugccgcaaacaagcuuaccaugggcaacaagcaggccaaggccagcgagguggaggacggccccagagccagccugauccccgacgccacccaccugggcccccaguucugcaagagcugcugguucgagaacaagagccugguggagugcaacaaccacuaccugugccugaacugccugacccugcugcugagcgugagcaacagaugccccaucugcaagaugccccugcccaccagacugaagcccagcguggugcccaccgccccccccaccagagccggcgacggcaccagacccccccccuacagccccugaggacuagucccuguucccagagcccacuuuuuuuucuuuuuuugaaauaaaauagccugucuuucagaucucaaaggcucuuuucagagccaccaaaaaaaaaaaaaaaaaaaaaaaaaaaaaaaaaaaaaaaaaaaaaaaaaaaaaaaaaaaaaaaaaaaaaaaaaaaaaaaaaaaaaaaaaaaaaaaaaaaaa

SEQ ID NO: 22398 - RNA, 591 nt, Artificial Sequence
  mRNA product Design a-2 (hSL-A100) comprising derived and/or modified sequence from LASV(Z0947-SLE-2011;Clade IV)__AIT17838__Z (opt4)
aggagaguccgcucagccagguugcagaagcggcuuagcguguguccuaaucuucucucugcguguagguaggccugugccgcaaacaagcuuaccaugggcaacaagcaggccaaggugcccgagagcaaggacagccccagagccagccugauccccgacgccacccaccugggcccccaguucugcaagagcugcugguucgagaacaagggccugguggagugcaacaaccacuaccugugccugaacugccugacccugcugcugagcgugagcaacagaugccccaucugcaagaugccccugcccaccaagcugaagcccagcgccgcccccaccgccccccccaccggcgccgccgacagcaucagacccccccccuacagccccugaggacuagucccuguucccagagcccacuuuuuuuucuuuuuuugaaauaaaauagccugucuuucagaucucaaaggcucuuuucagagccaccaaaaaaaaaaaaaaaaaaaaaaaaaaaaaaaaaaaaaaaaaaaaaaaaaaaaaaaaaaaaaaaaaaaaaaaaaaaaaaaaaaaaaaaaaaaaaaaaaaaaa

SEQ ID NO: 22399 - RNA, 591 nt, Artificial Sequence
  mRNA product Design a-2 (hSL-A100) comprising derived and/or modified sequence from LASV(Josiah;Clade IV)__ADY11072/NP_694871__Z (opt5)
aggagaguccgcucagccagguugcagaagcggcuuagcguguguccuaaucuucucucugcguguagguaggccugugccgcaaacaagcuuaccaugggcaacaagcaggccaaagcucccgagagcaaggacuccccuagagccucucugaucccggaugcgacccaccucgggccccaauucugcaaaagcuguugguuugaaaauaagggacugguggagugcaacaaucauuaccuuugucugaacugccucacacugcuucuguccgucucuaaucgguguccuauuugcaaaaugccccucccuacgaagcugcgccccagcgcugccccuaccgccccgcccacaggcgcugccgacuccaucagaccucccccuuauucucccugaggacuagucccuguucccagagcccacuuuuuuuucuuuuuuugaaauaaaauagccugucuuucagaucucaaaggcucuuuucagagccaccaaaaaaaaaaaaaaaaaaaaaaaaaaaaaaaaaaaaaaaaaaaaaaaaaaaaaaaaaaaaaaaaaaaaaaaaaaaaaaaaaaaaaaaaaaaaaaaaaaaaa

SEQ ID NO: 22400 - RNA, 594 nt, Artificial Sequence
  mRNA product Design a-2 (hSL-A100) comprising derived and/or modified sequence from LASV(Pinneo-NIG-1969;Clade I)__AIT17834__Z (opt5)
aggagaguccgcucagccagguugcagaagcggcuuagcguguguccuaaucuucucucugcguguagguaggccugugccgcaaacaagcuuaccaugggcaacaagcagaccagaagcccucccaaaccggagcacccccggccuacacugcuccccgacgccucccaucuggggccucaauucugcaagucuuguugguuugaaaauaaaggacuuguggagugcaacaaucacuaccugugucucaacugccugacgcuucugcucagcgucuccgaucgcugucccaucugcaagaugccucugccgaccaaacuggcuguuagaacacagcccucugccccuccccucaaucagggcaacacccagagcuccccucccccguauucuccuugaggacuagucccuguucccagagcccacuuuuuuuucuuuuuuugaaauaaaauagccugucuuucagaucucaaaggcucuuuucagagccaccaaaaaaaaaaaaaaaaaaaaaaaaaaaaaaaaaaaaaaaaaaaaaaaaaaaaaaaaaaaaaaaaaaaaaaaaaaaaaaaaaaaaaaaaaaaaaaaaaaaaa

SEQ ID NO: 22401 - RNA, 591 nt, Artificial Sequence
  mRNA product Design a-2 (hSL-A100) comprising derived and/or modified sequence from LASV(Nig08-04;Clade II)__ADU56612__Z (opt5)
aggagaguccgcucagccagguugcagaagcggcuuagcguguguccuaaucuucucucugcguguagguaggccugugccgcaaacaagcuuaccaugggcaacagacagacccggcccacagaggccacggaacaaagccgcgcccaccuggugccugacgccucccaucucgggccgcaguucugcaagucuuguugguuugagaauagaggacuggucgaaugcaacaaucacuaccuuugucugaacugccucagccugcuucuguccguuucuagccggugucccaucugcaaaaugccucuccccacccgccugaaggcguccgcucagccuucugcucccccuacagaggccccgcagaauaccacacccccucccuauaccccuugaggacuagucccuguucccagagcccacuuuuuuuucuuuuuuugaaauaaaauagccugucuuucagaucucaaaggcucuuuucagagccaccaaaaaaaaaaaaaaaaaaaaaaaaaaaaaaaaaaaaaaaaaaaaaaaaaaaaaaaaaaaaaaaaaaaaaaaaaaaaaaaaaaaaaaaaaaaaaaaaaaaaa

SEQ ID NO: 22402 - RNA, 591 nt, Artificial Sequence
  mRNA product Design a-2 (hSL-A100) comprising derived and/or modified sequence from LASV(Nig08-A19;Clade III)__ADU56620__Z (opt5)
aggagaguccgcucagccagguugcagaagcggcuuagcguguguccuaaucuucucucugcguguagguaggccugugccgcaaacaagcuuaccaugggcgggaagcacaccaaaccccagagagagagcaacuccccucgggccucucugaucccggacgcuacacaucucggaccccaauucugcaagagcuguugguuugaaaauaaaggccugguggagugcaacaaucacuaccuuugucugaacugccucacgcugcuucuguccgucucuaaucgcuguccuauuugcaagaugccccucccuaccagacugcgggccagcacaaaccccaccgcgccucagguugaacagguggggccgacaaaucccccucccuauuccccuugaggacuagucccuguucccagagcccacuuuuuuuucuuuuuuugaaauaaaauagccugucuuucagaucucaaaggcucuuuucagagccaccaaaaaaaaaaaaaaaaaaaaaaaaaaaaaaaaaaaaaaaaaaaaaaaaaaaaaaaaaaaaaaaaaaaaaaaaaaaaaaaaaaaaaaaaaaaaaaaaaaaaa

SEQ ID NO: 22403 - RNA, 591 nt, Artificial Sequence
  mRNA product Design a-2 (hSL-A100) comprising derived and/or modified sequence from LASV(AV;Clade V)__CCA30312__Z (opt5)
aggagaguccgcucagccagguugcagaagcggcuuagcguguguccuaaucuucucucugcguguagguaggccugugccgcaaacaagcuuaccaugggcaacagacaggccaagaaucccgagguggaaaacagcccucgggcuucccugaucccggacgccacccaccucgggccccaauucugcaaaucuuguugguuugagaauaagggacuggucgaaugcaacaaucauuaccuuugucugaacugccucagccugcuucuguccguuucuaaucgcuguccuauuugcaaaaugccccucccuacaagacugcggcccacgaccacaccuaccgcgccgcagaucauuaaggagaacacaaccaaucccccucccuauacaccuugaggacuagucccuguucccagagcccacuuuuuuuucuuuuuuugaaauaaaauagccugucuuucagaucucaaaggcucuuuucagagccaccaaaaaaaaaaaaaaaaaaaaaaaaaaaaaaaaaaaaaaaaaaaaaaaaaaaaaaaaaaaaaaaaaaaaaaaaaaaaaaaaaaaaaaaaaaaaaaaaaaaaa

SEQ ID NO: 22404 - RNA, 591 nt, Artificial Sequence
  mRNA product Design a-2 (hSL-A100) comprising derived and/or modified sequence from LASV(Togo/2016/7082;Clade VI)__AMR44579__Z (opt5)
aggagaguccgcucagccagguugcagaagcggcuuagcguguguccuaaucuucucucugcguguagguaggccugugccgcaaacaagcuuaccaugggcgccagacagaccaagcaaccccagaucgaggggagcccucgggcuucccuggugccggacgccucucaccucggaccccaguucugcaaaagcuguugguuugaaaacaagggccuggucgagugcaauaaccauuaccuuugucugaauugccucucccugcuucugucuguuagcaaccgcuguccuauuugcaaaaugccccucccuacaaagcugagaguguccucugcgcccagcgcuccuccggccgccacggcucagcccgggaccccucccccuuauucccccugaggacuagucccuguucccagagcccacuuuuuuuucuuuuuuugaaauaaaauagccugucuuucagaucucaaaggcucuuuucagagccaccaaaaaaaaaaaaaaaaaaaaaaaaaaaaaaaaaaaaaaaaaaaaaaaaaaaaaaaaaaaaaaaaaaaaaaaaaaaaaaaaaaaaaaaaaaaaaaaaaaaaa

SEQ ID NO: 22405 - RNA, 591 nt, Artificial Sequence
  mRNA product Design a-2 (hSL-A100) comprising derived and/or modified sequence from LASV(KAK-428;Clade n.d. (VII))__ANH09761__Z (opt5)
aggagaguccgcucagccagguugcagaagcggcuuagcguguguccuaaucuucucucugcguguagguaggccugugccgcaaacaagcuuaccaugggcaacaaggggaccaaacccacacagaauagcgagccuuccagagccaaccuggugccggacgcuucuuaccucggaccccaauucugcaagagcuguugguuugaaaauaaaggccuggucgagugcaacaaucacuaucuuugucugaacugccucacgaugcugcuuuccguuuccaaucgguguccuaucugcaagaugccccugccuaccaaaauuaaggccagcgggucccccucugcgccuccgacagaagcuaacagcgccgugucucccccucccuacaccccuugaggacuagucccuguucccagagcccacuuuuuuuucuuuuuuugaaauaaaauagccugucuuucagaucucaaaggcucuuuucagagccaccaaaaaaaaaaaaaaaaaaaaaaaaaaaaaaaaaaaaaaaaaaaaaaaaaaaaaaaaaaaaaaaaaaaaaaaaaaaaaaaaaaaaaaaaaaaaaaaaaaaaa

SEQ ID NO: 22406 - RNA, 591 nt, Artificial Sequence
  mRNA product Design a-2 (hSL-A100) comprising derived and/or modified sequence from LASV(ISTH0009-NIG-2011;Clade II)__AIT17402__Z (opt5)
aggagaguccgcucagccagguugcagaagcggcuuagcguguguccuaaucuucucucugcguguagguaggccugugccgcaaacaagcuuaccaugggcaacagacaggccaagagcaccaaaguggacgagcaccaacgggcucaucugguccccgaugccucccaccucgggccucaguucugcaagucuuguugguuugaaaaucgcggacugguugagugcaacaaucauuaccuuugucugaacugccucagccugcuucuguccgugucuagcagauguccgaucugcaaaaugccccucccuacaaagcugaaagcggcugcccagcccuccgccccuucuacggaaaccauucagaauacaacacccccuccguauacccccugaggacuagucccuguucccagagcccacuuuuuuuucuuuuuuugaaauaaaauagccugucuuucagaucucaaaggcucuuuucagagccaccaaaaaaaaaaaaaaaaaaaaaaaaaaaaaaaaaaaaaaaaaaaaaaaaaaaaaaaaaaaaaaaaaaaaaaaaaaaaaaaaaaaaaaaaaaaaaaaaaaaaa

SEQ ID NO: 22407 - RNA, 591 nt, Artificial Sequence
  mRNA product Design a-2 (hSL-A100) comprising derived and/or modified sequence from LASV(ISTH2010-NIG-2012;Clade II)__AIT17480__Z (opt5)
aggagaguccgcucagccagguugcagaagcggcuuagcguguguccuaaucuucucucugcguguagguaggccugugccgcaaacaagcuuaccaugggcaacagacacgccaagagcaccaaaguggacgagcaucagcgggcucaccugguccccgaugccucccaucucgggccucaauucugcaagucuuguugguuugaaaaucgcggacugguugagugcaacaaucacuaccuuugucugaacugccucagccugcuucuguccgugucuagcagauguccgaucugcaaaaugccccucccuacaaagcugaaagcggcugcccagcccuccgccccuucuacggaagugauucagagcaccacacccccuccguauacccccugaggacuagucccuguucccagagcccacuuuuuuuucuuuuuuugaaauaaaauagccugucuuucagaucucaaaggcucuuuucagagccaccaaaaaaaaaaaaaaaaaaaaaaaaaaaaaaaaaaaaaaaaaaaaaaaaaaaaaaaaaaaaaaaaaaaaaaaaaaaaaaaaaaaaaaaaaaaaaaaaaaaaa

SEQ ID NO: 22408 - RNA, 591 nt, Artificial Sequence
  mRNA product Design a-2 (hSL-A100) comprising derived and/or modified sequence from LASV(Lassa virus/H.sapiens-wt/NGA/2016/ISTH_0017;Clade II)__AVO03713__Z (opt5)
aggagaguccgcucagccagguugcagaagcggcuuagcguguguccuaaucuucucucugcguguagguaggccugugccgcaaacaagcuuaccaugggcaacagacaggccaagagcaccaaaguggacgagcaccaacgggcucaucugguccccgaugccucccaccucgggccucaguucugcaagucuuguugguuugaaaaucgcggacugguugagugcaacaaucauuaccuuugucugaacugccucagccugcuucuguccgugucuagcagauguccgaucugcaaaaugccccucccuacaaagcugaaagcggcuacgcagcccuccgccccuucuaccgaagugaaucagaacacaacacccccuccguauacccccugaggacuagucccuguucccagagcccacuuuuuuuucuuuuuuugaaauaaaauagccugucuuucagaucucaaaggcucuuuucagagccaccaaaaaaaaaaaaaaaaaaaaaaaaaaaaaaaaaaaaaaaaaaaaaaaaaaaaaaaaaaaaaaaaaaaaaaaaaaaaaaaaaaaaaaaaaaaaaaaaaaaaa

SEQ ID NO: 22409 - RNA, 591 nt, Artificial Sequence
  mRNA product Design a-2 (hSL-A100) comprising derived and/or modified sequence from LASV(Lassa virus/H.sapiens-wt/NGA/2018/ISTH_0959;Clade II)__AVV65084__Z (opt5)
aggagaguccgcucagccagguugcagaagcggcuuagcguguguccuaaucuucucucugcguguagguaggccugugccgcaaacaagcuuaccaugggcaacaagcaggccaaaagcaccaagguggacgagcaccaaagagcucaucugguccccgaugccucccaccucgggccucaguucugcaaaucuuguugguuugaaaaucggggacugguugagugcaacaaucauuaccuuugucugaacugccucagccugcuucuguccgugucuagccgcuguccgaucugcaagaugccccucccuacaaaacugaaggcggcugcccagcccuccgccccuucuacggaagcuauucagagcaccacacccccuccguauacccccugaggacuagucccuguucccagagcccacuuuuuuuucuuuuuuugaaauaaaauagccugucuuucagaucucaaaggcucuuuucagagccaccaaaaaaaaaaaaaaaaaaaaaaaaaaaaaaaaaaaaaaaaaaaaaaaaaaaaaaaaaaaaaaaaaaaaaaaaaaaaaaaaaaaaaaaaaaaaaaaaaaaaa

SEQ ID NO: 22410 - RNA, 591 nt, Artificial Sequence
  mRNA product Design a-2 (hSL-A100) comprising derived and/or modified sequence from LASV(LASV003-NIG-2008;Clade II)__AIT17578__Z (opt5)
aggagaguccgcucagccagguugcagaagcggcuuagcguguguccuaaucuucucucugcguguagguaggccugugccgcaaacaagcuuaccaugggcaacagacaggccaagagcaccaaaguggacgagcaccaacgggcucaucugguccccgaugccucccaccucgggccucaguucugcaagucuuguugguuugaaaauaaaggacugguugagugcaacaaucauuaccuuugucugaacugccucagccugcuucuguccgugucuagccgcuguccgaucugcaagaugccccucccuacaaaacugagagcggcugcccagcccuccgccccuucuacggaaagcgcucagaauaccgcucccccuccguaugcccccugaggacuagucccuguucccagagcccacuuuuuuuucuuuuuuugaaauaaaauagccugucuuucagaucucaaaggcucuuuucagagccaccaaaaaaaaaaaaaaaaaaaaaaaaaaaaaaaaaaaaaaaaaaaaaaaaaaaaaaaaaaaaaaaaaaaaaaaaaaaaaaaaaaaaaaaaaaaaaaaaaaaaa

SEQ ID NO: 22411 - RNA, 591 nt, Artificial Sequence
  mRNA product Design a-2 (hSL-A100) comprising derived and/or modified sequence from LASV(LASV035-NIG-2009;Clade II)__AIT17586__Z (opt5)
aggagaguccgcucagccagguugcagaagcggcuuagcguguguccuaaucuucucucugcguguagguaggccugugccgcaaacaagcuuaccaugggcaacaagcaggccaaaagcaccaagguggacgagcaccaaagagcucaucugguccccgaugccucccaccucgggccucaguucugcaaaucuuguugguuugaaaaucggggacugguugagugcaacaaucauuaccuuugucugaacugccucagccugcuucuguccgugucuagccgcuguccgaucugcaagaugccccucccuacaagacugaaagcggcugcccagcccuccgccccuucuacggaagugacccagaauacaacacccccuccguauacccccugaggacuagucccuguucccagagcccacuuuuuuuucuuuuuuugaaauaaaauagccugucuuucagaucucaaaggcucuuuucagagccaccaaaaaaaaaaaaaaaaaaaaaaaaaaaaaaaaaaaaaaaaaaaaaaaaaaaaaaaaaaaaaaaaaaaaaaaaaaaaaaaaaaaaaaaaaaaaaaaaaaaaa

SEQ ID NO: 22412 - RNA, 591 nt, Artificial Sequence
  mRNA product Design a-2 (hSL-A100) comprising derived and/or modified sequence from LASV(LASV1000-NIG-2009;Clade II)__AIT17780__Z (opt5)
aggagaguccgcucagccagguugcagaagcggcuuagcguguguccuaaucuucucucugcguguagguaggccugugccgcaaacaagcuuaccaugggcaacagacagaccaagagcacaaaaguggacgagcaccaacgggccuaccugguccccgaugcuucccuccuggggccucaguucugcaagucuuguugguuugaaaauaaaggacuuguugagugcaacaaucauuaucugugucucaacugccugagccuucugcucuccgugucuagccgcuguccgaucugcaagaugccccugccuacgagacugaaagccgcggcucagcccuccgccccucccaccgaagccauucagaauacaaccccuccgcccuacacaccuugaggacuagucccuguucccagagcccacuuuuuuuucuuuuuuugaaauaaaauagccugucuuucagaucucaaaggcucuuuucagagccaccaaaaaaaaaaaaaaaaaaaaaaaaaaaaaaaaaaaaaaaaaaaaaaaaaaaaaaaaaaaaaaaaaaaaaaaaaaaaaaaaaaaaaaaaaaaaaaaaaaaaa

SEQ ID NO: 22413 - RNA, 591 nt, Artificial Sequence
  mRNA product Design a-2 (hSL-A100) comprising derived and/or modified sequence from LASV(LASV221-NIG-2010;Clade II)__AIT17622__Z (opt5)
aggagaguccgcucagccagguugcagaagcggcuuagcguguguccuaaucuucucucugcguguagguaggccugugccgcaaacaagcuuaccaugggcaacagacaggccaagagcaccaaaguggacgagcaccaacgggcucaucugguccccgaugccucccaccucgggccucaguucugcaagucuuguugguuugaaaaucgcggacugguugagugcaacaaucauuaccuuugucugaacugccucagccugcuucuguccgugucuagcagauguccgaucugcaaaaugccccucccuacaaagcugaaagcggcuacgcagcccuccgccccuucuaccgaagugacacagaauaccauucccccuccguauagccccugaggacuagucccuguucccagagcccacuuuuuuuucuuuuuuugaaauaaaauagccugucuuucagaucucaaaggcucuuuucagagccaccaaaaaaaaaaaaaaaaaaaaaaaaaaaaaaaaaaaaaaaaaaaaaaaaaaaaaaaaaaaaaaaaaaaaaaaaaaaaaaaaaaaaaaaaaaaaaaaaaaaaa

SEQ ID NO: 22414 - RNA, 591 nt, Artificial Sequence
  mRNA product Design a-2 (hSL-A100) comprising derived and/or modified sequence from LASV(LASV237-NIG-2010;Clade II)__AIT17636__Z (opt5)
aggagaguccgcucagccagguugcagaagcggcuuagcguguguccuaaucuucucucugcguguagguaggccugugccgcaaacaagcuuaccaugggcaacagacaggccaagagcaccaaaguggacgagcaccaacgggcucaucugguccccgaugccucccaccucgggccucaguucugcaagucuuguugguuugaaaaucgcggacugguugagugcaacaaucauuaccuuugucugaacugccucagccugcuucuguccgugucuagcagauguccgaucugcaaaaugccccucccuacaaagcugaaagcggcugcccagcccuccgccccuucuauugaaacgauccagaauaccacacccccuccguauacccccugaggacuagucccuguucccagagcccacuuuuuuuucuuuuuuugaaauaaaauagccugucuuucagaucucaaaggcucuuuucagagccaccaaaaaaaaaaaaaaaaaaaaaaaaaaaaaaaaaaaaaaaaaaaaaaaaaaaaaaaaaaaaaaaaaaaaaaaaaaaaaaaaaaaaaaaaaaaaaaaaaaaaa

SEQ ID NO: 22415 - RNA, 591 nt, Artificial Sequence
  mRNA product Design a-2 (hSL-A100) comprising derived and/or modified sequence from LASV(LASV253-NIG-2011;Clade II)__AIT17668__Z (opt5)
aggagaguccgcucagccagguugcagaagcggcuuagcguguguccuaaucuucucucugcguguagguaggccugugccgcaaacaagcuuaccaugggcaacagacaggccaagagcaccaaaguggacgagcaccaacgggcucaucugguccccgaugccucccaccucgggccucaguucugcaagucuuguugguuugaaaauaaaggacugguugagugcaacaaucauuaccuuugucugaacugccucagccugcuucuguccgugucuagccgcuguccgaucugcaagaugccccucccuacaaaacugaagacgaccgcgcagcccuccgcuccucccacagaagccgccaagaauaccgcuccuccgcccuaugccccuugaggacuagucccuguucccagagcccacuuuuuuuucuuuuuuugaaauaaaauagccugucuuucagaucucaaaggcucuuuucagagccaccaaaaaaaaaaaaaaaaaaaaaaaaaaaaaaaaaaaaaaaaaaaaaaaaaaaaaaaaaaaaaaaaaaaaaaaaaaaaaaaaaaaaaaaaaaaaaaaaaaaaa

SEQ ID NO: 22416 - RNA, 591 nt, Artificial Sequence
  mRNA product Design a-2 (hSL-A100) comprising derived and/or modified sequence from LASV(G1180-SLE-2010;Clade IV)__AIT17166__Z (opt5)
aggagaguccgcucagccagguugcagaagcggcuuagcguguguccuaaucuucucucugcguguagguaggccugugccgcaaacaagcuuaccaugggcaacaagcaggccaaagcucccgaggccaaggacagcccuagagcgucccugaucccggaugcuacccaccucgggccccaauucugcaaaucuuguugguuugaaacaaagggacugguggagugcaauaaccauuaccuuugucugaauugccucacgcugcuucugagcgucuccaaccgguguccuauuugcaaaaugccccucccuaccaagcugcgccccucugccacaccuaccgccccgcccacagaagcugccgacagcaucggcccucccccuuauucccccugaggacuagucccuguucccagagcccacuuuuuuuucuuuuuuugaaauaaaauagccugucuuucagaucucaaaggcucuuuucagagccaccaaaaaaaaaaaaaaaaaaaaaaaaaaaaaaaaaaaaaaaaaaaaaaaaaaaaaaaaaaaaaaaaaaaaaaaaaaaaaaaaaaaaaaaaaaaaaaaaaaaaa

SEQ ID NO: 22417 - RNA, 591 nt, Artificial Sequence
  mRNA product Design a-2 (hSL-A100) comprising derived and/or modified sequence from LASV(G1442-SLE-2011;Clade IV)__AIT17178__Z (opt5)
aggagaguccgcucagccagguugcagaagcggcuuagcguguguccuaaucuucucucugcguguagguaggccugugccgcaaacaagcuuaccaugggcaacaagcaggccaaagcuagcgaggccaaggacucccccagagcgucucugaucccugaugcuacccaccucgggccgcaauucugcaaaagcuguugguuugaaaauaagggacugguggagugcaacaaucauuaccuuugucugaacugccucucccugcuucugucugucagcucccggugucccauuugcaaaaugccucuccccacacgccugagaccuucuacggcccccaccgccccuccggcucgggccggcgacaauaucaagcccccucccuauagcccuugaggacuagucccuguucccagagcccacuuuuuuuucuuuuuuugaaauaaaauagccugucuuucagaucucaaaggcucuuuucagagccaccaaaaaaaaaaaaaaaaaaaaaaaaaaaaaaaaaaaaaaaaaaaaaaaaaaaaaaaaaaaaaaaaaaaaaaaaaaaaaaaaaaaaaaaaaaaaaaaaaaaaa

SEQ ID NO: 22418 - RNA, 591 nt, Artificial Sequence
  mRNA product Design a-2 (hSL-A100) comprising derived and/or modified sequence from LASV(G502-SLE-2009;Clade IV)__AIT17124__Z (opt5)
aggagaguccgcucagccagguugcagaagcggcuuagcguguguccuaaucuucucucugcguguagguaggccugugccgcaaacaagcuuaccaugggcaacaaacaggugaagacccccgaggccaaggacagcccuagagcuucccugaucccggaugccacacaccucgggccccaauucugcaaaucuuguugguuugaaaauaagggacuggucgagugcaacaaucauuaccuuugucugaacugccucacgcugcuucugagcguuggcaaucgguguccuauuugcaaaaugccccucccuaccaagcugcgccccuccgugacaccuaccgcgccgcccacaagagcugccgacucuaucgggccucccccuuauagccccugaggacuagucccuguucccagagcccacuuuuuuuucuuuuuuugaaauaaaauagccugucuuucagaucucaaaggcucuuuucagagccaccaaaaaaaaaaaaaaaaaaaaaaaaaaaaaaaaaaaaaaaaaaaaaaaaaaaaaaaaaaaaaaaaaaaaaaaaaaaaaaaaaaaaaaaaaaaaaaaaaaaaa

SEQ ID NO: 22419 - RNA, 591 nt, Artificial Sequence
  mRNA product Design a-2 (hSL-A100) comprising derived and/or modified sequence from LASV(G733-SLE-2010;Clade IV)__AIT17152__Z (opt5)
aggagaguccgcucagccagguugcagaagcggcuuagcguguguccuaaucuucucucugcguguagguaggccugugccgcaaacaagcuuaccaugggcaacaagcaggccaaaacccccgagacaaaggacagcccuagagcuucccugaucccggaugccacgcaccucgggccccaauucugcaaaucuuguugguuugaaaauaagggacugguggagugcaacaaucauuaccuuugucugaacugccucacccugcuucugagcgucuccaaucgguguccuauuugcaaaaugccccucccuacaaagcugcgccccucuaccgcgccuacagcuccgcccgccggcgccgcugacaacaccagaccucccccuuauagccccugaggacuagucccuguucccagagcccacuuuuuuuucuuuuuuugaaauaaaauagccugucuuucagaucucaaaggcucuuuucagagccaccaaaaaaaaaaaaaaaaaaaaaaaaaaaaaaaaaaaaaaaaaaaaaaaaaaaaaaaaaaaaaaaaaaaaaaaaaaaaaaaaaaaaaaaaaaaaaaaaaaaaa

SEQ ID NO: 22420 - RNA, 603 nt, Artificial Sequence
  mRNA product Design a-2 (hSL-A100) comprising derived and/or modified sequence from MOPV/LASV reassortant(IGS-1;Clade IV)__AFY05533__Z (opt5)
aggagaguccgcucagccagguugcagaagcggcuuagcguguguccuaaucuucucucugcguguagguaggccugugccgcaaacaagcuuaccaugggcaagacccagagcaaagggcaacccuccacaaaccugcucaaggagacggaaccuagacacccggugauccccgacgcccggggaaccggcccugaguucugcaaaucuuguugguuugaacgcagagggcugguccggugcaaugaucauuaccuuugucugaacugccucacacugcuucacaccguuagcgaccgcugucccaucugcaagcauaaacugccuuucagacucgagcugcagacacagcccaccgcuccuccggaaauucccccuucccagaaucccccucccuauucuccgugaggacuagucccuguucccagagcccacuuuuuuuucuuuuuuugaaauaaaauagccugucuuucagaucucaaaggcucuuuucagagccaccaaaaaaaaaaaaaaaaaaaaaaaaaaaaaaaaaaaaaaaaaaaaaaaaaaaaaaaaaaaaaaaaaaaaaaaaaaaaaaaaaaaaaaaaaaaaaaaaaaaaa

SEQ ID NO: 22421 - RNA, 591 nt, Artificial Sequence
  mRNA product Design a-2 (hSL-A100) comprising derived and/or modified sequence from LASV(LM776-SLE-2012;Clade IV)__AIT17824__Z (opt5)
aggagaguccgcucagccagguugcagaagcggcuuagcguguguccuaaucuucucucugcguguagguaggccugugccgcaaacaagcuuaccaugggcaacaagcaggccaaagcuagcgaggaaaagaacucccccagagccucucugaucccugacgcgacccaccucgggccgcaauucugcaaaagcuguugguuugagaauaagggacugguggaaugcaauaaccauuaccuuugucugaauugccucacacugcuucuguccgucucuaaccggugucccauuugcaaaaugccucuccccacgaagcugcgcccuagcaccacacccaccgcuccuccgacaggcgccgccgauuccaucagacccccucccuauucuccuugaggacuagucccuguucccagagcccacuuuuuuuucuuuuuuugaaauaaaauagccugucuuucagaucucaaaggcucuuuucagagccaccaaaaaaaaaaaaaaaaaaaaaaaaaaaaaaaaaaaaaaaaaaaaaaaaaaaaaaaaaaaaaaaaaaaaaaaaaaaaaaaaaaaaaaaaaaaaaaaaaaaaa

SEQ ID NO: 22422 - RNA, 591 nt, Artificial Sequence
  mRNA product Design a-2 (hSL-A100) comprising derived and/or modified sequence from LASV(Mad39;Clade IV)__ANH09743__Z (opt5)
aggagaguccgcucagccagguugcagaagcggcuuagcguguguccuaaucuucucucugcguguagguaggccugugccgcaaacaagcuuaccaugggcaacaagcaggccaaagcuagcgagguggaagacgggcccagagccucccugaucccugaugcgacccaccucggaccgcaauucugcaagucuuguugguuugagaauaaaagccuggucgaaugcaacaaucauuaccuuugucugaacugccucacacugcuucuguccguuucuaaucggugucccauuugcaagaugccucuccccacgcgccugaaaccuagcguggugcccaccgcuccuccgacaagagccggcgacgggacccggcccccucccuauuccccuugaggacuagucccuguucccagagcccacuuuuuuuucuuuuuuugaaauaaaauagccugucuuucagaucucaaaggcucuuuucagagccaccaaaaaaaaaaaaaaaaaaaaaaaaaaaaaaaaaaaaaaaaaaaaaaaaaaaaaaaaaaaaaaaaaaaaaaaaaaaaaaaaaaaaaaaaaaaaaaaaaaaaa

SEQ ID NO: 22423 - RNA, 591 nt, Artificial Sequence
  mRNA product Design a-2 (hSL-A100) comprising derived and/or modified sequence from LASV(Z0947-SLE-2011;Clade IV)__AIT17838__Z (opt5)
aggagaguccgcucagccagguugcagaagcggcuuagcguguguccuaaucuucucucugcguguagguaggccugugccgcaaacaagcuuaccaugggcaacaagcaggccaaagugcccgagagcaaggacuccccuagagcuucucugaucccggaugccacccaccucgggccccaauucugcaaaagcuguugguuugaaaauaagggacuggucgagugcaacaaucauuaccuuugucugaacugccucacacugcuucuguccguuucuaaucgguguccuauuugcaaaaugccccucccuacgaagcugaagcccagcgcggcuccuaccgccccgcccacaggcgccgcugacuccauccgcccucccccuuauucucccugaggacuagucccuguucccagagcccacuuuuuuuucuuuuuuugaaauaaaauagccugucuuucagaucucaaaggcucuuuucagagccaccaaaaaaaaaaaaaaaaaaaaaaaaaaaaaaaaaaaaaaaaaaaaaaaaaaaaaaaaaaaaaaaaaaaaaaaaaaaaaaaaaaaaaaaaaaaaaaaaaaaaa

SEQ ID NO: 22424 - RNA, 567 nt, Artificial Sequence
  mRNA product Design a-2 (A100) comprising derived and/or modified sequence from LASV(Josiah;Clade IV)__ADY11072/NP_694871__Z (opt1)
aggagaguccgcucagccagguugcagaagcggcuuagcguguguccuaaucuucucucugcguguagguaggccugugccgcaaacaagcuuaccaugggcaacaagcaggccaaggcccccgagagcaaggacuccccgcgcgcgagccugauccccgacgccacccaccucgggccccaguucugcaaguccugcugguucgagaacaagggccugguggagugcaacaaccacuaccugugccucaacugccugacccugcuccugagcgucuccaaccggugccccaucugcaagaugccgcugcccacgaagcuccgccccagcgccgcccccaccgccccgcccaccggggcggccgacuccauccggcccccgcccuacagccccugaggacuagucccuguucccagagcccacuuuuuuuucuuuuuuugaaauaaaauagccugucuuucagaucuaaaaaaaaaaaaaaaaaaaaaaaaaaaaaaaaaaaaaaaaaaaaaaaaaaaaaaaaaaaaaaaaaaaaaaaaaaaaaaaaaaaaaaaaaaaaaaaaaaaa

SEQ ID NO: 22425 - RNA, 570 nt, Artificial Sequence
  mRNA product Design a-2 (A100) comprising derived and/or modified sequence from LASV(Pinneo-NIG-1969;Clade I)__AIT17834__Z (opt1)
aggagaguccgcucagccagguugcagaagcggcuuagcguguguccuaaucuucucucugcguguagguaggccugugccgcaaacaagcuuaccaugggcaacaagcagacccgcagcccgcccaagcccgagcacccccggcccacccugcuccccgacgccucccaccuggggccccaguucugcaagagcugcugguucgagaacaagggccugguggagugcaacaaccacuaccucugccugaacugccugacgcuccugcuguccgucagcgaccgcugccccaucugcaagaugccccuccccaccaagcuggccgugcggacccagcccuccgcgccgccccugaaccaggggaacacccagagcagcccgccgcccuacucccccugaggacuagucccuguucccagagcccacuuuuuuuucuuuuuuugaaauaaaauagccugucuuucagaucuaaaaaaaaaaaaaaaaaaaaaaaaaaaaaaaaaaaaaaaaaaaaaaaaaaaaaaaaaaaaaaaaaaaaaaaaaaaaaaaaaaaaaaaaaaaaaaaaaaaa

SEQ ID NO: 22426 - RNA, 567 nt, Artificial Sequence
  mRNA product Design a-2 (A100) comprising derived and/or modified sequence from LASV(Nig08-04;Clade II)__ADU56612__Z (opt1)
aggagaguccgcucagccagguugcagaagcggcuuagcguguguccuaaucuucucucugcguguagguaggccugugccgcaaacaagcuuaccaugggcaaccgccagacccggcccaccgaggccacggagcagagccgcgcccaccuggugccggacgccucccaccucgggccccaguucugcaagagcugcugguucgagaaccggggccuggucgagugcaacaaccacuaccugugccucaacugccugucccugcuccugagcguguccagccgcugccccaucugcaagaugccccugccgacccggcucaaggccuccgcccagcccagcgccccgcccaccgaggcgccccagaacaccacgcccccgcccuacacccccugaggacuagucccuguucccagagcccacuuuuuuuucuuuuuuugaaauaaaauagccugucuuucagaucuaaaaaaaaaaaaaaaaaaaaaaaaaaaaaaaaaaaaaaaaaaaaaaaaaaaaaaaaaaaaaaaaaaaaaaaaaaaaaaaaaaaaaaaaaaaaaaaaaaaa

SEQ ID NO: 22427 - RNA, 567 nt, Artificial Sequence
  mRNA product Design a-2 (A100) comprising derived and/or modified sequence from LASV(Nig08-A19;Clade III)__ADU56620__Z (opt1)
aggagaguccgcucagccagguugcagaagcggcuuagcguguguccuaaucuucucucugcguguagguaggccugugccgcaaacaagcuuaccaugggcgggaagcacaccaagccccagcgcgagagcaacuccccgcgggccagccugauccccgacgccacccaccucggcccccaguucugcaaguccugcugguucgagaacaaggggcugguggagugcaacaaccacuaccugugccucaacugccugacgcugcuccugagcguguccaaccgcugccccaucugcaagaugccccugcccacccggcuccgcgccagcaccaaccccaccgcgccccagguggagcaggucggcccgacgaacccgccgcccuacucccccugaggacuagucccuguucccagagcccacuuuuuuuucuuuuuuugaaauaaaauagccugucuuucagaucuaaaaaaaaaaaaaaaaaaaaaaaaaaaaaaaaaaaaaaaaaaaaaaaaaaaaaaaaaaaaaaaaaaaaaaaaaaaaaaaaaaaaaaaaaaaaaaaaaaaa

SEQ ID NO: 22428 - RNA, 567 nt, Artificial Sequence
  mRNA product Design a-2 (A100) comprising derived and/or modified sequence from LASV(AV;Clade V)__CCA30312__Z (opt1)
aggagaguccgcucagccagguugcagaagcggcuuagcguguguccuaaucuucucucugcguguagguaggccugugccgcaaacaagcuuaccaugggcaaccgccaggccaagaaccccgagguggagaacagcccccgggccucccugauccccgacgcgacccaccucgggccccaguucugcaagagcugcugguucgagaacaagggccuggucgagugcaacaaccacuaccugugccucaacugccugucccugcuccugagcguguccaaccgcugccccaucugcaagaugccgcugcccacccggcuccgccccacgaccacccccaccgccccgcagaucaucaaggagaacacgaccaacccgccgcccuacacccccugaggacuagucccuguucccagagcccacuuuuuuuucuuuuuuugaaauaaaauagccugucuuucagaucuaaaaaaaaaaaaaaaaaaaaaaaaaaaaaaaaaaaaaaaaaaaaaaaaaaaaaaaaaaaaaaaaaaaaaaaaaaaaaaaaaaaaaaaaaaaaaaaaaaaa

SEQ ID NO: 22429 - RNA, 567 nt, Artificial Sequence
  mRNA product Design a-2 (A100) comprising derived and/or modified sequence from LASV(Togo/2016/7082;Clade VI)__AMR44579__Z (opt1)
aggagaguccgcucagccagguugcagaagcggcuuagcguguguccuaaucuucucucugcguguagguaggccugugccgcaaacaagcuuaccaugggcgcccgccagaccaagcagccccagaucgaggggagcccccgggccucccuggugcccgacgcgagccaccucggcccccaguucugcaaguccugcugguucgagaacaaggggcuggucgagugcaacaaccacuaccugugccucaacugccugagccugcuccuguccgugagcaaccgcugccccaucugcaagaugccgcugcccaccaagcuccggguguccagcgcccccuccgcgcccccggccgccacggcccagcccggcaccccgccgcccuacagccccugaggacuagucccuguucccagagcccacuuuuuuuucuuuuuuugaaauaaaauagccugucuuucagaucuaaaaaaaaaaaaaaaaaaaaaaaaaaaaaaaaaaaaaaaaaaaaaaaaaaaaaaaaaaaaaaaaaaaaaaaaaaaaaaaaaaaaaaaaaaaaaaaaaaaa

SEQ ID NO: 22430 - RNA, 567 nt, Artificial Sequence
  mRNA product Design a-2 (A100) comprising derived and/or modified sequence from LASV(KAK-428;Clade n.d. (VII))__ANH09761__Z (opt1)
aggagaguccgcucagccagguugcagaagcggcuuagcguguguccuaaucuucucucugcguguagguaggccugugccgcaaacaagcuuaccaugggcaacaaggggaccaagcccacccagaacagcgagcccucccgcgccaaccuggugcccgacgccagcuaccucggcccccaguucugcaaguccugcugguucgagaacaaggggcuggucgagugcaacaaccacuaccugugccucaacugccugacgaugcugcucagcguguccaaccggugccccaucugcaagaugccgcugcccaccaagaucaaggccagcggcucccccagcgcgcccccgaccgaggccaacuccgccgugagcccgccgcccuacacccccugaggacuagucccuguucccagagcccacuuuuuuuucuuuuuuugaaauaaaauagccugucuuucagaucuaaaaaaaaaaaaaaaaaaaaaaaaaaaaaaaaaaaaaaaaaaaaaaaaaaaaaaaaaaaaaaaaaaaaaaaaaaaaaaaaaaaaaaaaaaaaaaaaaaaa

SEQ ID NO: 22431 - RNA, 567 nt, Artificial Sequence
  mRNA product Design a-2 (A100) comprising derived and/or modified sequence from LASV(ISTH0009-NIG-2011;Clade II)__AIT17402__Z (opt1)
aggagaguccgcucagccagguugcagaagcggcuuagcguguguccuaaucuucucucugcguguagguaggccugugccgcaaacaagcuuaccaugggcaaccgccaggccaagagcaccaagguggacgagcaccagcgggcccaccugguccccgacgcgucccaccucgggccccaguucugcaagagcugcugguucgagaaccgcggccugguggagugcaacaaccacuaccugugccucaacugccugucccugcuccugagcguguccagccggugccccaucugcaagaugccccugcccaccaagcucaaggccgccgcccagccguccgcccccagcacggagaccauccagaacaccaccccgccgcccuacacgcccugaggacuagucccuguucccagagcccacuuuuuuuucuuuuuuugaaauaaaauagccugucuuucagaucuaaaaaaaaaaaaaaaaaaaaaaaaaaaaaaaaaaaaaaaaaaaaaaaaaaaaaaaaaaaaaaaaaaaaaaaaaaaaaaaaaaaaaaaaaaaaaaaaaaaa

SEQ ID NO: 22432 - RNA, 567 nt, Artificial Sequence
  mRNA product Design a-2 (A100) comprising derived and/or modified sequence from LASV(ISTH2010-NIG-2012;Clade II)__AIT17480__Z (opt1)
aggagaguccgcucagccagguugcagaagcggcuuagcguguguccuaaucuucucucugcguguagguaggccugugccgcaaacaagcuuaccaugggcaaccgccacgccaagagcaccaagguggacgagcaccagcgggcccaccugguccccgacgcgucccaccucgggccccaguucugcaagagcugcugguucgagaaccgcggccugguggagugcaacaaccacuaccugugccucaacugccugucccugcuccugagcguguccagccggugccccaucugcaagaugccccugcccaccaagcucaaggccgccgcccagccguccgcccccagcacggaggucauccaguccaccaccccgccgcccuacacccccugaggacuagucccuguucccagagcccacuuuuuuuucuuuuuuugaaauaaaauagccugucuuucagaucuaaaaaaaaaaaaaaaaaaaaaaaaaaaaaaaaaaaaaaaaaaaaaaaaaaaaaaaaaaaaaaaaaaaaaaaaaaaaaaaaaaaaaaaaaaaaaaaaaaaa

SEQ ID NO: 22433 - RNA, 567 nt, Artificial Sequence
  mRNA product Design a-2 (A100) comprising derived and/or modified sequence from LASV(Lassa virus/H.sapiens-wt/NGA/2016/ISTH_0017;Clade II)__AVO03713__Z (opt1)
aggagaguccgcucagccagguugcagaagcggcuuagcguguguccuaaucuucucucugcguguagguaggccugugccgcaaacaagcuuaccaugggcaaccgccaggccaagagcaccaagguggacgagcaccagcgggcccaccugguccccgacgcgucccaccucgggccccaguucugcaagagcugcugguucgagaaccgcggccugguggagugcaacaaccacuaccugugccucaacugccugucccugcuccugagcguguccagccggugccccaucugcaagaugccccugcccaccaagcucaaggccgccacgcagccguccgcccccagcaccgaggucaaccagaacaccaccccgccgcccuacacgcccugaggacuagucccuguucccagagcccacuuuuuuuucuuuuuuugaaauaaaauagccugucuuucagaucuaaaaaaaaaaaaaaaaaaaaaaaaaaaaaaaaaaaaaaaaaaaaaaaaaaaaaaaaaaaaaaaaaaaaaaaaaaaaaaaaaaaaaaaaaaaaaaaaaaaa

SEQ ID NO: 22434 - RNA, 567 nt, Artificial Sequence
  mRNA product Design a-2 (A100) comprising derived and/or modified sequence from LASV(Lassa virus/H.sapiens-wt/NGA/2018/ISTH_0959;Clade II)__AVV65084__Z (opt1)
aggagaguccgcucagccagguugcagaagcggcuuagcguguguccuaaucuucucucugcguguagguaggccugugccgcaaacaagcuuaccaugggcaacaagcaggccaagagcaccaagguggacgagcaccagcgcgcccaccugguccccgacgcgucccaccucgggccccaguucugcaagagcugcugguucgagaaccggggccugguggagugcaacaaccacuaccugugccucaacugccugucccugcuccugagcguguccagccgcugccccaucugcaagaugccccugcccaccaagcucaaggccgccgcccagccguccgcccccagcacggaggcgauccaguccaccaccccgccgcccuacacccccugaggacuagucccuguucccagagcccacuuuuuuuucuuuuuuugaaauaaaauagccugucuuucagaucuaaaaaaaaaaaaaaaaaaaaaaaaaaaaaaaaaaaaaaaaaaaaaaaaaaaaaaaaaaaaaaaaaaaaaaaaaaaaaaaaaaaaaaaaaaaaaaaaaaaa

SEQ ID NO: 22435 - RNA, 567 nt, Artificial Sequence
  mRNA product Design a-2 (A100) comprising derived and/or modified sequence from LASV(LASV003-NIG-2008;Clade II)__AIT17578__Z (opt1)
aggagaguccgcucagccagguugcagaagcggcuuagcguguguccuaaucuucucucugcguguagguaggccugugccgcaaacaagcuuaccaugggcaaccgccaggccaagagcaccaagguggacgagcaccagcgggcccaccugguccccgacgcgucccaccucgggccccaguucugcaagagcugcugguucgagaacaagggccugguggagugcaacaaccacuaccugugccucaacugccugucccugcuccugagcguguccagccgcugccccaucugcaagaugccccugcccaccaagcuccgggccgccgcccagccguccgcccccagcacggaguccgcgcagaacaccgccccgccgcccuacgcccccugaggacuagucccuguucccagagcccacuuuuuuuucuuuuuuugaaauaaaauagccugucuuucagaucuaaaaaaaaaaaaaaaaaaaaaaaaaaaaaaaaaaaaaaaaaaaaaaaaaaaaaaaaaaaaaaaaaaaaaaaaaaaaaaaaaaaaaaaaaaaaaaaaaaaa

SEQ ID NO: 22436 - RNA, 567 nt, Artificial Sequence
  mRNA product Design a-2 (A100) comprising derived and/or modified sequence from LASV(LASV035-NIG-2009;Clade II)__AIT17586__Z (opt1)
aggagaguccgcucagccagguugcagaagcggcuuagcguguguccuaaucuucucucugcguguagguaggccugugccgcaaacaagcuuaccaugggcaacaagcaggccaagagcaccaagguggacgagcaccagcgcgcccaccugguccccgacgcgucccaccucgggccccaguucugcaagagcugcugguucgagaaccggggccugguggagugcaacaaccacuaccugugccucaacugccugucccugcuccugagcguguccagccgcugccccaucugcaagaugccccugcccacccggcucaaggccgccgcccagccguccgcccccagcacggaggucacccagaacaccaccccgccgcccuacacgcccugaggacuagucccuguucccagagcccacuuuuuuuucuuuuuuugaaauaaaauagccugucuuucagaucuaaaaaaaaaaaaaaaaaaaaaaaaaaaaaaaaaaaaaaaaaaaaaaaaaaaaaaaaaaaaaaaaaaaaaaaaaaaaaaaaaaaaaaaaaaaaaaaaaaaa

SEQ ID NO: 22437 - RNA, 567 nt, Artificial Sequence
  mRNA product Design a-2 (A100) comprising derived and/or modified sequence from LASV(LASV1000-NIG-2009;Clade II)__AIT17780__Z (opt1)
aggagaguccgcucagccagguugcagaagcggcuuagcguguguccuaaucuucucucugcguguagguaggccugugccgcaaacaagcuuaccaugggcaaccgccagaccaagagcaccaagguggacgagcaccagcgggccuaccugguccccgacgccucccuccuggggccccaguucugcaagagcugcugguucgagaacaagggccugguggagugcaacaaccacuaccucugccugaacugccugucccuccugcugagcguguccagccgcugccccaucugcaagaugccccuccccacgcggcugaaggcggccgcccagcccuccgccccgcccaccgaggccauccagaacaccacgccgccgcccuacacccccugaggacuagucccuguucccagagcccacuuuuuuuucuuuuuuugaaauaaaauagccugucuuucagaucuaaaaaaaaaaaaaaaaaaaaaaaaaaaaaaaaaaaaaaaaaaaaaaaaaaaaaaaaaaaaaaaaaaaaaaaaaaaaaaaaaaaaaaaaaaaaaaaaaaaa

SEQ ID NO: 22438 - RNA, 567 nt, Artificial Sequence
  mRNA product Design a-2 (A100) comprising derived and/or modified sequence from LASV(LASV221-NIG-2010;Clade II)__AIT17622__Z (opt1)
aggagaguccgcucagccagguugcagaagcggcuuagcguguguccuaaucuucucucugcguguagguaggccugugccgcaaacaagcuuaccaugggcaaccgccaggccaagagcaccaagguggacgagcaccagcgggcccaccugguccccgacgcgucccaccucgggccccaguucugcaagagcugcugguucgagaaccgcggccugguggagugcaacaaccacuaccugugccucaacugccugucccugcuccugagcguguccagccggugccccaucugcaagaugccccugcccaccaagcucaaggccgccacgcagccguccgcccccagcaccgaggucacccagaacaccaucccgccgcccuacucccccugaggacuagucccuguucccagagcccacuuuuuuuucuuuuuuugaaauaaaauagccugucuuucagaucuaaaaaaaaaaaaaaaaaaaaaaaaaaaaaaaaaaaaaaaaaaaaaaaaaaaaaaaaaaaaaaaaaaaaaaaaaaaaaaaaaaaaaaaaaaaaaaaaaaaa

SEQ ID NO: 22439 - RNA, 567 nt, Artificial Sequence
  mRNA product Design a-2 (A100) comprising derived and/or modified sequence from LASV(LASV237-NIG-2010;Clade II)__AIT17636__Z (opt1)
aggagaguccgcucagccagguugcagaagcggcuuagcguguguccuaaucuucucucugcguguagguaggccugugccgcaaacaagcuuaccaugggcaaccgccaggccaagagcaccaagguggacgagcaccagcgggcccaccugguccccgacgcgucccaccucgggccccaguucugcaagagcugcugguucgagaaccgcggccugguggagugcaacaaccacuaccugugccucaacugccugucccugcuccugagcguguccagccggugccccaucugcaagaugccccugcccaccaagcucaaggccgccgcccagccguccgcccccagcaucgagacgauccagaacaccaccccgccgcccuacacccccugaggacuagucccuguucccagagcccacuuuuuuuucuuuuuuugaaauaaaauagccugucuuucagaucuaaaaaaaaaaaaaaaaaaaaaaaaaaaaaaaaaaaaaaaaaaaaaaaaaaaaaaaaaaaaaaaaaaaaaaaaaaaaaaaaaaaaaaaaaaaaaaaaaaaa

SEQ ID NO: 22440 - RNA, 567 nt, Artificial Sequence
  mRNA product Design a-2 (A100) comprising derived and/or modified sequence from LASV(LASV253-NIG-2011;Clade II)__AIT17668__Z (opt1)
aggagaguccgcucagccagguugcagaagcggcuuagcguguguccuaaucuucucucugcguguagguaggccugugccgcaaacaagcuuaccaugggcaaccgccaggccaagagcaccaagguggacgagcaccagcgggcccaccugguccccgacgcgucccaccucgggccccaguucugcaagagcugcugguucgagaacaagggccugguggagugcaacaaccacuaccugugccucaacugccugucccugcuccugagcguguccagccgcugccccaucugcaagaugccccugcccaccaagcucaagacgaccgcccagccguccgccccgcccaccgaggccgccaagaacaccgcgcccccgcccuacgcccccugaggacuagucccuguucccagagcccacuuuuuuuucuuuuuuugaaauaaaauagccugucuuucagaucuaaaaaaaaaaaaaaaaaaaaaaaaaaaaaaaaaaaaaaaaaaaaaaaaaaaaaaaaaaaaaaaaaaaaaaaaaaaaaaaaaaaaaaaaaaaaaaaaaaaa

SEQ ID NO: 22441 - RNA, 567 nt, Artificial Sequence
  mRNA product Design a-2 (A100) comprising derived and/or modified sequence from LASV(G1180-SLE-2010;Clade IV)__AIT17166__Z (opt1)
aggagaguccgcucagccagguugcagaagcggcuuagcguguguccuaaucuucucucugcguguagguaggccugugccgcaaacaagcuuaccaugggcaacaagcaggccaaggcccccgaggcgaaggacagcccgcgcgccucccugauccccgacgccacccaccucgggccccaguucugcaagagcugcugguucgagaccaagggccugguggagugcaacaaccacuaccugugccucaacugccugacgcugcuccuguccgucagcaaccggugccccaucugcaagaugccgcugcccaccaagcuccgccccuccgccacccccaccgccccgcccacggaggcggccgacagcaucgggcccccgcccuacucccccugaggacuagucccuguucccagagcccacuuuuuuuucuuuuuuugaaauaaaauagccugucuuucagaucuaaaaaaaaaaaaaaaaaaaaaaaaaaaaaaaaaaaaaaaaaaaaaaaaaaaaaaaaaaaaaaaaaaaaaaaaaaaaaaaaaaaaaaaaaaaaaaaaaaaa

SEQ ID NO: 22442 - RNA, 567 nt, Artificial Sequence
  mRNA product Design a-2 (A100) comprising derived and/or modified sequence from LASV(G1442-SLE-2011;Clade IV)__AIT17178__Z (opt1)
aggagaguccgcucagccagguugcagaagcggcuuagcguguguccuaaucuucucucugcguguagguaggccugugccgcaaacaagcuuaccaugggcaacaagcaggccaaggccagcgaggcgaaggacagcccccgcgccucccugaucccggacgccacccaccucgggccccaguucugcaaguccugcugguucgagaacaagggccugguggagugcaacaaccacuaccugugccucaacugccugagccugcuccuguccgucagcucccggugccccaucugcaagaugccccugccgacccgccuccggcccagcacggcccccaccgcgcccccggcccgcgccggggacaacaucaagcccccgcccuacucccccugaggacuagucccuguucccagagcccacuuuuuuuucuuuuuuugaaauaaaauagccugucuuucagaucuaaaaaaaaaaaaaaaaaaaaaaaaaaaaaaaaaaaaaaaaaaaaaaaaaaaaaaaaaaaaaaaaaaaaaaaaaaaaaaaaaaaaaaaaaaaaaaaaaaaa

SEQ ID NO: 22443 - RNA, 567 nt, Artificial Sequence
  mRNA product Design a-2 (A100) comprising derived and/or modified sequence from LASV(G502-SLE-2009;Clade IV)__AIT17124__Z (opt1)
aggagaguccgcucagccagguugcagaagcggcuuagcguguguccuaaucuucucucugcguguagguaggccugugccgcaaacaagcuuaccaugggcaacaagcaggucaagacccccgaggccaaggacagcccccgcgccucccugauccccgacgcgacccaccucgggccccaguucugcaagagcugcugguucgagaacaagggccugguggagugcaacaaccacuaccugugccucaacugccugacgcugcuccuguccguggggaaccggugccccaucugcaagaugccgcugcccaccaagcuccgccccagcgugacccccaccgccccgcccacgcgggccgccgacuccaucggcccgccgcccuacagccccugaggacuagucccuguucccagagcccacuuuuuuuucuuuuuuugaaauaaaauagccugucuuucagaucuaaaaaaaaaaaaaaaaaaaaaaaaaaaaaaaaaaaaaaaaaaaaaaaaaaaaaaaaaaaaaaaaaaaaaaaaaaaaaaaaaaaaaaaaaaaaaaaaaaaa

SEQ ID NO: 22444 - RNA, 567 nt, Artificial Sequence
  mRNA product Design a-2 (A100) comprising derived and/or modified sequence from LASV(G733-SLE-2010;Clade IV)__AIT17152__Z (opt1)
aggagaguccgcucagccagguugcagaagcggcuuagcguguguccuaaucuucucucugcguguagguaggccugugccgcaaacaagcuuaccaugggcaacaagcaggccaagacccccgagaccaaggacagcccgcgcgccucccugauccccgacgcgacgcaccucgggccccaguucugcaagagcugcugguucgagaacaagggccugguggagugcaacaaccacuaccugugccucaacugccugacccugcuccuguccgucagcaaccggugccccaucugcaagaugccgcugcccaccaagcuccgccccuccaccgcccccacggccccgcccgccggggccgcggacaacacccggcccccgcccuacagccccugaggacuagucccuguucccagagcccacuuuuuuuucuuuuuuugaaauaaaauagccugucuuucagaucuaaaaaaaaaaaaaaaaaaaaaaaaaaaaaaaaaaaaaaaaaaaaaaaaaaaaaaaaaaaaaaaaaaaaaaaaaaaaaaaaaaaaaaaaaaaaaaaaaaaa

SEQ ID NO: 22445 - RNA, 579 nt, Artificial Sequence
  mRNA product Design a-2 (A100) comprising derived and/or modified sequence from MOPV/LASV reassortant(IGS-1;Clade IV)__AFY05533__Z (opt1)
aggagaguccgcucagccagguugcagaagcggcuuagcguguguccuaaucuucucucugcguguagguaggccugugccgcaaacaagcuuaccaugggcaagacccagagcaaggggcagcccuccaccaaccugcucaaggagacggagccccgccaccccgugauccccgacgcccggggcaccgggcccgaguucugcaagagcugcugguucgagcgccggggccugguccgcugcaacgaccacuaccugugccucaacugccugacccugcuccacaccguguccgaccggugccccaucugcaagcacaagcugcccuuccgccuggagcuccagacgcagcccaccgccccgcccgagaucccgcccagccagaacccgccgcccuacucccccugaggacuagucccuguucccagagcccacuuuuuuuucuuuuuuugaaauaaaauagccugucuuucagaucuaaaaaaaaaaaaaaaaaaaaaaaaaaaaaaaaaaaaaaaaaaaaaaaaaaaaaaaaaaaaaaaaaaaaaaaaaaaaaaaaaaaaaaaaaaaaaaaaaaaa

SEQ ID NO: 22446 - RNA, 567 nt, Artificial Sequence
  mRNA product Design a-2 (A100) comprising derived and/or modified sequence from LASV(LM776-SLE-2012;Clade IV)__AIT17824__Z (opt1)
aggagaguccgcucagccagguugcagaagcggcuuagcguguguccuaaucuucucucugcguguagguaggccugugccgcaaacaagcuuaccaugggcaacaagcaggccaaggccagcgaggagaagaacagcccccgcgccucccugaucccggacgccacccaccucgggccccaguucugcaaguccugcugguucgagaacaagggccugguggagugcaacaaccacuaccugugccucaacugccugacccugcuccugagcgucuccaaccggugccccaucugcaagaugccccugccgacgaagcuccgccccagcaccacccccaccgcgcccccgacgggggccgccgacuccauccggcccccgcccuacagccccugaggacuagucccuguucccagagcccacuuuuuuuucuuuuuuugaaauaaaauagccugucuuucagaucuaaaaaaaaaaaaaaaaaaaaaaaaaaaaaaaaaaaaaaaaaaaaaaaaaaaaaaaaaaaaaaaaaaaaaaaaaaaaaaaaaaaaaaaaaaaaaaaaaaaa

SEQ ID NO: 22447 - RNA, 567 nt, Artificial Sequence
  mRNA product Design a-2 (A100) comprising derived and/or modified sequence from LASV(Mad39;Clade IV)__ANH09743__Z (opt1)
aggagaguccgcucagccagguugcagaagcggcuuagcguguguccuaaucuucucucugcguguagguaggccugugccgcaaacaagcuuaccaugggcaacaagcaggccaaggccagcgagguggaggacgggccccgcgccucccugauccccgacgccacccaccucggcccccaguucugcaagagcugcugguucgagaacaagucccuggucgagugcaacaaccacuaccugugccucaacugccugacccugcuccugagcguguccaaccggugccccaucugcaagaugccccugccgacgcgccucaagcccagcgugguccccaccgcgcccccgacccgggccggggacggcacccgcccgccgcccuacucccccugaggacuagucccuguucccagagcccacuuuuuuuucuuuuuuugaaauaaaauagccugucuuucagaucuaaaaaaaaaaaaaaaaaaaaaaaaaaaaaaaaaaaaaaaaaaaaaaaaaaaaaaaaaaaaaaaaaaaaaaaaaaaaaaaaaaaaaaaaaaaaaaaaaaaa

SEQ ID NO: 22448 - RNA, 567 nt, Artificial Sequence
  mRNA product Design a-2 (A100) comprising derived and/or modified sequence from LASV(Z0947-SLE-2011;Clade IV)__AIT17838__Z (opt1)
aggagaguccgcucagccagguugcagaagcggcuuagcguguguccuaaucuucucucugcguguagguaggccugugccgcaaacaagcuuaccaugggcaacaagcaggccaaggugcccgagagcaaggacuccccgcgcgccagccugauccccgacgcgacccaccucgggccccaguucugcaaguccugcugguucgagaacaagggccuggucgagugcaacaaccacuaccugugccucaacugccugacccugcuccugagcguguccaaccgcugccccaucugcaagaugccgcugcccacgaagcucaagcccagcgccgcccccaccgccccgcccaccggggccgcggacuccauccggcccccgcccuacagccccugaggacuagucccuguucccagagcccacuuuuuuuucuuuuuuugaaauaaaauagccugucuuucagaucuaaaaaaaaaaaaaaaaaaaaaaaaaaaaaaaaaaaaaaaaaaaaaaaaaaaaaaaaaaaaaaaaaaaaaaaaaaaaaaaaaaaaaaaaaaaaaaaaaaaa

SEQ ID NO: 22449 - RNA, 567 nt, Artificial Sequence
  mRNA product Design a-2 (A100) comprising derived and/or modified sequence from LASV(Josiah;Clade IV)__ADY11072/NP_694871__Z (opt4)
aggagaguccgcucagccagguugcagaagcggcuuagcguguguccuaaucuucucucugcguguagguaggccugugccgcaaacaagcuuaccaugggcaacaagcaggccaaggcccccgagagcaaggacagccccagagccagccugauccccgacgccacccaccugggcccccaguucugcaagagcugcugguucgagaacaagggccugguggagugcaacaaccacuaccugugccugaacugccugacccugcugcugagcgugagcaacagaugccccaucugcaagaugccccugcccaccaagcugagacccagcgccgcccccaccgccccccccaccggcgccgccgacagcaucagacccccccccuacagccccugaggacuagucccuguucccagagcccacuuuuuuuucuuuuuuugaaauaaaauagccugucuuucagaucuaaaaaaaaaaaaaaaaaaaaaaaaaaaaaaaaaaaaaaaaaaaaaaaaaaaaaaaaaaaaaaaaaaaaaaaaaaaaaaaaaaaaaaaaaaaaaaaaaaaa

SEQ ID NO: 22450 - RNA, 570 nt, Artificial Sequence
  mRNA product Design a-2 (A100) comprising derived and/or modified sequence from LASV(Pinneo-NIG-1969;Clade I)__AIT17834__Z (opt4)
aggagaguccgcucagccagguugcagaagcggcuuagcguguguccuaaucuucucucugcguguagguaggccugugccgcaaacaagcuuaccaugggcaacaagcagaccagaagcccccccaagcccgagcaccccagacccacccugcugcccgacgccagccaccugggcccccaguucugcaagagcugcugguucgagaacaagggccugguggagugcaacaaccacuaccugugccugaacugccugacccugcugcugagcgugagcgacagaugccccaucugcaagaugccccugcccaccaagcuggccgugagaacccagcccagcgcccccccccugaaccagggcaacacccagagcagccccccccccuacagccccugaggacuagucccuguucccagagcccacuuuuuuuucuuuuuuugaaauaaaauagccugucuuucagaucuaaaaaaaaaaaaaaaaaaaaaaaaaaaaaaaaaaaaaaaaaaaaaaaaaaaaaaaaaaaaaaaaaaaaaaaaaaaaaaaaaaaaaaaaaaaaaaaaaaaa

SEQ ID NO: 22451 - RNA, 567 nt, Artificial Sequence
  mRNA product Design a-2 (A100) comprising derived and/or modified sequence from LASV(Nig08-04;Clade II)__ADU56612__Z (opt4)
aggagaguccgcucagccagguugcagaagcggcuuagcguguguccuaaucuucucucugcguguagguaggccugugccgcaaacaagcuuaccaugggcaacagacagaccagacccaccgaggccaccgagcagagcagagcccaccuggugcccgacgccagccaccugggcccccaguucugcaagagcugcugguucgagaacagaggccugguggagugcaacaaccacuaccugugccugaacugccugagccugcugcugagcgugagcagcagaugccccaucugcaagaugccccugcccaccagacugaaggccagcgcccagcccagcgccccccccaccgaggccccccagaacaccacccccccccccuacacccccugaggacuagucccuguucccagagcccacuuuuuuuucuuuuuuugaaauaaaauagccugucuuucagaucuaaaaaaaaaaaaaaaaaaaaaaaaaaaaaaaaaaaaaaaaaaaaaaaaaaaaaaaaaaaaaaaaaaaaaaaaaaaaaaaaaaaaaaaaaaaaaaaaaaaa

SEQ ID NO: 22452 - RNA, 567 nt, Artificial Sequence
  mRNA product Design a-2 (A100) comprising derived and/or modified sequence from LASV(Nig08-A19;Clade III)__ADU56620__Z (opt4)
aggagaguccgcucagccagguugcagaagcggcuuagcguguguccuaaucuucucucugcguguagguaggccugugccgcaaacaagcuuaccaugggcggcaagcacaccaagccccagagagagagcaacagccccagagccagccugauccccgacgccacccaccugggcccccaguucugcaagagcugcugguucgagaacaagggccugguggagugcaacaaccacuaccugugccugaacugccugacccugcugcugagcgugagcaacagaugccccaucugcaagaugccccugcccaccagacugagagccagcaccaaccccaccgccccccagguggagcaggugggccccaccaaccccccccccuacagccccugaggacuagucccuguucccagagcccacuuuuuuuucuuuuuuugaaauaaaauagccugucuuucagaucuaaaaaaaaaaaaaaaaaaaaaaaaaaaaaaaaaaaaaaaaaaaaaaaaaaaaaaaaaaaaaaaaaaaaaaaaaaaaaaaaaaaaaaaaaaaaaaaaaaaa

SEQ ID NO: 22453 - RNA, 567 nt, Artificial Sequence
  mRNA product Design a-2 (A100) comprising derived and/or modified sequence from LASV(AV;Clade V)__CCA30312__Z (opt4)
aggagaguccgcucagccagguugcagaagcggcuuagcguguguccuaaucuucucucugcguguagguaggccugugccgcaaacaagcuuaccaugggcaacagacaggccaagaaccccgagguggagaacagccccagagccagccugauccccgacgccacccaccugggcccccaguucugcaagagcugcugguucgagaacaagggccugguggagugcaacaaccacuaccugugccugaacugccugagccugcugcugagcgugagcaacagaugccccaucugcaagaugccccugcccaccagacugagacccaccaccacccccaccgccccccagaucaucaaggagaacaccaccaaccccccccccuacacccccugaggacuagucccuguucccagagcccacuuuuuuuucuuuuuuugaaauaaaauagccugucuuucagaucuaaaaaaaaaaaaaaaaaaaaaaaaaaaaaaaaaaaaaaaaaaaaaaaaaaaaaaaaaaaaaaaaaaaaaaaaaaaaaaaaaaaaaaaaaaaaaaaaaaaa

SEQ ID NO: 22454 - RNA, 567 nt, Artificial Sequence
  mRNA product Design a-2 (A100) comprising derived and/or modified sequence from LASV(Togo/2016/7082;Clade VI)__AMR44579__Z (opt4)
aggagaguccgcucagccagguugcagaagcggcuuagcguguguccuaaucuucucucugcguguagguaggccugugccgcaaacaagcuuaccaugggcgccagacagaccaagcagccccagaucgagggcagccccagagccagccuggugcccgacgccagccaccugggcccccaguucugcaagagcugcugguucgagaacaagggccugguggagugcaacaaccacuaccugugccugaacugccugagccugcugcugagcgugagcaacagaugccccaucugcaagaugccccugcccaccaagcugagagugagcagcgcccccagcgccccccccgccgccaccgcccagcccggcacccccccccccuacagccccugaggacuagucccuguucccagagcccacuuuuuuuucuuuuuuugaaauaaaauagccugucuuucagaucuaaaaaaaaaaaaaaaaaaaaaaaaaaaaaaaaaaaaaaaaaaaaaaaaaaaaaaaaaaaaaaaaaaaaaaaaaaaaaaaaaaaaaaaaaaaaaaaaaaaa

SEQ ID NO: 22455 - RNA, 567 nt, Artificial Sequence
  mRNA product Design a-2 (A100) comprising derived and/or modified sequence from LASV(KAK-428;Clade n.d. (VII))__ANH09761__Z (opt4)
aggagaguccgcucagccagguugcagaagcggcuuagcguguguccuaaucuucucucugcguguagguaggccugugccgcaaacaagcuuaccaugggcaacaagggcaccaagcccacccagaacagcgagcccagcagagccaaccuggugcccgacgccagcuaccugggcccccaguucugcaagagcugcugguucgagaacaagggccugguggagugcaacaaccacuaccugugccugaacugccugaccaugcugcugagcgugagcaacagaugccccaucugcaagaugccccugcccaccaagaucaaggccagcggcagccccagcgccccccccaccgaggccaacagcgccgugagccccccccccuacacccccugaggacuagucccuguucccagagcccacuuuuuuuucuuuuuuugaaauaaaauagccugucuuucagaucuaaaaaaaaaaaaaaaaaaaaaaaaaaaaaaaaaaaaaaaaaaaaaaaaaaaaaaaaaaaaaaaaaaaaaaaaaaaaaaaaaaaaaaaaaaaaaaaaaaaa

SEQ ID NO: 22456 - RNA, 567 nt, Artificial Sequence
  mRNA product Design a-2 (A100) comprising derived and/or modified sequence from LASV(ISTH0009-NIG-2011;Clade II)__AIT17402__Z (opt4)
aggagaguccgcucagccagguugcagaagcggcuuagcguguguccuaaucuucucucugcguguagguaggccugugccgcaaacaagcuuaccaugggcaacagacaggccaagagcaccaagguggacgagcaccagagagcccaccuggugcccgacgccagccaccugggcccccaguucugcaagagcugcugguucgagaacagaggccugguggagugcaacaaccacuaccugugccugaacugccugagccugcugcugagcgugagcagcagaugccccaucugcaagaugccccugcccaccaagcugaaggccgccgcccagcccagcgcccccagcaccgagaccauccagaacaccacccccccccccuacacccccugaggacuagucccuguucccagagcccacuuuuuuuucuuuuuuugaaauaaaauagccugucuuucagaucuaaaaaaaaaaaaaaaaaaaaaaaaaaaaaaaaaaaaaaaaaaaaaaaaaaaaaaaaaaaaaaaaaaaaaaaaaaaaaaaaaaaaaaaaaaaaaaaaaaaa

SEQ ID NO: 22457 - RNA, 567 nt, Artificial Sequence
  mRNA product Design a-2 (A100) comprising derived and/or modified sequence from LASV(ISTH2010-NIG-2012;Clade II)__AIT17480__Z (opt4)
aggagaguccgcucagccagguugcagaagcggcuuagcguguguccuaaucuucucucugcguguagguaggccugugccgcaaacaagcuuaccaugggcaacagacacgccaagagcaccaagguggacgagcaccagagagcccaccuggugcccgacgccagccaccugggcccccaguucugcaagagcugcugguucgagaacagaggccugguggagugcaacaaccacuaccugugccugaacugccugagccugcugcugagcgugagcagcagaugccccaucugcaagaugccccugcccaccaagcugaaggccgccgcccagcccagcgcccccagcaccgaggugauccagagcaccacccccccccccuacacccccugaggacuagucccuguucccagagcccacuuuuuuuucuuuuuuugaaauaaaauagccugucuuucagaucuaaaaaaaaaaaaaaaaaaaaaaaaaaaaaaaaaaaaaaaaaaaaaaaaaaaaaaaaaaaaaaaaaaaaaaaaaaaaaaaaaaaaaaaaaaaaaaaaaaaa

SEQ ID NO: 22458 - RNA, 567 nt, Artificial Sequence
  mRNA product Design a-2 (A100) comprising derived and/or modified sequence from LASV(Lassa virus/H.sapiens-wt/NGA/2016/ISTH_0017;Clade II)__AVO03713__Z (opt4)
aggagaguccgcucagccagguugcagaagcggcuuagcguguguccuaaucuucucucugcguguagguaggccugugccgcaaacaagcuuaccaugggcaacagacaggccaagagcaccaagguggacgagcaccagagagcccaccuggugcccgacgccagccaccugggcccccaguucugcaagagcugcugguucgagaacagaggccugguggagugcaacaaccacuaccugugccugaacugccugagccugcugcugagcgugagcagcagaugccccaucugcaagaugccccugcccaccaagcugaaggccgccacccagcccagcgcccccagcaccgaggugaaccagaacaccacccccccccccuacacccccugaggacuagucccuguucccagagcccacuuuuuuuucuuuuuuugaaauaaaauagccugucuuucagaucuaaaaaaaaaaaaaaaaaaaaaaaaaaaaaaaaaaaaaaaaaaaaaaaaaaaaaaaaaaaaaaaaaaaaaaaaaaaaaaaaaaaaaaaaaaaaaaaaaaaa

SEQ ID NO: 22459 - RNA, 567 nt, Artificial Sequence
  mRNA product Design a-2 (A100) comprising derived and/or modified sequence from LASV(Lassa virus/H.sapiens-wt/NGA/2018/ISTH_0959;Clade II)__AVV65084__Z (opt4)
aggagaguccgcucagccagguugcagaagcggcuuagcguguguccuaaucuucucucugcguguagguaggccugugccgcaaacaagcuuaccaugggcaacaagcaggccaagagcaccaagguggacgagcaccagagagcccaccuggugcccgacgccagccaccugggcccccaguucugcaagagcugcugguucgagaacagaggccugguggagugcaacaaccacuaccugugccugaacugccugagccugcugcugagcgugagcagcagaugccccaucugcaagaugccccugcccaccaagcugaaggccgccgcccagcccagcgcccccagcaccgaggccauccagagcaccacccccccccccuacacccccugaggacuagucccuguucccagagcccacuuuuuuuucuuuuuuugaaauaaaauagccugucuuucagaucuaaaaaaaaaaaaaaaaaaaaaaaaaaaaaaaaaaaaaaaaaaaaaaaaaaaaaaaaaaaaaaaaaaaaaaaaaaaaaaaaaaaaaaaaaaaaaaaaaaaa

SEQ ID NO: 22460 - RNA, 567 nt, Artificial Sequence
  mRNA product Design a-2 (A100) comprising derived and/or modified sequence from LASV(LASV003-NIG-2008;Clade II)__AIT17578__Z (opt4)
aggagaguccgcucagccagguugcagaagcggcuuagcguguguccuaaucuucucucugcguguagguaggccugugccgcaaacaagcuuaccaugggcaacagacaggccaagagcaccaagguggacgagcaccagagagcccaccuggugcccgacgccagccaccugggcccccaguucugcaagagcugcugguucgagaacaagggccugguggagugcaacaaccacuaccugugccugaacugccugagccugcugcugagcgugagcagcagaugccccaucugcaagaugccccugcccaccaagcugagagccgccgcccagcccagcgcccccagcaccgagagcgcccagaacaccgcccccccccccuacgcccccugaggacuagucccuguucccagagcccacuuuuuuuucuuuuuuugaaauaaaauagccugucuuucagaucuaaaaaaaaaaaaaaaaaaaaaaaaaaaaaaaaaaaaaaaaaaaaaaaaaaaaaaaaaaaaaaaaaaaaaaaaaaaaaaaaaaaaaaaaaaaaaaaaaaaa

SEQ ID NO: 22461 - RNA, 567 nt, Artificial Sequence
  mRNA product Design a-2 (A100) comprising derived and/or modified sequence from LASV(LASV035-NIG-2009;Clade II)__AIT17586__Z (opt4)
aggagaguccgcucagccagguugcagaagcggcuuagcguguguccuaaucuucucucugcguguagguaggccugugccgcaaacaagcuuaccaugggcaacaagcaggccaagagcaccaagguggacgagcaccagagagcccaccuggugcccgacgccagccaccugggcccccaguucugcaagagcugcugguucgagaacagaggccugguggagugcaacaaccacuaccugugccugaacugccugagccugcugcugagcgugagcagcagaugccccaucugcaagaugccccugcccaccagacugaaggccgccgcccagcccagcgcccccagcaccgaggugacccagaacaccacccccccccccuacacccccugaggacuagucccuguucccagagcccacuuuuuuuucuuuuuuugaaauaaaauagccugucuuucagaucuaaaaaaaaaaaaaaaaaaaaaaaaaaaaaaaaaaaaaaaaaaaaaaaaaaaaaaaaaaaaaaaaaaaaaaaaaaaaaaaaaaaaaaaaaaaaaaaaaaaa

SEQ ID NO: 22462 - RNA, 567 nt, Artificial Sequence
  mRNA product Design a-2 (A100) comprising derived and/or modified sequence from LASV(LASV1000-NIG-2009;Clade II)__AIT17780__Z (opt4)
aggagaguccgcucagccagguugcagaagcggcuuagcguguguccuaaucuucucucugcguguagguaggccugugccgcaaacaagcuuaccaugggcaacagacagaccaagagcaccaagguggacgagcaccagagagccuaccuggugcccgacgccagccugcugggcccccaguucugcaagagcugcugguucgagaacaagggccugguggagugcaacaaccacuaccugugccugaacugccugagccugcugcugagcgugagcagcagaugccccaucugcaagaugccccugcccaccagacugaaggccgccgcccagcccagcgccccccccaccgaggccauccagaacaccacccccccccccuacacccccugaggacuagucccuguucccagagcccacuuuuuuuucuuuuuuugaaauaaaauagccugucuuucagaucuaaaaaaaaaaaaaaaaaaaaaaaaaaaaaaaaaaaaaaaaaaaaaaaaaaaaaaaaaaaaaaaaaaaaaaaaaaaaaaaaaaaaaaaaaaaaaaaaaaaa

SEQ ID NO: 22463 - RNA, 567 nt, Artificial Sequence
  mRNA product Design a-2 (A100) comprising derived and/or modified sequence from LASV(LASV221-NIG-2010;Clade II)__AIT17622__Z (opt4)
aggagaguccgcucagccagguugcagaagcggcuuagcguguguccuaaucuucucucugcguguagguaggccugugccgcaaacaagcuuaccaugggcaacagacaggccaagagcaccaagguggacgagcaccagagagcccaccuggugcccgacgccagccaccugggcccccaguucugcaagagcugcugguucgagaacagaggccugguggagugcaacaaccacuaccugugccugaacugccugagccugcugcugagcgugagcagcagaugccccaucugcaagaugccccugcccaccaagcugaaggccgccacccagcccagcgcccccagcaccgaggugacccagaacaccauccccccccccuacagccccugaggacuagucccuguucccagagcccacuuuuuuuucuuuuuuugaaauaaaauagccugucuuucagaucuaaaaaaaaaaaaaaaaaaaaaaaaaaaaaaaaaaaaaaaaaaaaaaaaaaaaaaaaaaaaaaaaaaaaaaaaaaaaaaaaaaaaaaaaaaaaaaaaaaaa

SEQ ID NO: 22464 - RNA, 567 nt, Artificial Sequence
  mRNA product Design a-2 (A100) comprising derived and/or modified sequence from LASV(LASV237-NIG-2010;Clade II)__AIT17636__Z (opt4)
aggagaguccgcucagccagguugcagaagcggcuuagcguguguccuaaucuucucucugcguguagguaggccugugccgcaaacaagcuuaccaugggcaacagacaggccaagagcaccaagguggacgagcaccagagagcccaccuggugcccgacgccagccaccugggcccccaguucugcaagagcugcugguucgagaacagaggccugguggagugcaacaaccacuaccugugccugaacugccugagccugcugcugagcgugagcagcagaugccccaucugcaagaugccccugcccaccaagcugaaggccgccgcccagcccagcgcccccagcaucgagaccauccagaacaccacccccccccccuacacccccugaggacuagucccuguucccagagcccacuuuuuuuucuuuuuuugaaauaaaauagccugucuuucagaucuaaaaaaaaaaaaaaaaaaaaaaaaaaaaaaaaaaaaaaaaaaaaaaaaaaaaaaaaaaaaaaaaaaaaaaaaaaaaaaaaaaaaaaaaaaaaaaaaaaaa

SEQ ID NO: 22465 - RNA, 567 nt, Artificial Sequence
  mRNA product Design a-2 (A100) comprising derived and/or modified sequence from LASV(LASV253-NIG-2011;Clade II)__AIT17668__Z (opt4)
aggagaguccgcucagccagguugcagaagcggcuuagcguguguccuaaucuucucucugcguguagguaggccugugccgcaaacaagcuuaccaugggcaacagacaggccaagagcaccaagguggacgagcaccagagagcccaccuggugcccgacgccagccaccugggcccccaguucugcaagagcugcugguucgagaacaagggccugguggagugcaacaaccacuaccugugccugaacugccugagccugcugcugagcgugagcagcagaugccccaucugcaagaugccccugcccaccaagcugaagaccaccgcccagcccagcgccccccccaccgaggccgccaagaacaccgcccccccccccuacgcccccugaggacuagucccuguucccagagcccacuuuuuuuucuuuuuuugaaauaaaauagccugucuuucagaucuaaaaaaaaaaaaaaaaaaaaaaaaaaaaaaaaaaaaaaaaaaaaaaaaaaaaaaaaaaaaaaaaaaaaaaaaaaaaaaaaaaaaaaaaaaaaaaaaaaaa

SEQ ID NO: 22466 - RNA, 567 nt, Artificial Sequence
  mRNA product Design a-2 (A100) comprising derived and/or modified sequence from LASV(G1180-SLE-2010;Clade IV)__AIT17166__Z (opt4)
aggagaguccgcucagccagguugcagaagcggcuuagcguguguccuaaucuucucucugcguguagguaggccugugccgcaaacaagcuuaccaugggcaacaagcaggccaaggcccccgaggccaaggacagccccagagccagccugauccccgacgccacccaccugggcccccaguucugcaagagcugcugguucgagaccaagggccugguggagugcaacaaccacuaccugugccugaacugccugacccugcugcugagcgugagcaacagaugccccaucugcaagaugccccugcccaccaagcugagacccagcgccacccccaccgccccccccaccgaggccgccgacagcaucggccccccccccuacagccccugaggacuagucccuguucccagagcccacuuuuuuuucuuuuuuugaaauaaaauagccugucuuucagaucuaaaaaaaaaaaaaaaaaaaaaaaaaaaaaaaaaaaaaaaaaaaaaaaaaaaaaaaaaaaaaaaaaaaaaaaaaaaaaaaaaaaaaaaaaaaaaaaaaaaa

SEQ ID NO: 22467 - RNA, 567 nt, Artificial Sequence
  mRNA product Design a-2 (A100) comprising derived and/or modified sequence from LASV(G1442-SLE-2011;Clade IV)__AIT17178__Z (opt4)
aggagaguccgcucagccagguugcagaagcggcuuagcguguguccuaaucuucucucugcguguagguaggccugugccgcaaacaagcuuaccaugggcaacaagcaggccaaggccagcgaggccaaggacagccccagagccagccugauccccgacgccacccaccugggcccccaguucugcaagagcugcugguucgagaacaagggccugguggagugcaacaaccacuaccugugccugaacugccugagccugcugcugagcgugagcagcagaugccccaucugcaagaugccccugcccaccagacugagacccagcaccgcccccaccgccccccccgccagagccggcgacaacaucaagcccccccccuacagccccugaggacuagucccuguucccagagcccacuuuuuuuucuuuuuuugaaauaaaauagccugucuuucagaucuaaaaaaaaaaaaaaaaaaaaaaaaaaaaaaaaaaaaaaaaaaaaaaaaaaaaaaaaaaaaaaaaaaaaaaaaaaaaaaaaaaaaaaaaaaaaaaaaaaaa

SEQ ID NO: 22468 - RNA, 567 nt, Artificial Sequence
  mRNA product Design a-2 (A100) comprising derived and/or modified sequence from LASV(G502-SLE-2009;Clade IV)__AIT17124__Z (opt4)
aggagaguccgcucagccagguugcagaagcggcuuagcguguguccuaaucuucucucugcguguagguaggccugugccgcaaacaagcuuaccaugggcaacaagcaggugaagacccccgaggccaaggacagccccagagccagccugauccccgacgccacccaccugggcccccaguucugcaagagcugcugguucgagaacaagggccugguggagugcaacaaccacuaccugugccugaacugccugacccugcugcugagcgugggcaacagaugccccaucugcaagaugccccugcccaccaagcugagacccagcgugacccccaccgccccccccaccagagccgccgacagcaucggccccccccccuacagccccugaggacuagucccuguucccagagcccacuuuuuuuucuuuuuuugaaauaaaauagccugucuuucagaucuaaaaaaaaaaaaaaaaaaaaaaaaaaaaaaaaaaaaaaaaaaaaaaaaaaaaaaaaaaaaaaaaaaaaaaaaaaaaaaaaaaaaaaaaaaaaaaaaaaaa

SEQ ID NO: 22469 - RNA, 567 nt, Artificial Sequence
  mRNA product Design a-2 (A100) comprising derived and/or modified sequence from LASV(G733-SLE-2010;Clade IV)__AIT17152__Z (opt4)
aggagaguccgcucagccagguugcagaagcggcuuagcguguguccuaaucuucucucugcguguagguaggccugugccgcaaacaagcuuaccaugggcaacaagcaggccaagacccccgagaccaaggacagccccagagccagccugauccccgacgccacccaccugggcccccaguucugcaagagcugcugguucgagaacaagggccugguggagugcaacaaccacuaccugugccugaacugccugacccugcugcugagcgugagcaacagaugccccaucugcaagaugccccugcccaccaagcugagacccagcaccgcccccaccgccccccccgccggcgccgccgacaacaccagacccccccccuacagccccugaggacuagucccuguucccagagcccacuuuuuuuucuuuuuuugaaauaaaauagccugucuuucagaucuaaaaaaaaaaaaaaaaaaaaaaaaaaaaaaaaaaaaaaaaaaaaaaaaaaaaaaaaaaaaaaaaaaaaaaaaaaaaaaaaaaaaaaaaaaaaaaaaaaaa

SEQ ID NO: 22470 - RNA, 579 nt, Artificial Sequence
  mRNA product Design a-2 (A100) comprising derived and/or modified sequence from MOPV/LASV reassortant(IGS-1;Clade IV)__AFY05533__Z (opt4)
aggagaguccgcucagccagguugcagaagcggcuuagcguguguccuaaucuucucucugcguguagguaggccugugccgcaaacaagcuuaccaugggcaagacccagagcaagggccagcccagcaccaaccugcugaaggagaccgagcccagacaccccgugauccccgacgccagaggcaccggccccgaguucugcaagagcugcugguucgagagaagaggccuggugagaugcaacgaccacuaccugugccugaacugccugacccugcugcacaccgugagcgacagaugccccaucugcaagcacaagcugcccuucagacuggagcugcagacccagcccaccgccccccccgagaucccccccagccagaaccccccccccuacagccccugaggacuagucccuguucccagagcccacuuuuuuuucuuuuuuugaaauaaaauagccugucuuucagaucuaaaaaaaaaaaaaaaaaaaaaaaaaaaaaaaaaaaaaaaaaaaaaaaaaaaaaaaaaaaaaaaaaaaaaaaaaaaaaaaaaaaaaaaaaaaaaaaaaaaa

SEQ ID NO: 22471 - RNA, 567 nt, Artificial Sequence
  mRNA product Design a-2 (A100) comprising derived and/or modified sequence from LASV(LM776-SLE-2012;Clade IV)__AIT17824__Z (opt4)
aggagaguccgcucagccagguugcagaagcggcuuagcguguguccuaaucuucucucugcguguagguaggccugugccgcaaacaagcuuaccaugggcaacaagcaggccaaggccagcgaggagaagaacagccccagagccagccugauccccgacgccacccaccugggcccccaguucugcaagagcugcugguucgagaacaagggccugguggagugcaacaaccacuaccugugccugaacugccugacccugcugcugagcgugagcaacagaugccccaucugcaagaugccccugcccaccaagcugagacccagcaccacccccaccgccccccccaccggcgccgccgacagcaucagacccccccccuacagccccugaggacuagucccuguucccagagcccacuuuuuuuucuuuuuuugaaauaaaauagccugucuuucagaucuaaaaaaaaaaaaaaaaaaaaaaaaaaaaaaaaaaaaaaaaaaaaaaaaaaaaaaaaaaaaaaaaaaaaaaaaaaaaaaaaaaaaaaaaaaaaaaaaaaaa

SEQ ID NO: 22472 - RNA, 567 nt, Artificial Sequence
  mRNA product Design a-2 (A100) comprising derived and/or modified sequence from LASV(Mad39;Clade IV)__ANH09743__Z (opt4)
aggagaguccgcucagccagguugcagaagcggcuuagcguguguccuaaucuucucucugcguguagguaggccugugccgcaaacaagcuuaccaugggcaacaagcaggccaaggccagcgagguggaggacggccccagagccagccugauccccgacgccacccaccugggcccccaguucugcaagagcugcugguucgagaacaagagccugguggagugcaacaaccacuaccugugccugaacugccugacccugcugcugagcgugagcaacagaugccccaucugcaagaugccccugcccaccagacugaagcccagcguggugcccaccgccccccccaccagagccggcgacggcaccagacccccccccuacagccccugaggacuagucccuguucccagagcccacuuuuuuuucuuuuuuugaaauaaaauagccugucuuucagaucuaaaaaaaaaaaaaaaaaaaaaaaaaaaaaaaaaaaaaaaaaaaaaaaaaaaaaaaaaaaaaaaaaaaaaaaaaaaaaaaaaaaaaaaaaaaaaaaaaaaa

SEQ ID NO: 22473 - RNA, 567 nt, Artificial Sequence
  mRNA product Design a-2 (A100) comprising derived and/or modified sequence from LASV(Z0947-SLE-2011;Clade IV)__AIT17838__Z (opt4)
aggagaguccgcucagccagguugcagaagcggcuuagcguguguccuaaucuucucucugcguguagguaggccugugccgcaaacaagcuuaccaugggcaacaagcaggccaaggugcccgagagcaaggacagccccagagccagccugauccccgacgccacccaccugggcccccaguucugcaagagcugcugguucgagaacaagggccugguggagugcaacaaccacuaccugugccugaacugccugacccugcugcugagcgugagcaacagaugccccaucugcaagaugccccugcccaccaagcugaagcccagcgccgcccccaccgccccccccaccggcgccgccgacagcaucagacccccccccuacagccccugaggacuagucccuguucccagagcccacuuuuuuuucuuuuuuugaaauaaaauagccugucuuucagaucuaaaaaaaaaaaaaaaaaaaaaaaaaaaaaaaaaaaaaaaaaaaaaaaaaaaaaaaaaaaaaaaaaaaaaaaaaaaaaaaaaaaaaaaaaaaaaaaaaaaa

SEQ ID NO: 22474 - RNA, 567 nt, Artificial Sequence
  mRNA product Design a-2 (A100) comprising derived and/or modified sequence from LASV(Josiah;Clade IV)__ADY11072/NP_694871__Z (opt5)
aggagaguccgcucagccagguugcagaagcggcuuagcguguguccuaaucuucucucugcguguagguaggccugugccgcaaacaagcuuaccaugggcaacaagcaggccaaagcucccgagagcaaggacuccccuagagccucucugaucccggaugcgacccaccucgggccccaauucugcaaaagcuguugguuugaaaauaagggacugguggagugcaacaaucauuaccuuugucugaacugccucacacugcuucuguccgucucuaaucgguguccuauuugcaaaaugccccucccuacgaagcugcgccccagcgcugccccuaccgccccgcccacaggcgcugccgacuccaucagaccucccccuuauucucccugaggacuagucccuguucccagagcccacuuuuuuuucuuuuuuugaaauaaaauagccugucuuucagaucuaaaaaaaaaaaaaaaaaaaaaaaaaaaaaaaaaaaaaaaaaaaaaaaaaaaaaaaaaaaaaaaaaaaaaaaaaaaaaaaaaaaaaaaaaaaaaaaaaaaa

SEQ ID NO: 22475 - RNA, 570 nt, Artificial Sequence
  mRNA product Design a-2 (A100) comprising derived and/or modified sequence from LASV(Pinneo-NIG-1969;Clade I)__AIT17834__Z (opt5)
aggagaguccgcucagccagguugcagaagcggcuuagcguguguccuaaucuucucucugcguguagguaggccugugccgcaaacaagcuuaccaugggcaacaagcagaccagaagcccucccaaaccggagcacccccggccuacacugcuccccgacgccucccaucuggggccucaauucugcaagucuuguugguuugaaaauaaaggacuuguggagugcaacaaucacuaccugugucucaacugccugacgcuucugcucagcgucuccgaucgcugucccaucugcaagaugccucugccgaccaaacuggcuguuagaacacagcccucugccccuccccucaaucagggcaacacccagagcuccccucccccguauucuccuugaggacuagucccuguucccagagcccacuuuuuuuucuuuuuuugaaauaaaauagccugucuuucagaucuaaaaaaaaaaaaaaaaaaaaaaaaaaaaaaaaaaaaaaaaaaaaaaaaaaaaaaaaaaaaaaaaaaaaaaaaaaaaaaaaaaaaaaaaaaaaaaaaaaaa

SEQ ID NO: 22476 - RNA, 567 nt, Artificial Sequence
  mRNA product Design a-2 (A100) comprising derived and/or modified sequence from LASV(Nig08-04;Clade II)__ADU56612__Z (opt5)
aggagaguccgcucagccagguugcagaagcggcuuagcguguguccuaaucuucucucugcguguagguaggccugugccgcaaacaagcuuaccaugggcaacagacagacccggcccacagaggccacggaacaaagccgcgcccaccuggugccugacgccucccaucucgggccgcaguucugcaagucuuguugguuugagaauagaggacuggucgaaugcaacaaucacuaccuuugucugaacugccucagccugcuucuguccguuucuagccggugucccaucugcaaaaugccucuccccacccgccugaaggcguccgcucagccuucugcucccccuacagaggccccgcagaauaccacacccccucccuauaccccuugaggacuagucccuguucccagagcccacuuuuuuuucuuuuuuugaaauaaaauagccugucuuucagaucuaaaaaaaaaaaaaaaaaaaaaaaaaaaaaaaaaaaaaaaaaaaaaaaaaaaaaaaaaaaaaaaaaaaaaaaaaaaaaaaaaaaaaaaaaaaaaaaaaaaa

SEQ ID NO: 22477 - RNA, 567 nt, Artificial Sequence
  mRNA product Design a-2 (A100) comprising derived and/or modified sequence from LASV(Nig08-A19;Clade III)__ADU56620__Z (opt5)
aggagaguccgcucagccagguugcagaagcggcuuagcguguguccuaaucuucucucugcguguagguaggccugugccgcaaacaagcuuaccaugggcgggaagcacaccaaaccccagagagagagcaacuccccucgggccucucugaucccggacgcuacacaucucggaccccaauucugcaagagcuguugguuugaaaauaaaggccugguggagugcaacaaucacuaccuuugucugaacugccucacgcugcuucuguccgucucuaaucgcuguccuauuugcaagaugccccucccuaccagacugcgggccagcacaaaccccaccgcgccucagguugaacagguggggccgacaaaucccccucccuauuccccuugaggacuagucccuguucccagagcccacuuuuuuuucuuuuuuugaaauaaaauagccugucuuucagaucuaaaaaaaaaaaaaaaaaaaaaaaaaaaaaaaaaaaaaaaaaaaaaaaaaaaaaaaaaaaaaaaaaaaaaaaaaaaaaaaaaaaaaaaaaaaaaaaaaaaa

SEQ ID NO: 22478 - RNA, 567 nt, Artificial Sequence
  mRNA product Design a-2 (A100) comprising derived and/or modified sequence from LASV(AV;Clade V)__CCA30312__Z (opt5)
aggagaguccgcucagccagguugcagaagcggcuuagcguguguccuaaucuucucucugcguguagguaggccugugccgcaaacaagcuuaccaugggcaacagacaggccaagaaucccgagguggaaaacagcccucgggcuucccugaucccggacgccacccaccucgggccccaauucugcaaaucuuguugguuugagaauaagggacuggucgaaugcaacaaucauuaccuuugucugaacugccucagccugcuucuguccguuucuaaucgcuguccuauuugcaaaaugccccucccuacaagacugcggcccacgaccacaccuaccgcgccgcagaucauuaaggagaacacaaccaaucccccucccuauacaccuugaggacuagucccuguucccagagcccacuuuuuuuucuuuuuuugaaauaaaauagccugucuuucagaucuaaaaaaaaaaaaaaaaaaaaaaaaaaaaaaaaaaaaaaaaaaaaaaaaaaaaaaaaaaaaaaaaaaaaaaaaaaaaaaaaaaaaaaaaaaaaaaaaaaaa

SEQ ID NO: 22479 - RNA, 567 nt, Artificial Sequence
  mRNA product Design a-2 (A100) comprising derived and/or modified sequence from LASV(Togo/2016/7082;Clade VI)__AMR44579__Z (opt5)
aggagaguccgcucagccagguugcagaagcggcuuagcguguguccuaaucuucucucugcguguagguaggccugugccgcaaacaagcuuaccaugggcgccagacagaccaagcaaccccagaucgaggggagcccucgggcuucccuggugccggacgccucucaccucggaccccaguucugcaaaagcuguugguuugaaaacaagggccuggucgagugcaauaaccauuaccuuugucugaauugccucucccugcuucugucuguuagcaaccgcuguccuauuugcaaaaugccccucccuacaaagcugagaguguccucugcgcccagcgcuccuccggccgccacggcucagcccgggaccccucccccuuauucccccugaggacuagucccuguucccagagcccacuuuuuuuucuuuuuuugaaauaaaauagccugucuuucagaucuaaaaaaaaaaaaaaaaaaaaaaaaaaaaaaaaaaaaaaaaaaaaaaaaaaaaaaaaaaaaaaaaaaaaaaaaaaaaaaaaaaaaaaaaaaaaaaaaaaaa

SEQ ID NO: 22480 - RNA, 567 nt, Artificial Sequence
  mRNA product Design a-2 (A100) comprising derived and/or modified sequence from LASV(KAK-428;Clade n.d. (VII))__ANH09761__Z (opt5)
aggagaguccgcucagccagguugcagaagcggcuuagcguguguccuaaucuucucucugcguguagguaggccugugccgcaaacaagcuuaccaugggcaacaaggggaccaaacccacacagaauagcgagccuuccagagccaaccuggugccggacgcuucuuaccucggaccccaauucugcaagagcuguugguuugaaaauaaaggccuggucgagugcaacaaucacuaucuuugucugaacugccucacgaugcugcuuuccguuuccaaucgguguccuaucugcaagaugccccugccuaccaaaauuaaggccagcgggucccccucugcgccuccgacagaagcuaacagcgccgugucucccccucccuacaccccuugaggacuagucccuguucccagagcccacuuuuuuuucuuuuuuugaaauaaaauagccugucuuucagaucuaaaaaaaaaaaaaaaaaaaaaaaaaaaaaaaaaaaaaaaaaaaaaaaaaaaaaaaaaaaaaaaaaaaaaaaaaaaaaaaaaaaaaaaaaaaaaaaaaaaa

SEQ ID NO: 22481 - RNA, 567 nt, Artificial Sequence
  mRNA product Design a-2 (A100) comprising derived and/or modified sequence from LASV(ISTH0009-NIG-2011;Clade II)__AIT17402__Z (opt5)
aggagaguccgcucagccagguugcagaagcggcuuagcguguguccuaaucuucucucugcguguagguaggccugugccgcaaacaagcuuaccaugggcaacagacaggccaagagcaccaaaguggacgagcaccaacgggcucaucugguccccgaugccucccaccucgggccucaguucugcaagucuuguugguuugaaaaucgcggacugguugagugcaacaaucauuaccuuugucugaacugccucagccugcuucuguccgugucuagcagauguccgaucugcaaaaugccccucccuacaaagcugaaagcggcugcccagcccuccgccccuucuacggaaaccauucagaauacaacacccccuccguauacccccugaggacuagucccuguucccagagcccacuuuuuuuucuuuuuuugaaauaaaauagccugucuuucagaucuaaaaaaaaaaaaaaaaaaaaaaaaaaaaaaaaaaaaaaaaaaaaaaaaaaaaaaaaaaaaaaaaaaaaaaaaaaaaaaaaaaaaaaaaaaaaaaaaaaaa

SEQ ID NO: 22482 - RNA, 567 nt, Artificial Sequence
  mRNA product Design a-2 (A100) comprising derived and/or modified sequence from LASV(ISTH2010-NIG-2012;Clade II)__AIT17480__Z (opt5)
aggagaguccgcucagccagguugcagaagcggcuuagcguguguccuaaucuucucucugcguguagguaggccugugccgcaaacaagcuuaccaugggcaacagacacgccaagagcaccaaaguggacgagcaucagcgggcucaccugguccccgaugccucccaucucgggccucaauucugcaagucuuguugguuugaaaaucgcggacugguugagugcaacaaucacuaccuuugucugaacugccucagccugcuucuguccgugucuagcagauguccgaucugcaaaaugccccucccuacaaagcugaaagcggcugcccagcccuccgccccuucuacggaagugauucagagcaccacacccccuccguauacccccugaggacuagucccuguucccagagcccacuuuuuuuucuuuuuuugaaauaaaauagccugucuuucagaucuaaaaaaaaaaaaaaaaaaaaaaaaaaaaaaaaaaaaaaaaaaaaaaaaaaaaaaaaaaaaaaaaaaaaaaaaaaaaaaaaaaaaaaaaaaaaaaaaaaaa

SEQ ID NO: 22483 - RNA, 567 nt, Artificial Sequence
  mRNA product Design a-2 (A100) comprising derived and/or modified sequence from LASV(Lassa virus/H.sapiens-wt/NGA/2016/ISTH_0017;Clade II)__AVO03713__Z (opt5)
aggagaguccgcucagccagguugcagaagcggcuuagcguguguccuaaucuucucucugcguguagguaggccugugccgcaaacaagcuuaccaugggcaacagacaggccaagagcaccaaaguggacgagcaccaacgggcucaucugguccccgaugccucccaccucgggccucaguucugcaagucuuguugguuugaaaaucgcggacugguugagugcaacaaucauuaccuuugucugaacugccucagccugcuucuguccgugucuagcagauguccgaucugcaaaaugccccucccuacaaagcugaaagcggcuacgcagcccuccgccccuucuaccgaagugaaucagaacacaacacccccuccguauacccccugaggacuagucccuguucccagagcccacuuuuuuuucuuuuuuugaaauaaaauagccugucuuucagaucuaaaaaaaaaaaaaaaaaaaaaaaaaaaaaaaaaaaaaaaaaaaaaaaaaaaaaaaaaaaaaaaaaaaaaaaaaaaaaaaaaaaaaaaaaaaaaaaaaaaa

SEQ ID NO: 22484 - RNA, 567 nt, Artificial Sequence
  mRNA product Design a-2 (A100) comprising derived and/or modified sequence from LASV(Lassa virus/H.sapiens-wt/NGA/2018/ISTH_0959;Clade II)__AVV65084__Z (opt5)
aggagaguccgcucagccagguugcagaagcggcuuagcguguguccuaaucuucucucugcguguagguaggccugugccgcaaacaagcuuaccaugggcaacaagcaggccaaaagcaccaagguggacgagcaccaaagagcucaucugguccccgaugccucccaccucgggccucaguucugcaaaucuuguugguuugaaaaucggggacugguugagugcaacaaucauuaccuuugucugaacugccucagccugcuucuguccgugucuagccgcuguccgaucugcaagaugccccucccuacaaaacugaaggcggcugcccagcccuccgccccuucuacggaagcuauucagagcaccacacccccuccguauacccccugaggacuagucccuguucccagagcccacuuuuuuuucuuuuuuugaaauaaaauagccugucuuucagaucuaaaaaaaaaaaaaaaaaaaaaaaaaaaaaaaaaaaaaaaaaaaaaaaaaaaaaaaaaaaaaaaaaaaaaaaaaaaaaaaaaaaaaaaaaaaaaaaaaaaa

SEQ ID NO: 22485 - RNA, 567 nt, Artificial Sequence
  mRNA product Design a-2 (A100) comprising derived and/or modified sequence from LASV(LASV003-NIG-2008;Clade II)__AIT17578__Z (opt5)
aggagaguccgcucagccagguugcagaagcggcuuagcguguguccuaaucuucucucugcguguagguaggccugugccgcaaacaagcuuaccaugggcaacagacaggccaagagcaccaaaguggacgagcaccaacgggcucaucugguccccgaugccucccaccucgggccucaguucugcaagucuuguugguuugaaaauaaaggacugguugagugcaacaaucauuaccuuugucugaacugccucagccugcuucuguccgugucuagccgcuguccgaucugcaagaugccccucccuacaaaacugagagcggcugcccagcccuccgccccuucuacggaaagcgcucagaauaccgcucccccuccguaugcccccugaggacuagucccuguucccagagcccacuuuuuuuucuuuuuuugaaauaaaauagccugucuuucagaucuaaaaaaaaaaaaaaaaaaaaaaaaaaaaaaaaaaaaaaaaaaaaaaaaaaaaaaaaaaaaaaaaaaaaaaaaaaaaaaaaaaaaaaaaaaaaaaaaaaaa

SEQ ID NO: 22486 - RNA, 567 nt, Artificial Sequence
  mRNA product Design a-2 (A100) comprising derived and/or modified sequence from LASV(LASV035-NIG-2009;Clade II)__AIT17586__Z (opt5)
aggagaguccgcucagccagguugcagaagcggcuuagcguguguccuaaucuucucucugcguguagguaggccugugccgcaaacaagcuuaccaugggcaacaagcaggccaaaagcaccaagguggacgagcaccaaagagcucaucugguccccgaugccucccaccucgggccucaguucugcaaaucuuguugguuugaaaaucggggacugguugagugcaacaaucauuaccuuugucugaacugccucagccugcuucuguccgugucuagccgcuguccgaucugcaagaugccccucccuacaagacugaaagcggcugcccagcccuccgccccuucuacggaagugacccagaauacaacacccccuccguauacccccugaggacuagucccuguucccagagcccacuuuuuuuucuuuuuuugaaauaaaauagccugucuuucagaucuaaaaaaaaaaaaaaaaaaaaaaaaaaaaaaaaaaaaaaaaaaaaaaaaaaaaaaaaaaaaaaaaaaaaaaaaaaaaaaaaaaaaaaaaaaaaaaaaaaaa

SEQ ID NO: 22487 - RNA, 567 nt, Artificial Sequence
  mRNA product Design a-2 (A100) comprising derived and/or modified sequence from LASV(LASV1000-NIG-2009;Clade II)__AIT17780__Z (opt5)
aggagaguccgcucagccagguugcagaagcggcuuagcguguguccuaaucuucucucugcguguagguaggccugugccgcaaacaagcuuaccaugggcaacagacagaccaagagcacaaaaguggacgagcaccaacgggccuaccugguccccgaugcuucccuccuggggccucaguucugcaagucuuguugguuugaaaauaaaggacuuguugagugcaacaaucauuaucugugucucaacugccugagccuucugcucuccgugucuagccgcuguccgaucugcaagaugccccugccuacgagacugaaagccgcggcucagcccuccgccccucccaccgaagccauucagaauacaaccccuccgcccuacacaccuugaggacuagucccuguucccagagcccacuuuuuuuucuuuuuuugaaauaaaauagccugucuuucagaucuaaaaaaaaaaaaaaaaaaaaaaaaaaaaaaaaaaaaaaaaaaaaaaaaaaaaaaaaaaaaaaaaaaaaaaaaaaaaaaaaaaaaaaaaaaaaaaaaaaaa

SEQ ID NO: 22488 - RNA, 567 nt, Artificial Sequence
  mRNA product Design a-2 (A100) comprising derived and/or modified sequence from LASV(LASV221-NIG-2010;Clade II)__AIT17622__Z (opt5)
aggagaguccgcucagccagguugcagaagcggcuuagcguguguccuaaucuucucucugcguguagguaggccugugccgcaaacaagcuuaccaugggcaacagacaggccaagagcaccaaaguggacgagcaccaacgggcucaucugguccccgaugccucccaccucgggccucaguucugcaagucuuguugguuugaaaaucgcggacugguugagugcaacaaucauuaccuuugucugaacugccucagccugcuucuguccgugucuagcagauguccgaucugcaaaaugccccucccuacaaagcugaaagcggcuacgcagcccuccgccccuucuaccgaagugacacagaauaccauucccccuccguauagccccugaggacuagucccuguucccagagcccacuuuuuuuucuuuuuuugaaauaaaauagccugucuuucagaucuaaaaaaaaaaaaaaaaaaaaaaaaaaaaaaaaaaaaaaaaaaaaaaaaaaaaaaaaaaaaaaaaaaaaaaaaaaaaaaaaaaaaaaaaaaaaaaaaaaaa

SEQ ID NO: 22489 - RNA, 567 nt, Artificial Sequence
  mRNA product Design a-2 (A100) comprising derived and/or modified sequence from LASV(LASV237-NIG-2010;Clade II)__AIT17636__Z (opt5)
aggagaguccgcucagccagguugcagaagcggcuuagcguguguccuaaucuucucucugcguguagguaggccugugccgcaaacaagcuuaccaugggcaacagacaggccaagagcaccaaaguggacgagcaccaacgggcucaucugguccccgaugccucccaccucgggccucaguucugcaagucuuguugguuugaaaaucgcggacugguugagugcaacaaucauuaccuuugucugaacugccucagccugcuucuguccgugucuagcagauguccgaucugcaaaaugccccucccuacaaagcugaaagcggcugcccagcccuccgccccuucuauugaaacgauccagaauaccacacccccuccguauacccccugaggacuagucccuguucccagagcccacuuuuuuuucuuuuuuugaaauaaaauagccugucuuucagaucuaaaaaaaaaaaaaaaaaaaaaaaaaaaaaaaaaaaaaaaaaaaaaaaaaaaaaaaaaaaaaaaaaaaaaaaaaaaaaaaaaaaaaaaaaaaaaaaaaaaa

SEQ ID NO: 22490 - RNA, 567 nt, Artificial Sequence
  mRNA product Design a-2 (A100) comprising derived and/or modified sequence from LASV(LASV253-NIG-2011;Clade II)__AIT17668__Z (opt5)
aggagaguccgcucagccagguugcagaagcggcuuagcguguguccuaaucuucucucugcguguagguaggccugugccgcaaacaagcuuaccaugggcaacagacaggccaagagcaccaaaguggacgagcaccaacgggcucaucugguccccgaugccucccaccucgggccucaguucugcaagucuuguugguuugaaaauaaaggacugguugagugcaacaaucauuaccuuugucugaacugccucagccugcuucuguccgugucuagccgcuguccgaucugcaagaugccccucccuacaaaacugaagacgaccgcgcagcccuccgcuccucccacagaagccgccaagaauaccgcuccuccgcccuaugccccuugaggacuagucccuguucccagagcccacuuuuuuuucuuuuuuugaaauaaaauagccugucuuucagaucuaaaaaaaaaaaaaaaaaaaaaaaaaaaaaaaaaaaaaaaaaaaaaaaaaaaaaaaaaaaaaaaaaaaaaaaaaaaaaaaaaaaaaaaaaaaaaaaaaaaa

SEQ ID NO: 22491 - RNA, 567 nt, Artificial Sequence
  mRNA product Design a-2 (A100) comprising derived and/or modified sequence from LASV(G1180-SLE-2010;Clade IV)__AIT17166__Z (opt5)
aggagaguccgcucagccagguugcagaagcggcuuagcguguguccuaaucuucucucugcguguagguaggccugugccgcaaacaagcuuaccaugggcaacaagcaggccaaagcucccgaggccaaggacagcccuagagcgucccugaucccggaugcuacccaccucgggccccaauucugcaaaucuuguugguuugaaacaaagggacugguggagugcaauaaccauuaccuuugucugaauugccucacgcugcuucugagcgucuccaaccgguguccuauuugcaaaaugccccucccuaccaagcugcgccccucugccacaccuaccgccccgcccacagaagcugccgacagcaucggcccucccccuuauucccccugaggacuagucccuguucccagagcccacuuuuuuuucuuuuuuugaaauaaaauagccugucuuucagaucuaaaaaaaaaaaaaaaaaaaaaaaaaaaaaaaaaaaaaaaaaaaaaaaaaaaaaaaaaaaaaaaaaaaaaaaaaaaaaaaaaaaaaaaaaaaaaaaaaaaa

SEQ ID NO: 22492 - RNA, 567 nt, Artificial Sequence
  mRNA product Design a-2 (A100) comprising derived and/or modified sequence from LASV(G1442-SLE-2011;Clade IV)__AIT17178__Z (opt5)
aggagaguccgcucagccagguugcagaagcggcuuagcguguguccuaaucuucucucugcguguagguaggccugugccgcaaacaagcuuaccaugggcaacaagcaggccaaagcuagcgaggccaaggacucccccagagcgucucugaucccugaugcuacccaccucgggccgcaauucugcaaaagcuguugguuugaaaauaagggacugguggagugcaacaaucauuaccuuugucugaacugccucucccugcuucugucugucagcucccggugucccauuugcaaaaugccucuccccacacgccugagaccuucuacggcccccaccgccccuccggcucgggccggcgacaauaucaagcccccucccuauagcccuugaggacuagucccuguucccagagcccacuuuuuuuucuuuuuuugaaauaaaauagccugucuuucagaucuaaaaaaaaaaaaaaaaaaaaaaaaaaaaaaaaaaaaaaaaaaaaaaaaaaaaaaaaaaaaaaaaaaaaaaaaaaaaaaaaaaaaaaaaaaaaaaaaaaaa

SEQ ID NO: 22493 - RNA, 567 nt, Artificial Sequence
  mRNA product Design a-2 (A100) comprising derived and/or modified sequence from LASV(G502-SLE-2009;Clade IV)__AIT17124__Z (opt5)
aggagaguccgcucagccagguugcagaagcggcuuagcguguguccuaaucuucucucugcguguagguaggccugugccgcaaacaagcuuaccaugggcaacaaacaggugaagacccccgaggccaaggacagcccuagagcuucccugaucccggaugccacacaccucgggccccaauucugcaaaucuuguugguuugaaaauaagggacuggucgagugcaacaaucauuaccuuugucugaacugccucacgcugcuucugagcguuggcaaucgguguccuauuugcaaaaugccccucccuaccaagcugcgccccuccgugacaccuaccgcgccgcccacaagagcugccgacucuaucgggccucccccuuauagccccugaggacuagucccuguucccagagcccacuuuuuuuucuuuuuuugaaauaaaauagccugucuuucagaucuaaaaaaaaaaaaaaaaaaaaaaaaaaaaaaaaaaaaaaaaaaaaaaaaaaaaaaaaaaaaaaaaaaaaaaaaaaaaaaaaaaaaaaaaaaaaaaaaaaaa

SEQ ID NO: 22494 - RNA, 567 nt, Artificial Sequence
  mRNA product Design a-2 (A100) comprising derived and/or modified sequence from LASV(G733-SLE-2010;Clade IV)__AIT17152__Z (opt5)
aggagaguccgcucagccagguugcagaagcggcuuagcguguguccuaaucuucucucugcguguagguaggccugugccgcaaacaagcuuaccaugggcaacaagcaggccaaaacccccgagacaaaggacagcccuagagcuucccugaucccggaugccacgcaccucgggccccaauucugcaaaucuuguugguuugaaaauaagggacugguggagugcaacaaucauuaccuuugucugaacugccucacccugcuucugagcgucuccaaucgguguccuauuugcaaaaugccccucccuacaaagcugcgccccucuaccgcgccuacagcuccgcccgccggcgccgcugacaacaccagaccucccccuuauagccccugaggacuagucccuguucccagagcccacuuuuuuuucuuuuuuugaaauaaaauagccugucuuucagaucuaaaaaaaaaaaaaaaaaaaaaaaaaaaaaaaaaaaaaaaaaaaaaaaaaaaaaaaaaaaaaaaaaaaaaaaaaaaaaaaaaaaaaaaaaaaaaaaaaaaa

SEQ ID NO: 22495 - RNA, 579 nt, Artificial Sequence
  mRNA product Design a-2 (A100) comprising derived and/or modified sequence from MOPV/LASV reassortant(IGS-1;Clade IV)__AFY05533__Z (opt5)
aggagaguccgcucagccagguugcagaagcggcuuagcguguguccuaaucuucucucugcguguagguaggccugugccgcaaacaagcuuaccaugggcaagacccagagcaaagggcaacccuccacaaaccugcucaaggagacggaaccuagacacccggugauccccgacgcccggggaaccggcccugaguucugcaaaucuuguugguuugaacgcagagggcugguccggugcaaugaucauuaccuuugucugaacugccucacacugcuucacaccguuagcgaccgcugucccaucugcaagcauaaacugccuuucagacucgagcugcagacacagcccaccgcuccuccggaaauucccccuucccagaaucccccucccuauucuccgugaggacuagucccuguucccagagcccacuuuuuuuucuuuuuuugaaauaaaauagccugucuuucagaucuaaaaaaaaaaaaaaaaaaaaaaaaaaaaaaaaaaaaaaaaaaaaaaaaaaaaaaaaaaaaaaaaaaaaaaaaaaaaaaaaaaaaaaaaaaaaaaaaaaaa

SEQ ID NO: 22496 - RNA, 567 nt, Artificial Sequence
  mRNA product Design a-2 (A100) comprising derived and/or modified sequence from LASV(LM776-SLE-2012;Clade IV)__AIT17824__Z (opt5)
aggagaguccgcucagccagguugcagaagcggcuuagcguguguccuaaucuucucucugcguguagguaggccugugccgcaaacaagcuuaccaugggcaacaagcaggccaaagcuagcgaggaaaagaacucccccagagccucucugaucccugacgcgacccaccucgggccgcaauucugcaaaagcuguugguuugagaauaagggacugguggaaugcaauaaccauuaccuuugucugaauugccucacacugcuucuguccgucucuaaccggugucccauuugcaaaaugccucuccccacgaagcugcgcccuagcaccacacccaccgcuccuccgacaggcgccgccgauuccaucagacccccucccuauucuccuugaggacuagucccuguucccagagcccacuuuuuuuucuuuuuuugaaauaaaauagccugucuuucagaucuaaaaaaaaaaaaaaaaaaaaaaaaaaaaaaaaaaaaaaaaaaaaaaaaaaaaaaaaaaaaaaaaaaaaaaaaaaaaaaaaaaaaaaaaaaaaaaaaaaaa

SEQ ID NO: 22497 - RNA, 567 nt, Artificial Sequence
  mRNA product Design a-2 (A100) comprising derived and/or modified sequence from LASV(Mad39;Clade IV)__ANH09743__Z (opt5)
aggagaguccgcucagccagguugcagaagcggcuuagcguguguccuaaucuucucucugcguguagguaggccugugccgcaaacaagcuuaccaugggcaacaagcaggccaaagcuagcgagguggaagacgggcccagagccucccugaucccugaugcgacccaccucggaccgcaauucugcaagucuuguugguuugagaauaaaagccuggucgaaugcaacaaucauuaccuuugucugaacugccucacacugcuucuguccguuucuaaucggugucccauuugcaagaugccucuccccacgcgccugaaaccuagcguggugcccaccgcuccuccgacaagagccggcgacgggacccggcccccucccuauuccccuugaggacuagucccuguucccagagcccacuuuuuuuucuuuuuuugaaauaaaauagccugucuuucagaucuaaaaaaaaaaaaaaaaaaaaaaaaaaaaaaaaaaaaaaaaaaaaaaaaaaaaaaaaaaaaaaaaaaaaaaaaaaaaaaaaaaaaaaaaaaaaaaaaaaaa

SEQ ID NO: 22498 - RNA, 567 nt, Artificial Sequence
  mRNA product Design a-2 (A100) comprising derived and/or modified sequence from LASV(Z0947-SLE-2011;Clade IV)__AIT17838__Z (opt5)
aggagaguccgcucagccagguugcagaagcggcuuagcguguguccuaaucuucucucugcguguagguaggccugugccgcaaacaagcuuaccaugggcaacaagcaggccaaagugcccgagagcaaggacuccccuagagcuucucugaucccggaugccacccaccucgggccccaauucugcaaaagcuguugguuugaaaauaagggacuggucgagugcaacaaucauuaccuuugucugaacugccucacacugcuucuguccguuucuaaucgguguccuauuugcaaaaugccccucccuacgaagcugaagcccagcgcggcuccuaccgccccgcccacaggcgccgcugacuccauccgcccucccccuuauucucccugaggacuagucccuguucccagagcccacuuuuuuuucuuuuuuugaaauaaaauagccugucuuucagaucuaaaaaaaaaaaaaaaaaaaaaaaaaaaaaaaaaaaaaaaaaaaaaaaaaaaaaaaaaaaaaaaaaaaaaaaaaaaaaaaaaaaaaaaaaaaaaaaaaaaa

SEQ ID NO: 22499 - RNA, 605 nt, Artificial Sequence
  mRNA product Design b-4 (hSL-A64-N5) comprising derived and/or modified sequence from LASV(Josiah;Clade IV)__ADY11072/NP_694871__Z (opt1)
aggagagucccgcagucggcguccagcggcucugcuuguucgugugugugucguugcaggccuuauucaagcuuaccaugggcaacaagcaggccaaggcccccgagagcaaggacuccccgcgcgcgagccugauccccgacgccacccaccucgggccccaguucugcaaguccugcugguucgagaacaagggccugguggagugcaacaaccacuaccugugccucaacugccugacccugcuccugagcgucuccaaccggugccccaucugcaagaugccgcugcccacgaagcuccgccccagcgccgcccccaccgccccgcccaccggggcggccgacuccauccggcccccgcccuacagccccugaggacuaguaauaaggaaacuguaugaaugucugugggcaggaagugaagagauccuucuguaaagguuuuuggaauuaugucugcugaauaauaaacuuuuuugaaauaauaaaucugguagaaaaaugagaucucaaaggcucuuuucagagccaccaaaaaaaaaaaaaaaaaaaaaaaaaaaaaaaaaaaaaaaaaaaaaaaaaaaaaaaaaaaaaaaaagaauu

SEQ ID NO: 22500 - RNA, 608 nt, Artificial Sequence
  mRNA product Design b-4 (hSL-A64-N5) comprising derived and/or modified sequence from LASV(Pinneo-NIG-1969;Clade I)__AIT17834__Z (opt1)
aggagagucccgcagucggcguccagcggcucugcuuguucgugugugugucguugcaggccuuauucaagcuuaccaugggcaacaagcagacccgcagcccgcccaagcccgagcacccccggcccacccugcuccccgacgccucccaccuggggccccaguucugcaagagcugcugguucgagaacaagggccugguggagugcaacaaccacuaccucugccugaacugccugacgcuccugcuguccgucagcgaccgcugccccaucugcaagaugccccuccccaccaagcuggccgugcggacccagcccuccgcgccgccccugaaccaggggaacacccagagcagcccgccgcccuacucccccugaggacuaguaauaaggaaacuguaugaaugucugugggcaggaagugaagagauccuucuguaaagguuuuuggaauuaugucugcugaauaauaaacuuuuuugaaauaauaaaucugguagaaaaaugagaucucaaaggcucuuuucagagccaccaaaaaaaaaaaaaaaaaaaaaaaaaaaaaaaaaaaaaaaaaaaaaaaaaaaaaaaaaaaaaaaaagaauu

SEQ ID NO: 22501 - RNA, 605 nt, Artificial Sequence
  mRNA product Design b-4 (hSL-A64-N5) comprising derived and/or modified sequence from LASV(Nig08-04;Clade II)__ADU56612__Z (opt1)
aggagagucccgcagucggcguccagcggcucugcuuguucgugugugugucguugcaggccuuauucaagcuuaccaugggcaaccgccagacccggcccaccgaggccacggagcagagccgcgcccaccuggugccggacgccucccaccucgggccccaguucugcaagagcugcugguucgagaaccggggccuggucgagugcaacaaccacuaccugugccucaacugccugucccugcuccugagcguguccagccgcugccccaucugcaagaugccccugccgacccggcucaaggccuccgcccagcccagcgccccgcccaccgaggcgccccagaacaccacgcccccgcccuacacccccugaggacuaguaauaaggaaacuguaugaaugucugugggcaggaagugaagagauccuucuguaaagguuuuuggaauuaugucugcugaauaauaaacuuuuuugaaauaauaaaucugguagaaaaaugagaucucaaaggcucuuuucagagccaccaaaaaaaaaaaaaaaaaaaaaaaaaaaaaaaaaaaaaaaaaaaaaaaaaaaaaaaaaaaaaaaaagaauu

SEQ ID NO: 22502 - RNA, 605 nt, Artificial Sequence
  mRNA product Design b-4 (hSL-A64-N5) comprising derived and/or modified sequence from LASV(Nig08-A19;Clade III)__ADU56620__Z (opt1)
aggagagucccgcagucggcguccagcggcucugcuuguucgugugugugucguugcaggccuuauucaagcuuaccaugggcgggaagcacaccaagccccagcgcgagagcaacuccccgcgggccagccugauccccgacgccacccaccucggcccccaguucugcaaguccugcugguucgagaacaaggggcugguggagugcaacaaccacuaccugugccucaacugccugacgcugcuccugagcguguccaaccgcugccccaucugcaagaugccccugcccacccggcuccgcgccagcaccaaccccaccgcgccccagguggagcaggucggcccgacgaacccgccgcccuacucccccugaggacuaguaauaaggaaacuguaugaaugucugugggcaggaagugaagagauccuucuguaaagguuuuuggaauuaugucugcugaauaauaaacuuuuuugaaauaauaaaucugguagaaaaaugagaucucaaaggcucuuuucagagccaccaaaaaaaaaaaaaaaaaaaaaaaaaaaaaaaaaaaaaaaaaaaaaaaaaaaaaaaaaaaaaaaaagaauu

SEQ ID NO: 22503 - RNA, 605 nt, Artificial Sequence
  mRNA product Design b-4 (hSL-A64-N5) comprising derived and/or modified sequence from LASV(AV;Clade V)__CCA30312__Z (opt1)
aggagagucccgcagucggcguccagcggcucugcuuguucgugugugugucguugcaggccuuauucaagcuuaccaugggcaaccgccaggccaagaaccccgagguggagaacagcccccgggccucccugauccccgacgcgacccaccucgggccccaguucugcaagagcugcugguucgagaacaagggccuggucgagugcaacaaccacuaccugugccucaacugccugucccugcuccugagcguguccaaccgcugccccaucugcaagaugccgcugcccacccggcuccgccccacgaccacccccaccgccccgcagaucaucaaggagaacacgaccaacccgccgcccuacacccccugaggacuaguaauaaggaaacuguaugaaugucugugggcaggaagugaagagauccuucuguaaagguuuuuggaauuaugucugcugaauaauaaacuuuuuugaaauaauaaaucugguagaaaaaugagaucucaaaggcucuuuucagagccaccaaaaaaaaaaaaaaaaaaaaaaaaaaaaaaaaaaaaaaaaaaaaaaaaaaaaaaaaaaaaaaaaagaauu

SEQ ID NO: 22504 - RNA, 605 nt, Artificial Sequence
  mRNA product Design b-4 (hSL-A64-N5) comprising derived and/or modified sequence from LASV(Togo/2016/7082;Clade VI)__AMR44579__Z (opt1)
aggagagucccgcagucggcguccagcggcucugcuuguucgugugugugucguugcaggccuuauucaagcuuaccaugggcgcccgccagaccaagcagccccagaucgaggggagcccccgggccucccuggugcccgacgcgagccaccucggcccccaguucugcaaguccugcugguucgagaacaaggggcuggucgagugcaacaaccacuaccugugccucaacugccugagccugcuccuguccgugagcaaccgcugccccaucugcaagaugccgcugcccaccaagcuccggguguccagcgcccccuccgcgcccccggccgccacggcccagcccggcaccccgccgcccuacagccccugaggacuaguaauaaggaaacuguaugaaugucugugggcaggaagugaagagauccuucuguaaagguuuuuggaauuaugucugcugaauaauaaacuuuuuugaaauaauaaaucugguagaaaaaugagaucucaaaggcucuuuucagagccaccaaaaaaaaaaaaaaaaaaaaaaaaaaaaaaaaaaaaaaaaaaaaaaaaaaaaaaaaaaaaaaaaagaauu

SEQ ID NO: 22505 - RNA, 605 nt, Artificial Sequence
  mRNA product Design b-4 (hSL-A64-N5) comprising derived and/or modified sequence from LASV(KAK-428;Clade n.d. (VII))__ANH09761__Z (opt1)
aggagagucccgcagucggcguccagcggcucugcuuguucgugugugugucguugcaggccuuauucaagcuuaccaugggcaacaaggggaccaagcccacccagaacagcgagcccucccgcgccaaccuggugcccgacgccagcuaccucggcccccaguucugcaaguccugcugguucgagaacaaggggcuggucgagugcaacaaccacuaccugugccucaacugccugacgaugcugcucagcguguccaaccggugccccaucugcaagaugccgcugcccaccaagaucaaggccagcggcucccccagcgcgcccccgaccgaggccaacuccgccgugagcccgccgcccuacacccccugaggacuaguaauaaggaaacuguaugaaugucugugggcaggaagugaagagauccuucuguaaagguuuuuggaauuaugucugcugaauaauaaacuuuuuugaaauaauaaaucugguagaaaaaugagaucucaaaggcucuuuucagagccaccaaaaaaaaaaaaaaaaaaaaaaaaaaaaaaaaaaaaaaaaaaaaaaaaaaaaaaaaaaaaaaaaagaauu

SEQ ID NO: 22506 - RNA, 605 nt, Artificial Sequence
  mRNA product Design b-4 (hSL-A64-N5) comprising derived and/or modified sequence from LASV(ISTH0009-NIG-2011;Clade II)__AIT17402__Z (opt1)
aggagagucccgcagucggcguccagcggcucugcuuguucgugugugugucguugcaggccuuauucaagcuuaccaugggcaaccgccaggccaagagcaccaagguggacgagcaccagcgggcccaccugguccccgacgcgucccaccucgggccccaguucugcaagagcugcugguucgagaaccgcggccugguggagugcaacaaccacuaccugugccucaacugccugucccugcuccugagcguguccagccggugccccaucugcaagaugccccugcccaccaagcucaaggccgccgcccagccguccgcccccagcacggagaccauccagaacaccaccccgccgcccuacacgcccugaggacuaguaauaaggaaacuguaugaaugucugugggcaggaagugaagagauccuucuguaaagguuuuuggaauuaugucugcugaauaauaaacuuuuuugaaauaauaaaucugguagaaaaaugagaucucaaaggcucuuuucagagccaccaaaaaaaaaaaaaaaaaaaaaaaaaaaaaaaaaaaaaaaaaaaaaaaaaaaaaaaaaaaaaaaaagaauu

SEQ ID NO: 22507 - RNA, 605 nt, Artificial Sequence
  mRNA product Design b-4 (hSL-A64-N5) comprising derived and/or modified sequence from LASV(ISTH2010-NIG-2012;Clade II)__AIT17480__Z (opt1)
aggagagucccgcagucggcguccagcggcucugcuuguucgugugugugucguugcaggccuuauucaagcuuaccaugggcaaccgccacgccaagagcaccaagguggacgagcaccagcgggcccaccugguccccgacgcgucccaccucgggccccaguucugcaagagcugcugguucgagaaccgcggccugguggagugcaacaaccacuaccugugccucaacugccugucccugcuccugagcguguccagccggugccccaucugcaagaugccccugcccaccaagcucaaggccgccgcccagccguccgcccccagcacggaggucauccaguccaccaccccgccgcccuacacccccugaggacuaguaauaaggaaacuguaugaaugucugugggcaggaagugaagagauccuucuguaaagguuuuuggaauuaugucugcugaauaauaaacuuuuuugaaauaauaaaucugguagaaaaaugagaucucaaaggcucuuuucagagccaccaaaaaaaaaaaaaaaaaaaaaaaaaaaaaaaaaaaaaaaaaaaaaaaaaaaaaaaaaaaaaaaaagaauu

SEQ ID NO: 22508 - RNA, 605 nt, Artificial Sequence
  mRNA product Design b-4 (hSL-A64-N5) comprising derived and/or modified sequence from LASV(Lassa virus/H.sapiens-wt/NGA/2016/ISTH_0017;Clade II)__AVO03713__Z (opt1)
aggagagucccgcagucggcguccagcggcucugcuuguucgugugugugucguugcaggccuuauucaagcuuaccaugggcaaccgccaggccaagagcaccaagguggacgagcaccagcgggcccaccugguccccgacgcgucccaccucgggccccaguucugcaagagcugcugguucgagaaccgcggccugguggagugcaacaaccacuaccugugccucaacugccugucccugcuccugagcguguccagccggugccccaucugcaagaugccccugcccaccaagcucaaggccgccacgcagccguccgcccccagcaccgaggucaaccagaacaccaccccgccgcccuacacgcccugaggacuaguaauaaggaaacuguaugaaugucugugggcaggaagugaagagauccuucuguaaagguuuuuggaauuaugucugcugaauaauaaacuuuuuugaaauaauaaaucugguagaaaaaugagaucucaaaggcucuuuucagagccaccaaaaaaaaaaaaaaaaaaaaaaaaaaaaaaaaaaaaaaaaaaaaaaaaaaaaaaaaaaaaaaaaagaauu

SEQ ID NO: 22509 - RNA, 605 nt, Artificial Sequence
  mRNA product Design b-4 (hSL-A64-N5) comprising derived and/or modified sequence from LASV(Lassa virus/H.sapiens-wt/NGA/2018/ISTH_0959;Clade II)__AVV65084__Z (opt1)
aggagagucccgcagucggcguccagcggcucugcuuguucgugugugugucguugcaggccuuauucaagcuuaccaugggcaacaagcaggccaagagcaccaagguggacgagcaccagcgcgcccaccugguccccgacgcgucccaccucgggccccaguucugcaagagcugcugguucgagaaccggggccugguggagugcaacaaccacuaccugugccucaacugccugucccugcuccugagcguguccagccgcugccccaucugcaagaugccccugcccaccaagcucaaggccgccgcccagccguccgcccccagcacggaggcgauccaguccaccaccccgccgcccuacacccccugaggacuaguaauaaggaaacuguaugaaugucugugggcaggaagugaagagauccuucuguaaagguuuuuggaauuaugucugcugaauaauaaacuuuuuugaaauaauaaaucugguagaaaaaugagaucucaaaggcucuuuucagagccaccaaaaaaaaaaaaaaaaaaaaaaaaaaaaaaaaaaaaaaaaaaaaaaaaaaaaaaaaaaaaaaaaagaauu

SEQ ID NO: 22510 - RNA, 605 nt, Artificial Sequence
  mRNA product Design b-4 (hSL-A64-N5) comprising derived and/or modified sequence from LASV(LASV003-NIG-2008;Clade II)__AIT17578__Z (opt1)
aggagagucccgcagucggcguccagcggcucugcuuguucgugugugugucguugcaggccuuauucaagcuuaccaugggcaaccgccaggccaagagcaccaagguggacgagcaccagcgggcccaccugguccccgacgcgucccaccucgggccccaguucugcaagagcugcugguucgagaacaagggccugguggagugcaacaaccacuaccugugccucaacugccugucccugcuccugagcguguccagccgcugccccaucugcaagaugccccugcccaccaagcuccgggccgccgcccagccguccgcccccagcacggaguccgcgcagaacaccgccccgccgcccuacgcccccugaggacuaguaauaaggaaacuguaugaaugucugugggcaggaagugaagagauccuucuguaaagguuuuuggaauuaugucugcugaauaauaaacuuuuuugaaauaauaaaucugguagaaaaaugagaucucaaaggcucuuuucagagccaccaaaaaaaaaaaaaaaaaaaaaaaaaaaaaaaaaaaaaaaaaaaaaaaaaaaaaaaaaaaaaaaaagaauu

SEQ ID NO: 22511 - RNA, 605 nt, Artificial Sequence
  mRNA product Design b-4 (hSL-A64-N5) comprising derived and/or modified sequence from LASV(LASV035-NIG-2009;Clade II)__AIT17586__Z (opt1)
aggagagucccgcagucggcguccagcggcucugcuuguucgugugugugucguugcaggccuuauucaagcuuaccaugggcaacaagcaggccaagagcaccaagguggacgagcaccagcgcgcccaccugguccccgacgcgucccaccucgggccccaguucugcaagagcugcugguucgagaaccggggccugguggagugcaacaaccacuaccugugccucaacugccugucccugcuccugagcguguccagccgcugccccaucugcaagaugccccugcccacccggcucaaggccgccgcccagccguccgcccccagcacggaggucacccagaacaccaccccgccgcccuacacgcccugaggacuaguaauaaggaaacuguaugaaugucugugggcaggaagugaagagauccuucuguaaagguuuuuggaauuaugucugcugaauaauaaacuuuuuugaaauaauaaaucugguagaaaaaugagaucucaaaggcucuuuucagagccaccaaaaaaaaaaaaaaaaaaaaaaaaaaaaaaaaaaaaaaaaaaaaaaaaaaaaaaaaaaaaaaaaagaauu

SEQ ID NO: 22512 - RNA, 605 nt, Artificial Sequence
  mRNA product Design b-4 (hSL-A64-N5) comprising derived and/or modified sequence from LASV(LASV1000-NIG-2009;Clade II)__AIT17780__Z (opt1)
aggagagucccgcagucggcguccagcggcucugcuuguucgugugugugucguugcaggccuuauucaagcuuaccaugggcaaccgccagaccaagagcaccaagguggacgagcaccagcgggccuaccugguccccgacgccucccuccuggggccccaguucugcaagagcugcugguucgagaacaagggccugguggagugcaacaaccacuaccucugccugaacugccugucccuccugcugagcguguccagccgcugccccaucugcaagaugccccuccccacgcggcugaaggcggccgcccagcccuccgccccgcccaccgaggccauccagaacaccacgccgccgcccuacacccccugaggacuaguaauaaggaaacuguaugaaugucugugggcaggaagugaagagauccuucuguaaagguuuuuggaauuaugucugcugaauaauaaacuuuuuugaaauaauaaaucugguagaaaaaugagaucucaaaggcucuuuucagagccaccaaaaaaaaaaaaaaaaaaaaaaaaaaaaaaaaaaaaaaaaaaaaaaaaaaaaaaaaaaaaaaaaagaauu

SEQ ID NO: 22513 - RNA, 605 nt, Artificial Sequence
  mRNA product Design b-4 (hSL-A64-N5) comprising derived and/or modified sequence from LASV(LASV221-NIG-2010;Clade II)__AIT17622__Z (opt1)
aggagagucccgcagucggcguccagcggcucugcuuguucgugugugugucguugcaggccuuauucaagcuuaccaugggcaaccgccaggccaagagcaccaagguggacgagcaccagcgggcccaccugguccccgacgcgucccaccucgggccccaguucugcaagagcugcugguucgagaaccgcggccugguggagugcaacaaccacuaccugugccucaacugccugucccugcuccugagcguguccagccggugccccaucugcaagaugccccugcccaccaagcucaaggccgccacgcagccguccgcccccagcaccgaggucacccagaacaccaucccgccgcccuacucccccugaggacuaguaauaaggaaacuguaugaaugucugugggcaggaagugaagagauccuucuguaaagguuuuuggaauuaugucugcugaauaauaaacuuuuuugaaauaauaaaucugguagaaaaaugagaucucaaaggcucuuuucagagccaccaaaaaaaaaaaaaaaaaaaaaaaaaaaaaaaaaaaaaaaaaaaaaaaaaaaaaaaaaaaaaaaaagaauu

SEQ ID NO: 22514 - RNA, 605 nt, Artificial Sequence
  mRNA product Design b-4 (hSL-A64-N5) comprising derived and/or modified sequence from LASV(LASV237-NIG-2010;Clade II)__AIT17636__Z (opt1)
aggagagucccgcagucggcguccagcggcucugcuuguucgugugugugucguugcaggccuuauucaagcuuaccaugggcaaccgccaggccaagagcaccaagguggacgagcaccagcgggcccaccugguccccgacgcgucccaccucgggccccaguucugcaagagcugcugguucgagaaccgcggccugguggagugcaacaaccacuaccugugccucaacugccugucccugcuccugagcguguccagccggugccccaucugcaagaugccccugcccaccaagcucaaggccgccgcccagccguccgcccccagcaucgagacgauccagaacaccaccccgccgcccuacacccccugaggacuaguaauaaggaaacuguaugaaugucugugggcaggaagugaagagauccuucuguaaagguuuuuggaauuaugucugcugaauaauaaacuuuuuugaaauaauaaaucugguagaaaaaugagaucucaaaggcucuuuucagagccaccaaaaaaaaaaaaaaaaaaaaaaaaaaaaaaaaaaaaaaaaaaaaaaaaaaaaaaaaaaaaaaaaagaauu

SEQ ID NO: 22515 - RNA, 605 nt, Artificial Sequence
  mRNA product Design b-4 (hSL-A64-N5) comprising derived and/or modified sequence from LASV(LASV253-NIG-2011;Clade II)__AIT17668__Z (opt1)
aggagagucccgcagucggcguccagcggcucugcuuguucgugugugugucguugcaggccuuauucaagcuuaccaugggcaaccgccaggccaagagcaccaagguggacgagcaccagcgggcccaccugguccccgacgcgucccaccucgggccccaguucugcaagagcugcugguucgagaacaagggccugguggagugcaacaaccacuaccugugccucaacugccugucccugcuccugagcguguccagccgcugccccaucugcaagaugccccugcccaccaagcucaagacgaccgcccagccguccgccccgcccaccgaggccgccaagaacaccgcgcccccgcccuacgcccccugaggacuaguaauaaggaaacuguaugaaugucugugggcaggaagugaagagauccuucuguaaagguuuuuggaauuaugucugcugaauaauaaacuuuuuugaaauaauaaaucugguagaaaaaugagaucucaaaggcucuuuucagagccaccaaaaaaaaaaaaaaaaaaaaaaaaaaaaaaaaaaaaaaaaaaaaaaaaaaaaaaaaaaaaaaaaagaauu

SEQ ID NO: 22516 - RNA, 605 nt, Artificial Sequence
  mRNA product Design b-4 (hSL-A64-N5) comprising derived and/or modified sequence from LASV(G1180-SLE-2010;Clade IV)__AIT17166__Z (opt1)
aggagagucccgcagucggcguccagcggcucugcuuguucgugugugugucguugcaggccuuauucaagcuuaccaugggcaacaagcaggccaaggcccccgaggcgaaggacagcccgcgcgccucccugauccccgacgccacccaccucgggccccaguucugcaagagcugcugguucgagaccaagggccugguggagugcaacaaccacuaccugugccucaacugccugacgcugcuccuguccgucagcaaccggugccccaucugcaagaugccgcugcccaccaagcuccgccccuccgccacccccaccgccccgcccacggaggcggccgacagcaucgggcccccgcccuacucccccugaggacuaguaauaaggaaacuguaugaaugucugugggcaggaagugaagagauccuucuguaaagguuuuuggaauuaugucugcugaauaauaaacuuuuuugaaauaauaaaucugguagaaaaaugagaucucaaaggcucuuuucagagccaccaaaaaaaaaaaaaaaaaaaaaaaaaaaaaaaaaaaaaaaaaaaaaaaaaaaaaaaaaaaaaaaaagaauu

SEQ ID NO: 22517 - RNA, 605 nt, Artificial Sequence
  mRNA product Design b-4 (hSL-A64-N5) comprising derived and/or modified sequence from LASV(G1442-SLE-2011;Clade IV)__AIT17178__Z (opt1)
aggagagucccgcagucggcguccagcggcucugcuuguucgugugugugucguugcaggccuuauucaagcuuaccaugggcaacaagcaggccaaggccagcgaggcgaaggacagcccccgcgccucccugaucccggacgccacccaccucgggccccaguucugcaaguccugcugguucgagaacaagggccugguggagugcaacaaccacuaccugugccucaacugccugagccugcuccuguccgucagcucccggugccccaucugcaagaugccccugccgacccgccuccggcccagcacggcccccaccgcgcccccggcccgcgccggggacaacaucaagcccccgcccuacucccccugaggacuaguaauaaggaaacuguaugaaugucugugggcaggaagugaagagauccuucuguaaagguuuuuggaauuaugucugcugaauaauaaacuuuuuugaaauaauaaaucugguagaaaaaugagaucucaaaggcucuuuucagagccaccaaaaaaaaaaaaaaaaaaaaaaaaaaaaaaaaaaaaaaaaaaaaaaaaaaaaaaaaaaaaaaaaagaauu

SEQ ID NO: 22518 - RNA, 605 nt, Artificial Sequence
  mRNA product Design b-4 (hSL-A64-N5) comprising derived and/or modified sequence from LASV(G502-SLE-2009;Clade IV)__AIT17124__Z (opt1)
aggagagucccgcagucggcguccagcggcucugcuuguucgugugugugucguugcaggccuuauucaagcuuaccaugggcaacaagcaggucaagacccccgaggccaaggacagcccccgcgccucccugauccccgacgcgacccaccucgggccccaguucugcaagagcugcugguucgagaacaagggccugguggagugcaacaaccacuaccugugccucaacugccugacgcugcuccuguccguggggaaccggugccccaucugcaagaugccgcugcccaccaagcuccgccccagcgugacccccaccgccccgcccacgcgggccgccgacuccaucggcccgccgcccuacagccccugaggacuaguaauaaggaaacuguaugaaugucugugggcaggaagugaagagauccuucuguaaagguuuuuggaauuaugucugcugaauaauaaacuuuuuugaaauaauaaaucugguagaaaaaugagaucucaaaggcucuuuucagagccaccaaaaaaaaaaaaaaaaaaaaaaaaaaaaaaaaaaaaaaaaaaaaaaaaaaaaaaaaaaaaaaaaagaauu

SEQ ID NO: 22519 - RNA, 605 nt, Artificial Sequence
  mRNA product Design b-4 (hSL-A64-N5) comprising derived and/or modified sequence from LASV(G733-SLE-2010;Clade IV)__AIT17152__Z (opt1)
aggagagucccgcagucggcguccagcggcucugcuuguucgugugugugucguugcaggccuuauucaagcuuaccaugggcaacaagcaggccaagacccccgagaccaaggacagcccgcgcgccucccugauccccgacgcgacgcaccucgggccccaguucugcaagagcugcugguucgagaacaagggccugguggagugcaacaaccacuaccugugccucaacugccugacccugcuccuguccgucagcaaccggugccccaucugcaagaugccgcugcccaccaagcuccgccccuccaccgcccccacggccccgcccgccggggccgcggacaacacccggcccccgcccuacagccccugaggacuaguaauaaggaaacuguaugaaugucugugggcaggaagugaagagauccuucuguaaagguuuuuggaauuaugucugcugaauaauaaacuuuuuugaaauaauaaaucugguagaaaaaugagaucucaaaggcucuuuucagagccaccaaaaaaaaaaaaaaaaaaaaaaaaaaaaaaaaaaaaaaaaaaaaaaaaaaaaaaaaaaaaaaaaagaauu

SEQ ID NO: 22520 - RNA, 617 nt, Artificial Sequence
  mRNA product Design b-4 (hSL-A64-N5) comprising derived and/or modified sequence from MOPV/LASV reassortant(IGS-1;Clade IV)__AFY05533__Z (opt1)
aggagagucccgcagucggcguccagcggcucugcuuguucgugugugugucguugcaggccuuauucaagcuuaccaugggcaagacccagagcaaggggcagcccuccaccaaccugcucaaggagacggagccccgccaccccgugauccccgacgcccggggcaccgggcccgaguucugcaagagcugcugguucgagcgccggggccugguccgcugcaacgaccacuaccugugccucaacugccugacccugcuccacaccguguccgaccggugccccaucugcaagcacaagcugcccuuccgccuggagcuccagacgcagcccaccgccccgcccgagaucccgcccagccagaacccgccgcccuacucccccugaggacuaguaauaaggaaacuguaugaaugucugugggcaggaagugaagagauccuucuguaaagguuuuuggaauuaugucugcugaauaauaaacuuuuuugaaauaauaaaucugguagaaaaaugagaucucaaaggcucuuuucagagccaccaaaaaaaaaaaaaaaaaaaaaaaaaaaaaaaaaaaaaaaaaaaaaaaaaaaaaaaaaaaaaaaaagaauu

SEQ ID NO: 22521 - RNA, 605 nt, Artificial Sequence
  mRNA product Design b-4 (hSL-A64-N5) comprising derived and/or modified sequence from LASV(LM776-SLE-2012;Clade IV)__AIT17824__Z (opt1)
aggagagucccgcagucggcguccagcggcucugcuuguucgugugugugucguugcaggccuuauucaagcuuaccaugggcaacaagcaggccaaggccagcgaggagaagaacagcccccgcgccucccugaucccggacgccacccaccucgggccccaguucugcaaguccugcugguucgagaacaagggccugguggagugcaacaaccacuaccugugccucaacugccugacccugcuccugagcgucuccaaccggugccccaucugcaagaugccccugccgacgaagcuccgccccagcaccacccccaccgcgcccccgacgggggccgccgacuccauccggcccccgcccuacagccccugaggacuaguaauaaggaaacuguaugaaugucugugggcaggaagugaagagauccuucuguaaagguuuuuggaauuaugucugcugaauaauaaacuuuuuugaaauaauaaaucugguagaaaaaugagaucucaaaggcucuuuucagagccaccaaaaaaaaaaaaaaaaaaaaaaaaaaaaaaaaaaaaaaaaaaaaaaaaaaaaaaaaaaaaaaaaagaauu

SEQ ID NO: 22522 - RNA, 605 nt, Artificial Sequence
  mRNA product Design b-4 (hSL-A64-N5) comprising derived and/or modified sequence from LASV(Mad39;Clade IV)__ANH09743__Z (opt1)
aggagagucccgcagucggcguccagcggcucugcuuguucgugugugugucguugcaggccuuauucaagcuuaccaugggcaacaagcaggccaaggccagcgagguggaggacgggccccgcgccucccugauccccgacgccacccaccucggcccccaguucugcaagagcugcugguucgagaacaagucccuggucgagugcaacaaccacuaccugugccucaacugccugacccugcuccugagcguguccaaccggugccccaucugcaagaugccccugccgacgcgccucaagcccagcgugguccccaccgcgcccccgacccgggccggggacggcacccgcccgccgcccuacucccccugaggacuaguaauaaggaaacuguaugaaugucugugggcaggaagugaagagauccuucuguaaagguuuuuggaauuaugucugcugaauaauaaacuuuuuugaaauaauaaaucugguagaaaaaugagaucucaaaggcucuuuucagagccaccaaaaaaaaaaaaaaaaaaaaaaaaaaaaaaaaaaaaaaaaaaaaaaaaaaaaaaaaaaaaaaaaagaauu

SEQ ID NO: 22523 - RNA, 605 nt, Artificial Sequence
  mRNA product Design b-4 (hSL-A64-N5) comprising derived and/or modified sequence from LASV(Z0947-SLE-2011;Clade IV)__AIT17838__Z (opt1)
aggagagucccgcagucggcguccagcggcucugcuuguucgugugugugucguugcaggccuuauucaagcuuaccaugggcaacaagcaggccaaggugcccgagagcaaggacuccccgcgcgccagccugauccccgacgcgacccaccucgggccccaguucugcaaguccugcugguucgagaacaagggccuggucgagugcaacaaccacuaccugugccucaacugccugacccugcuccugagcguguccaaccgcugccccaucugcaagaugccgcugcccacgaagcucaagcccagcgccgcccccaccgccccgcccaccggggccgcggacuccauccggcccccgcccuacagccccugaggacuaguaauaaggaaacuguaugaaugucugugggcaggaagugaagagauccuucuguaaagguuuuuggaauuaugucugcugaauaauaaacuuuuuugaaauaauaaaucugguagaaaaaugagaucucaaaggcucuuuucagagccaccaaaaaaaaaaaaaaaaaaaaaaaaaaaaaaaaaaaaaaaaaaaaaaaaaaaaaaaaaaaaaaaaagaauu

SEQ ID NO: 22524 - RNA, 605 nt, Artificial Sequence
  mRNA product Design b-4 (hSL-A64-N5) comprising derived and/or modified sequence from LASV(Josiah;Clade IV)__ADY11072/NP_694871__Z (opt4)
aggagagucccgcagucggcguccagcggcucugcuuguucgugugugugucguugcaggccuuauucaagcuuaccaugggcaacaagcaggccaaggcccccgagagcaaggacagccccagagccagccugauccccgacgccacccaccugggcccccaguucugcaagagcugcugguucgagaacaagggccugguggagugcaacaaccacuaccugugccugaacugccugacccugcugcugagcgugagcaacagaugccccaucugcaagaugccccugcccaccaagcugagacccagcgccgcccccaccgccccccccaccggcgccgccgacagcaucagacccccccccuacagccccugaggacuaguaauaaggaaacuguaugaaugucugugggcaggaagugaagagauccuucuguaaagguuuuuggaauuaugucugcugaauaauaaacuuuuuugaaauaauaaaucugguagaaaaaugagaucucaaaggcucuuuucagagccaccaaaaaaaaaaaaaaaaaaaaaaaaaaaaaaaaaaaaaaaaaaaaaaaaaaaaaaaaaaaaaaaaagaauu

SEQ ID NO: 22525 - RNA, 608 nt, Artificial Sequence
  mRNA product Design b-4 (hSL-A64-N5) comprising derived and/or modified sequence from LASV(Pinneo-NIG-1969;Clade I)__AIT17834__Z (opt4)
aggagagucccgcagucggcguccagcggcucugcuuguucgugugugugucguugcaggccuuauucaagcuuaccaugggcaacaagcagaccagaagcccccccaagcccgagcaccccagacccacccugcugcccgacgccagccaccugggcccccaguucugcaagagcugcugguucgagaacaagggccugguggagugcaacaaccacuaccugugccugaacugccugacccugcugcugagcgugagcgacagaugccccaucugcaagaugccccugcccaccaagcuggccgugagaacccagcccagcgcccccccccugaaccagggcaacacccagagcagccccccccccuacagccccugaggacuaguaauaaggaaacuguaugaaugucugugggcaggaagugaagagauccuucuguaaagguuuuuggaauuaugucugcugaauaauaaacuuuuuugaaauaauaaaucugguagaaaaaugagaucucaaaggcucuuuucagagccaccaaaaaaaaaaaaaaaaaaaaaaaaaaaaaaaaaaaaaaaaaaaaaaaaaaaaaaaaaaaaaaaaagaauu

SEQ ID NO: 22526 - RNA, 605 nt, Artificial Sequence
  mRNA product Design b-4 (hSL-A64-N5) comprising derived and/or modified sequence from LASV(Nig08-04;Clade II)__ADU56612__Z (opt4)
aggagagucccgcagucggcguccagcggcucugcuuguucgugugugugucguugcaggccuuauucaagcuuaccaugggcaacagacagaccagacccaccgaggccaccgagcagagcagagcccaccuggugcccgacgccagccaccugggcccccaguucugcaagagcugcugguucgagaacagaggccugguggagugcaacaaccacuaccugugccugaacugccugagccugcugcugagcgugagcagcagaugccccaucugcaagaugccccugcccaccagacugaaggccagcgcccagcccagcgccccccccaccgaggccccccagaacaccacccccccccccuacacccccugaggacuaguaauaaggaaacuguaugaaugucugugggcaggaagugaagagauccuucuguaaagguuuuuggaauuaugucugcugaauaauaaacuuuuuugaaauaauaaaucugguagaaaaaugagaucucaaaggcucuuuucagagccaccaaaaaaaaaaaaaaaaaaaaaaaaaaaaaaaaaaaaaaaaaaaaaaaaaaaaaaaaaaaaaaaaagaauu

SEQ ID NO: 22527 - RNA, 605 nt, Artificial Sequence
  mRNA product Design b-4 (hSL-A64-N5) comprising derived and/or modified sequence from LASV(Nig08-A19;Clade III)__ADU56620__Z (opt4)
aggagagucccgcagucggcguccagcggcucugcuuguucgugugugugucguugcaggccuuauucaagcuuaccaugggcggcaagcacaccaagccccagagagagagcaacagccccagagccagccugauccccgacgccacccaccugggcccccaguucugcaagagcugcugguucgagaacaagggccugguggagugcaacaaccacuaccugugccugaacugccugacccugcugcugagcgugagcaacagaugccccaucugcaagaugccccugcccaccagacugagagccagcaccaaccccaccgccccccagguggagcaggugggccccaccaaccccccccccuacagccccugaggacuaguaauaaggaaacuguaugaaugucugugggcaggaagugaagagauccuucuguaaagguuuuuggaauuaugucugcugaauaauaaacuuuuuugaaauaauaaaucugguagaaaaaugagaucucaaaggcucuuuucagagccaccaaaaaaaaaaaaaaaaaaaaaaaaaaaaaaaaaaaaaaaaaaaaaaaaaaaaaaaaaaaaaaaaagaauu

SEQ ID NO: 22528 - RNA, 605 nt, Artificial Sequence
  mRNA product Design b-4 (hSL-A64-N5) comprising derived and/or modified sequence from LASV(AV;Clade V)__CCA30312__Z (opt4)
aggagagucccgcagucggcguccagcggcucugcuuguucgugugugugucguugcaggccuuauucaagcuuaccaugggcaacagacaggccaagaaccccgagguggagaacagccccagagccagccugauccccgacgccacccaccugggcccccaguucugcaagagcugcugguucgagaacaagggccugguggagugcaacaaccacuaccugugccugaacugccugagccugcugcugagcgugagcaacagaugccccaucugcaagaugccccugcccaccagacugagacccaccaccacccccaccgccccccagaucaucaaggagaacaccaccaaccccccccccuacacccccugaggacuaguaauaaggaaacuguaugaaugucugugggcaggaagugaagagauccuucuguaaagguuuuuggaauuaugucugcugaauaauaaacuuuuuugaaauaauaaaucugguagaaaaaugagaucucaaaggcucuuuucagagccaccaaaaaaaaaaaaaaaaaaaaaaaaaaaaaaaaaaaaaaaaaaaaaaaaaaaaaaaaaaaaaaaaagaauu

SEQ ID NO: 22529 - RNA, 605 nt, Artificial Sequence
  mRNA product Design b-4 (hSL-A64-N5) comprising derived and/or modified sequence from LASV(Togo/2016/7082;Clade VI)__AMR44579__Z (opt4)
aggagagucccgcagucggcguccagcggcucugcuuguucgugugugugucguugcaggccuuauucaagcuuaccaugggcgccagacagaccaagcagccccagaucgagggcagccccagagccagccuggugcccgacgccagccaccugggcccccaguucugcaagagcugcugguucgagaacaagggccugguggagugcaacaaccacuaccugugccugaacugccugagccugcugcugagcgugagcaacagaugccccaucugcaagaugccccugcccaccaagcugagagugagcagcgcccccagcgccccccccgccgccaccgcccagcccggcacccccccccccuacagccccugaggacuaguaauaaggaaacuguaugaaugucugugggcaggaagugaagagauccuucuguaaagguuuuuggaauuaugucugcugaauaauaaacuuuuuugaaauaauaaaucugguagaaaaaugagaucucaaaggcucuuuucagagccaccaaaaaaaaaaaaaaaaaaaaaaaaaaaaaaaaaaaaaaaaaaaaaaaaaaaaaaaaaaaaaaaaagaauu

SEQ ID NO: 22530 - RNA, 605 nt, Artificial Sequence
  mRNA product Design b-4 (hSL-A64-N5) comprising derived and/or modified sequence from LASV(KAK-428;Clade n.d. (VII))__ANH09761__Z (opt4)
aggagagucccgcagucggcguccagcggcucugcuuguucgugugugugucguugcaggccuuauucaagcuuaccaugggcaacaagggcaccaagcccacccagaacagcgagcccagcagagccaaccuggugcccgacgccagcuaccugggcccccaguucugcaagagcugcugguucgagaacaagggccugguggagugcaacaaccacuaccugugccugaacugccugaccaugcugcugagcgugagcaacagaugccccaucugcaagaugccccugcccaccaagaucaaggccagcggcagccccagcgccccccccaccgaggccaacagcgccgugagccccccccccuacacccccugaggacuaguaauaaggaaacuguaugaaugucugugggcaggaagugaagagauccuucuguaaagguuuuuggaauuaugucugcugaauaauaaacuuuuuugaaauaauaaaucugguagaaaaaugagaucucaaaggcucuuuucagagccaccaaaaaaaaaaaaaaaaaaaaaaaaaaaaaaaaaaaaaaaaaaaaaaaaaaaaaaaaaaaaaaaaagaauu

SEQ ID NO: 22531 - RNA, 605 nt, Artificial Sequence
  mRNA product Design b-4 (hSL-A64-N5) comprising derived and/or modified sequence from LASV(ISTH0009-NIG-2011;Clade II)__AIT17402__Z (opt4)
aggagagucccgcagucggcguccagcggcucugcuuguucgugugugugucguugcaggccuuauucaagcuuaccaugggcaacagacaggccaagagcaccaagguggacgagcaccagagagcccaccuggugcccgacgccagccaccugggcccccaguucugcaagagcugcugguucgagaacagaggccugguggagugcaacaaccacuaccugugccugaacugccugagccugcugcugagcgugagcagcagaugccccaucugcaagaugccccugcccaccaagcugaaggccgccgcccagcccagcgcccccagcaccgagaccauccagaacaccacccccccccccuacacccccugaggacuaguaauaaggaaacuguaugaaugucugugggcaggaagugaagagauccuucuguaaagguuuuuggaauuaugucugcugaauaauaaacuuuuuugaaauaauaaaucugguagaaaaaugagaucucaaaggcucuuuucagagccaccaaaaaaaaaaaaaaaaaaaaaaaaaaaaaaaaaaaaaaaaaaaaaaaaaaaaaaaaaaaaaaaaagaauu

SEQ ID NO: 22532 - RNA, 605 nt, Artificial Sequence
  mRNA product Design b-4 (hSL-A64-N5) comprising derived and/or modified sequence from LASV(ISTH2010-NIG-2012;Clade II)__AIT17480__Z (opt4)
aggagagucccgcagucggcguccagcggcucugcuuguucgugugugugucguugcaggccuuauucaagcuuaccaugggcaacagacacgccaagagcaccaagguggacgagcaccagagagcccaccuggugcccgacgccagccaccugggcccccaguucugcaagagcugcugguucgagaacagaggccugguggagugcaacaaccacuaccugugccugaacugccugagccugcugcugagcgugagcagcagaugccccaucugcaagaugccccugcccaccaagcugaaggccgccgcccagcccagcgcccccagcaccgaggugauccagagcaccacccccccccccuacacccccugaggacuaguaauaaggaaacuguaugaaugucugugggcaggaagugaagagauccuucuguaaagguuuuuggaauuaugucugcugaauaauaaacuuuuuugaaauaauaaaucugguagaaaaaugagaucucaaaggcucuuuucagagccaccaaaaaaaaaaaaaaaaaaaaaaaaaaaaaaaaaaaaaaaaaaaaaaaaaaaaaaaaaaaaaaaaagaauu

SEQ ID NO: 22533 - RNA, 605 nt, Artificial Sequence
  mRNA product Design b-4 (hSL-A64-N5) comprising derived and/or modified sequence from LASV(Lassa virus/H.sapiens-wt/NGA/2016/ISTH_0017;Clade II)__AVO03713__Z (opt4)
aggagagucccgcagucggcguccagcggcucugcuuguucgugugugugucguugcaggccuuauucaagcuuaccaugggcaacagacaggccaagagcaccaagguggacgagcaccagagagcccaccuggugcccgacgccagccaccugggcccccaguucugcaagagcugcugguucgagaacagaggccugguggagugcaacaaccacuaccugugccugaacugccugagccugcugcugagcgugagcagcagaugccccaucugcaagaugccccugcccaccaagcugaaggccgccacccagcccagcgcccccagcaccgaggugaaccagaacaccacccccccccccuacacccccugaggacuaguaauaaggaaacuguaugaaugucugugggcaggaagugaagagauccuucuguaaagguuuuuggaauuaugucugcugaauaauaaacuuuuuugaaauaauaaaucugguagaaaaaugagaucucaaaggcucuuuucagagccaccaaaaaaaaaaaaaaaaaaaaaaaaaaaaaaaaaaaaaaaaaaaaaaaaaaaaaaaaaaaaaaaaagaauu

SEQ ID NO: 22534 - RNA, 605 nt, Artificial Sequence
  mRNA product Design b-4 (hSL-A64-N5) comprising derived and/or modified sequence from LASV(Lassa virus/H.sapiens-wt/NGA/2018/ISTH_0959;Clade II)__AVV65084__Z (opt4)
aggagagucccgcagucggcguccagcggcucugcuuguucgugugugugucguugcaggccuuauucaagcuuaccaugggcaacaagcaggccaagagcaccaagguggacgagcaccagagagcccaccuggugcccgacgccagccaccugggcccccaguucugcaagagcugcugguucgagaacagaggccugguggagugcaacaaccacuaccugugccugaacugccugagccugcugcugagcgugagcagcagaugccccaucugcaagaugccccugcccaccaagcugaaggccgccgcccagcccagcgcccccagcaccgaggccauccagagcaccacccccccccccuacacccccugaggacuaguaauaaggaaacuguaugaaugucugugggcaggaagugaagagauccuucuguaaagguuuuuggaauuaugucugcugaauaauaaacuuuuuugaaauaauaaaucugguagaaaaaugagaucucaaaggcucuuuucagagccaccaaaaaaaaaaaaaaaaaaaaaaaaaaaaaaaaaaaaaaaaaaaaaaaaaaaaaaaaaaaaaaaaagaauu

SEQ ID NO: 22535 - RNA, 605 nt, Artificial Sequence
  mRNA product Design b-4 (hSL-A64-N5) comprising derived and/or modified sequence from LASV(LASV003-NIG-2008;Clade II)__AIT17578__Z (opt4)
aggagagucccgcagucggcguccagcggcucugcuuguucgugugugugucguugcaggccuuauucaagcuuaccaugggcaacagacaggccaagagcaccaagguggacgagcaccagagagcccaccuggugcccgacgccagccaccugggcccccaguucugcaagagcugcugguucgagaacaagggccugguggagugcaacaaccacuaccugugccugaacugccugagccugcugcugagcgugagcagcagaugccccaucugcaagaugccccugcccaccaagcugagagccgccgcccagcccagcgcccccagcaccgagagcgcccagaacaccgcccccccccccuacgcccccugaggacuaguaauaaggaaacuguaugaaugucugugggcaggaagugaagagauccuucuguaaagguuuuuggaauuaugucugcugaauaauaaacuuuuuugaaauaauaaaucugguagaaaaaugagaucucaaaggcucuuuucagagccaccaaaaaaaaaaaaaaaaaaaaaaaaaaaaaaaaaaaaaaaaaaaaaaaaaaaaaaaaaaaaaaaaagaauu

SEQ ID NO: 22536 - RNA, 605 nt, Artificial Sequence
  mRNA product Design b-4 (hSL-A64-N5) comprising derived and/or modified sequence from LASV(LASV035-NIG-2009;Clade II)__AIT17586__Z (opt4)
aggagagucccgcagucggcguccagcggcucugcuuguucgugugugugucguugcaggccuuauucaagcuuaccaugggcaacaagcaggccaagagcaccaagguggacgagcaccagagagcccaccuggugcccgacgccagccaccugggcccccaguucugcaagagcugcugguucgagaacagaggccugguggagugcaacaaccacuaccugugccugaacugccugagccugcugcugagcgugagcagcagaugccccaucugcaagaugccccugcccaccagacugaaggccgccgcccagcccagcgcccccagcaccgaggugacccagaacaccacccccccccccuacacccccugaggacuaguaauaaggaaacuguaugaaugucugugggcaggaagugaagagauccuucuguaaagguuuuuggaauuaugucugcugaauaauaaacuuuuuugaaauaauaaaucugguagaaaaaugagaucucaaaggcucuuuucagagccaccaaaaaaaaaaaaaaaaaaaaaaaaaaaaaaaaaaaaaaaaaaaaaaaaaaaaaaaaaaaaaaaaagaauu

SEQ ID NO: 22537 - RNA, 605 nt, Artificial Sequence
  mRNA product Design b-4 (hSL-A64-N5) comprising derived and/or modified sequence from LASV(LASV1000-NIG-2009;Clade II)__AIT17780__Z (opt4)
aggagagucccgcagucggcguccagcggcucugcuuguucgugugugugucguugcaggccuuauucaagcuuaccaugggcaacagacagaccaagagcaccaagguggacgagcaccagagagccuaccuggugcccgacgccagccugcugggcccccaguucugcaagagcugcugguucgagaacaagggccugguggagugcaacaaccacuaccugugccugaacugccugagccugcugcugagcgugagcagcagaugccccaucugcaagaugccccugcccaccagacugaaggccgccgcccagcccagcgccccccccaccgaggccauccagaacaccacccccccccccuacacccccugaggacuaguaauaaggaaacuguaugaaugucugugggcaggaagugaagagauccuucuguaaagguuuuuggaauuaugucugcugaauaauaaacuuuuuugaaauaauaaaucugguagaaaaaugagaucucaaaggcucuuuucagagccaccaaaaaaaaaaaaaaaaaaaaaaaaaaaaaaaaaaaaaaaaaaaaaaaaaaaaaaaaaaaaaaaaagaauu

SEQ ID NO: 22538 - RNA, 605 nt, Artificial Sequence
  mRNA product Design b-4 (hSL-A64-N5) comprising derived and/or modified sequence from LASV(LASV221-NIG-2010;Clade II)__AIT17622__Z (opt4)
aggagagucccgcagucggcguccagcggcucugcuuguucgugugugugucguugcaggccuuauucaagcuuaccaugggcaacagacaggccaagagcaccaagguggacgagcaccagagagcccaccuggugcccgacgccagccaccugggcccccaguucugcaagagcugcugguucgagaacagaggccugguggagugcaacaaccacuaccugugccugaacugccugagccugcugcugagcgugagcagcagaugccccaucugcaagaugccccugcccaccaagcugaaggccgccacccagcccagcgcccccagcaccgaggugacccagaacaccauccccccccccuacagccccugaggacuaguaauaaggaaacuguaugaaugucugugggcaggaagugaagagauccuucuguaaagguuuuuggaauuaugucugcugaauaauaaacuuuuuugaaauaauaaaucugguagaaaaaugagaucucaaaggcucuuuucagagccaccaaaaaaaaaaaaaaaaaaaaaaaaaaaaaaaaaaaaaaaaaaaaaaaaaaaaaaaaaaaaaaaaagaauu

SEQ ID NO: 22539 - RNA, 605 nt, Artificial Sequence
  mRNA product Design b-4 (hSL-A64-N5) comprising derived and/or modified sequence from LASV(LASV237-NIG-2010;Clade II)__AIT17636__Z (opt4)
aggagagucccgcagucggcguccagcggcucugcuuguucgugugugugucguugcaggccuuauucaagcuuaccaugggcaacagacaggccaagagcaccaagguggacgagcaccagagagcccaccuggugcccgacgccagccaccugggcccccaguucugcaagagcugcugguucgagaacagaggccugguggagugcaacaaccacuaccugugccugaacugccugagccugcugcugagcgugagcagcagaugccccaucugcaagaugccccugcccaccaagcugaaggccgccgcccagcccagcgcccccagcaucgagaccauccagaacaccacccccccccccuacacccccugaggacuaguaauaaggaaacuguaugaaugucugugggcaggaagugaagagauccuucuguaaagguuuuuggaauuaugucugcugaauaauaaacuuuuuugaaauaauaaaucugguagaaaaaugagaucucaaaggcucuuuucagagccaccaaaaaaaaaaaaaaaaaaaaaaaaaaaaaaaaaaaaaaaaaaaaaaaaaaaaaaaaaaaaaaaaagaauu

SEQ ID NO: 22540 - RNA, 605 nt, Artificial Sequence
  mRNA product Design b-4 (hSL-A64-N5) comprising derived and/or modified sequence from LASV(LASV253-NIG-2011;Clade II)__AIT17668__Z (opt4)
aggagagucccgcagucggcguccagcggcucugcuuguucgugugugugucguugcaggccuuauucaagcuuaccaugggcaacagacaggccaagagcaccaagguggacgagcaccagagagcccaccuggugcccgacgccagccaccugggcccccaguucugcaagagcugcugguucgagaacaagggccugguggagugcaacaaccacuaccugugccugaacugccugagccugcugcugagcgugagcagcagaugccccaucugcaagaugccccugcccaccaagcugaagaccaccgcccagcccagcgccccccccaccgaggccgccaagaacaccgcccccccccccuacgcccccugaggacuaguaauaaggaaacuguaugaaugucugugggcaggaagugaagagauccuucuguaaagguuuuuggaauuaugucugcugaauaauaaacuuuuuugaaauaauaaaucugguagaaaaaugagaucucaaaggcucuuuucagagccaccaaaaaaaaaaaaaaaaaaaaaaaaaaaaaaaaaaaaaaaaaaaaaaaaaaaaaaaaaaaaaaaaagaauu

SEQ ID NO: 22541 - RNA, 605 nt, Artificial Sequence
  mRNA product Design b-4 (hSL-A64-N5) comprising derived and/or modified sequence from LASV(G1180-SLE-2010;Clade IV)__AIT17166__Z (opt4)
aggagagucccgcagucggcguccagcggcucugcuuguucgugugugugucguugcaggccuuauucaagcuuaccaugggcaacaagcaggccaaggcccccgaggccaaggacagccccagagccagccugauccccgacgccacccaccugggcccccaguucugcaagagcugcugguucgagaccaagggccugguggagugcaacaaccacuaccugugccugaacugccugacccugcugcugagcgugagcaacagaugccccaucugcaagaugccccugcccaccaagcugagacccagcgccacccccaccgccccccccaccgaggccgccgacagcaucggccccccccccuacagccccugaggacuaguaauaaggaaacuguaugaaugucugugggcaggaagugaagagauccuucuguaaagguuuuuggaauuaugucugcugaauaauaaacuuuuuugaaauaauaaaucugguagaaaaaugagaucucaaaggcucuuuucagagccaccaaaaaaaaaaaaaaaaaaaaaaaaaaaaaaaaaaaaaaaaaaaaaaaaaaaaaaaaaaaaaaaaagaauu

SEQ ID NO: 22542 - RNA, 605 nt, Artificial Sequence
  mRNA product Design b-4 (hSL-A64-N5) comprising derived and/or modified sequence from LASV(G1442-SLE-2011;Clade IV)__AIT17178__Z (opt4)
aggagagucccgcagucggcguccagcggcucugcuuguucgugugugugucguugcaggccuuauucaagcuuaccaugggcaacaagcaggccaaggccagcgaggccaaggacagccccagagccagccugauccccgacgccacccaccugggcccccaguucugcaagagcugcugguucgagaacaagggccugguggagugcaacaaccacuaccugugccugaacugccugagccugcugcugagcgugagcagcagaugccccaucugcaagaugccccugcccaccagacugagacccagcaccgcccccaccgccccccccgccagagccggcgacaacaucaagcccccccccuacagccccugaggacuaguaauaaggaaacuguaugaaugucugugggcaggaagugaagagauccuucuguaaagguuuuuggaauuaugucugcugaauaauaaacuuuuuugaaauaauaaaucugguagaaaaaugagaucucaaaggcucuuuucagagccaccaaaaaaaaaaaaaaaaaaaaaaaaaaaaaaaaaaaaaaaaaaaaaaaaaaaaaaaaaaaaaaaaagaauu

SEQ ID NO: 22543 - RNA, 605 nt, Artificial Sequence
  mRNA product Design b-4 (hSL-A64-N5) comprising derived and/or modified sequence from LASV(G502-SLE-2009;Clade IV)__AIT17124__Z (opt4)
aggagagucccgcagucggcguccagcggcucugcuuguucgugugugugucguugcaggccuuauucaagcuuaccaugggcaacaagcaggugaagacccccgaggccaaggacagccccagagccagccugauccccgacgccacccaccugggcccccaguucugcaagagcugcugguucgagaacaagggccugguggagugcaacaaccacuaccugugccugaacugccugacccugcugcugagcgugggcaacagaugccccaucugcaagaugccccugcccaccaagcugagacccagcgugacccccaccgccccccccaccagagccgccgacagcaucggccccccccccuacagccccugaggacuaguaauaaggaaacuguaugaaugucugugggcaggaagugaagagauccuucuguaaagguuuuuggaauuaugucugcugaauaauaaacuuuuuugaaauaauaaaucugguagaaaaaugagaucucaaaggcucuuuucagagccaccaaaaaaaaaaaaaaaaaaaaaaaaaaaaaaaaaaaaaaaaaaaaaaaaaaaaaaaaaaaaaaaaagaauu

SEQ ID NO: 22544 - RNA, 605 nt, Artificial Sequence
  mRNA product Design b-4 (hSL-A64-N5) comprising derived and/or modified sequence from LASV(G733-SLE-2010;Clade IV)__AIT17152__Z (opt4)
aggagagucccgcagucggcguccagcggcucugcuuguucgugugugugucguugcaggccuuauucaagcuuaccaugggcaacaagcaggccaagacccccgagaccaaggacagccccagagccagccugauccccgacgccacccaccugggcccccaguucugcaagagcugcugguucgagaacaagggccugguggagugcaacaaccacuaccugugccugaacugccugacccugcugcugagcgugagcaacagaugccccaucugcaagaugccccugcccaccaagcugagacccagcaccgcccccaccgccccccccgccggcgccgccgacaacaccagacccccccccuacagccccugaggacuaguaauaaggaaacuguaugaaugucugugggcaggaagugaagagauccuucuguaaagguuuuuggaauuaugucugcugaauaauaaacuuuuuugaaauaauaaaucugguagaaaaaugagaucucaaaggcucuuuucagagccaccaaaaaaaaaaaaaaaaaaaaaaaaaaaaaaaaaaaaaaaaaaaaaaaaaaaaaaaaaaaaaaaaagaauu

SEQ ID NO: 22545 - RNA, 617 nt, Artificial Sequence
  mRNA product Design b-4 (hSL-A64-N5) comprising derived and/or modified sequence from MOPV/LASV reassortant(IGS-1;Clade IV)__AFY05533__Z (opt4)
aggagagucccgcagucggcguccagcggcucugcuuguucgugugugugucguugcaggccuuauucaagcuuaccaugggcaagacccagagcaagggccagcccagcaccaaccugcugaaggagaccgagcccagacaccccgugauccccgacgccagaggcaccggccccgaguucugcaagagcugcugguucgagagaagaggccuggugagaugcaacgaccacuaccugugccugaacugccugacccugcugcacaccgugagcgacagaugccccaucugcaagcacaagcugcccuucagacuggagcugcagacccagcccaccgccccccccgagaucccccccagccagaaccccccccccuacagccccugaggacuaguaauaaggaaacuguaugaaugucugugggcaggaagugaagagauccuucuguaaagguuuuuggaauuaugucugcugaauaauaaacuuuuuugaaauaauaaaucugguagaaaaaugagaucucaaaggcucuuuucagagccaccaaaaaaaaaaaaaaaaaaaaaaaaaaaaaaaaaaaaaaaaaaaaaaaaaaaaaaaaaaaaaaaaagaauu

SEQ ID NO: 22546 - RNA, 605 nt, Artificial Sequence
  mRNA product Design b-4 (hSL-A64-N5) comprising derived and/or modified sequence from LASV(LM776-SLE-2012;Clade IV)__AIT17824__Z (opt4)
aggagagucccgcagucggcguccagcggcucugcuuguucgugugugugucguugcaggccuuauucaagcuuaccaugggcaacaagcaggccaaggccagcgaggagaagaacagccccagagccagccugauccccgacgccacccaccugggcccccaguucugcaagagcugcugguucgagaacaagggccugguggagugcaacaaccacuaccugugccugaacugccugacccugcugcugagcgugagcaacagaugccccaucugcaagaugccccugcccaccaagcugagacccagcaccacccccaccgccccccccaccggcgccgccgacagcaucagacccccccccuacagccccugaggacuaguaauaaggaaacuguaugaaugucugugggcaggaagugaagagauccuucuguaaagguuuuuggaauuaugucugcugaauaauaaacuuuuuugaaauaauaaaucugguagaaaaaugagaucucaaaggcucuuuucagagccaccaaaaaaaaaaaaaaaaaaaaaaaaaaaaaaaaaaaaaaaaaaaaaaaaaaaaaaaaaaaaaaaaagaauu

SEQ ID NO: 22547 - RNA, 605 nt, Artificial Sequence
  mRNA product Design b-4 (hSL-A64-N5) comprising derived and/or modified sequence from LASV(Mad39;Clade IV)__ANH09743__Z (opt4)
aggagagucccgcagucggcguccagcggcucugcuuguucgugugugugucguugcaggccuuauucaagcuuaccaugggcaacaagcaggccaaggccagcgagguggaggacggccccagagccagccugauccccgacgccacccaccugggcccccaguucugcaagagcugcugguucgagaacaagagccugguggagugcaacaaccacuaccugugccugaacugccugacccugcugcugagcgugagcaacagaugccccaucugcaagaugccccugcccaccagacugaagcccagcguggugcccaccgccccccccaccagagccggcgacggcaccagacccccccccuacagccccugaggacuaguaauaaggaaacuguaugaaugucugugggcaggaagugaagagauccuucuguaaagguuuuuggaauuaugucugcugaauaauaaacuuuuuugaaauaauaaaucugguagaaaaaugagaucucaaaggcucuuuucagagccaccaaaaaaaaaaaaaaaaaaaaaaaaaaaaaaaaaaaaaaaaaaaaaaaaaaaaaaaaaaaaaaaaagaauu

SEQ ID NO: 22548 - RNA, 605 nt, Artificial Sequence
  mRNA product Design b-4 (hSL-A64-N5) comprising derived and/or modified sequence from LASV(Z0947-SLE-2011;Clade IV)__AIT17838__Z (opt4)
aggagagucccgcagucggcguccagcggcucugcuuguucgugugugugucguugcaggccuuauucaagcuuaccaugggcaacaagcaggccaaggugcccgagagcaaggacagccccagagccagccugauccccgacgccacccaccugggcccccaguucugcaagagcugcugguucgagaacaagggccugguggagugcaacaaccacuaccugugccugaacugccugacccugcugcugagcgugagcaacagaugccccaucugcaagaugccccugcccaccaagcugaagcccagcgccgcccccaccgccccccccaccggcgccgccgacagcaucagacccccccccuacagccccugaggacuaguaauaaggaaacuguaugaaugucugugggcaggaagugaagagauccuucuguaaagguuuuuggaauuaugucugcugaauaauaaacuuuuuugaaauaauaaaucugguagaaaaaugagaucucaaaggcucuuuucagagccaccaaaaaaaaaaaaaaaaaaaaaaaaaaaaaaaaaaaaaaaaaaaaaaaaaaaaaaaaaaaaaaaaagaauu

SEQ ID NO: 22549 - RNA, 605 nt, Artificial Sequence
  mRNA product Design b-4 (hSL-A64-N5) comprising derived and/or modified sequence from LASV(Josiah;Clade IV)__ADY11072/NP_694871__Z (opt5)
aggagagucccgcagucggcguccagcggcucugcuuguucgugugugugucguugcaggccuuauucaagcuuaccaugggcaacaagcaggccaaagcucccgagagcaaggacuccccuagagccucucugaucccggaugcgacccaccucgggccccaauucugcaaaagcuguugguuugaaaauaagggacugguggagugcaacaaucauuaccuuugucugaacugccucacacugcuucuguccgucucuaaucgguguccuauuugcaaaaugccccucccuacgaagcugcgccccagcgcugccccuaccgccccgcccacaggcgcugccgacuccaucagaccucccccuuauucucccugaggacuaguaauaaggaaacuguaugaaugucugugggcaggaagugaagagauccuucuguaaagguuuuuggaauuaugucugcugaauaauaaacuuuuuugaaauaauaaaucugguagaaaaaugagaucucaaaggcucuuuucagagccaccaaaaaaaaaaaaaaaaaaaaaaaaaaaaaaaaaaaaaaaaaaaaaaaaaaaaaaaaaaaaaaaaagaauu

SEQ ID NO: 22550 - RNA, 608 nt, Artificial Sequence
  mRNA product Design b-4 (hSL-A64-N5) comprising derived and/or modified sequence from LASV(Pinneo-NIG-1969;Clade I)__AIT17834__Z (opt5)
aggagagucccgcagucggcguccagcggcucugcuuguucgugugugugucguugcaggccuuauucaagcuuaccaugggcaacaagcagaccagaagcccucccaaaccggagcacccccggccuacacugcuccccgacgccucccaucuggggccucaauucugcaagucuuguugguuugaaaauaaaggacuuguggagugcaacaaucacuaccugugucucaacugccugacgcuucugcucagcgucuccgaucgcugucccaucugcaagaugccucugccgaccaaacuggcuguuagaacacagcccucugccccuccccucaaucagggcaacacccagagcuccccucccccguauucuccuugaggacuaguaauaaggaaacuguaugaaugucugugggcaggaagugaagagauccuucuguaaagguuuuuggaauuaugucugcugaauaauaaacuuuuuugaaauaauaaaucugguagaaaaaugagaucucaaaggcucuuuucagagccaccaaaaaaaaaaaaaaaaaaaaaaaaaaaaaaaaaaaaaaaaaaaaaaaaaaaaaaaaaaaaaaaaagaauu

SEQ ID NO: 22551 - RNA, 605 nt, Artificial Sequence
  mRNA product Design b-4 (hSL-A64-N5) comprising derived and/or modified sequence from LASV(Nig08-04;Clade II)__ADU56612__Z (opt5)
aggagagucccgcagucggcguccagcggcucugcuuguucgugugugugucguugcaggccuuauucaagcuuaccaugggcaacagacagacccggcccacagaggccacggaacaaagccgcgcccaccuggugccugacgccucccaucucgggccgcaguucugcaagucuuguugguuugagaauagaggacuggucgaaugcaacaaucacuaccuuugucugaacugccucagccugcuucuguccguuucuagccggugucccaucugcaaaaugccucuccccacccgccugaaggcguccgcucagccuucugcucccccuacagaggccccgcagaauaccacacccccucccuauaccccuugaggacuaguaauaaggaaacuguaugaaugucugugggcaggaagugaagagauccuucuguaaagguuuuuggaauuaugucugcugaauaauaaacuuuuuugaaauaauaaaucugguagaaaaaugagaucucaaaggcucuuuucagagccaccaaaaaaaaaaaaaaaaaaaaaaaaaaaaaaaaaaaaaaaaaaaaaaaaaaaaaaaaaaaaaaaaagaauu

SEQ ID NO: 22552 - RNA, 605 nt, Artificial Sequence
  mRNA product Design b-4 (hSL-A64-N5) comprising derived and/or modified sequence from LASV(Nig08-A19;Clade III)__ADU56620__Z (opt5)
aggagagucccgcagucggcguccagcggcucugcuuguucgugugugugucguugcaggccuuauucaagcuuaccaugggcgggaagcacaccaaaccccagagagagagcaacuccccucgggccucucugaucccggacgcuacacaucucggaccccaauucugcaagagcuguugguuugaaaauaaaggccugguggagugcaacaaucacuaccuuugucugaacugccucacgcugcuucuguccgucucuaaucgcuguccuauuugcaagaugccccucccuaccagacugcgggccagcacaaaccccaccgcgccucagguugaacagguggggccgacaaaucccccucccuauuccccuugaggacuaguaauaaggaaacuguaugaaugucugugggcaggaagugaagagauccuucuguaaagguuuuuggaauuaugucugcugaauaauaaacuuuuuugaaauaauaaaucugguagaaaaaugagaucucaaaggcucuuuucagagccaccaaaaaaaaaaaaaaaaaaaaaaaaaaaaaaaaaaaaaaaaaaaaaaaaaaaaaaaaaaaaaaaaagaauu

SEQ ID NO: 22553 - RNA, 605 nt, Artificial Sequence
  mRNA product Design b-4 (hSL-A64-N5) comprising derived and/or modified sequence from LASV(AV;Clade V)__CCA30312__Z (opt5)
aggagagucccgcagucggcguccagcggcucugcuuguucgugugugugucguugcaggccuuauucaagcuuaccaugggcaacagacaggccaagaaucccgagguggaaaacagcccucgggcuucccugaucccggacgccacccaccucgggccccaauucugcaaaucuuguugguuugagaauaagggacuggucgaaugcaacaaucauuaccuuugucugaacugccucagccugcuucuguccguuucuaaucgcuguccuauuugcaaaaugccccucccuacaagacugcggcccacgaccacaccuaccgcgccgcagaucauuaaggagaacacaaccaaucccccucccuauacaccuugaggacuaguaauaaggaaacuguaugaaugucugugggcaggaagugaagagauccuucuguaaagguuuuuggaauuaugucugcugaauaauaaacuuuuuugaaauaauaaaucugguagaaaaaugagaucucaaaggcucuuuucagagccaccaaaaaaaaaaaaaaaaaaaaaaaaaaaaaaaaaaaaaaaaaaaaaaaaaaaaaaaaaaaaaaaaagaauu

SEQ ID NO: 22554 - RNA, 605 nt, Artificial Sequence
  mRNA product Design b-4 (hSL-A64-N5) comprising derived and/or modified sequence from LASV(Togo/2016/7082;Clade VI)__AMR44579__Z (opt5)
aggagagucccgcagucggcguccagcggcucugcuuguucgugugugugucguugcaggccuuauucaagcuuaccaugggcgccagacagaccaagcaaccccagaucgaggggagcccucgggcuucccuggugccggacgccucucaccucggaccccaguucugcaaaagcuguugguuugaaaacaagggccuggucgagugcaauaaccauuaccuuugucugaauugccucucccugcuucugucuguuagcaaccgcuguccuauuugcaaaaugccccucccuacaaagcugagaguguccucugcgcccagcgcuccuccggccgccacggcucagcccgggaccccucccccuuauucccccugaggacuaguaauaaggaaacuguaugaaugucugugggcaggaagugaagagauccuucuguaaagguuuuuggaauuaugucugcugaauaauaaacuuuuuugaaauaauaaaucugguagaaaaaugagaucucaaaggcucuuuucagagccaccaaaaaaaaaaaaaaaaaaaaaaaaaaaaaaaaaaaaaaaaaaaaaaaaaaaaaaaaaaaaaaaaagaauu

SEQ ID NO: 22555 - RNA, 605 nt, Artificial Sequence
  mRNA product Design b-4 (hSL-A64-N5) comprising derived and/or modified sequence from LASV(KAK-428;Clade n.d. (VII))__ANH09761__Z (opt5)
aggagagucccgcagucggcguccagcggcucugcuuguucgugugugugucguugcaggccuuauucaagcuuaccaugggcaacaaggggaccaaacccacacagaauagcgagccuuccagagccaaccuggugccggacgcuucuuaccucggaccccaauucugcaagagcuguugguuugaaaauaaaggccuggucgagugcaacaaucacuaucuuugucugaacugccucacgaugcugcuuuccguuuccaaucgguguccuaucugcaagaugccccugccuaccaaaauuaaggccagcgggucccccucugcgccuccgacagaagcuaacagcgccgugucucccccucccuacaccccuugaggacuaguaauaaggaaacuguaugaaugucugugggcaggaagugaagagauccuucuguaaagguuuuuggaauuaugucugcugaauaauaaacuuuuuugaaauaauaaaucugguagaaaaaugagaucucaaaggcucuuuucagagccaccaaaaaaaaaaaaaaaaaaaaaaaaaaaaaaaaaaaaaaaaaaaaaaaaaaaaaaaaaaaaaaaaagaauu

SEQ ID NO: 22556 - RNA, 605 nt, Artificial Sequence
  mRNA product Design b-4 (hSL-A64-N5) comprising derived and/or modified sequence from LASV(ISTH0009-NIG-2011;Clade II)__AIT17402__Z (opt5)
aggagagucccgcagucggcguccagcggcucugcuuguucgugugugugucguugcaggccuuauucaagcuuaccaugggcaacagacaggccaagagcaccaaaguggacgagcaccaacgggcucaucugguccccgaugccucccaccucgggccucaguucugcaagucuuguugguuugaaaaucgcggacugguugagugcaacaaucauuaccuuugucugaacugccucagccugcuucuguccgugucuagcagauguccgaucugcaaaaugccccucccuacaaagcugaaagcggcugcccagcccuccgccccuucuacggaaaccauucagaauacaacacccccuccguauacccccugaggacuaguaauaaggaaacuguaugaaugucugugggcaggaagugaagagauccuucuguaaagguuuuuggaauuaugucugcugaauaauaaacuuuuuugaaauaauaaaucugguagaaaaaugagaucucaaaggcucuuuucagagccaccaaaaaaaaaaaaaaaaaaaaaaaaaaaaaaaaaaaaaaaaaaaaaaaaaaaaaaaaaaaaaaaaagaauu

SEQ ID NO: 22557 - RNA, 605 nt, Artificial Sequence
  mRNA product Design b-4 (hSL-A64-N5) comprising derived and/or modified sequence from LASV(ISTH2010-NIG-2012;Clade II)__AIT17480__Z (opt5)
aggagagucccgcagucggcguccagcggcucugcuuguucgugugugugucguugcaggccuuauucaagcuuaccaugggcaacagacacgccaagagcaccaaaguggacgagcaucagcgggcucaccugguccccgaugccucccaucucgggccucaauucugcaagucuuguugguuugaaaaucgcggacugguugagugcaacaaucacuaccuuugucugaacugccucagccugcuucuguccgugucuagcagauguccgaucugcaaaaugccccucccuacaaagcugaaagcggcugcccagcccuccgccccuucuacggaagugauucagagcaccacacccccuccguauacccccugaggacuaguaauaaggaaacuguaugaaugucugugggcaggaagugaagagauccuucuguaaagguuuuuggaauuaugucugcugaauaauaaacuuuuuugaaauaauaaaucugguagaaaaaugagaucucaaaggcucuuuucagagccaccaaaaaaaaaaaaaaaaaaaaaaaaaaaaaaaaaaaaaaaaaaaaaaaaaaaaaaaaaaaaaaaaagaauu

SEQ ID NO: 22558 - RNA, 605 nt, Artificial Sequence
  mRNA product Design b-4 (hSL-A64-N5) comprising derived and/or modified sequence from LASV(Lassa virus/H.sapiens-wt/NGA/2016/ISTH_0017;Clade II)__AVO03713__Z (opt5)
aggagagucccgcagucggcguccagcggcucugcuuguucgugugugugucguugcaggccuuauucaagcuuaccaugggcaacagacaggccaagagcaccaaaguggacgagcaccaacgggcucaucugguccccgaugccucccaccucgggccucaguucugcaagucuuguugguuugaaaaucgcggacugguugagugcaacaaucauuaccuuugucugaacugccucagccugcuucuguccgugucuagcagauguccgaucugcaaaaugccccucccuacaaagcugaaagcggcuacgcagcccuccgccccuucuaccgaagugaaucagaacacaacacccccuccguauacccccugaggacuaguaauaaggaaacuguaugaaugucugugggcaggaagugaagagauccuucuguaaagguuuuuggaauuaugucugcugaauaauaaacuuuuuugaaauaauaaaucugguagaaaaaugagaucucaaaggcucuuuucagagccaccaaaaaaaaaaaaaaaaaaaaaaaaaaaaaaaaaaaaaaaaaaaaaaaaaaaaaaaaaaaaaaaaagaauu

SEQ ID NO: 22559 - RNA, 605 nt, Artificial Sequence
  mRNA product Design b-4 (hSL-A64-N5) comprising derived and/or modified sequence from LASV(Lassa virus/H.sapiens-wt/NGA/2018/ISTH_0959;Clade II)__AVV65084__Z (opt5)
aggagagucccgcagucggcguccagcggcucugcuuguucgugugugugucguugcaggccuuauucaagcuuaccaugggcaacaagcaggccaaaagcaccaagguggacgagcaccaaagagcucaucugguccccgaugccucccaccucgggccucaguucugcaaaucuuguugguuugaaaaucggggacugguugagugcaacaaucauuaccuuugucugaacugccucagccugcuucuguccgugucuagccgcuguccgaucugcaagaugccccucccuacaaaacugaaggcggcugcccagcccuccgccccuucuacggaagcuauucagagcaccacacccccuccguauacccccugaggacuaguaauaaggaaacuguaugaaugucugugggcaggaagugaagagauccuucuguaaagguuuuuggaauuaugucugcugaauaauaaacuuuuuugaaauaauaaaucugguagaaaaaugagaucucaaaggcucuuuucagagccaccaaaaaaaaaaaaaaaaaaaaaaaaaaaaaaaaaaaaaaaaaaaaaaaaaaaaaaaaaaaaaaaaagaauu

SEQ ID NO: 22560 - RNA, 605 nt, Artificial Sequence
  mRNA product Design b-4 (hSL-A64-N5) comprising derived and/or modified sequence from LASV(LASV003-NIG-2008;Clade II)__AIT17578__Z (opt5)
aggagagucccgcagucggcguccagcggcucugcuuguucgugugugugucguugcaggccuuauucaagcuuaccaugggcaacagacaggccaagagcaccaaaguggacgagcaccaacgggcucaucugguccccgaugccucccaccucgggccucaguucugcaagucuuguugguuugaaaauaaaggacugguugagugcaacaaucauuaccuuugucugaacugccucagccugcuucuguccgugucuagccgcuguccgaucugcaagaugccccucccuacaaaacugagagcggcugcccagcccuccgccccuucuacggaaagcgcucagaauaccgcucccccuccguaugcccccugaggacuaguaauaaggaaacuguaugaaugucugugggcaggaagugaagagauccuucuguaaagguuuuuggaauuaugucugcugaauaauaaacuuuuuugaaauaauaaaucugguagaaaaaugagaucucaaaggcucuuuucagagccaccaaaaaaaaaaaaaaaaaaaaaaaaaaaaaaaaaaaaaaaaaaaaaaaaaaaaaaaaaaaaaaaaagaauu

SEQ ID NO: 22561 - RNA, 605 nt, Artificial Sequence
  mRNA product Design b-4 (hSL-A64-N5) comprising derived and/or modified sequence from LASV(LASV035-NIG-2009;Clade II)__AIT17586__Z (opt5)
aggagagucccgcagucggcguccagcggcucugcuuguucgugugugugucguugcaggccuuauucaagcuuaccaugggcaacaagcaggccaaaagcaccaagguggacgagcaccaaagagcucaucugguccccgaugccucccaccucgggccucaguucugcaaaucuuguugguuugaaaaucggggacugguugagugcaacaaucauuaccuuugucugaacugccucagccugcuucuguccgugucuagccgcuguccgaucugcaagaugccccucccuacaagacugaaagcggcugcccagcccuccgccccuucuacggaagugacccagaauacaacacccccuccguauacccccugaggacuaguaauaaggaaacuguaugaaugucugugggcaggaagugaagagauccuucuguaaagguuuuuggaauuaugucugcugaauaauaaacuuuuuugaaauaauaaaucugguagaaaaaugagaucucaaaggcucuuuucagagccaccaaaaaaaaaaaaaaaaaaaaaaaaaaaaaaaaaaaaaaaaaaaaaaaaaaaaaaaaaaaaaaaaagaauu

SEQ ID NO: 22562 - RNA, 605 nt, Artificial Sequence
  mRNA product Design b-4 (hSL-A64-N5) comprising derived and/or modified sequence from LASV(LASV1000-NIG-2009;Clade II)__AIT17780__Z (opt5)
aggagagucccgcagucggcguccagcggcucugcuuguucgugugugugucguugcaggccuuauucaagcuuaccaugggcaacagacagaccaagagcacaaaaguggacgagcaccaacgggccuaccugguccccgaugcuucccuccuggggccucaguucugcaagucuuguugguuugaaaauaaaggacuuguugagugcaacaaucauuaucugugucucaacugccugagccuucugcucuccgugucuagccgcuguccgaucugcaagaugccccugccuacgagacugaaagccgcggcucagcccuccgccccucccaccgaagccauucagaauacaaccccuccgcccuacacaccuugaggacuaguaauaaggaaacuguaugaaugucugugggcaggaagugaagagauccuucuguaaagguuuuuggaauuaugucugcugaauaauaaacuuuuuugaaauaauaaaucugguagaaaaaugagaucucaaaggcucuuuucagagccaccaaaaaaaaaaaaaaaaaaaaaaaaaaaaaaaaaaaaaaaaaaaaaaaaaaaaaaaaaaaaaaaaagaauu

SEQ ID NO: 22563 - RNA, 605 nt, Artificial Sequence
  mRNA product Design b-4 (hSL-A64-N5) comprising derived and/or modified sequence from LASV(LASV221-NIG-2010;Clade II)__AIT17622__Z (opt5)
aggagagucccgcagucggcguccagcggcucugcuuguucgugugugugucguugcaggccuuauucaagcuuaccaugggcaacagacaggccaagagcaccaaaguggacgagcaccaacgggcucaucugguccccgaugccucccaccucgggccucaguucugcaagucuuguugguuugaaaaucgcggacugguugagugcaacaaucauuaccuuugucugaacugccucagccugcuucuguccgugucuagcagauguccgaucugcaaaaugccccucccuacaaagcugaaagcggcuacgcagcccuccgccccuucuaccgaagugacacagaauaccauucccccuccguauagccccugaggacuaguaauaaggaaacuguaugaaugucugugggcaggaagugaagagauccuucuguaaagguuuuuggaauuaugucugcugaauaauaaacuuuuuugaaauaauaaaucugguagaaaaaugagaucucaaaggcucuuuucagagccaccaaaaaaaaaaaaaaaaaaaaaaaaaaaaaaaaaaaaaaaaaaaaaaaaaaaaaaaaaaaaaaaaagaauu

SEQ ID NO: 22564 - RNA, 605 nt, Artificial Sequence
  mRNA product Design b-4 (hSL-A64-N5) comprising derived and/or modified sequence from LASV(LASV237-NIG-2010;Clade II)__AIT17636__Z (opt5)
aggagagucccgcagucggcguccagcggcucugcuuguucgugugugugucguugcaggccuuauucaagcuuaccaugggcaacagacaggccaagagcaccaaaguggacgagcaccaacgggcucaucugguccccgaugccucccaccucgggccucaguucugcaagucuuguugguuugaaaaucgcggacugguugagugcaacaaucauuaccuuugucugaacugccucagccugcuucuguccgugucuagcagauguccgaucugcaaaaugccccucccuacaaagcugaaagcggcugcccagcccuccgccccuucuauugaaacgauccagaauaccacacccccuccguauacccccugaggacuaguaauaaggaaacuguaugaaugucugugggcaggaagugaagagauccuucuguaaagguuuuuggaauuaugucugcugaauaauaaacuuuuuugaaauaauaaaucugguagaaaaaugagaucucaaaggcucuuuucagagccaccaaaaaaaaaaaaaaaaaaaaaaaaaaaaaaaaaaaaaaaaaaaaaaaaaaaaaaaaaaaaaaaaagaauu

SEQ ID NO: 22565 - RNA, 605 nt, Artificial Sequence
  mRNA product Design b-4 (hSL-A64-N5) comprising derived and/or modified sequence from LASV(LASV253-NIG-2011;Clade II)__AIT17668__Z (opt5)
aggagagucccgcagucggcguccagcggcucugcuuguucgugugugugucguugcaggccuuauucaagcuuaccaugggcaacagacaggccaagagcaccaaaguggacgagcaccaacgggcucaucugguccccgaugccucccaccucgggccucaguucugcaagucuuguugguuugaaaauaaaggacugguugagugcaacaaucauuaccuuugucugaacugccucagccugcuucuguccgugucuagccgcuguccgaucugcaagaugccccucccuacaaaacugaagacgaccgcgcagcccuccgcuccucccacagaagccgccaagaauaccgcuccuccgcccuaugccccuugaggacuaguaauaaggaaacuguaugaaugucugugggcaggaagugaagagauccuucuguaaagguuuuuggaauuaugucugcugaauaauaaacuuuuuugaaauaauaaaucugguagaaaaaugagaucucaaaggcucuuuucagagccaccaaaaaaaaaaaaaaaaaaaaaaaaaaaaaaaaaaaaaaaaaaaaaaaaaaaaaaaaaaaaaaaaagaauu

SEQ ID NO: 22566 - RNA, 605 nt, Artificial Sequence
  mRNA product Design b-4 (hSL-A64-N5) comprising derived and/or modified sequence from LASV(G1180-SLE-2010;Clade IV)__AIT17166__Z (opt5)
aggagagucccgcagucggcguccagcggcucugcuuguucgugugugugucguugcaggccuuauucaagcuuaccaugggcaacaagcaggccaaagcucccgaggccaaggacagcccuagagcgucccugaucccggaugcuacccaccucgggccccaauucugcaaaucuuguugguuugaaacaaagggacugguggagugcaauaaccauuaccuuugucugaauugccucacgcugcuucugagcgucuccaaccgguguccuauuugcaaaaugccccucccuaccaagcugcgccccucugccacaccuaccgccccgcccacagaagcugccgacagcaucggcccucccccuuauucccccugaggacuaguaauaaggaaacuguaugaaugucugugggcaggaagugaagagauccuucuguaaagguuuuuggaauuaugucugcugaauaauaaacuuuuuugaaauaauaaaucugguagaaaaaugagaucucaaaggcucuuuucagagccaccaaaaaaaaaaaaaaaaaaaaaaaaaaaaaaaaaaaaaaaaaaaaaaaaaaaaaaaaaaaaaaaaagaauu

SEQ ID NO: 22567 - RNA, 605 nt, Artificial Sequence
  mRNA product Design b-4 (hSL-A64-N5) comprising derived and/or modified sequence from LASV(G1442-SLE-2011;Clade IV)__AIT17178__Z (opt5)
aggagagucccgcagucggcguccagcggcucugcuuguucgugugugugucguugcaggccuuauucaagcuuaccaugggcaacaagcaggccaaagcuagcgaggccaaggacucccccagagcgucucugaucccugaugcuacccaccucgggccgcaauucugcaaaagcuguugguuugaaaauaagggacugguggagugcaacaaucauuaccuuugucugaacugccucucccugcuucugucugucagcucccggugucccauuugcaaaaugccucuccccacacgccugagaccuucuacggcccccaccgccccuccggcucgggccggcgacaauaucaagcccccucccuauagcccuugaggacuaguaauaaggaaacuguaugaaugucugugggcaggaagugaagagauccuucuguaaagguuuuuggaauuaugucugcugaauaauaaacuuuuuugaaauaauaaaucugguagaaaaaugagaucucaaaggcucuuuucagagccaccaaaaaaaaaaaaaaaaaaaaaaaaaaaaaaaaaaaaaaaaaaaaaaaaaaaaaaaaaaaaaaaaagaauu

SEQ ID NO: 22568 - RNA, 605 nt, Artificial Sequence
  mRNA product Design b-4 (hSL-A64-N5) comprising derived and/or modified sequence from LASV(G502-SLE-2009;Clade IV)__AIT17124__Z (opt5)
aggagagucccgcagucggcguccagcggcucugcuuguucgugugugugucguugcaggccuuauucaagcuuaccaugggcaacaaacaggugaagacccccgaggccaaggacagcccuagagcuucccugaucccggaugccacacaccucgggccccaauucugcaaaucuuguugguuugaaaauaagggacuggucgagugcaacaaucauuaccuuugucugaacugccucacgcugcuucugagcguuggcaaucgguguccuauuugcaaaaugccccucccuaccaagcugcgccccuccgugacaccuaccgcgccgcccacaagagcugccgacucuaucgggccucccccuuauagccccugaggacuaguaauaaggaaacuguaugaaugucugugggcaggaagugaagagauccuucuguaaagguuuuuggaauuaugucugcugaauaauaaacuuuuuugaaauaauaaaucugguagaaaaaugagaucucaaaggcucuuuucagagccaccaaaaaaaaaaaaaaaaaaaaaaaaaaaaaaaaaaaaaaaaaaaaaaaaaaaaaaaaaaaaaaaaagaauu

SEQ ID NO: 22569 - RNA, 605 nt, Artificial Sequence
  mRNA product Design b-4 (hSL-A64-N5) comprising derived and/or modified sequence from LASV(G733-SLE-2010;Clade IV)__AIT17152__Z (opt5)
aggagagucccgcagucggcguccagcggcucugcuuguucgugugugugucguugcaggccuuauucaagcuuaccaugggcaacaagcaggccaaaacccccgagacaaaggacagcccuagagcuucccugaucccggaugccacgcaccucgggccccaauucugcaaaucuuguugguuugaaaauaagggacugguggagugcaacaaucauuaccuuugucugaacugccucacccugcuucugagcgucuccaaucgguguccuauuugcaaaaugccccucccuacaaagcugcgccccucuaccgcgccuacagcuccgcccgccggcgccgcugacaacaccagaccucccccuuauagccccugaggacuaguaauaaggaaacuguaugaaugucugugggcaggaagugaagagauccuucuguaaagguuuuuggaauuaugucugcugaauaauaaacuuuuuugaaauaauaaaucugguagaaaaaugagaucucaaaggcucuuuucagagccaccaaaaaaaaaaaaaaaaaaaaaaaaaaaaaaaaaaaaaaaaaaaaaaaaaaaaaaaaaaaaaaaaagaauu

SEQ ID NO: 22570 - RNA, 617 nt, Artificial Sequence
  mRNA product Design b-4 (hSL-A64-N5) comprising derived and/or modified sequence from MOPV/LASV reassortant(IGS-1;Clade IV)__AFY05533__Z (opt5)
aggagagucccgcagucggcguccagcggcucugcuuguucgugugugugucguugcaggccuuauucaagcuuaccaugggcaagacccagagcaaagggcaacccuccacaaaccugcucaaggagacggaaccuagacacccggugauccccgacgcccggggaaccggcccugaguucugcaaaucuuguugguuugaacgcagagggcugguccggugcaaugaucauuaccuuugucugaacugccucacacugcuucacaccguuagcgaccgcugucccaucugcaagcauaaacugccuuucagacucgagcugcagacacagcccaccgcuccuccggaaauucccccuucccagaaucccccucccuauucuccgugaggacuaguaauaaggaaacuguaugaaugucugugggcaggaagugaagagauccuucuguaaagguuuuuggaauuaugucugcugaauaauaaacuuuuuugaaauaauaaaucugguagaaaaaugagaucucaaaggcucuuuucagagccaccaaaaaaaaaaaaaaaaaaaaaaaaaaaaaaaaaaaaaaaaaaaaaaaaaaaaaaaaaaaaaaaaagaauu

SEQ ID NO: 22571 - RNA, 605 nt, Artificial Sequence
  mRNA product Design b-4 (hSL-A64-N5) comprising derived and/or modified sequence from LASV(LM776-SLE-2012;Clade IV)__AIT17824__Z (opt5)
aggagagucccgcagucggcguccagcggcucugcuuguucgugugugugucguugcaggccuuauucaagcuuaccaugggcaacaagcaggccaaagcuagcgaggaaaagaacucccccagagccucucugaucccugacgcgacccaccucgggccgcaauucugcaaaagcuguugguuugagaauaagggacugguggaaugcaauaaccauuaccuuugucugaauugccucacacugcuucuguccgucucuaaccggugucccauuugcaaaaugccucuccccacgaagcugcgcccuagcaccacacccaccgcuccuccgacaggcgccgccgauuccaucagacccccucccuauucuccuugaggacuaguaauaaggaaacuguaugaaugucugugggcaggaagugaagagauccuucuguaaagguuuuuggaauuaugucugcugaauaauaaacuuuuuugaaauaauaaaucugguagaaaaaugagaucucaaaggcucuuuucagagccaccaaaaaaaaaaaaaaaaaaaaaaaaaaaaaaaaaaaaaaaaaaaaaaaaaaaaaaaaaaaaaaaaagaauu

SEQ ID NO: 22572 - RNA, 605 nt, Artificial Sequence
  mRNA product Design b-4 (hSL-A64-N5) comprising derived and/or modified sequence from LASV(Mad39;Clade IV)__ANH09743__Z (opt5)
aggagagucccgcagucggcguccagcggcucugcuuguucgugugugugucguugcaggccuuauucaagcuuaccaugggcaacaagcaggccaaagcuagcgagguggaagacgggcccagagccucccugaucccugaugcgacccaccucggaccgcaauucugcaagucuuguugguuugagaauaaaagccuggucgaaugcaacaaucauuaccuuugucugaacugccucacacugcuucuguccguuucuaaucggugucccauuugcaagaugccucuccccacgcgccugaaaccuagcguggugcccaccgcuccuccgacaagagccggcgacgggacccggcccccucccuauuccccuugaggacuaguaauaaggaaacuguaugaaugucugugggcaggaagugaagagauccuucuguaaagguuuuuggaauuaugucugcugaauaauaaacuuuuuugaaauaauaaaucugguagaaaaaugagaucucaaaggcucuuuucagagccaccaaaaaaaaaaaaaaaaaaaaaaaaaaaaaaaaaaaaaaaaaaaaaaaaaaaaaaaaaaaaaaaaagaauu

SEQ ID NO: 22573 - RNA, 605 nt, Artificial Sequence
  mRNA product Design b-4 (hSL-A64-N5) comprising derived and/or modified sequence from LASV(Z0947-SLE-2011;Clade IV)__AIT17838__Z (opt5)
aggagagucccgcagucggcguccagcggcucugcuuguucgugugugugucguugcaggccuuauucaagcuuaccaugggcaacaagcaggccaaagugcccgagagcaaggacuccccuagagcuucucugaucccggaugccacccaccucgggccccaauucugcaaaagcuguugguuugaaaauaagggacuggucgagugcaacaaucauuaccuuugucugaacugccucacacugcuucuguccguuucuaaucgguguccuauuugcaaaaugccccucccuacgaagcugaagcccagcgcggcuccuaccgccccgcccacaggcgccgcugacuccauccgcccucccccuuauucucccugaggacuaguaauaaggaaacuguaugaaugucugugggcaggaagugaagagauccuucuguaaagguuuuuggaauuaugucugcugaauaauaaacuuuuuugaaauaauaaaucugguagaaaaaugagaucucaaaggcucuuuucagagccaccaaaaaaaaaaaaaaaaaaaaaaaaaaaaaaaaaaaaaaaaaaaaaaaaaaaaaaaaaaaaaaaaagaauu

SEQ ID NO: 22574 - RNA, 636 nt, Artificial Sequence
  mRNA product Design b-4 (hSL-A100) comprising derived and/or modified sequence from LASV(Josiah;Clade IV)__ADY11072/NP_694871__Z (opt1)
aggagagucccgcagucggcguccagcggcucugcuuguucgugugugugucguugcaggccuuauucaagcuuaccaugggcaacaagcaggccaaggcccccgagagcaaggacuccccgcgcgcgagccugauccccgacgccacccaccucgggccccaguucugcaaguccugcugguucgagaacaagggccugguggagugcaacaaccacuaccugugccucaacugccugacccugcuccugagcgucuccaaccggugccccaucugcaagaugccgcugcccacgaagcuccgccccagcgccgcccccaccgccccgcccaccggggcggccgacuccauccggcccccgcccuacagccccugaggacuaguaauaaggaaacuguaugaaugucugugggcaggaagugaagagauccuucuguaaagguuuuuggaauuaugucugcugaauaauaaacuuuuuugaaauaauaaaucugguagaaaaaugagaucucaaaggcucuuuucagagccaccaaaaaaaaaaaaaaaaaaaaaaaaaaaaaaaaaaaaaaaaaaaaaaaaaaaaaaaaaaaaaaaaaaaaaaaaaaaaaaaaaaaaaaaaaaaaaaaaaaaaa

SEQ ID NO: 22575 - RNA, 639 nt, Artificial Sequence
  mRNA product Design b-4 (hSL-A100) comprising derived and/or modified sequence from LASV(Pinneo-NIG-1969;Clade I)__AIT17834__Z (opt1)
aggagagucccgcagucggcguccagcggcucugcuuguucgugugugugucguugcaggccuuauucaagcuuaccaugggcaacaagcagacccgcagcccgcccaagcccgagcacccccggcccacccugcuccccgacgccucccaccuggggccccaguucugcaagagcugcugguucgagaacaagggccugguggagugcaacaaccacuaccucugccugaacugccugacgcuccugcuguccgucagcgaccgcugccccaucugcaagaugccccuccccaccaagcuggccgugcggacccagcccuccgcgccgccccugaaccaggggaacacccagagcagcccgccgcccuacucccccugaggacuaguaauaaggaaacuguaugaaugucugugggcaggaagugaagagauccuucuguaaagguuuuuggaauuaugucugcugaauaauaaacuuuuuugaaauaauaaaucugguagaaaaaugagaucucaaaggcucuuuucagagccaccaaaaaaaaaaaaaaaaaaaaaaaaaaaaaaaaaaaaaaaaaaaaaaaaaaaaaaaaaaaaaaaaaaaaaaaaaaaaaaaaaaaaaaaaaaaaaaaaaaaaa

SEQ ID NO: 22576 - RNA, 636 nt, Artificial Sequence
  mRNA product Design b-4 (hSL-A100) comprising derived and/or modified sequence from LASV(Nig08-04;Clade II)__ADU56612__Z (opt1)
aggagagucccgcagucggcguccagcggcucugcuuguucgugugugugucguugcaggccuuauucaagcuuaccaugggcaaccgccagacccggcccaccgaggccacggagcagagccgcgcccaccuggugccggacgccucccaccucgggccccaguucugcaagagcugcugguucgagaaccggggccuggucgagugcaacaaccacuaccugugccucaacugccugucccugcuccugagcguguccagccgcugccccaucugcaagaugccccugccgacccggcucaaggccuccgcccagcccagcgccccgcccaccgaggcgccccagaacaccacgcccccgcccuacacccccugaggacuaguaauaaggaaacuguaugaaugucugugggcaggaagugaagagauccuucuguaaagguuuuuggaauuaugucugcugaauaauaaacuuuuuugaaauaauaaaucugguagaaaaaugagaucucaaaggcucuuuucagagccaccaaaaaaaaaaaaaaaaaaaaaaaaaaaaaaaaaaaaaaaaaaaaaaaaaaaaaaaaaaaaaaaaaaaaaaaaaaaaaaaaaaaaaaaaaaaaaaaaaaaaa

SEQ ID NO: 22577 - RNA, 636 nt, Artificial Sequence
  mRNA product Design b-4 (hSL-A100) comprising derived and/or modified sequence from LASV(Nig08-A19;Clade III)__ADU56620__Z (opt1)
aggagagucccgcagucggcguccagcggcucugcuuguucgugugugugucguugcaggccuuauucaagcuuaccaugggcgggaagcacaccaagccccagcgcgagagcaacuccccgcgggccagccugauccccgacgccacccaccucggcccccaguucugcaaguccugcugguucgagaacaaggggcugguggagugcaacaaccacuaccugugccucaacugccugacgcugcuccugagcguguccaaccgcugccccaucugcaagaugccccugcccacccggcuccgcgccagcaccaaccccaccgcgccccagguggagcaggucggcccgacgaacccgccgcccuacucccccugaggacuaguaauaaggaaacuguaugaaugucugugggcaggaagugaagagauccuucuguaaagguuuuuggaauuaugucugcugaauaauaaacuuuuuugaaauaauaaaucugguagaaaaaugagaucucaaaggcucuuuucagagccaccaaaaaaaaaaaaaaaaaaaaaaaaaaaaaaaaaaaaaaaaaaaaaaaaaaaaaaaaaaaaaaaaaaaaaaaaaaaaaaaaaaaaaaaaaaaaaaaaaaaaa

SEQ ID NO: 22578 - RNA, 636 nt, Artificial Sequence
  mRNA product Design b-4 (hSL-A100) comprising derived and/or modified sequence from LASV(AV;Clade V)__CCA30312__Z (opt1)
aggagagucccgcagucggcguccagcggcucugcuuguucgugugugugucguugcaggccuuauucaagcuuaccaugggcaaccgccaggccaagaaccccgagguggagaacagcccccgggccucccugauccccgacgcgacccaccucgggccccaguucugcaagagcugcugguucgagaacaagggccuggucgagugcaacaaccacuaccugugccucaacugccugucccugcuccugagcguguccaaccgcugccccaucugcaagaugccgcugcccacccggcuccgccccacgaccacccccaccgccccgcagaucaucaaggagaacacgaccaacccgccgcccuacacccccugaggacuaguaauaaggaaacuguaugaaugucugugggcaggaagugaagagauccuucuguaaagguuuuuggaauuaugucugcugaauaauaaacuuuuuugaaauaauaaaucugguagaaaaaugagaucucaaaggcucuuuucagagccaccaaaaaaaaaaaaaaaaaaaaaaaaaaaaaaaaaaaaaaaaaaaaaaaaaaaaaaaaaaaaaaaaaaaaaaaaaaaaaaaaaaaaaaaaaaaaaaaaaaaaa

SEQ ID NO: 22579 - RNA, 636 nt, Artificial Sequence
  mRNA product Design b-4 (hSL-A100) comprising derived and/or modified sequence from LASV(Togo/2016/7082;Clade VI)__AMR44579__Z (opt1)
aggagagucccgcagucggcguccagcggcucugcuuguucgugugugugucguugcaggccuuauucaagcuuaccaugggcgcccgccagaccaagcagccccagaucgaggggagcccccgggccucccuggugcccgacgcgagccaccucggcccccaguucugcaaguccugcugguucgagaacaaggggcuggucgagugcaacaaccacuaccugugccucaacugccugagccugcuccuguccgugagcaaccgcugccccaucugcaagaugccgcugcccaccaagcuccggguguccagcgcccccuccgcgcccccggccgccacggcccagcccggcaccccgccgcccuacagccccugaggacuaguaauaaggaaacuguaugaaugucugugggcaggaagugaagagauccuucuguaaagguuuuuggaauuaugucugcugaauaauaaacuuuuuugaaauaauaaaucugguagaaaaaugagaucucaaaggcucuuuucagagccaccaaaaaaaaaaaaaaaaaaaaaaaaaaaaaaaaaaaaaaaaaaaaaaaaaaaaaaaaaaaaaaaaaaaaaaaaaaaaaaaaaaaaaaaaaaaaaaaaaaaaa

SEQ ID NO: 22580 - RNA, 636 nt, Artificial Sequence
  mRNA product Design b-4 (hSL-A100) comprising derived and/or modified sequence from LASV(KAK-428;Clade n.d. (VII))__ANH09761__Z (opt1)
aggagagucccgcagucggcguccagcggcucugcuuguucgugugugugucguugcaggccuuauucaagcuuaccaugggcaacaaggggaccaagcccacccagaacagcgagcccucccgcgccaaccuggugcccgacgccagcuaccucggcccccaguucugcaaguccugcugguucgagaacaaggggcuggucgagugcaacaaccacuaccugugccucaacugccugacgaugcugcucagcguguccaaccggugccccaucugcaagaugccgcugcccaccaagaucaaggccagcggcucccccagcgcgcccccgaccgaggccaacuccgccgugagcccgccgcccuacacccccugaggacuaguaauaaggaaacuguaugaaugucugugggcaggaagugaagagauccuucuguaaagguuuuuggaauuaugucugcugaauaauaaacuuuuuugaaauaauaaaucugguagaaaaaugagaucucaaaggcucuuuucagagccaccaaaaaaaaaaaaaaaaaaaaaaaaaaaaaaaaaaaaaaaaaaaaaaaaaaaaaaaaaaaaaaaaaaaaaaaaaaaaaaaaaaaaaaaaaaaaaaaaaaaaa

SEQ ID NO: 22581 - RNA, 636 nt, Artificial Sequence
  mRNA product Design b-4 (hSL-A100) comprising derived and/or modified sequence from LASV(ISTH0009-NIG-2011;Clade II)__AIT17402__Z (opt1)
aggagagucccgcagucggcguccagcggcucugcuuguucgugugugugucguugcaggccuuauucaagcuuaccaugggcaaccgccaggccaagagcaccaagguggacgagcaccagcgggcccaccugguccccgacgcgucccaccucgggccccaguucugcaagagcugcugguucgagaaccgcggccugguggagugcaacaaccacuaccugugccucaacugccugucccugcuccugagcguguccagccggugccccaucugcaagaugccccugcccaccaagcucaaggccgccgcccagccguccgcccccagcacggagaccauccagaacaccaccccgccgcccuacacgcccugaggacuaguaauaaggaaacuguaugaaugucugugggcaggaagugaagagauccuucuguaaagguuuuuggaauuaugucugcugaauaauaaacuuuuuugaaauaauaaaucugguagaaaaaugagaucucaaaggcucuuuucagagccaccaaaaaaaaaaaaaaaaaaaaaaaaaaaaaaaaaaaaaaaaaaaaaaaaaaaaaaaaaaaaaaaaaaaaaaaaaaaaaaaaaaaaaaaaaaaaaaaaaaaaa

SEQ ID NO: 22582 - RNA, 636 nt, Artificial Sequence
  mRNA product Design b-4 (hSL-A100) comprising derived and/or modified sequence from LASV(ISTH2010-NIG-2012;Clade II)__AIT17480__Z (opt1)
aggagagucccgcagucggcguccagcggcucugcuuguucgugugugugucguugcaggccuuauucaagcuuaccaugggcaaccgccacgccaagagcaccaagguggacgagcaccagcgggcccaccugguccccgacgcgucccaccucgggccccaguucugcaagagcugcugguucgagaaccgcggccugguggagugcaacaaccacuaccugugccucaacugccugucccugcuccugagcguguccagccggugccccaucugcaagaugccccugcccaccaagcucaaggccgccgcccagccguccgcccccagcacggaggucauccaguccaccaccccgccgcccuacacccccugaggacuaguaauaaggaaacuguaugaaugucugugggcaggaagugaagagauccuucuguaaagguuuuuggaauuaugucugcugaauaauaaacuuuuuugaaauaauaaaucugguagaaaaaugagaucucaaaggcucuuuucagagccaccaaaaaaaaaaaaaaaaaaaaaaaaaaaaaaaaaaaaaaaaaaaaaaaaaaaaaaaaaaaaaaaaaaaaaaaaaaaaaaaaaaaaaaaaaaaaaaaaaaaaa

SEQ ID NO: 22583 - RNA, 636 nt, Artificial Sequence
  mRNA product Design b-4 (hSL-A100) comprising derived and/or modified sequence from LASV(Lassa virus/H.sapiens-wt/NGA/2016/ISTH_0017;Clade II)__AVO03713__Z (opt1)
aggagagucccgcagucggcguccagcggcucugcuuguucgugugugugucguugcaggccuuauucaagcuuaccaugggcaaccgccaggccaagagcaccaagguggacgagcaccagcgggcccaccugguccccgacgcgucccaccucgggccccaguucugcaagagcugcugguucgagaaccgcggccugguggagugcaacaaccacuaccugugccucaacugccugucccugcuccugagcguguccagccggugccccaucugcaagaugccccugcccaccaagcucaaggccgccacgcagccguccgcccccagcaccgaggucaaccagaacaccaccccgccgcccuacacgcccugaggacuaguaauaaggaaacuguaugaaugucugugggcaggaagugaagagauccuucuguaaagguuuuuggaauuaugucugcugaauaauaaacuuuuuugaaauaauaaaucugguagaaaaaugagaucucaaaggcucuuuucagagccaccaaaaaaaaaaaaaaaaaaaaaaaaaaaaaaaaaaaaaaaaaaaaaaaaaaaaaaaaaaaaaaaaaaaaaaaaaaaaaaaaaaaaaaaaaaaaaaaaaaaaa

SEQ ID NO: 22584 - RNA, 636 nt, Artificial Sequence
  mRNA product Design b-4 (hSL-A100) comprising derived and/or modified sequence from LASV(Lassa virus/H.sapiens-wt/NGA/2018/ISTH_0959;Clade II)__AVV65084__Z (opt1)
aggagagucccgcagucggcguccagcggcucugcuuguucgugugugugucguugcaggccuuauucaagcuuaccaugggcaacaagcaggccaagagcaccaagguggacgagcaccagcgcgcccaccugguccccgacgcgucccaccucgggccccaguucugcaagagcugcugguucgagaaccggggccugguggagugcaacaaccacuaccugugccucaacugccugucccugcuccugagcguguccagccgcugccccaucugcaagaugccccugcccaccaagcucaaggccgccgcccagccguccgcccccagcacggaggcgauccaguccaccaccccgccgcccuacacccccugaggacuaguaauaaggaaacuguaugaaugucugugggcaggaagugaagagauccuucuguaaagguuuuuggaauuaugucugcugaauaauaaacuuuuuugaaauaauaaaucugguagaaaaaugagaucucaaaggcucuuuucagagccaccaaaaaaaaaaaaaaaaaaaaaaaaaaaaaaaaaaaaaaaaaaaaaaaaaaaaaaaaaaaaaaaaaaaaaaaaaaaaaaaaaaaaaaaaaaaaaaaaaaaaa

SEQ ID NO: 22585 - RNA, 636 nt, Artificial Sequence
  mRNA product Design b-4 (hSL-A100) comprising derived and/or modified sequence from LASV(LASV003-NIG-2008;Clade II)__AIT17578__Z (opt1)
aggagagucccgcagucggcguccagcggcucugcuuguucgugugugugucguugcaggccuuauucaagcuuaccaugggcaaccgccaggccaagagcaccaagguggacgagcaccagcgggcccaccugguccccgacgcgucccaccucgggccccaguucugcaagagcugcugguucgagaacaagggccugguggagugcaacaaccacuaccugugccucaacugccugucccugcuccugagcguguccagccgcugccccaucugcaagaugccccugcccaccaagcuccgggccgccgcccagccguccgcccccagcacggaguccgcgcagaacaccgccccgccgcccuacgcccccugaggacuaguaauaaggaaacuguaugaaugucugugggcaggaagugaagagauccuucuguaaagguuuuuggaauuaugucugcugaauaauaaacuuuuuugaaauaauaaaucugguagaaaaaugagaucucaaaggcucuuuucagagccaccaaaaaaaaaaaaaaaaaaaaaaaaaaaaaaaaaaaaaaaaaaaaaaaaaaaaaaaaaaaaaaaaaaaaaaaaaaaaaaaaaaaaaaaaaaaaaaaaaaaaa

SEQ ID NO: 22586 - RNA, 636 nt, Artificial Sequence
  mRNA product Design b-4 (hSL-A100) comprising derived and/or modified sequence from LASV(LASV035-NIG-2009;Clade II)__AIT17586__Z (opt1)
aggagagucccgcagucggcguccagcggcucugcuuguucgugugugugucguugcaggccuuauucaagcuuaccaugggcaacaagcaggccaagagcaccaagguggacgagcaccagcgcgcccaccugguccccgacgcgucccaccucgggccccaguucugcaagagcugcugguucgagaaccggggccugguggagugcaacaaccacuaccugugccucaacugccugucccugcuccugagcguguccagccgcugccccaucugcaagaugccccugcccacccggcucaaggccgccgcccagccguccgcccccagcacggaggucacccagaacaccaccccgccgcccuacacgcccugaggacuaguaauaaggaaacuguaugaaugucugugggcaggaagugaagagauccuucuguaaagguuuuuggaauuaugucugcugaauaauaaacuuuuuugaaauaauaaaucugguagaaaaaugagaucucaaaggcucuuuucagagccaccaaaaaaaaaaaaaaaaaaaaaaaaaaaaaaaaaaaaaaaaaaaaaaaaaaaaaaaaaaaaaaaaaaaaaaaaaaaaaaaaaaaaaaaaaaaaaaaaaaaaa

SEQ ID NO: 22587 - RNA, 636 nt, Artificial Sequence
  mRNA product Design b-4 (hSL-A100) comprising derived and/or modified sequence from LASV(LASV1000-NIG-2009;Clade II)__AIT17780__Z (opt1)
aggagagucccgcagucggcguccagcggcucugcuuguucgugugugugucguugcaggccuuauucaagcuuaccaugggcaaccgccagaccaagagcaccaagguggacgagcaccagcgggccuaccugguccccgacgccucccuccuggggccccaguucugcaagagcugcugguucgagaacaagggccugguggagugcaacaaccacuaccucugccugaacugccugucccuccugcugagcguguccagccgcugccccaucugcaagaugccccuccccacgcggcugaaggcggccgcccagcccuccgccccgcccaccgaggccauccagaacaccacgccgccgcccuacacccccugaggacuaguaauaaggaaacuguaugaaugucugugggcaggaagugaagagauccuucuguaaagguuuuuggaauuaugucugcugaauaauaaacuuuuuugaaauaauaaaucugguagaaaaaugagaucucaaaggcucuuuucagagccaccaaaaaaaaaaaaaaaaaaaaaaaaaaaaaaaaaaaaaaaaaaaaaaaaaaaaaaaaaaaaaaaaaaaaaaaaaaaaaaaaaaaaaaaaaaaaaaaaaaaaa

SEQ ID NO: 22588 - RNA, 636 nt, Artificial Sequence
  mRNA product Design b-4 (hSL-A100) comprising derived and/or modified sequence from LASV(LASV221-NIG-2010;Clade II)__AIT17622__Z (opt1)
aggagagucccgcagucggcguccagcggcucugcuuguucgugugugugucguugcaggccuuauucaagcuuaccaugggcaaccgccaggccaagagcaccaagguggacgagcaccagcgggcccaccugguccccgacgcgucccaccucgggccccaguucugcaagagcugcugguucgagaaccgcggccugguggagugcaacaaccacuaccugugccucaacugccugucccugcuccugagcguguccagccggugccccaucugcaagaugccccugcccaccaagcucaaggccgccacgcagccguccgcccccagcaccgaggucacccagaacaccaucccgccgcccuacucccccugaggacuaguaauaaggaaacuguaugaaugucugugggcaggaagugaagagauccuucuguaaagguuuuuggaauuaugucugcugaauaauaaacuuuuuugaaauaauaaaucugguagaaaaaugagaucucaaaggcucuuuucagagccaccaaaaaaaaaaaaaaaaaaaaaaaaaaaaaaaaaaaaaaaaaaaaaaaaaaaaaaaaaaaaaaaaaaaaaaaaaaaaaaaaaaaaaaaaaaaaaaaaaaaaa

SEQ ID NO: 22589 - RNA, 636 nt, Artificial Sequence
  mRNA product Design b-4 (hSL-A100) comprising derived and/or modified sequence from LASV(LASV237-NIG-2010;Clade II)__AIT17636__Z (opt1)
aggagagucccgcagucggcguccagcggcucugcuuguucgugugugugucguugcaggccuuauucaagcuuaccaugggcaaccgccaggccaagagcaccaagguggacgagcaccagcgggcccaccugguccccgacgcgucccaccucgggccccaguucugcaagagcugcugguucgagaaccgcggccugguggagugcaacaaccacuaccugugccucaacugccugucccugcuccugagcguguccagccggugccccaucugcaagaugccccugcccaccaagcucaaggccgccgcccagccguccgcccccagcaucgagacgauccagaacaccaccccgccgcccuacacccccugaggacuaguaauaaggaaacuguaugaaugucugugggcaggaagugaagagauccuucuguaaagguuuuuggaauuaugucugcugaauaauaaacuuuuuugaaauaauaaaucugguagaaaaaugagaucucaaaggcucuuuucagagccaccaaaaaaaaaaaaaaaaaaaaaaaaaaaaaaaaaaaaaaaaaaaaaaaaaaaaaaaaaaaaaaaaaaaaaaaaaaaaaaaaaaaaaaaaaaaaaaaaaaaaa

SEQ ID NO: 22590 - RNA, 636 nt, Artificial Sequence
  mRNA product Design b-4 (hSL-A100) comprising derived and/or modified sequence from LASV(LASV253-NIG-2011;Clade II)__AIT17668__Z (opt1)
aggagagucccgcagucggcguccagcggcucugcuuguucgugugugugucguugcaggccuuauucaagcuuaccaugggcaaccgccaggccaagagcaccaagguggacgagcaccagcgggcccaccugguccccgacgcgucccaccucgggccccaguucugcaagagcugcugguucgagaacaagggccugguggagugcaacaaccacuaccugugccucaacugccugucccugcuccugagcguguccagccgcugccccaucugcaagaugccccugcccaccaagcucaagacgaccgcccagccguccgccccgcccaccgaggccgccaagaacaccgcgcccccgcccuacgcccccugaggacuaguaauaaggaaacuguaugaaugucugugggcaggaagugaagagauccuucuguaaagguuuuuggaauuaugucugcugaauaauaaacuuuuuugaaauaauaaaucugguagaaaaaugagaucucaaaggcucuuuucagagccaccaaaaaaaaaaaaaaaaaaaaaaaaaaaaaaaaaaaaaaaaaaaaaaaaaaaaaaaaaaaaaaaaaaaaaaaaaaaaaaaaaaaaaaaaaaaaaaaaaaaaa

SEQ ID NO: 22591 - RNA, 636 nt, Artificial Sequence
  mRNA product Design b-4 (hSL-A100) comprising derived and/or modified sequence from LASV(G1180-SLE-2010;Clade IV)__AIT17166__Z (opt1)
aggagagucccgcagucggcguccagcggcucugcuuguucgugugugugucguugcaggccuuauucaagcuuaccaugggcaacaagcaggccaaggcccccgaggcgaaggacagcccgcgcgccucccugauccccgacgccacccaccucgggccccaguucugcaagagcugcugguucgagaccaagggccugguggagugcaacaaccacuaccugugccucaacugccugacgcugcuccuguccgucagcaaccggugccccaucugcaagaugccgcugcccaccaagcuccgccccuccgccacccccaccgccccgcccacggaggcggccgacagcaucgggcccccgcccuacucccccugaggacuaguaauaaggaaacuguaugaaugucugugggcaggaagugaagagauccuucuguaaagguuuuuggaauuaugucugcugaauaauaaacuuuuuugaaauaauaaaucugguagaaaaaugagaucucaaaggcucuuuucagagccaccaaaaaaaaaaaaaaaaaaaaaaaaaaaaaaaaaaaaaaaaaaaaaaaaaaaaaaaaaaaaaaaaaaaaaaaaaaaaaaaaaaaaaaaaaaaaaaaaaaaaa

SEQ ID NO: 22592 - RNA, 636 nt, Artificial Sequence
  mRNA product Design b-4 (hSL-A100) comprising derived and/or modified sequence from LASV(G1442-SLE-2011;Clade IV)__AIT17178__Z (opt1)
aggagagucccgcagucggcguccagcggcucugcuuguucgugugugugucguugcaggccuuauucaagcuuaccaugggcaacaagcaggccaaggccagcgaggcgaaggacagcccccgcgccucccugaucccggacgccacccaccucgggccccaguucugcaaguccugcugguucgagaacaagggccugguggagugcaacaaccacuaccugugccucaacugccugagccugcuccuguccgucagcucccggugccccaucugcaagaugccccugccgacccgccuccggcccagcacggcccccaccgcgcccccggcccgcgccggggacaacaucaagcccccgcccuacucccccugaggacuaguaauaaggaaacuguaugaaugucugugggcaggaagugaagagauccuucuguaaagguuuuuggaauuaugucugcugaauaauaaacuuuuuugaaauaauaaaucugguagaaaaaugagaucucaaaggcucuuuucagagccaccaaaaaaaaaaaaaaaaaaaaaaaaaaaaaaaaaaaaaaaaaaaaaaaaaaaaaaaaaaaaaaaaaaaaaaaaaaaaaaaaaaaaaaaaaaaaaaaaaaaaa

SEQ ID NO: 22593 - RNA, 636 nt, Artificial Sequence
  mRNA product Design b-4 (hSL-A100) comprising derived and/or modified sequence from LASV(G502-SLE-2009;Clade IV)__AIT17124__Z (opt1)
aggagagucccgcagucggcguccagcggcucugcuuguucgugugugugucguugcaggccuuauucaagcuuaccaugggcaacaagcaggucaagacccccgaggccaaggacagcccccgcgccucccugauccccgacgcgacccaccucgggccccaguucugcaagagcugcugguucgagaacaagggccugguggagugcaacaaccacuaccugugccucaacugccugacgcugcuccuguccguggggaaccggugccccaucugcaagaugccgcugcccaccaagcuccgccccagcgugacccccaccgccccgcccacgcgggccgccgacuccaucggcccgccgcccuacagccccugaggacuaguaauaaggaaacuguaugaaugucugugggcaggaagugaagagauccuucuguaaagguuuuuggaauuaugucugcugaauaauaaacuuuuuugaaauaauaaaucugguagaaaaaugagaucucaaaggcucuuuucagagccaccaaaaaaaaaaaaaaaaaaaaaaaaaaaaaaaaaaaaaaaaaaaaaaaaaaaaaaaaaaaaaaaaaaaaaaaaaaaaaaaaaaaaaaaaaaaaaaaaaaaaa

SEQ ID NO: 22594 - RNA, 636 nt, Artificial Sequence
  mRNA product Design b-4 (hSL-A100) comprising derived and/or modified sequence from LASV(G733-SLE-2010;Clade IV)__AIT17152__Z (opt1)
aggagagucccgcagucggcguccagcggcucugcuuguucgugugugugucguugcaggccuuauucaagcuuaccaugggcaacaagcaggccaagacccccgagaccaaggacagcccgcgcgccucccugauccccgacgcgacgcaccucgggccccaguucugcaagagcugcugguucgagaacaagggccugguggagugcaacaaccacuaccugugccucaacugccugacccugcuccuguccgucagcaaccggugccccaucugcaagaugccgcugcccaccaagcuccgccccuccaccgcccccacggccccgcccgccggggccgcggacaacacccggcccccgcccuacagccccugaggacuaguaauaaggaaacuguaugaaugucugugggcaggaagugaagagauccuucuguaaagguuuuuggaauuaugucugcugaauaauaaacuuuuuugaaauaauaaaucugguagaaaaaugagaucucaaaggcucuuuucagagccaccaaaaaaaaaaaaaaaaaaaaaaaaaaaaaaaaaaaaaaaaaaaaaaaaaaaaaaaaaaaaaaaaaaaaaaaaaaaaaaaaaaaaaaaaaaaaaaaaaaaaa

SEQ ID NO: 22595 - RNA, 648 nt, Artificial Sequence
  mRNA product Design b-4 (hSL-A100) comprising derived and/or modified sequence from MOPV/LASV reassortant(IGS-1;Clade IV)__AFY05533__Z (opt1)
aggagagucccgcagucggcguccagcggcucugcuuguucgugugugugucguugcaggccuuauucaagcuuaccaugggcaagacccagagcaaggggcagcccuccaccaaccugcucaaggagacggagccccgccaccccgugauccccgacgcccggggcaccgggcccgaguucugcaagagcugcugguucgagcgccggggccugguccgcugcaacgaccacuaccugugccucaacugccugacccugcuccacaccguguccgaccggugccccaucugcaagcacaagcugcccuuccgccuggagcuccagacgcagcccaccgccccgcccgagaucccgcccagccagaacccgccgcccuacucccccugaggacuaguaauaaggaaacuguaugaaugucugugggcaggaagugaagagauccuucuguaaagguuuuuggaauuaugucugcugaauaauaaacuuuuuugaaauaauaaaucugguagaaaaaugagaucucaaaggcucuuuucagagccaccaaaaaaaaaaaaaaaaaaaaaaaaaaaaaaaaaaaaaaaaaaaaaaaaaaaaaaaaaaaaaaaaaaaaaaaaaaaaaaaaaaaaaaaaaaaaaaaaaaaaa

SEQ ID NO: 22596 - RNA, 636 nt, Artificial Sequence
  mRNA product Design b-4 (hSL-A100) comprising derived and/or modified sequence from LASV(LM776-SLE-2012;Clade IV)__AIT17824__Z (opt1)
aggagagucccgcagucggcguccagcggcucugcuuguucgugugugugucguugcaggccuuauucaagcuuaccaugggcaacaagcaggccaaggccagcgaggagaagaacagcccccgcgccucccugaucccggacgccacccaccucgggccccaguucugcaaguccugcugguucgagaacaagggccugguggagugcaacaaccacuaccugugccucaacugccugacccugcuccugagcgucuccaaccggugccccaucugcaagaugccccugccgacgaagcuccgccccagcaccacccccaccgcgcccccgacgggggccgccgacuccauccggcccccgcccuacagccccugaggacuaguaauaaggaaacuguaugaaugucugugggcaggaagugaagagauccuucuguaaagguuuuuggaauuaugucugcugaauaauaaacuuuuuugaaauaauaaaucugguagaaaaaugagaucucaaaggcucuuuucagagccaccaaaaaaaaaaaaaaaaaaaaaaaaaaaaaaaaaaaaaaaaaaaaaaaaaaaaaaaaaaaaaaaaaaaaaaaaaaaaaaaaaaaaaaaaaaaaaaaaaaaaa

SEQ ID NO: 22597 - RNA, 636 nt, Artificial Sequence
  mRNA product Design b-4 (hSL-A100) comprising derived and/or modified sequence from LASV(Mad39;Clade IV)__ANH09743__Z (opt1)
aggagagucccgcagucggcguccagcggcucugcuuguucgugugugugucguugcaggccuuauucaagcuuaccaugggcaacaagcaggccaaggccagcgagguggaggacgggccccgcgccucccugauccccgacgccacccaccucggcccccaguucugcaagagcugcugguucgagaacaagucccuggucgagugcaacaaccacuaccugugccucaacugccugacccugcuccugagcguguccaaccggugccccaucugcaagaugccccugccgacgcgccucaagcccagcgugguccccaccgcgcccccgacccgggccggggacggcacccgcccgccgcccuacucccccugaggacuaguaauaaggaaacuguaugaaugucugugggcaggaagugaagagauccuucuguaaagguuuuuggaauuaugucugcugaauaauaaacuuuuuugaaauaauaaaucugguagaaaaaugagaucucaaaggcucuuuucagagccaccaaaaaaaaaaaaaaaaaaaaaaaaaaaaaaaaaaaaaaaaaaaaaaaaaaaaaaaaaaaaaaaaaaaaaaaaaaaaaaaaaaaaaaaaaaaaaaaaaaaaa

SEQ ID NO: 22598 - RNA, 636 nt, Artificial Sequence
  mRNA product Design b-4 (hSL-A100) comprising derived and/or modified sequence from LASV(Z0947-SLE-2011;Clade IV)__AIT17838__Z (opt1)
aggagagucccgcagucggcguccagcggcucugcuuguucgugugugugucguugcaggccuuauucaagcuuaccaugggcaacaagcaggccaaggugcccgagagcaaggacuccccgcgcgccagccugauccccgacgcgacccaccucgggccccaguucugcaaguccugcugguucgagaacaagggccuggucgagugcaacaaccacuaccugugccucaacugccugacccugcuccugagcguguccaaccgcugccccaucugcaagaugccgcugcccacgaagcucaagcccagcgccgcccccaccgccccgcccaccggggccgcggacuccauccggcccccgcccuacagccccugaggacuaguaauaaggaaacuguaugaaugucugugggcaggaagugaagagauccuucuguaaagguuuuuggaauuaugucugcugaauaauaaacuuuuuugaaauaauaaaucugguagaaaaaugagaucucaaaggcucuuuucagagccaccaaaaaaaaaaaaaaaaaaaaaaaaaaaaaaaaaaaaaaaaaaaaaaaaaaaaaaaaaaaaaaaaaaaaaaaaaaaaaaaaaaaaaaaaaaaaaaaaaaaaa

SEQ ID NO: 22599 - RNA, 636 nt, Artificial Sequence
  mRNA product Design b-4 (hSL-A100) comprising derived and/or modified sequence from LASV(Josiah;Clade IV)__ADY11072/NP_694871__Z (opt4)
aggagagucccgcagucggcguccagcggcucugcuuguucgugugugugucguugcaggccuuauucaagcuuaccaugggcaacaagcaggccaaggcccccgagagcaaggacagccccagagccagccugauccccgacgccacccaccugggcccccaguucugcaagagcugcugguucgagaacaagggccugguggagugcaacaaccacuaccugugccugaacugccugacccugcugcugagcgugagcaacagaugccccaucugcaagaugccccugcccaccaagcugagacccagcgccgcccccaccgccccccccaccggcgccgccgacagcaucagacccccccccuacagccccugaggacuaguaauaaggaaacuguaugaaugucugugggcaggaagugaagagauccuucuguaaagguuuuuggaauuaugucugcugaauaauaaacuuuuuugaaauaauaaaucugguagaaaaaugagaucucaaaggcucuuuucagagccaccaaaaaaaaaaaaaaaaaaaaaaaaaaaaaaaaaaaaaaaaaaaaaaaaaaaaaaaaaaaaaaaaaaaaaaaaaaaaaaaaaaaaaaaaaaaaaaaaaaaaa

SEQ ID NO: 22600 - RNA, 639 nt, Artificial Sequence
  mRNA product Design b-4 (hSL-A100) comprising derived and/or modified sequence from LASV(Pinneo-NIG-1969;Clade I)__AIT17834__Z (opt4)
aggagagucccgcagucggcguccagcggcucugcuuguucgugugugugucguugcaggccuuauucaagcuuaccaugggcaacaagcagaccagaagcccccccaagcccgagcaccccagacccacccugcugcccgacgccagccaccugggcccccaguucugcaagagcugcugguucgagaacaagggccugguggagugcaacaaccacuaccugugccugaacugccugacccugcugcugagcgugagcgacagaugccccaucugcaagaugccccugcccaccaagcuggccgugagaacccagcccagcgcccccccccugaaccagggcaacacccagagcagccccccccccuacagccccugaggacuaguaauaaggaaacuguaugaaugucugugggcaggaagugaagagauccuucuguaaagguuuuuggaauuaugucugcugaauaauaaacuuuuuugaaauaauaaaucugguagaaaaaugagaucucaaaggcucuuuucagagccaccaaaaaaaaaaaaaaaaaaaaaaaaaaaaaaaaaaaaaaaaaaaaaaaaaaaaaaaaaaaaaaaaaaaaaaaaaaaaaaaaaaaaaaaaaaaaaaaaaaaaa

SEQ ID NO: 22601 - RNA, 636 nt, Artificial Sequence
  mRNA product Design b-4 (hSL-A100) comprising derived and/or modified sequence from LASV(Nig08-04;Clade II)__ADU56612__Z (opt4)
aggagagucccgcagucggcguccagcggcucugcuuguucgugugugugucguugcaggccuuauucaagcuuaccaugggcaacagacagaccagacccaccgaggccaccgagcagagcagagcccaccuggugcccgacgccagccaccugggcccccaguucugcaagagcugcugguucgagaacagaggccugguggagugcaacaaccacuaccugugccugaacugccugagccugcugcugagcgugagcagcagaugccccaucugcaagaugccccugcccaccagacugaaggccagcgcccagcccagcgccccccccaccgaggccccccagaacaccacccccccccccuacacccccugaggacuaguaauaaggaaacuguaugaaugucugugggcaggaagugaagagauccuucuguaaagguuuuuggaauuaugucugcugaauaauaaacuuuuuugaaauaauaaaucugguagaaaaaugagaucucaaaggcucuuuucagagccaccaaaaaaaaaaaaaaaaaaaaaaaaaaaaaaaaaaaaaaaaaaaaaaaaaaaaaaaaaaaaaaaaaaaaaaaaaaaaaaaaaaaaaaaaaaaaaaaaaaaaa

SEQ ID NO: 22602 - RNA, 636 nt, Artificial Sequence
  mRNA product Design b-4 (hSL-A100) comprising derived and/or modified sequence from LASV(Nig08-A19;Clade III)__ADU56620__Z (opt4)
aggagagucccgcagucggcguccagcggcucugcuuguucgugugugugucguugcaggccuuauucaagcuuaccaugggcggcaagcacaccaagccccagagagagagcaacagccccagagccagccugauccccgacgccacccaccugggcccccaguucugcaagagcugcugguucgagaacaagggccugguggagugcaacaaccacuaccugugccugaacugccugacccugcugcugagcgugagcaacagaugccccaucugcaagaugccccugcccaccagacugagagccagcaccaaccccaccgccccccagguggagcaggugggccccaccaaccccccccccuacagccccugaggacuaguaauaaggaaacuguaugaaugucugugggcaggaagugaagagauccuucuguaaagguuuuuggaauuaugucugcugaauaauaaacuuuuuugaaauaauaaaucugguagaaaaaugagaucucaaaggcucuuuucagagccaccaaaaaaaaaaaaaaaaaaaaaaaaaaaaaaaaaaaaaaaaaaaaaaaaaaaaaaaaaaaaaaaaaaaaaaaaaaaaaaaaaaaaaaaaaaaaaaaaaaaaa

SEQ ID NO: 22603 - RNA, 636 nt, Artificial Sequence
  mRNA product Design b-4 (hSL-A100) comprising derived and/or modified sequence from LASV(AV;Clade V)__CCA30312__Z (opt4)
aggagagucccgcagucggcguccagcggcucugcuuguucgugugugugucguugcaggccuuauucaagcuuaccaugggcaacagacaggccaagaaccccgagguggagaacagccccagagccagccugauccccgacgccacccaccugggcccccaguucugcaagagcugcugguucgagaacaagggccugguggagugcaacaaccacuaccugugccugaacugccugagccugcugcugagcgugagcaacagaugccccaucugcaagaugccccugcccaccagacugagacccaccaccacccccaccgccccccagaucaucaaggagaacaccaccaaccccccccccuacacccccugaggacuaguaauaaggaaacuguaugaaugucugugggcaggaagugaagagauccuucuguaaagguuuuuggaauuaugucugcugaauaauaaacuuuuuugaaauaauaaaucugguagaaaaaugagaucucaaaggcucuuuucagagccaccaaaaaaaaaaaaaaaaaaaaaaaaaaaaaaaaaaaaaaaaaaaaaaaaaaaaaaaaaaaaaaaaaaaaaaaaaaaaaaaaaaaaaaaaaaaaaaaaaaaaa

SEQ ID NO: 22604 - RNA, 636 nt, Artificial Sequence
  mRNA product Design b-4 (hSL-A100) comprising derived and/or modified sequence from LASV(Togo/2016/7082;Clade VI)__AMR44579__Z (opt4)
aggagagucccgcagucggcguccagcggcucugcuuguucgugugugugucguugcaggccuuauucaagcuuaccaugggcgccagacagaccaagcagccccagaucgagggcagccccagagccagccuggugcccgacgccagccaccugggcccccaguucugcaagagcugcugguucgagaacaagggccugguggagugcaacaaccacuaccugugccugaacugccugagccugcugcugagcgugagcaacagaugccccaucugcaagaugccccugcccaccaagcugagagugagcagcgcccccagcgccccccccgccgccaccgcccagcccggcacccccccccccuacagccccugaggacuaguaauaaggaaacuguaugaaugucugugggcaggaagugaagagauccuucuguaaagguuuuuggaauuaugucugcugaauaauaaacuuuuuugaaauaauaaaucugguagaaaaaugagaucucaaaggcucuuuucagagccaccaaaaaaaaaaaaaaaaaaaaaaaaaaaaaaaaaaaaaaaaaaaaaaaaaaaaaaaaaaaaaaaaaaaaaaaaaaaaaaaaaaaaaaaaaaaaaaaaaaaaa

SEQ ID NO: 22605 - RNA, 636 nt, Artificial Sequence
  mRNA product Design b-4 (hSL-A100) comprising derived and/or modified sequence from LASV(KAK-428;Clade n.d. (VII))__ANH09761__Z (opt4)
aggagagucccgcagucggcguccagcggcucugcuuguucgugugugugucguugcaggccuuauucaagcuuaccaugggcaacaagggcaccaagcccacccagaacagcgagcccagcagagccaaccuggugcccgacgccagcuaccugggcccccaguucugcaagagcugcugguucgagaacaagggccugguggagugcaacaaccacuaccugugccugaacugccugaccaugcugcugagcgugagcaacagaugccccaucugcaagaugccccugcccaccaagaucaaggccagcggcagccccagcgccccccccaccgaggccaacagcgccgugagccccccccccuacacccccugaggacuaguaauaaggaaacuguaugaaugucugugggcaggaagugaagagauccuucuguaaagguuuuuggaauuaugucugcugaauaauaaacuuuuuugaaauaauaaaucugguagaaaaaugagaucucaaaggcucuuuucagagccaccaaaaaaaaaaaaaaaaaaaaaaaaaaaaaaaaaaaaaaaaaaaaaaaaaaaaaaaaaaaaaaaaaaaaaaaaaaaaaaaaaaaaaaaaaaaaaaaaaaaaa

SEQ ID NO: 22606 - RNA, 636 nt, Artificial Sequence
  mRNA product Design b-4 (hSL-A100) comprising derived and/or modified sequence from LASV(ISTH0009-NIG-2011;Clade II)__AIT17402__Z (opt4)
aggagagucccgcagucggcguccagcggcucugcuuguucgugugugugucguugcaggccuuauucaagcuuaccaugggcaacagacaggccaagagcaccaagguggacgagcaccagagagcccaccuggugcccgacgccagccaccugggcccccaguucugcaagagcugcugguucgagaacagaggccugguggagugcaacaaccacuaccugugccugaacugccugagccugcugcugagcgugagcagcagaugccccaucugcaagaugccccugcccaccaagcugaaggccgccgcccagcccagcgcccccagcaccgagaccauccagaacaccacccccccccccuacacccccugaggacuaguaauaaggaaacuguaugaaugucugugggcaggaagugaagagauccuucuguaaagguuuuuggaauuaugucugcugaauaauaaacuuuuuugaaauaauaaaucugguagaaaaaugagaucucaaaggcucuuuucagagccaccaaaaaaaaaaaaaaaaaaaaaaaaaaaaaaaaaaaaaaaaaaaaaaaaaaaaaaaaaaaaaaaaaaaaaaaaaaaaaaaaaaaaaaaaaaaaaaaaaaaaa

SEQ ID NO: 22607 - RNA, 636 nt, Artificial Sequence
  mRNA product Design b-4 (hSL-A100) comprising derived and/or modified sequence from LASV(ISTH2010-NIG-2012;Clade II)__AIT17480__Z (opt4)
aggagagucccgcagucggcguccagcggcucugcuuguucgugugugugucguugcaggccuuauucaagcuuaccaugggcaacagacacgccaagagcaccaagguggacgagcaccagagagcccaccuggugcccgacgccagccaccugggcccccaguucugcaagagcugcugguucgagaacagaggccugguggagugcaacaaccacuaccugugccugaacugccugagccugcugcugagcgugagcagcagaugccccaucugcaagaugccccugcccaccaagcugaaggccgccgcccagcccagcgcccccagcaccgaggugauccagagcaccacccccccccccuacacccccugaggacuaguaauaaggaaacuguaugaaugucugugggcaggaagugaagagauccuucuguaaagguuuuuggaauuaugucugcugaauaauaaacuuuuuugaaauaauaaaucugguagaaaaaugagaucucaaaggcucuuuucagagccaccaaaaaaaaaaaaaaaaaaaaaaaaaaaaaaaaaaaaaaaaaaaaaaaaaaaaaaaaaaaaaaaaaaaaaaaaaaaaaaaaaaaaaaaaaaaaaaaaaaaaa

SEQ ID NO: 22608 - RNA, 636 nt, Artificial Sequence
  mRNA product Design b-4 (hSL-A100) comprising derived and/or modified sequence from LASV(Lassa virus/H.sapiens-wt/NGA/2016/ISTH_0017;Clade II)__AVO03713__Z (opt4)
aggagagucccgcagucggcguccagcggcucugcuuguucgugugugugucguugcaggccuuauucaagcuuaccaugggcaacagacaggccaagagcaccaagguggacgagcaccagagagcccaccuggugcccgacgccagccaccugggcccccaguucugcaagagcugcugguucgagaacagaggccugguggagugcaacaaccacuaccugugccugaacugccugagccugcugcugagcgugagcagcagaugccccaucugcaagaugccccugcccaccaagcugaaggccgccacccagcccagcgcccccagcaccgaggugaaccagaacaccacccccccccccuacacccccugaggacuaguaauaaggaaacuguaugaaugucugugggcaggaagugaagagauccuucuguaaagguuuuuggaauuaugucugcugaauaauaaacuuuuuugaaauaauaaaucugguagaaaaaugagaucucaaaggcucuuuucagagccaccaaaaaaaaaaaaaaaaaaaaaaaaaaaaaaaaaaaaaaaaaaaaaaaaaaaaaaaaaaaaaaaaaaaaaaaaaaaaaaaaaaaaaaaaaaaaaaaaaaaaa

SEQ ID NO: 22609 - RNA, 636 nt, Artificial Sequence
  mRNA product Design b-4 (hSL-A100) comprising derived and/or modified sequence from LASV(Lassa virus/H.sapiens-wt/NGA/2018/ISTH_0959;Clade II)__AVV65084__Z (opt4)
aggagagucccgcagucggcguccagcggcucugcuuguucgugugugugucguugcaggccuuauucaagcuuaccaugggcaacaagcaggccaagagcaccaagguggacgagcaccagagagcccaccuggugcccgacgccagccaccugggcccccaguucugcaagagcugcugguucgagaacagaggccugguggagugcaacaaccacuaccugugccugaacugccugagccugcugcugagcgugagcagcagaugccccaucugcaagaugccccugcccaccaagcugaaggccgccgcccagcccagcgcccccagcaccgaggccauccagagcaccacccccccccccuacacccccugaggacuaguaauaaggaaacuguaugaaugucugugggcaggaagugaagagauccuucuguaaagguuuuuggaauuaugucugcugaauaauaaacuuuuuugaaauaauaaaucugguagaaaaaugagaucucaaaggcucuuuucagagccaccaaaaaaaaaaaaaaaaaaaaaaaaaaaaaaaaaaaaaaaaaaaaaaaaaaaaaaaaaaaaaaaaaaaaaaaaaaaaaaaaaaaaaaaaaaaaaaaaaaaaa

SEQ ID NO: 22610 - RNA, 636 nt, Artificial Sequence
  mRNA product Design b-4 (hSL-A100) comprising derived and/or modified sequence from LASV(LASV003-NIG-2008;Clade II)__AIT17578__Z (opt4)
aggagagucccgcagucggcguccagcggcucugcuuguucgugugugugucguugcaggccuuauucaagcuuaccaugggcaacagacaggccaagagcaccaagguggacgagcaccagagagcccaccuggugcccgacgccagccaccugggcccccaguucugcaagagcugcugguucgagaacaagggccugguggagugcaacaaccacuaccugugccugaacugccugagccugcugcugagcgugagcagcagaugccccaucugcaagaugccccugcccaccaagcugagagccgccgcccagcccagcgcccccagcaccgagagcgcccagaacaccgcccccccccccuacgcccccugaggacuaguaauaaggaaacuguaugaaugucugugggcaggaagugaagagauccuucuguaaagguuuuuggaauuaugucugcugaauaauaaacuuuuuugaaauaauaaaucugguagaaaaaugagaucucaaaggcucuuuucagagccaccaaaaaaaaaaaaaaaaaaaaaaaaaaaaaaaaaaaaaaaaaaaaaaaaaaaaaaaaaaaaaaaaaaaaaaaaaaaaaaaaaaaaaaaaaaaaaaaaaaaaa

SEQ ID NO: 22611 - RNA, 636 nt, Artificial Sequence
  mRNA product Design b-4 (hSL-A100) comprising derived and/or modified sequence from LASV(LASV035-NIG-2009;Clade II)__AIT17586__Z (opt4)
aggagagucccgcagucggcguccagcggcucugcuuguucgugugugugucguugcaggccuuauucaagcuuaccaugggcaacaagcaggccaagagcaccaagguggacgagcaccagagagcccaccuggugcccgacgccagccaccugggcccccaguucugcaagagcugcugguucgagaacagaggccugguggagugcaacaaccacuaccugugccugaacugccugagccugcugcugagcgugagcagcagaugccccaucugcaagaugccccugcccaccagacugaaggccgccgcccagcccagcgcccccagcaccgaggugacccagaacaccacccccccccccuacacccccugaggacuaguaauaaggaaacuguaugaaugucugugggcaggaagugaagagauccuucuguaaagguuuuuggaauuaugucugcugaauaauaaacuuuuuugaaauaauaaaucugguagaaaaaugagaucucaaaggcucuuuucagagccaccaaaaaaaaaaaaaaaaaaaaaaaaaaaaaaaaaaaaaaaaaaaaaaaaaaaaaaaaaaaaaaaaaaaaaaaaaaaaaaaaaaaaaaaaaaaaaaaaaaaaa

SEQ ID NO: 22612 - RNA, 636 nt, Artificial Sequence
  mRNA product Design b-4 (hSL-A100) comprising derived and/or modified sequence from LASV(LASV1000-NIG-2009;Clade II)__AIT17780__Z (opt4)
aggagagucccgcagucggcguccagcggcucugcuuguucgugugugugucguugcaggccuuauucaagcuuaccaugggcaacagacagaccaagagcaccaagguggacgagcaccagagagccuaccuggugcccgacgccagccugcugggcccccaguucugcaagagcugcugguucgagaacaagggccugguggagugcaacaaccacuaccugugccugaacugccugagccugcugcugagcgugagcagcagaugccccaucugcaagaugccccugcccaccagacugaaggccgccgcccagcccagcgccccccccaccgaggccauccagaacaccacccccccccccuacacccccugaggacuaguaauaaggaaacuguaugaaugucugugggcaggaagugaagagauccuucuguaaagguuuuuggaauuaugucugcugaauaauaaacuuuuuugaaauaauaaaucugguagaaaaaugagaucucaaaggcucuuuucagagccaccaaaaaaaaaaaaaaaaaaaaaaaaaaaaaaaaaaaaaaaaaaaaaaaaaaaaaaaaaaaaaaaaaaaaaaaaaaaaaaaaaaaaaaaaaaaaaaaaaaaaa

SEQ ID NO: 22613 - RNA, 636 nt, Artificial Sequence
  mRNA product Design b-4 (hSL-A100) comprising derived and/or modified sequence from LASV(LASV221-NIG-2010;Clade II)__AIT17622__Z (opt4)
aggagagucccgcagucggcguccagcggcucugcuuguucgugugugugucguugcaggccuuauucaagcuuaccaugggcaacagacaggccaagagcaccaagguggacgagcaccagagagcccaccuggugcccgacgccagccaccugggcccccaguucugcaagagcugcugguucgagaacagaggccugguggagugcaacaaccacuaccugugccugaacugccugagccugcugcugagcgugagcagcagaugccccaucugcaagaugccccugcccaccaagcugaaggccgccacccagcccagcgcccccagcaccgaggugacccagaacaccauccccccccccuacagccccugaggacuaguaauaaggaaacuguaugaaugucugugggcaggaagugaagagauccuucuguaaagguuuuuggaauuaugucugcugaauaauaaacuuuuuugaaauaauaaaucugguagaaaaaugagaucucaaaggcucuuuucagagccaccaaaaaaaaaaaaaaaaaaaaaaaaaaaaaaaaaaaaaaaaaaaaaaaaaaaaaaaaaaaaaaaaaaaaaaaaaaaaaaaaaaaaaaaaaaaaaaaaaaaaa

SEQ ID NO: 22614 - RNA, 636 nt, Artificial Sequence
  mRNA product Design b-4 (hSL-A100) comprising derived and/or modified sequence from LASV(LASV237-NIG-2010;Clade II)__AIT17636__Z (opt4)
aggagagucccgcagucggcguccagcggcucugcuuguucgugugugugucguugcaggccuuauucaagcuuaccaugggcaacagacaggccaagagcaccaagguggacgagcaccagagagcccaccuggugcccgacgccagccaccugggcccccaguucugcaagagcugcugguucgagaacagaggccugguggagugcaacaaccacuaccugugccugaacugccugagccugcugcugagcgugagcagcagaugccccaucugcaagaugccccugcccaccaagcugaaggccgccgcccagcccagcgcccccagcaucgagaccauccagaacaccacccccccccccuacacccccugaggacuaguaauaaggaaacuguaugaaugucugugggcaggaagugaagagauccuucuguaaagguuuuuggaauuaugucugcugaauaauaaacuuuuuugaaauaauaaaucugguagaaaaaugagaucucaaaggcucuuuucagagccaccaaaaaaaaaaaaaaaaaaaaaaaaaaaaaaaaaaaaaaaaaaaaaaaaaaaaaaaaaaaaaaaaaaaaaaaaaaaaaaaaaaaaaaaaaaaaaaaaaaaaa

SEQ ID NO: 22615 - RNA, 636 nt, Artificial Sequence
  mRNA product Design b-4 (hSL-A100) comprising derived and/or modified sequence from LASV(LASV253-NIG-2011;Clade II)__AIT17668__Z (opt4)
aggagagucccgcagucggcguccagcggcucugcuuguucgugugugugucguugcaggccuuauucaagcuuaccaugggcaacagacaggccaagagcaccaagguggacgagcaccagagagcccaccuggugcccgacgccagccaccugggcccccaguucugcaagagcugcugguucgagaacaagggccugguggagugcaacaaccacuaccugugccugaacugccugagccugcugcugagcgugagcagcagaugccccaucugcaagaugccccugcccaccaagcugaagaccaccgcccagcccagcgccccccccaccgaggccgccaagaacaccgcccccccccccuacgcccccugaggacuaguaauaaggaaacuguaugaaugucugugggcaggaagugaagagauccuucuguaaagguuuuuggaauuaugucugcugaauaauaaacuuuuuugaaauaauaaaucugguagaaaaaugagaucucaaaggcucuuuucagagccaccaaaaaaaaaaaaaaaaaaaaaaaaaaaaaaaaaaaaaaaaaaaaaaaaaaaaaaaaaaaaaaaaaaaaaaaaaaaaaaaaaaaaaaaaaaaaaaaaaaaaa

SEQ ID NO: 22616 - RNA, 636 nt, Artificial Sequence
  mRNA product Design b-4 (hSL-A100) comprising derived and/or modified sequence from LASV(G1180-SLE-2010;Clade IV)__AIT17166__Z (opt4)
aggagagucccgcagucggcguccagcggcucugcuuguucgugugugugucguugcaggccuuauucaagcuuaccaugggcaacaagcaggccaaggcccccgaggccaaggacagccccagagccagccugauccccgacgccacccaccugggcccccaguucugcaagagcugcugguucgagaccaagggccugguggagugcaacaaccacuaccugugccugaacugccugacccugcugcugagcgugagcaacagaugccccaucugcaagaugccccugcccaccaagcugagacccagcgccacccccaccgccccccccaccgaggccgccgacagcaucggccccccccccuacagccccugaggacuaguaauaaggaaacuguaugaaugucugugggcaggaagugaagagauccuucuguaaagguuuuuggaauuaugucugcugaauaauaaacuuuuuugaaauaauaaaucugguagaaaaaugagaucucaaaggcucuuuucagagccaccaaaaaaaaaaaaaaaaaaaaaaaaaaaaaaaaaaaaaaaaaaaaaaaaaaaaaaaaaaaaaaaaaaaaaaaaaaaaaaaaaaaaaaaaaaaaaaaaaaaaa

SEQ ID NO: 22617 - RNA, 636 nt, Artificial Sequence
  mRNA product Design b-4 (hSL-A100) comprising derived and/or modified sequence from LASV(G1442-SLE-2011;Clade IV)__AIT17178__Z (opt4)
aggagagucccgcagucggcguccagcggcucugcuuguucgugugugugucguugcaggccuuauucaagcuuaccaugggcaacaagcaggccaaggccagcgaggccaaggacagccccagagccagccugauccccgacgccacccaccugggcccccaguucugcaagagcugcugguucgagaacaagggccugguggagugcaacaaccacuaccugugccugaacugccugagccugcugcugagcgugagcagcagaugccccaucugcaagaugccccugcccaccagacugagacccagcaccgcccccaccgccccccccgccagagccggcgacaacaucaagcccccccccuacagccccugaggacuaguaauaaggaaacuguaugaaugucugugggcaggaagugaagagauccuucuguaaagguuuuuggaauuaugucugcugaauaauaaacuuuuuugaaauaauaaaucugguagaaaaaugagaucucaaaggcucuuuucagagccaccaaaaaaaaaaaaaaaaaaaaaaaaaaaaaaaaaaaaaaaaaaaaaaaaaaaaaaaaaaaaaaaaaaaaaaaaaaaaaaaaaaaaaaaaaaaaaaaaaaaaa

SEQ ID NO: 22618 - RNA, 636 nt, Artificial Sequence
  mRNA product Design b-4 (hSL-A100) comprising derived and/or modified sequence from LASV(G502-SLE-2009;Clade IV)__AIT17124__Z (opt4)
aggagagucccgcagucggcguccagcggcucugcuuguucgugugugugucguugcaggccuuauucaagcuuaccaugggcaacaagcaggugaagacccccgaggccaaggacagccccagagccagccugauccccgacgccacccaccugggcccccaguucugcaagagcugcugguucgagaacaagggccugguggagugcaacaaccacuaccugugccugaacugccugacccugcugcugagcgugggcaacagaugccccaucugcaagaugccccugcccaccaagcugagacccagcgugacccccaccgccccccccaccagagccgccgacagcaucggccccccccccuacagccccugaggacuaguaauaaggaaacuguaugaaugucugugggcaggaagugaagagauccuucuguaaagguuuuuggaauuaugucugcugaauaauaaacuuuuuugaaauaauaaaucugguagaaaaaugagaucucaaaggcucuuuucagagccaccaaaaaaaaaaaaaaaaaaaaaaaaaaaaaaaaaaaaaaaaaaaaaaaaaaaaaaaaaaaaaaaaaaaaaaaaaaaaaaaaaaaaaaaaaaaaaaaaaaaaa

SEQ ID NO: 22619 - RNA, 636 nt, Artificial Sequence
  mRNA product Design b-4 (hSL-A100) comprising derived and/or modified sequence from LASV(G733-SLE-2010;Clade IV)__AIT17152__Z (opt4)
aggagagucccgcagucggcguccagcggcucugcuuguucgugugugugucguugcaggccuuauucaagcuuaccaugggcaacaagcaggccaagacccccgagaccaaggacagccccagagccagccugauccccgacgccacccaccugggcccccaguucugcaagagcugcugguucgagaacaagggccugguggagugcaacaaccacuaccugugccugaacugccugacccugcugcugagcgugagcaacagaugccccaucugcaagaugccccugcccaccaagcugagacccagcaccgcccccaccgccccccccgccggcgccgccgacaacaccagacccccccccuacagccccugaggacuaguaauaaggaaacuguaugaaugucugugggcaggaagugaagagauccuucuguaaagguuuuuggaauuaugucugcugaauaauaaacuuuuuugaaauaauaaaucugguagaaaaaugagaucucaaaggcucuuuucagagccaccaaaaaaaaaaaaaaaaaaaaaaaaaaaaaaaaaaaaaaaaaaaaaaaaaaaaaaaaaaaaaaaaaaaaaaaaaaaaaaaaaaaaaaaaaaaaaaaaaaaaa

SEQ ID NO: 22620 - RNA, 648 nt, Artificial Sequence
  mRNA product Design b-4 (hSL-A100) comprising derived and/or modified sequence from MOPV/LASV reassortant(IGS-1;Clade IV)__AFY05533__Z (opt4)
aggagagucccgcagucggcguccagcggcucugcuuguucgugugugugucguugcaggccuuauucaagcuuaccaugggcaagacccagagcaagggccagcccagcaccaaccugcugaaggagaccgagcccagacaccccgugauccccgacgccagaggcaccggccccgaguucugcaagagcugcugguucgagagaagaggccuggugagaugcaacgaccacuaccugugccugaacugccugacccugcugcacaccgugagcgacagaugccccaucugcaagcacaagcugcccuucagacuggagcugcagacccagcccaccgccccccccgagaucccccccagccagaaccccccccccuacagccccugaggacuaguaauaaggaaacuguaugaaugucugugggcaggaagugaagagauccuucuguaaagguuuuuggaauuaugucugcugaauaauaaacuuuuuugaaauaauaaaucugguagaaaaaugagaucucaaaggcucuuuucagagccaccaaaaaaaaaaaaaaaaaaaaaaaaaaaaaaaaaaaaaaaaaaaaaaaaaaaaaaaaaaaaaaaaaaaaaaaaaaaaaaaaaaaaaaaaaaaaaaaaaaaaa

SEQ ID NO: 22621 - RNA, 636 nt, Artificial Sequence
  mRNA product Design b-4 (hSL-A100) comprising derived and/or modified sequence from LASV(LM776-SLE-2012;Clade IV)__AIT17824__Z (opt4)
aggagagucccgcagucggcguccagcggcucugcuuguucgugugugugucguugcaggccuuauucaagcuuaccaugggcaacaagcaggccaaggccagcgaggagaagaacagccccagagccagccugauccccgacgccacccaccugggcccccaguucugcaagagcugcugguucgagaacaagggccugguggagugcaacaaccacuaccugugccugaacugccugacccugcugcugagcgugagcaacagaugccccaucugcaagaugccccugcccaccaagcugagacccagcaccacccccaccgccccccccaccggcgccgccgacagcaucagacccccccccuacagccccugaggacuaguaauaaggaaacuguaugaaugucugugggcaggaagugaagagauccuucuguaaagguuuuuggaauuaugucugcugaauaauaaacuuuuuugaaauaauaaaucugguagaaaaaugagaucucaaaggcucuuuucagagccaccaaaaaaaaaaaaaaaaaaaaaaaaaaaaaaaaaaaaaaaaaaaaaaaaaaaaaaaaaaaaaaaaaaaaaaaaaaaaaaaaaaaaaaaaaaaaaaaaaaaaa

SEQ ID NO: 22622 - RNA, 636 nt, Artificial Sequence
  mRNA product Design b-4 (hSL-A100) comprising derived and/or modified sequence from LASV(Mad39;Clade IV)__ANH09743__Z (opt4)
aggagagucccgcagucggcguccagcggcucugcuuguucgugugugugucguugcaggccuuauucaagcuuaccaugggcaacaagcaggccaaggccagcgagguggaggacggccccagagccagccugauccccgacgccacccaccugggcccccaguucugcaagagcugcugguucgagaacaagagccugguggagugcaacaaccacuaccugugccugaacugccugacccugcugcugagcgugagcaacagaugccccaucugcaagaugccccugcccaccagacugaagcccagcguggugcccaccgccccccccaccagagccggcgacggcaccagacccccccccuacagccccugaggacuaguaauaaggaaacuguaugaaugucugugggcaggaagugaagagauccuucuguaaagguuuuuggaauuaugucugcugaauaauaaacuuuuuugaaauaauaaaucugguagaaaaaugagaucucaaaggcucuuuucagagccaccaaaaaaaaaaaaaaaaaaaaaaaaaaaaaaaaaaaaaaaaaaaaaaaaaaaaaaaaaaaaaaaaaaaaaaaaaaaaaaaaaaaaaaaaaaaaaaaaaaaaa

SEQ ID NO: 22623 - RNA, 636 nt, Artificial Sequence
  mRNA product Design b-4 (hSL-A100) comprising derived and/or modified sequence from LASV(Z0947-SLE-2011;Clade IV)__AIT17838__Z (opt4)
aggagagucccgcagucggcguccagcggcucugcuuguucgugugugugucguugcaggccuuauucaagcuuaccaugggcaacaagcaggccaaggugcccgagagcaaggacagccccagagccagccugauccccgacgccacccaccugggcccccaguucugcaagagcugcugguucgagaacaagggccugguggagugcaacaaccacuaccugugccugaacugccugacccugcugcugagcgugagcaacagaugccccaucugcaagaugccccugcccaccaagcugaagcccagcgccgcccccaccgccccccccaccggcgccgccgacagcaucagacccccccccuacagccccugaggacuaguaauaaggaaacuguaugaaugucugugggcaggaagugaagagauccuucuguaaagguuuuuggaauuaugucugcugaauaauaaacuuuuuugaaauaauaaaucugguagaaaaaugagaucucaaaggcucuuuucagagccaccaaaaaaaaaaaaaaaaaaaaaaaaaaaaaaaaaaaaaaaaaaaaaaaaaaaaaaaaaaaaaaaaaaaaaaaaaaaaaaaaaaaaaaaaaaaaaaaaaaaaa

SEQ ID NO: 22624 - RNA, 636 nt, Artificial Sequence
  mRNA product Design b-4 (hSL-A100) comprising derived and/or modified sequence from LASV(Josiah;Clade IV)__ADY11072/NP_694871__Z (opt5)
aggagagucccgcagucggcguccagcggcucugcuuguucgugugugugucguugcaggccuuauucaagcuuaccaugggcaacaagcaggccaaagcucccgagagcaaggacuccccuagagccucucugaucccggaugcgacccaccucgggccccaauucugcaaaagcuguugguuugaaaauaagggacugguggagugcaacaaucauuaccuuugucugaacugccucacacugcuucuguccgucucuaaucgguguccuauuugcaaaaugccccucccuacgaagcugcgccccagcgcugccccuaccgccccgcccacaggcgcugccgacuccaucagaccucccccuuauucucccugaggacuaguaauaaggaaacuguaugaaugucugugggcaggaagugaagagauccuucuguaaagguuuuuggaauuaugucugcugaauaauaaacuuuuuugaaauaauaaaucugguagaaaaaugagaucucaaaggcucuuuucagagccaccaaaaaaaaaaaaaaaaaaaaaaaaaaaaaaaaaaaaaaaaaaaaaaaaaaaaaaaaaaaaaaaaaaaaaaaaaaaaaaaaaaaaaaaaaaaaaaaaaaaaa

SEQ ID NO: 22625 - RNA, 639 nt, Artificial Sequence
  mRNA product Design b-4 (hSL-A100) comprising derived and/or modified sequence from LASV(Pinneo-NIG-1969;Clade I)__AIT17834__Z (opt5)
aggagagucccgcagucggcguccagcggcucugcuuguucgugugugugucguugcaggccuuauucaagcuuaccaugggcaacaagcagaccagaagcccucccaaaccggagcacccccggccuacacugcuccccgacgccucccaucuggggccucaauucugcaagucuuguugguuugaaaauaaaggacuuguggagugcaacaaucacuaccugugucucaacugccugacgcuucugcucagcgucuccgaucgcugucccaucugcaagaugccucugccgaccaaacuggcuguuagaacacagcccucugccccuccccucaaucagggcaacacccagagcuccccucccccguauucuccuugaggacuaguaauaaggaaacuguaugaaugucugugggcaggaagugaagagauccuucuguaaagguuuuuggaauuaugucugcugaauaauaaacuuuuuugaaauaauaaaucugguagaaaaaugagaucucaaaggcucuuuucagagccaccaaaaaaaaaaaaaaaaaaaaaaaaaaaaaaaaaaaaaaaaaaaaaaaaaaaaaaaaaaaaaaaaaaaaaaaaaaaaaaaaaaaaaaaaaaaaaaaaaaaaa

SEQ ID NO: 22626 - RNA, 636 nt, Artificial Sequence
  mRNA product Design b-4 (hSL-A100) comprising derived and/or modified sequence from LASV(Nig08-04;Clade II)__ADU56612__Z (opt5)
aggagagucccgcagucggcguccagcggcucugcuuguucgugugugugucguugcaggccuuauucaagcuuaccaugggcaacagacagacccggcccacagaggccacggaacaaagccgcgcccaccuggugccugacgccucccaucucgggccgcaguucugcaagucuuguugguuugagaauagaggacuggucgaaugcaacaaucacuaccuuugucugaacugccucagccugcuucuguccguuucuagccggugucccaucugcaaaaugccucuccccacccgccugaaggcguccgcucagccuucugcucccccuacagaggccccgcagaauaccacacccccucccuauaccccuugaggacuaguaauaaggaaacuguaugaaugucugugggcaggaagugaagagauccuucuguaaagguuuuuggaauuaugucugcugaauaauaaacuuuuuugaaauaauaaaucugguagaaaaaugagaucucaaaggcucuuuucagagccaccaaaaaaaaaaaaaaaaaaaaaaaaaaaaaaaaaaaaaaaaaaaaaaaaaaaaaaaaaaaaaaaaaaaaaaaaaaaaaaaaaaaaaaaaaaaaaaaaaaaaa

SEQ ID NO: 22627 - RNA, 636 nt, Artificial Sequence
  mRNA product Design b-4 (hSL-A100) comprising derived and/or modified sequence from LASV(Nig08-A19;Clade III)__ADU56620__Z (opt5)
aggagagucccgcagucggcguccagcggcucugcuuguucgugugugugucguugcaggccuuauucaagcuuaccaugggcgggaagcacaccaaaccccagagagagagcaacuccccucgggccucucugaucccggacgcuacacaucucggaccccaauucugcaagagcuguugguuugaaaauaaaggccugguggagugcaacaaucacuaccuuugucugaacugccucacgcugcuucuguccgucucuaaucgcuguccuauuugcaagaugccccucccuaccagacugcgggccagcacaaaccccaccgcgccucagguugaacagguggggccgacaaaucccccucccuauuccccuugaggacuaguaauaaggaaacuguaugaaugucugugggcaggaagugaagagauccuucuguaaagguuuuuggaauuaugucugcugaauaauaaacuuuuuugaaauaauaaaucugguagaaaaaugagaucucaaaggcucuuuucagagccaccaaaaaaaaaaaaaaaaaaaaaaaaaaaaaaaaaaaaaaaaaaaaaaaaaaaaaaaaaaaaaaaaaaaaaaaaaaaaaaaaaaaaaaaaaaaaaaaaaaaaa

SEQ ID NO: 22628 - RNA, 636 nt, Artificial Sequence
  mRNA product Design b-4 (hSL-A100) comprising derived and/or modified sequence from LASV(AV;Clade V)__CCA30312__Z (opt5)
aggagagucccgcagucggcguccagcggcucugcuuguucgugugugugucguugcaggccuuauucaagcuuaccaugggcaacagacaggccaagaaucccgagguggaaaacagcccucgggcuucccugaucccggacgccacccaccucgggccccaauucugcaaaucuuguugguuugagaauaagggacuggucgaaugcaacaaucauuaccuuugucugaacugccucagccugcuucuguccguuucuaaucgcuguccuauuugcaaaaugccccucccuacaagacugcggcccacgaccacaccuaccgcgccgcagaucauuaaggagaacacaaccaaucccccucccuauacaccuugaggacuaguaauaaggaaacuguaugaaugucugugggcaggaagugaagagauccuucuguaaagguuuuuggaauuaugucugcugaauaauaaacuuuuuugaaauaauaaaucugguagaaaaaugagaucucaaaggcucuuuucagagccaccaaaaaaaaaaaaaaaaaaaaaaaaaaaaaaaaaaaaaaaaaaaaaaaaaaaaaaaaaaaaaaaaaaaaaaaaaaaaaaaaaaaaaaaaaaaaaaaaaaaaa

SEQ ID NO: 22629 - RNA, 636 nt, Artificial Sequence
  mRNA product Design b-4 (hSL-A100) comprising derived and/or modified sequence from LASV(Togo/2016/7082;Clade VI)__AMR44579__Z (opt5)
aggagagucccgcagucggcguccagcggcucugcuuguucgugugugugucguugcaggccuuauucaagcuuaccaugggcgccagacagaccaagcaaccccagaucgaggggagcccucgggcuucccuggugccggacgccucucaccucggaccccaguucugcaaaagcuguugguuugaaaacaagggccuggucgagugcaauaaccauuaccuuugucugaauugccucucccugcuucugucuguuagcaaccgcuguccuauuugcaaaaugccccucccuacaaagcugagaguguccucugcgcccagcgcuccuccggccgccacggcucagcccgggaccccucccccuuauucccccugaggacuaguaauaaggaaacuguaugaaugucugugggcaggaagugaagagauccuucuguaaagguuuuuggaauuaugucugcugaauaauaaacuuuuuugaaauaauaaaucugguagaaaaaugagaucucaaaggcucuuuucagagccaccaaaaaaaaaaaaaaaaaaaaaaaaaaaaaaaaaaaaaaaaaaaaaaaaaaaaaaaaaaaaaaaaaaaaaaaaaaaaaaaaaaaaaaaaaaaaaaaaaaaaa

SEQ ID NO: 22630 - RNA, 636 nt, Artificial Sequence
  mRNA product Design b-4 (hSL-A100) comprising derived and/or modified sequence from LASV(KAK-428;Clade n.d. (VII))__ANH09761__Z (opt5)
aggagagucccgcagucggcguccagcggcucugcuuguucgugugugugucguugcaggccuuauucaagcuuaccaugggcaacaaggggaccaaacccacacagaauagcgagccuuccagagccaaccuggugccggacgcuucuuaccucggaccccaauucugcaagagcuguugguuugaaaauaaaggccuggucgagugcaacaaucacuaucuuugucugaacugccucacgaugcugcuuuccguuuccaaucgguguccuaucugcaagaugccccugccuaccaaaauuaaggccagcgggucccccucugcgccuccgacagaagcuaacagcgccgugucucccccucccuacaccccuugaggacuaguaauaaggaaacuguaugaaugucugugggcaggaagugaagagauccuucuguaaagguuuuuggaauuaugucugcugaauaauaaacuuuuuugaaauaauaaaucugguagaaaaaugagaucucaaaggcucuuuucagagccaccaaaaaaaaaaaaaaaaaaaaaaaaaaaaaaaaaaaaaaaaaaaaaaaaaaaaaaaaaaaaaaaaaaaaaaaaaaaaaaaaaaaaaaaaaaaaaaaaaaaaa

SEQ ID NO: 22631 - RNA, 636 nt, Artificial Sequence
  mRNA product Design b-4 (hSL-A100) comprising derived and/or modified sequence from LASV(ISTH0009-NIG-2011;Clade II)__AIT17402__Z (opt5)
aggagagucccgcagucggcguccagcggcucugcuuguucgugugugugucguugcaggccuuauucaagcuuaccaugggcaacagacaggccaagagcaccaaaguggacgagcaccaacgggcucaucugguccccgaugccucccaccucgggccucaguucugcaagucuuguugguuugaaaaucgcggacugguugagugcaacaaucauuaccuuugucugaacugccucagccugcuucuguccgugucuagcagauguccgaucugcaaaaugccccucccuacaaagcugaaagcggcugcccagcccuccgccccuucuacggaaaccauucagaauacaacacccccuccguauacccccugaggacuaguaauaaggaaacuguaugaaugucugugggcaggaagugaagagauccuucuguaaagguuuuuggaauuaugucugcugaauaauaaacuuuuuugaaauaauaaaucugguagaaaaaugagaucucaaaggcucuuuucagagccaccaaaaaaaaaaaaaaaaaaaaaaaaaaaaaaaaaaaaaaaaaaaaaaaaaaaaaaaaaaaaaaaaaaaaaaaaaaaaaaaaaaaaaaaaaaaaaaaaaaaaa

SEQ ID NO: 22632 - RNA, 636 nt, Artificial Sequence
  mRNA product Design b-4 (hSL-A100) comprising derived and/or modified sequence from LASV(ISTH2010-NIG-2012;Clade II)__AIT17480__Z (opt5)
aggagagucccgcagucggcguccagcggcucugcuuguucgugugugugucguugcaggccuuauucaagcuuaccaugggcaacagacacgccaagagcaccaaaguggacgagcaucagcgggcucaccugguccccgaugccucccaucucgggccucaauucugcaagucuuguugguuugaaaaucgcggacugguugagugcaacaaucacuaccuuugucugaacugccucagccugcuucuguccgugucuagcagauguccgaucugcaaaaugccccucccuacaaagcugaaagcggcugcccagcccuccgccccuucuacggaagugauucagagcaccacacccccuccguauacccccugaggacuaguaauaaggaaacuguaugaaugucugugggcaggaagugaagagauccuucuguaaagguuuuuggaauuaugucugcugaauaauaaacuuuuuugaaauaauaaaucugguagaaaaaugagaucucaaaggcucuuuucagagccaccaaaaaaaaaaaaaaaaaaaaaaaaaaaaaaaaaaaaaaaaaaaaaaaaaaaaaaaaaaaaaaaaaaaaaaaaaaaaaaaaaaaaaaaaaaaaaaaaaaaaa

SEQ ID NO: 22633 - RNA, 636 nt, Artificial Sequence
  mRNA product Design b-4 (hSL-A100) comprising derived and/or modified sequence from LASV(Lassa virus/H.sapiens-wt/NGA/2016/ISTH_0017;Clade II)__AVO03713__Z (opt5)
aggagagucccgcagucggcguccagcggcucugcuuguucgugugugugucguugcaggccuuauucaagcuuaccaugggcaacagacaggccaagagcaccaaaguggacgagcaccaacgggcucaucugguccccgaugccucccaccucgggccucaguucugcaagucuuguugguuugaaaaucgcggacugguugagugcaacaaucauuaccuuugucugaacugccucagccugcuucuguccgugucuagcagauguccgaucugcaaaaugccccucccuacaaagcugaaagcggcuacgcagcccuccgccccuucuaccgaagugaaucagaacacaacacccccuccguauacccccugaggacuaguaauaaggaaacuguaugaaugucugugggcaggaagugaagagauccuucuguaaagguuuuuggaauuaugucugcugaauaauaaacuuuuuugaaauaauaaaucugguagaaaaaugagaucucaaaggcucuuuucagagccaccaaaaaaaaaaaaaaaaaaaaaaaaaaaaaaaaaaaaaaaaaaaaaaaaaaaaaaaaaaaaaaaaaaaaaaaaaaaaaaaaaaaaaaaaaaaaaaaaaaaaa

SEQ ID NO: 22634 - RNA, 636 nt, Artificial Sequence
  mRNA product Design b-4 (hSL-A100) comprising derived and/or modified sequence from LASV(Lassa virus/H.sapiens-wt/NGA/2018/ISTH_0959;Clade II)__AVV65084__Z (opt5)
aggagagucccgcagucggcguccagcggcucugcuuguucgugugugugucguugcaggccuuauucaagcuuaccaugggcaacaagcaggccaaaagcaccaagguggacgagcaccaaagagcucaucugguccccgaugccucccaccucgggccucaguucugcaaaucuuguugguuugaaaaucggggacugguugagugcaacaaucauuaccuuugucugaacugccucagccugcuucuguccgugucuagccgcuguccgaucugcaagaugccccucccuacaaaacugaaggcggcugcccagcccuccgccccuucuacggaagcuauucagagcaccacacccccuccguauacccccugaggacuaguaauaaggaaacuguaugaaugucugugggcaggaagugaagagauccuucuguaaagguuuuuggaauuaugucugcugaauaauaaacuuuuuugaaauaauaaaucugguagaaaaaugagaucucaaaggcucuuuucagagccaccaaaaaaaaaaaaaaaaaaaaaaaaaaaaaaaaaaaaaaaaaaaaaaaaaaaaaaaaaaaaaaaaaaaaaaaaaaaaaaaaaaaaaaaaaaaaaaaaaaaaa

SEQ ID NO: 22635 - RNA, 636 nt, Artificial Sequence
  mRNA product Design b-4 (hSL-A100) comprising derived and/or modified sequence from LASV(LASV003-NIG-2008;Clade II)__AIT17578__Z (opt5)
aggagagucccgcagucggcguccagcggcucugcuuguucgugugugugucguugcaggccuuauucaagcuuaccaugggcaacagacaggccaagagcaccaaaguggacgagcaccaacgggcucaucugguccccgaugccucccaccucgggccucaguucugcaagucuuguugguuugaaaauaaaggacugguugagugcaacaaucauuaccuuugucugaacugccucagccugcuucuguccgugucuagccgcuguccgaucugcaagaugccccucccuacaaaacugagagcggcugcccagcccuccgccccuucuacggaaagcgcucagaauaccgcucccccuccguaugcccccugaggacuaguaauaaggaaacuguaugaaugucugugggcaggaagugaagagauccuucuguaaagguuuuuggaauuaugucugcugaauaauaaacuuuuuugaaauaauaaaucugguagaaaaaugagaucucaaaggcucuuuucagagccaccaaaaaaaaaaaaaaaaaaaaaaaaaaaaaaaaaaaaaaaaaaaaaaaaaaaaaaaaaaaaaaaaaaaaaaaaaaaaaaaaaaaaaaaaaaaaaaaaaaaaa

SEQ ID NO: 22636 - RNA, 636 nt, Artificial Sequence
  mRNA product Design b-4 (hSL-A100) comprising derived and/or modified sequence from LASV(LASV035-NIG-2009;Clade II)__AIT17586__Z (opt5)
aggagagucccgcagucggcguccagcggcucugcuuguucgugugugugucguugcaggccuuauucaagcuuaccaugggcaacaagcaggccaaaagcaccaagguggacgagcaccaaagagcucaucugguccccgaugccucccaccucgggccucaguucugcaaaucuuguugguuugaaaaucggggacugguugagugcaacaaucauuaccuuugucugaacugccucagccugcuucuguccgugucuagccgcuguccgaucugcaagaugccccucccuacaagacugaaagcggcugcccagcccuccgccccuucuacggaagugacccagaauacaacacccccuccguauacccccugaggacuaguaauaaggaaacuguaugaaugucugugggcaggaagugaagagauccuucuguaaagguuuuuggaauuaugucugcugaauaauaaacuuuuuugaaauaauaaaucugguagaaaaaugagaucucaaaggcucuuuucagagccaccaaaaaaaaaaaaaaaaaaaaaaaaaaaaaaaaaaaaaaaaaaaaaaaaaaaaaaaaaaaaaaaaaaaaaaaaaaaaaaaaaaaaaaaaaaaaaaaaaaaaa

SEQ ID NO: 22637 - RNA, 636 nt, Artificial Sequence
  mRNA product Design b-4 (hSL-A100) comprising derived and/or modified sequence from LASV(LASV1000-NIG-2009;Clade II)__AIT17780__Z (opt5)
aggagagucccgcagucggcguccagcggcucugcuuguucgugugugugucguugcaggccuuauucaagcuuaccaugggcaacagacagaccaagagcacaaaaguggacgagcaccaacgggccuaccugguccccgaugcuucccuccuggggccucaguucugcaagucuuguugguuugaaaauaaaggacuuguugagugcaacaaucauuaucugugucucaacugccugagccuucugcucuccgugucuagccgcuguccgaucugcaagaugccccugccuacgagacugaaagccgcggcucagcccuccgccccucccaccgaagccauucagaauacaaccccuccgcccuacacaccuugaggacuaguaauaaggaaacuguaugaaugucugugggcaggaagugaagagauccuucuguaaagguuuuuggaauuaugucugcugaauaauaaacuuuuuugaaauaauaaaucugguagaaaaaugagaucucaaaggcucuuuucagagccaccaaaaaaaaaaaaaaaaaaaaaaaaaaaaaaaaaaaaaaaaaaaaaaaaaaaaaaaaaaaaaaaaaaaaaaaaaaaaaaaaaaaaaaaaaaaaaaaaaaaaa

SEQ ID NO: 22638 - RNA, 636 nt, Artificial Sequence
  mRNA product Design b-4 (hSL-A100) comprising derived and/or modified sequence from LASV(LASV221-NIG-2010;Clade II)__AIT17622__Z (opt5)
aggagagucccgcagucggcguccagcggcucugcuuguucgugugugugucguugcaggccuuauucaagcuuaccaugggcaacagacaggccaagagcaccaaaguggacgagcaccaacgggcucaucugguccccgaugccucccaccucgggccucaguucugcaagucuuguugguuugaaaaucgcggacugguugagugcaacaaucauuaccuuugucugaacugccucagccugcuucuguccgugucuagcagauguccgaucugcaaaaugccccucccuacaaagcugaaagcggcuacgcagcccuccgccccuucuaccgaagugacacagaauaccauucccccuccguauagccccugaggacuaguaauaaggaaacuguaugaaugucugugggcaggaagugaagagauccuucuguaaagguuuuuggaauuaugucugcugaauaauaaacuuuuuugaaauaauaaaucugguagaaaaaugagaucucaaaggcucuuuucagagccaccaaaaaaaaaaaaaaaaaaaaaaaaaaaaaaaaaaaaaaaaaaaaaaaaaaaaaaaaaaaaaaaaaaaaaaaaaaaaaaaaaaaaaaaaaaaaaaaaaaaaa

SEQ ID NO: 22639 - RNA, 636 nt, Artificial Sequence
  mRNA product Design b-4 (hSL-A100) comprising derived and/or modified sequence from LASV(LASV237-NIG-2010;Clade II)__AIT17636__Z (opt5)
aggagagucccgcagucggcguccagcggcucugcuuguucgugugugugucguugcaggccuuauucaagcuuaccaugggcaacagacaggccaagagcaccaaaguggacgagcaccaacgggcucaucugguccccgaugccucccaccucgggccucaguucugcaagucuuguugguuugaaaaucgcggacugguugagugcaacaaucauuaccuuugucugaacugccucagccugcuucuguccgugucuagcagauguccgaucugcaaaaugccccucccuacaaagcugaaagcggcugcccagcccuccgccccuucuauugaaacgauccagaauaccacacccccuccguauacccccugaggacuaguaauaaggaaacuguaugaaugucugugggcaggaagugaagagauccuucuguaaagguuuuuggaauuaugucugcugaauaauaaacuuuuuugaaauaauaaaucugguagaaaaaugagaucucaaaggcucuuuucagagccaccaaaaaaaaaaaaaaaaaaaaaaaaaaaaaaaaaaaaaaaaaaaaaaaaaaaaaaaaaaaaaaaaaaaaaaaaaaaaaaaaaaaaaaaaaaaaaaaaaaaaa

SEQ ID NO: 22640 - RNA, 636 nt, Artificial Sequence
  mRNA product Design b-4 (hSL-A100) comprising derived and/or modified sequence from LASV(LASV253-NIG-2011;Clade II)__AIT17668__Z (opt5)
aggagagucccgcagucggcguccagcggcucugcuuguucgugugugugucguugcaggccuuauucaagcuuaccaugggcaacagacaggccaagagcaccaaaguggacgagcaccaacgggcucaucugguccccgaugccucccaccucgggccucaguucugcaagucuuguugguuugaaaauaaaggacugguugagugcaacaaucauuaccuuugucugaacugccucagccugcuucuguccgugucuagccgcuguccgaucugcaagaugccccucccuacaaaacugaagacgaccgcgcagcccuccgcuccucccacagaagccgccaagaauaccgcuccuccgcccuaugccccuugaggacuaguaauaaggaaacuguaugaaugucugugggcaggaagugaagagauccuucuguaaagguuuuuggaauuaugucugcugaauaauaaacuuuuuugaaauaauaaaucugguagaaaaaugagaucucaaaggcucuuuucagagccaccaaaaaaaaaaaaaaaaaaaaaaaaaaaaaaaaaaaaaaaaaaaaaaaaaaaaaaaaaaaaaaaaaaaaaaaaaaaaaaaaaaaaaaaaaaaaaaaaaaaaa

SEQ ID NO: 22641 - RNA, 636 nt, Artificial Sequence
  mRNA product Design b-4 (hSL-A100) comprising derived and/or modified sequence from LASV(G1180-SLE-2010;Clade IV)__AIT17166__Z (opt5)
aggagagucccgcagucggcguccagcggcucugcuuguucgugugugugucguugcaggccuuauucaagcuuaccaugggcaacaagcaggccaaagcucccgaggccaaggacagcccuagagcgucccugaucccggaugcuacccaccucgggccccaauucugcaaaucuuguugguuugaaacaaagggacugguggagugcaauaaccauuaccuuugucugaauugccucacgcugcuucugagcgucuccaaccgguguccuauuugcaaaaugccccucccuaccaagcugcgccccucugccacaccuaccgccccgcccacagaagcugccgacagcaucggcccucccccuuauucccccugaggacuaguaauaaggaaacuguaugaaugucugugggcaggaagugaagagauccuucuguaaagguuuuuggaauuaugucugcugaauaauaaacuuuuuugaaauaauaaaucugguagaaaaaugagaucucaaaggcucuuuucagagccaccaaaaaaaaaaaaaaaaaaaaaaaaaaaaaaaaaaaaaaaaaaaaaaaaaaaaaaaaaaaaaaaaaaaaaaaaaaaaaaaaaaaaaaaaaaaaaaaaaaaaa

SEQ ID NO: 22642 - RNA, 636 nt, Artificial Sequence
  mRNA product Design b-4 (hSL-A100) comprising derived and/or modified sequence from LASV(G1442-SLE-2011;Clade IV)__AIT17178__Z (opt5)
aggagagucccgcagucggcguccagcggcucugcuuguucgugugugugucguugcaggccuuauucaagcuuaccaugggcaacaagcaggccaaagcuagcgaggccaaggacucccccagagcgucucugaucccugaugcuacccaccucgggccgcaauucugcaaaagcuguugguuugaaaauaagggacugguggagugcaacaaucauuaccuuugucugaacugccucucccugcuucugucugucagcucccggugucccauuugcaaaaugccucuccccacacgccugagaccuucuacggcccccaccgccccuccggcucgggccggcgacaauaucaagcccccucccuauagcccuugaggacuaguaauaaggaaacuguaugaaugucugugggcaggaagugaagagauccuucuguaaagguuuuuggaauuaugucugcugaauaauaaacuuuuuugaaauaauaaaucugguagaaaaaugagaucucaaaggcucuuuucagagccaccaaaaaaaaaaaaaaaaaaaaaaaaaaaaaaaaaaaaaaaaaaaaaaaaaaaaaaaaaaaaaaaaaaaaaaaaaaaaaaaaaaaaaaaaaaaaaaaaaaaaa

SEQ ID NO: 22643 - RNA, 636 nt, Artificial Sequence
  mRNA product Design b-4 (hSL-A100) comprising derived and/or modified sequence from LASV(G502-SLE-2009;Clade IV)__AIT17124__Z (opt5)
aggagagucccgcagucggcguccagcggcucugcuuguucgugugugugucguugcaggccuuauucaagcuuaccaugggcaacaaacaggugaagacccccgaggccaaggacagcccuagagcuucccugaucccggaugccacacaccucgggccccaauucugcaaaucuuguugguuugaaaauaagggacuggucgagugcaacaaucauuaccuuugucugaacugccucacgcugcuucugagcguuggcaaucgguguccuauuugcaaaaugccccucccuaccaagcugcgccccuccgugacaccuaccgcgccgcccacaagagcugccgacucuaucgggccucccccuuauagccccugaggacuaguaauaaggaaacuguaugaaugucugugggcaggaagugaagagauccuucuguaaagguuuuuggaauuaugucugcugaauaauaaacuuuuuugaaauaauaaaucugguagaaaaaugagaucucaaaggcucuuuucagagccaccaaaaaaaaaaaaaaaaaaaaaaaaaaaaaaaaaaaaaaaaaaaaaaaaaaaaaaaaaaaaaaaaaaaaaaaaaaaaaaaaaaaaaaaaaaaaaaaaaaaaa

SEQ ID NO: 22644 - RNA, 636 nt, Artificial Sequence
  mRNA product Design b-4 (hSL-A100) comprising derived and/or modified sequence from LASV(G733-SLE-2010;Clade IV)__AIT17152__Z (opt5)
aggagagucccgcagucggcguccagcggcucugcuuguucgugugugugucguugcaggccuuauucaagcuuaccaugggcaacaagcaggccaaaacccccgagacaaaggacagcccuagagcuucccugaucccggaugccacgcaccucgggccccaauucugcaaaucuuguugguuugaaaauaagggacugguggagugcaacaaucauuaccuuugucugaacugccucacccugcuucugagcgucuccaaucgguguccuauuugcaaaaugccccucccuacaaagcugcgccccucuaccgcgccuacagcuccgcccgccggcgccgcugacaacaccagaccucccccuuauagccccugaggacuaguaauaaggaaacuguaugaaugucugugggcaggaagugaagagauccuucuguaaagguuuuuggaauuaugucugcugaauaauaaacuuuuuugaaauaauaaaucugguagaaaaaugagaucucaaaggcucuuuucagagccaccaaaaaaaaaaaaaaaaaaaaaaaaaaaaaaaaaaaaaaaaaaaaaaaaaaaaaaaaaaaaaaaaaaaaaaaaaaaaaaaaaaaaaaaaaaaaaaaaaaaaa

SEQ ID NO: 22645 - RNA, 648 nt, Artificial Sequence
  mRNA product Design b-4 (hSL-A100) comprising derived and/or modified sequence from MOPV/LASV reassortant(IGS-1;Clade IV)__AFY05533__Z (opt5)
aggagagucccgcagucggcguccagcggcucugcuuguucgugugugugucguugcaggccuuauucaagcuuaccaugggcaagacccagagcaaagggcaacccuccacaaaccugcucaaggagacggaaccuagacacccggugauccccgacgcccggggaaccggcccugaguucugcaaaucuuguugguuugaacgcagagggcugguccggugcaaugaucauuaccuuugucugaacugccucacacugcuucacaccguuagcgaccgcugucccaucugcaagcauaaacugccuuucagacucgagcugcagacacagcccaccgcuccuccggaaauucccccuucccagaaucccccucccuauucuccgugaggacuaguaauaaggaaacuguaugaaugucugugggcaggaagugaagagauccuucuguaaagguuuuuggaauuaugucugcugaauaauaaacuuuuuugaaauaauaaaucugguagaaaaaugagaucucaaaggcucuuuucagagccaccaaaaaaaaaaaaaaaaaaaaaaaaaaaaaaaaaaaaaaaaaaaaaaaaaaaaaaaaaaaaaaaaaaaaaaaaaaaaaaaaaaaaaaaaaaaaaaaaaaaaa

SEQ ID NO: 22646 - RNA, 636 nt, Artificial Sequence
  mRNA product Design b-4 (hSL-A100) comprising derived and/or modified sequence from LASV(LM776-SLE-2012;Clade IV)__AIT17824__Z (opt5)
aggagagucccgcagucggcguccagcggcucugcuuguucgugugugugucguugcaggccuuauucaagcuuaccaugggcaacaagcaggccaaagcuagcgaggaaaagaacucccccagagccucucugaucccugacgcgacccaccucgggccgcaauucugcaaaagcuguugguuugagaauaagggacugguggaaugcaauaaccauuaccuuugucugaauugccucacacugcuucuguccgucucuaaccggugucccauuugcaaaaugccucuccccacgaagcugcgcccuagcaccacacccaccgcuccuccgacaggcgccgccgauuccaucagacccccucccuauucuccuugaggacuaguaauaaggaaacuguaugaaugucugugggcaggaagugaagagauccuucuguaaagguuuuuggaauuaugucugcugaauaauaaacuuuuuugaaauaauaaaucugguagaaaaaugagaucucaaaggcucuuuucagagccaccaaaaaaaaaaaaaaaaaaaaaaaaaaaaaaaaaaaaaaaaaaaaaaaaaaaaaaaaaaaaaaaaaaaaaaaaaaaaaaaaaaaaaaaaaaaaaaaaaaaaa

SEQ ID NO: 22647 - RNA, 636 nt, Artificial Sequence
  mRNA product Design b-4 (hSL-A100) comprising derived and/or modified sequence from LASV(Mad39;Clade IV)__ANH09743__Z (opt5)
aggagagucccgcagucggcguccagcggcucugcuuguucgugugugugucguugcaggccuuauucaagcuuaccaugggcaacaagcaggccaaagcuagcgagguggaagacgggcccagagccucccugaucccugaugcgacccaccucggaccgcaauucugcaagucuuguugguuugagaauaaaagccuggucgaaugcaacaaucauuaccuuugucugaacugccucacacugcuucuguccguuucuaaucggugucccauuugcaagaugccucuccccacgcgccugaaaccuagcguggugcccaccgcuccuccgacaagagccggcgacgggacccggcccccucccuauuccccuugaggacuaguaauaaggaaacuguaugaaugucugugggcaggaagugaagagauccuucuguaaagguuuuuggaauuaugucugcugaauaauaaacuuuuuugaaauaauaaaucugguagaaaaaugagaucucaaaggcucuuuucagagccaccaaaaaaaaaaaaaaaaaaaaaaaaaaaaaaaaaaaaaaaaaaaaaaaaaaaaaaaaaaaaaaaaaaaaaaaaaaaaaaaaaaaaaaaaaaaaaaaaaaaaa

SEQ ID NO: 22648 - RNA, 636 nt, Artificial Sequence
  mRNA product Design b-4 (hSL-A100) comprising derived and/or modified sequence from LASV(Z0947-SLE-2011;Clade IV)__AIT17838__Z (opt5)
aggagagucccgcagucggcguccagcggcucugcuuguucgugugugugucguugcaggccuuauucaagcuuaccaugggcaacaagcaggccaaagugcccgagagcaaggacuccccuagagcuucucugaucccggaugccacccaccucgggccccaauucugcaaaagcuguugguuugaaaauaagggacuggucgagugcaacaaucauuaccuuugucugaacugccucacacugcuucuguccguuucuaaucgguguccuauuugcaaaaugccccucccuacgaagcugaagcccagcgcggcuccuaccgccccgcccacaggcgccgcugacuccauccgcccucccccuuauucucccugaggacuaguaauaaggaaacuguaugaaugucugugggcaggaagugaagagauccuucuguaaagguuuuuggaauuaugucugcugaauaauaaacuuuuuugaaauaauaaaucugguagaaaaaugagaucucaaaggcucuuuucagagccaccaaaaaaaaaaaaaaaaaaaaaaaaaaaaaaaaaaaaaaaaaaaaaaaaaaaaaaaaaaaaaaaaaaaaaaaaaaaaaaaaaaaaaaaaaaaaaaaaaaaaa

SEQ ID NO: 22649 - RNA, 612 nt, Artificial Sequence
  mRNA product Design b-4 (A100) comprising derived and/or modified sequence from LASV(Josiah;Clade IV)__ADY11072/NP_694871__Z (opt1)
aggagagucccgcagucggcguccagcggcucugcuuguucgugugugugucguugcaggccuuauucaagcuuaccaugggcaacaagcaggccaaggcccccgagagcaaggacuccccgcgcgcgagccugauccccgacgccacccaccucgggccccaguucugcaaguccugcugguucgagaacaagggccugguggagugcaacaaccacuaccugugccucaacugccugacccugcuccugagcgucuccaaccggugccccaucugcaagaugccgcugcccacgaagcuccgccccagcgccgcccccaccgccccgcccaccggggcggccgacuccauccggcccccgcccuacagccccugaggacuaguaauaaggaaacuguaugaaugucugugggcaggaagugaagagauccuucuguaaagguuuuuggaauuaugucugcugaauaauaaacuuuuuugaaauaauaaaucugguagaaaaaugagaucuaaaaaaaaaaaaaaaaaaaaaaaaaaaaaaaaaaaaaaaaaaaaaaaaaaaaaaaaaaaaaaaaaaaaaaaaaaaaaaaaaaaaaaaaaaaaaaaaaaaa

SEQ ID NO: 22650 - RNA, 615 nt, Artificial Sequence
  mRNA product Design b-4 (A100) comprising derived and/or modified sequence from LASV(Pinneo-NIG-1969;Clade I)__AIT17834__Z (opt1)
aggagagucccgcagucggcguccagcggcucugcuuguucgugugugugucguugcaggccuuauucaagcuuaccaugggcaacaagcagacccgcagcccgcccaagcccgagcacccccggcccacccugcuccccgacgccucccaccuggggccccaguucugcaagagcugcugguucgagaacaagggccugguggagugcaacaaccacuaccucugccugaacugccugacgcuccugcuguccgucagcgaccgcugccccaucugcaagaugccccuccccaccaagcuggccgugcggacccagcccuccgcgccgccccugaaccaggggaacacccagagcagcccgccgcccuacucccccugaggacuaguaauaaggaaacuguaugaaugucugugggcaggaagugaagagauccuucuguaaagguuuuuggaauuaugucugcugaauaauaaacuuuuuugaaauaauaaaucugguagaaaaaugagaucuaaaaaaaaaaaaaaaaaaaaaaaaaaaaaaaaaaaaaaaaaaaaaaaaaaaaaaaaaaaaaaaaaaaaaaaaaaaaaaaaaaaaaaaaaaaaaaaaaaaa

SEQ ID NO: 22651 - RNA, 612 nt, Artificial Sequence
  mRNA product Design b-4 (A100) comprising derived and/or modified sequence from LASV(Nig08-04;Clade II)__ADU56612__Z (opt1)
aggagagucccgcagucggcguccagcggcucugcuuguucgugugugugucguugcaggccuuauucaagcuuaccaugggcaaccgccagacccggcccaccgaggccacggagcagagccgcgcccaccuggugccggacgccucccaccucgggccccaguucugcaagagcugcugguucgagaaccggggccuggucgagugcaacaaccacuaccugugccucaacugccugucccugcuccugagcguguccagccgcugccccaucugcaagaugccccugccgacccggcucaaggccuccgcccagcccagcgccccgcccaccgaggcgccccagaacaccacgcccccgcccuacacccccugaggacuaguaauaaggaaacuguaugaaugucugugggcaggaagugaagagauccuucuguaaagguuuuuggaauuaugucugcugaauaauaaacuuuuuugaaauaauaaaucugguagaaaaaugagaucuaaaaaaaaaaaaaaaaaaaaaaaaaaaaaaaaaaaaaaaaaaaaaaaaaaaaaaaaaaaaaaaaaaaaaaaaaaaaaaaaaaaaaaaaaaaaaaaaaaaa

SEQ ID NO: 22652 - RNA, 612 nt, Artificial Sequence
  mRNA product Design b-4 (A100) comprising derived and/or modified sequence from LASV(Nig08-A19;Clade III)__ADU56620__Z (opt1)
aggagagucccgcagucggcguccagcggcucugcuuguucgugugugugucguugcaggccuuauucaagcuuaccaugggcgggaagcacaccaagccccagcgcgagagcaacuccccgcgggccagccugauccccgacgccacccaccucggcccccaguucugcaaguccugcugguucgagaacaaggggcugguggagugcaacaaccacuaccugugccucaacugccugacgcugcuccugagcguguccaaccgcugccccaucugcaagaugccccugcccacccggcuccgcgccagcaccaaccccaccgcgccccagguggagcaggucggcccgacgaacccgccgcccuacucccccugaggacuaguaauaaggaaacuguaugaaugucugugggcaggaagugaagagauccuucuguaaagguuuuuggaauuaugucugcugaauaauaaacuuuuuugaaauaauaaaucugguagaaaaaugagaucuaaaaaaaaaaaaaaaaaaaaaaaaaaaaaaaaaaaaaaaaaaaaaaaaaaaaaaaaaaaaaaaaaaaaaaaaaaaaaaaaaaaaaaaaaaaaaaaaaaaa

SEQ ID NO: 22653 - RNA, 612 nt, Artificial Sequence
  mRNA product Design b-4 (A100) comprising derived and/or modified sequence from LASV(AV;Clade V)__CCA30312__Z (opt1)
aggagagucccgcagucggcguccagcggcucugcuuguucgugugugugucguugcaggccuuauucaagcuuaccaugggcaaccgccaggccaagaaccccgagguggagaacagcccccgggccucccugauccccgacgcgacccaccucgggccccaguucugcaagagcugcugguucgagaacaagggccuggucgagugcaacaaccacuaccugugccucaacugccugucccugcuccugagcguguccaaccgcugccccaucugcaagaugccgcugcccacccggcuccgccccacgaccacccccaccgccccgcagaucaucaaggagaacacgaccaacccgccgcccuacacccccugaggacuaguaauaaggaaacuguaugaaugucugugggcaggaagugaagagauccuucuguaaagguuuuuggaauuaugucugcugaauaauaaacuuuuuugaaauaauaaaucugguagaaaaaugagaucuaaaaaaaaaaaaaaaaaaaaaaaaaaaaaaaaaaaaaaaaaaaaaaaaaaaaaaaaaaaaaaaaaaaaaaaaaaaaaaaaaaaaaaaaaaaaaaaaaaaa

SEQ ID NO: 22654 - RNA, 612 nt, Artificial Sequence
  mRNA product Design b-4 (A100) comprising derived and/or modified sequence from LASV(Togo/2016/7082;Clade VI)__AMR44579__Z (opt1)
aggagagucccgcagucggcguccagcggcucugcuuguucgugugugugucguugcaggccuuauucaagcuuaccaugggcgcccgccagaccaagcagccccagaucgaggggagcccccgggccucccuggugcccgacgcgagccaccucggcccccaguucugcaaguccugcugguucgagaacaaggggcuggucgagugcaacaaccacuaccugugccucaacugccugagccugcuccuguccgugagcaaccgcugccccaucugcaagaugccgcugcccaccaagcuccggguguccagcgcccccuccgcgcccccggccgccacggcccagcccggcaccccgccgcccuacagccccugaggacuaguaauaaggaaacuguaugaaugucugugggcaggaagugaagagauccuucuguaaagguuuuuggaauuaugucugcugaauaauaaacuuuuuugaaauaauaaaucugguagaaaaaugagaucuaaaaaaaaaaaaaaaaaaaaaaaaaaaaaaaaaaaaaaaaaaaaaaaaaaaaaaaaaaaaaaaaaaaaaaaaaaaaaaaaaaaaaaaaaaaaaaaaaaaa

SEQ ID NO: 22655 - RNA, 612 nt, Artificial Sequence
  mRNA product Design b-4 (A100) comprising derived and/or modified sequence from LASV(KAK-428;Clade n.d. (VII))__ANH09761__Z (opt1)
aggagagucccgcagucggcguccagcggcucugcuuguucgugugugugucguugcaggccuuauucaagcuuaccaugggcaacaaggggaccaagcccacccagaacagcgagcccucccgcgccaaccuggugcccgacgccagcuaccucggcccccaguucugcaaguccugcugguucgagaacaaggggcuggucgagugcaacaaccacuaccugugccucaacugccugacgaugcugcucagcguguccaaccggugccccaucugcaagaugccgcugcccaccaagaucaaggccagcggcucccccagcgcgcccccgaccgaggccaacuccgccgugagcccgccgcccuacacccccugaggacuaguaauaaggaaacuguaugaaugucugugggcaggaagugaagagauccuucuguaaagguuuuuggaauuaugucugcugaauaauaaacuuuuuugaaauaauaaaucugguagaaaaaugagaucuaaaaaaaaaaaaaaaaaaaaaaaaaaaaaaaaaaaaaaaaaaaaaaaaaaaaaaaaaaaaaaaaaaaaaaaaaaaaaaaaaaaaaaaaaaaaaaaaaaaa

SEQ ID NO: 22656 - RNA, 612 nt, Artificial Sequence
  mRNA product Design b-4 (A100) comprising derived and/or modified sequence from LASV(ISTH0009-NIG-2011;Clade II)__AIT17402__Z (opt1)
aggagagucccgcagucggcguccagcggcucugcuuguucgugugugugucguugcaggccuuauucaagcuuaccaugggcaaccgccaggccaagagcaccaagguggacgagcaccagcgggcccaccugguccccgacgcgucccaccucgggccccaguucugcaagagcugcugguucgagaaccgcggccugguggagugcaacaaccacuaccugugccucaacugccugucccugcuccugagcguguccagccggugccccaucugcaagaugccccugcccaccaagcucaaggccgccgcccagccguccgcccccagcacggagaccauccagaacaccaccccgccgcccuacacgcccugaggacuaguaauaaggaaacuguaugaaugucugugggcaggaagugaagagauccuucuguaaagguuuuuggaauuaugucugcugaauaauaaacuuuuuugaaauaauaaaucugguagaaaaaugagaucuaaaaaaaaaaaaaaaaaaaaaaaaaaaaaaaaaaaaaaaaaaaaaaaaaaaaaaaaaaaaaaaaaaaaaaaaaaaaaaaaaaaaaaaaaaaaaaaaaaaa

SEQ ID NO: 22657 - RNA, 612 nt, Artificial Sequence
  mRNA product Design b-4 (A100) comprising derived and/or modified sequence from LASV(ISTH2010-NIG-2012;Clade II)__AIT17480__Z (opt1)
aggagagucccgcagucggcguccagcggcucugcuuguucgugugugugucguugcaggccuuauucaagcuuaccaugggcaaccgccacgccaagagcaccaagguggacgagcaccagcgggcccaccugguccccgacgcgucccaccucgggccccaguucugcaagagcugcugguucgagaaccgcggccugguggagugcaacaaccacuaccugugccucaacugccugucccugcuccugagcguguccagccggugccccaucugcaagaugccccugcccaccaagcucaaggccgccgcccagccguccgcccccagcacggaggucauccaguccaccaccccgccgcccuacacccccugaggacuaguaauaaggaaacuguaugaaugucugugggcaggaagugaagagauccuucuguaaagguuuuuggaauuaugucugcugaauaauaaacuuuuuugaaauaauaaaucugguagaaaaaugagaucuaaaaaaaaaaaaaaaaaaaaaaaaaaaaaaaaaaaaaaaaaaaaaaaaaaaaaaaaaaaaaaaaaaaaaaaaaaaaaaaaaaaaaaaaaaaaaaaaaaaa

SEQ ID NO: 22658 - RNA, 612 nt, Artificial Sequence
  mRNA product Design b-4 (A100) comprising derived and/or modified sequence from LASV(Lassa virus/H.sapiens-wt/NGA/2016/ISTH_0017;Clade II)__AVO03713__Z (opt1)
aggagagucccgcagucggcguccagcggcucugcuuguucgugugugugucguugcaggccuuauucaagcuuaccaugggcaaccgccaggccaagagcaccaagguggacgagcaccagcgggcccaccugguccccgacgcgucccaccucgggccccaguucugcaagagcugcugguucgagaaccgcggccugguggagugcaacaaccacuaccugugccucaacugccugucccugcuccugagcguguccagccggugccccaucugcaagaugccccugcccaccaagcucaaggccgccacgcagccguccgcccccagcaccgaggucaaccagaacaccaccccgccgcccuacacgcccugaggacuaguaauaaggaaacuguaugaaugucugugggcaggaagugaagagauccuucuguaaagguuuuuggaauuaugucugcugaauaauaaacuuuuuugaaauaauaaaucugguagaaaaaugagaucuaaaaaaaaaaaaaaaaaaaaaaaaaaaaaaaaaaaaaaaaaaaaaaaaaaaaaaaaaaaaaaaaaaaaaaaaaaaaaaaaaaaaaaaaaaaaaaaaaaaa

SEQ ID NO: 22659 - RNA, 612 nt, Artificial Sequence
  mRNA product Design b-4 (A100) comprising derived and/or modified sequence from LASV(Lassa virus/H.sapiens-wt/NGA/2018/ISTH_0959;Clade II)__AVV65084__Z (opt1)
aggagagucccgcagucggcguccagcggcucugcuuguucgugugugugucguugcaggccuuauucaagcuuaccaugggcaacaagcaggccaagagcaccaagguggacgagcaccagcgcgcccaccugguccccgacgcgucccaccucgggccccaguucugcaagagcugcugguucgagaaccggggccugguggagugcaacaaccacuaccugugccucaacugccugucccugcuccugagcguguccagccgcugccccaucugcaagaugccccugcccaccaagcucaaggccgccgcccagccguccgcccccagcacggaggcgauccaguccaccaccccgccgcccuacacccccugaggacuaguaauaaggaaacuguaugaaugucugugggcaggaagugaagagauccuucuguaaagguuuuuggaauuaugucugcugaauaauaaacuuuuuugaaauaauaaaucugguagaaaaaugagaucuaaaaaaaaaaaaaaaaaaaaaaaaaaaaaaaaaaaaaaaaaaaaaaaaaaaaaaaaaaaaaaaaaaaaaaaaaaaaaaaaaaaaaaaaaaaaaaaaaaaa

SEQ ID NO: 22660 - RNA, 612 nt, Artificial Sequence
  mRNA product Design b-4 (A100) comprising derived and/or modified sequence from LASV(LASV003-NIG-2008;Clade II)__AIT17578__Z (opt1)
aggagagucccgcagucggcguccagcggcucugcuuguucgugugugugucguugcaggccuuauucaagcuuaccaugggcaaccgccaggccaagagcaccaagguggacgagcaccagcgggcccaccugguccccgacgcgucccaccucgggccccaguucugcaagagcugcugguucgagaacaagggccugguggagugcaacaaccacuaccugugccucaacugccugucccugcuccugagcguguccagccgcugccccaucugcaagaugccccugcccaccaagcuccgggccgccgcccagccguccgcccccagcacggaguccgcgcagaacaccgccccgccgcccuacgcccccugaggacuaguaauaaggaaacuguaugaaugucugugggcaggaagugaagagauccuucuguaaagguuuuuggaauuaugucugcugaauaauaaacuuuuuugaaauaauaaaucugguagaaaaaugagaucuaaaaaaaaaaaaaaaaaaaaaaaaaaaaaaaaaaaaaaaaaaaaaaaaaaaaaaaaaaaaaaaaaaaaaaaaaaaaaaaaaaaaaaaaaaaaaaaaaaaa

SEQ ID NO: 22661 - RNA, 612 nt, Artificial Sequence
  mRNA product Design b-4 (A100) comprising derived and/or modified sequence from LASV(LASV035-NIG-2009;Clade II)__AIT17586__Z (opt1)
aggagagucccgcagucggcguccagcggcucugcuuguucgugugugugucguugcaggccuuauucaagcuuaccaugggcaacaagcaggccaagagcaccaagguggacgagcaccagcgcgcccaccugguccccgacgcgucccaccucgggccccaguucugcaagagcugcugguucgagaaccggggccugguggagugcaacaaccacuaccugugccucaacugccugucccugcuccugagcguguccagccgcugccccaucugcaagaugccccugcccacccggcucaaggccgccgcccagccguccgcccccagcacggaggucacccagaacaccaccccgccgcccuacacgcccugaggacuaguaauaaggaaacuguaugaaugucugugggcaggaagugaagagauccuucuguaaagguuuuuggaauuaugucugcugaauaauaaacuuuuuugaaauaauaaaucugguagaaaaaugagaucuaaaaaaaaaaaaaaaaaaaaaaaaaaaaaaaaaaaaaaaaaaaaaaaaaaaaaaaaaaaaaaaaaaaaaaaaaaaaaaaaaaaaaaaaaaaaaaaaaaaa

SEQ ID NO: 22662 - RNA, 612 nt, Artificial Sequence
  mRNA product Design b-4 (A100) comprising derived and/or modified sequence from LASV(LASV1000-NIG-2009;Clade II)__AIT17780__Z (opt1)
aggagagucccgcagucggcguccagcggcucugcuuguucgugugugugucguugcaggccuuauucaagcuuaccaugggcaaccgccagaccaagagcaccaagguggacgagcaccagcgggccuaccugguccccgacgccucccuccuggggccccaguucugcaagagcugcugguucgagaacaagggccugguggagugcaacaaccacuaccucugccugaacugccugucccuccugcugagcguguccagccgcugccccaucugcaagaugccccuccccacgcggcugaaggcggccgcccagcccuccgccccgcccaccgaggccauccagaacaccacgccgccgcccuacacccccugaggacuaguaauaaggaaacuguaugaaugucugugggcaggaagugaagagauccuucuguaaagguuuuuggaauuaugucugcugaauaauaaacuuuuuugaaauaauaaaucugguagaaaaaugagaucuaaaaaaaaaaaaaaaaaaaaaaaaaaaaaaaaaaaaaaaaaaaaaaaaaaaaaaaaaaaaaaaaaaaaaaaaaaaaaaaaaaaaaaaaaaaaaaaaaaaa

SEQ ID NO: 22663 - RNA, 612 nt, Artificial Sequence
  mRNA product Design b-4 (A100) comprising derived and/or modified sequence from LASV(LASV221-NIG-2010;Clade II)__AIT17622__Z (opt1)
aggagagucccgcagucggcguccagcggcucugcuuguucgugugugugucguugcaggccuuauucaagcuuaccaugggcaaccgccaggccaagagcaccaagguggacgagcaccagcgggcccaccugguccccgacgcgucccaccucgggccccaguucugcaagagcugcugguucgagaaccgcggccugguggagugcaacaaccacuaccugugccucaacugccugucccugcuccugagcguguccagccggugccccaucugcaagaugccccugcccaccaagcucaaggccgccacgcagccguccgcccccagcaccgaggucacccagaacaccaucccgccgcccuacucccccugaggacuaguaauaaggaaacuguaugaaugucugugggcaggaagugaagagauccuucuguaaagguuuuuggaauuaugucugcugaauaauaaacuuuuuugaaauaauaaaucugguagaaaaaugagaucuaaaaaaaaaaaaaaaaaaaaaaaaaaaaaaaaaaaaaaaaaaaaaaaaaaaaaaaaaaaaaaaaaaaaaaaaaaaaaaaaaaaaaaaaaaaaaaaaaaaa

SEQ ID NO: 22664 - RNA, 612 nt, Artificial Sequence
  mRNA product Design b-4 (A100) comprising derived and/or modified sequence from LASV(LASV237-NIG-2010;Clade II)__AIT17636__Z (opt1)
aggagagucccgcagucggcguccagcggcucugcuuguucgugugugugucguugcaggccuuauucaagcuuaccaugggcaaccgccaggccaagagcaccaagguggacgagcaccagcgggcccaccugguccccgacgcgucccaccucgggccccaguucugcaagagcugcugguucgagaaccgcggccugguggagugcaacaaccacuaccugugccucaacugccugucccugcuccugagcguguccagccggugccccaucugcaagaugccccugcccaccaagcucaaggccgccgcccagccguccgcccccagcaucgagacgauccagaacaccaccccgccgcccuacacccccugaggacuaguaauaaggaaacuguaugaaugucugugggcaggaagugaagagauccuucuguaaagguuuuuggaauuaugucugcugaauaauaaacuuuuuugaaauaauaaaucugguagaaaaaugagaucuaaaaaaaaaaaaaaaaaaaaaaaaaaaaaaaaaaaaaaaaaaaaaaaaaaaaaaaaaaaaaaaaaaaaaaaaaaaaaaaaaaaaaaaaaaaaaaaaaaaa

SEQ ID NO: 22665 - RNA, 612 nt, Artificial Sequence
  mRNA product Design b-4 (A100) comprising derived and/or modified sequence from LASV(LASV253-NIG-2011;Clade II)__AIT17668__Z (opt1)
aggagagucccgcagucggcguccagcggcucugcuuguucgugugugugucguugcaggccuuauucaagcuuaccaugggcaaccgccaggccaagagcaccaagguggacgagcaccagcgggcccaccugguccccgacgcgucccaccucgggccccaguucugcaagagcugcugguucgagaacaagggccugguggagugcaacaaccacuaccugugccucaacugccugucccugcuccugagcguguccagccgcugccccaucugcaagaugccccugcccaccaagcucaagacgaccgcccagccguccgccccgcccaccgaggccgccaagaacaccgcgcccccgcccuacgcccccugaggacuaguaauaaggaaacuguaugaaugucugugggcaggaagugaagagauccuucuguaaagguuuuuggaauuaugucugcugaauaauaaacuuuuuugaaauaauaaaucugguagaaaaaugagaucuaaaaaaaaaaaaaaaaaaaaaaaaaaaaaaaaaaaaaaaaaaaaaaaaaaaaaaaaaaaaaaaaaaaaaaaaaaaaaaaaaaaaaaaaaaaaaaaaaaaa

SEQ ID NO: 22666 - RNA, 612 nt, Artificial Sequence
  mRNA product Design b-4 (A100) comprising derived and/or modified sequence from LASV(G1180-SLE-2010;Clade IV)__AIT17166__Z (opt1)
aggagagucccgcagucggcguccagcggcucugcuuguucgugugugugucguugcaggccuuauucaagcuuaccaugggcaacaagcaggccaaggcccccgaggcgaaggacagcccgcgcgccucccugauccccgacgccacccaccucgggccccaguucugcaagagcugcugguucgagaccaagggccugguggagugcaacaaccacuaccugugccucaacugccugacgcugcuccuguccgucagcaaccggugccccaucugcaagaugccgcugcccaccaagcuccgccccuccgccacccccaccgccccgcccacggaggcggccgacagcaucgggcccccgcccuacucccccugaggacuaguaauaaggaaacuguaugaaugucugugggcaggaagugaagagauccuucuguaaagguuuuuggaauuaugucugcugaauaauaaacuuuuuugaaauaauaaaucugguagaaaaaugagaucuaaaaaaaaaaaaaaaaaaaaaaaaaaaaaaaaaaaaaaaaaaaaaaaaaaaaaaaaaaaaaaaaaaaaaaaaaaaaaaaaaaaaaaaaaaaaaaaaaaaa

SEQ ID NO: 22667 - RNA, 612 nt, Artificial Sequence
  mRNA product Design b-4 (A100) comprising derived and/or modified sequence from LASV(G1442-SLE-2011;Clade IV)__AIT17178__Z (opt1)
aggagagucccgcagucggcguccagcggcucugcuuguucgugugugugucguugcaggccuuauucaagcuuaccaugggcaacaagcaggccaaggccagcgaggcgaaggacagcccccgcgccucccugaucccggacgccacccaccucgggccccaguucugcaaguccugcugguucgagaacaagggccugguggagugcaacaaccacuaccugugccucaacugccugagccugcuccuguccgucagcucccggugccccaucugcaagaugccccugccgacccgccuccggcccagcacggcccccaccgcgcccccggcccgcgccggggacaacaucaagcccccgcccuacucccccugaggacuaguaauaaggaaacuguaugaaugucugugggcaggaagugaagagauccuucuguaaagguuuuuggaauuaugucugcugaauaauaaacuuuuuugaaauaauaaaucugguagaaaaaugagaucuaaaaaaaaaaaaaaaaaaaaaaaaaaaaaaaaaaaaaaaaaaaaaaaaaaaaaaaaaaaaaaaaaaaaaaaaaaaaaaaaaaaaaaaaaaaaaaaaaaaa

SEQ ID NO: 22668 - RNA, 612 nt, Artificial Sequence
  mRNA product Design b-4 (A100) comprising derived and/or modified sequence from LASV(G502-SLE-2009;Clade IV)__AIT17124__Z (opt1)
aggagagucccgcagucggcguccagcggcucugcuuguucgugugugugucguugcaggccuuauucaagcuuaccaugggcaacaagcaggucaagacccccgaggccaaggacagcccccgcgccucccugauccccgacgcgacccaccucgggccccaguucugcaagagcugcugguucgagaacaagggccugguggagugcaacaaccacuaccugugccucaacugccugacgcugcuccuguccguggggaaccggugccccaucugcaagaugccgcugcccaccaagcuccgccccagcgugacccccaccgccccgcccacgcgggccgccgacuccaucggcccgccgcccuacagccccugaggacuaguaauaaggaaacuguaugaaugucugugggcaggaagugaagagauccuucuguaaagguuuuuggaauuaugucugcugaauaauaaacuuuuuugaaauaauaaaucugguagaaaaaugagaucuaaaaaaaaaaaaaaaaaaaaaaaaaaaaaaaaaaaaaaaaaaaaaaaaaaaaaaaaaaaaaaaaaaaaaaaaaaaaaaaaaaaaaaaaaaaaaaaaaaaa

SEQ ID NO: 22669 - RNA, 612 nt, Artificial Sequence
  mRNA product Design b-4 (A100) comprising derived and/or modified sequence from LASV(G733-SLE-2010;Clade IV)__AIT17152__Z (opt1)
aggagagucccgcagucggcguccagcggcucugcuuguucgugugugugucguugcaggccuuauucaagcuuaccaugggcaacaagcaggccaagacccccgagaccaaggacagcccgcgcgccucccugauccccgacgcgacgcaccucgggccccaguucugcaagagcugcugguucgagaacaagggccugguggagugcaacaaccacuaccugugccucaacugccugacccugcuccuguccgucagcaaccggugccccaucugcaagaugccgcugcccaccaagcuccgccccuccaccgcccccacggccccgcccgccggggccgcggacaacacccggcccccgcccuacagccccugaggacuaguaauaaggaaacuguaugaaugucugugggcaggaagugaagagauccuucuguaaagguuuuuggaauuaugucugcugaauaauaaacuuuuuugaaauaauaaaucugguagaaaaaugagaucuaaaaaaaaaaaaaaaaaaaaaaaaaaaaaaaaaaaaaaaaaaaaaaaaaaaaaaaaaaaaaaaaaaaaaaaaaaaaaaaaaaaaaaaaaaaaaaaaaaaa

SEQ ID NO: 22670 - RNA, 624 nt, Artificial Sequence
  mRNA product Design b-4 (A100) comprising derived and/or modified sequence from MOPV/LASV reassortant(IGS-1;Clade IV)__AFY05533__Z (opt1)
aggagagucccgcagucggcguccagcggcucugcuuguucgugugugugucguugcaggccuuauucaagcuuaccaugggcaagacccagagcaaggggcagcccuccaccaaccugcucaaggagacggagccccgccaccccgugauccccgacgcccggggcaccgggcccgaguucugcaagagcugcugguucgagcgccggggccugguccgcugcaacgaccacuaccugugccucaacugccugacccugcuccacaccguguccgaccggugccccaucugcaagcacaagcugcccuuccgccuggagcuccagacgcagcccaccgccccgcccgagaucccgcccagccagaacccgccgcccuacucccccugaggacuaguaauaaggaaacuguaugaaugucugugggcaggaagugaagagauccuucuguaaagguuuuuggaauuaugucugcugaauaauaaacuuuuuugaaauaauaaaucugguagaaaaaugagaucuaaaaaaaaaaaaaaaaaaaaaaaaaaaaaaaaaaaaaaaaaaaaaaaaaaaaaaaaaaaaaaaaaaaaaaaaaaaaaaaaaaaaaaaaaaaaaaaaaaaa

SEQ ID NO: 22671 - RNA, 612 nt, Artificial Sequence
  mRNA product Design b-4 (A100) comprising derived and/or modified sequence from LASV(LM776-SLE-2012;Clade IV)__AIT17824__Z (opt1)
aggagagucccgcagucggcguccagcggcucugcuuguucgugugugugucguugcaggccuuauucaagcuuaccaugggcaacaagcaggccaaggccagcgaggagaagaacagcccccgcgccucccugaucccggacgccacccaccucgggccccaguucugcaaguccugcugguucgagaacaagggccugguggagugcaacaaccacuaccugugccucaacugccugacccugcuccugagcgucuccaaccggugccccaucugcaagaugccccugccgacgaagcuccgccccagcaccacccccaccgcgcccccgacgggggccgccgacuccauccggcccccgcccuacagccccugaggacuaguaauaaggaaacuguaugaaugucugugggcaggaagugaagagauccuucuguaaagguuuuuggaauuaugucugcugaauaauaaacuuuuuugaaauaauaaaucugguagaaaaaugagaucuaaaaaaaaaaaaaaaaaaaaaaaaaaaaaaaaaaaaaaaaaaaaaaaaaaaaaaaaaaaaaaaaaaaaaaaaaaaaaaaaaaaaaaaaaaaaaaaaaaaa

SEQ ID NO: 22672 - RNA, 612 nt, Artificial Sequence
  mRNA product Design b-4 (A100) comprising derived and/or modified sequence from LASV(Mad39;Clade IV)__ANH09743__Z (opt1)
aggagagucccgcagucggcguccagcggcucugcuuguucgugugugugucguugcaggccuuauucaagcuuaccaugggcaacaagcaggccaaggccagcgagguggaggacgggccccgcgccucccugauccccgacgccacccaccucggcccccaguucugcaagagcugcugguucgagaacaagucccuggucgagugcaacaaccacuaccugugccucaacugccugacccugcuccugagcguguccaaccggugccccaucugcaagaugccccugccgacgcgccucaagcccagcgugguccccaccgcgcccccgacccgggccggggacggcacccgcccgccgcccuacucccccugaggacuaguaauaaggaaacuguaugaaugucugugggcaggaagugaagagauccuucuguaaagguuuuuggaauuaugucugcugaauaauaaacuuuuuugaaauaauaaaucugguagaaaaaugagaucuaaaaaaaaaaaaaaaaaaaaaaaaaaaaaaaaaaaaaaaaaaaaaaaaaaaaaaaaaaaaaaaaaaaaaaaaaaaaaaaaaaaaaaaaaaaaaaaaaaaa

SEQ ID NO: 22673 - RNA, 612 nt, Artificial Sequence
  mRNA product Design b-4 (A100) comprising derived and/or modified sequence from LASV(Z0947-SLE-2011;Clade IV)__AIT17838__Z (opt1)
aggagagucccgcagucggcguccagcggcucugcuuguucgugugugugucguugcaggccuuauucaagcuuaccaugggcaacaagcaggccaaggugcccgagagcaaggacuccccgcgcgccagccugauccccgacgcgacccaccucgggccccaguucugcaaguccugcugguucgagaacaagggccuggucgagugcaacaaccacuaccugugccucaacugccugacccugcuccugagcguguccaaccgcugccccaucugcaagaugccgcugcccacgaagcucaagcccagcgccgcccccaccgccccgcccaccggggccgcggacuccauccggcccccgcccuacagccccugaggacuaguaauaaggaaacuguaugaaugucugugggcaggaagugaagagauccuucuguaaagguuuuuggaauuaugucugcugaauaauaaacuuuuuugaaauaauaaaucugguagaaaaaugagaucuaaaaaaaaaaaaaaaaaaaaaaaaaaaaaaaaaaaaaaaaaaaaaaaaaaaaaaaaaaaaaaaaaaaaaaaaaaaaaaaaaaaaaaaaaaaaaaaaaaaa

SEQ ID NO: 22674 - RNA, 612 nt, Artificial Sequence
  mRNA product Design b-4 (A100) comprising derived and/or modified sequence from LASV(Josiah;Clade IV)__ADY11072/NP_694871__Z (opt4)
aggagagucccgcagucggcguccagcggcucugcuuguucgugugugugucguugcaggccuuauucaagcuuaccaugggcaacaagcaggccaaggcccccgagagcaaggacagccccagagccagccugauccccgacgccacccaccugggcccccaguucugcaagagcugcugguucgagaacaagggccugguggagugcaacaaccacuaccugugccugaacugccugacccugcugcugagcgugagcaacagaugccccaucugcaagaugccccugcccaccaagcugagacccagcgccgcccccaccgccccccccaccggcgccgccgacagcaucagacccccccccuacagccccugaggacuaguaauaaggaaacuguaugaaugucugugggcaggaagugaagagauccuucuguaaagguuuuuggaauuaugucugcugaauaauaaacuuuuuugaaauaauaaaucugguagaaaaaugagaucuaaaaaaaaaaaaaaaaaaaaaaaaaaaaaaaaaaaaaaaaaaaaaaaaaaaaaaaaaaaaaaaaaaaaaaaaaaaaaaaaaaaaaaaaaaaaaaaaaaaa

SEQ ID NO: 22675 - RNA, 615 nt, Artificial Sequence
  mRNA product Design b-4 (A100) comprising derived and/or modified sequence from LASV(Pinneo-NIG-1969;Clade I)__AIT17834__Z (opt4)
aggagagucccgcagucggcguccagcggcucugcuuguucgugugugugucguugcaggccuuauucaagcuuaccaugggcaacaagcagaccagaagcccccccaagcccgagcaccccagacccacccugcugcccgacgccagccaccugggcccccaguucugcaagagcugcugguucgagaacaagggccugguggagugcaacaaccacuaccugugccugaacugccugacccugcugcugagcgugagcgacagaugccccaucugcaagaugccccugcccaccaagcuggccgugagaacccagcccagcgcccccccccugaaccagggcaacacccagagcagccccccccccuacagccccugaggacuaguaauaaggaaacuguaugaaugucugugggcaggaagugaagagauccuucuguaaagguuuuuggaauuaugucugcugaauaauaaacuuuuuugaaauaauaaaucugguagaaaaaugagaucuaaaaaaaaaaaaaaaaaaaaaaaaaaaaaaaaaaaaaaaaaaaaaaaaaaaaaaaaaaaaaaaaaaaaaaaaaaaaaaaaaaaaaaaaaaaaaaaaaaaa

SEQ ID NO: 22676 - RNA, 612 nt, Artificial Sequence
  mRNA product Design b-4 (A100) comprising derived and/or modified sequence from LASV(Nig08-04;Clade II)__ADU56612__Z (opt4)
aggagagucccgcagucggcguccagcggcucugcuuguucgugugugugucguugcaggccuuauucaagcuuaccaugggcaacagacagaccagacccaccgaggccaccgagcagagcagagcccaccuggugcccgacgccagccaccugggcccccaguucugcaagagcugcugguucgagaacagaggccugguggagugcaacaaccacuaccugugccugaacugccugagccugcugcugagcgugagcagcagaugccccaucugcaagaugccccugcccaccagacugaaggccagcgcccagcccagcgccccccccaccgaggccccccagaacaccacccccccccccuacacccccugaggacuaguaauaaggaaacuguaugaaugucugugggcaggaagugaagagauccuucuguaaagguuuuuggaauuaugucugcugaauaauaaacuuuuuugaaauaauaaaucugguagaaaaaugagaucuaaaaaaaaaaaaaaaaaaaaaaaaaaaaaaaaaaaaaaaaaaaaaaaaaaaaaaaaaaaaaaaaaaaaaaaaaaaaaaaaaaaaaaaaaaaaaaaaaaaa

SEQ ID NO: 22677 - RNA, 612 nt, Artificial Sequence
  mRNA product Design b-4 (A100) comprising derived and/or modified sequence from LASV(Nig08-A19;Clade III)__ADU56620__Z (opt4)
aggagagucccgcagucggcguccagcggcucugcuuguucgugugugugucguugcaggccuuauucaagcuuaccaugggcggcaagcacaccaagccccagagagagagcaacagccccagagccagccugauccccgacgccacccaccugggcccccaguucugcaagagcugcugguucgagaacaagggccugguggagugcaacaaccacuaccugugccugaacugccugacccugcugcugagcgugagcaacagaugccccaucugcaagaugccccugcccaccagacugagagccagcaccaaccccaccgccccccagguggagcaggugggccccaccaaccccccccccuacagccccugaggacuaguaauaaggaaacuguaugaaugucugugggcaggaagugaagagauccuucuguaaagguuuuuggaauuaugucugcugaauaauaaacuuuuuugaaauaauaaaucugguagaaaaaugagaucuaaaaaaaaaaaaaaaaaaaaaaaaaaaaaaaaaaaaaaaaaaaaaaaaaaaaaaaaaaaaaaaaaaaaaaaaaaaaaaaaaaaaaaaaaaaaaaaaaaaa

SEQ ID NO: 22678 - RNA, 612 nt, Artificial Sequence
  mRNA product Design b-4 (A100) comprising derived and/or modified sequence from LASV(AV;Clade V)__CCA30312__Z (opt4)
aggagagucccgcagucggcguccagcggcucugcuuguucgugugugugucguugcaggccuuauucaagcuuaccaugggcaacagacaggccaagaaccccgagguggagaacagccccagagccagccugauccccgacgccacccaccugggcccccaguucugcaagagcugcugguucgagaacaagggccugguggagugcaacaaccacuaccugugccugaacugccugagccugcugcugagcgugagcaacagaugccccaucugcaagaugccccugcccaccagacugagacccaccaccacccccaccgccccccagaucaucaaggagaacaccaccaaccccccccccuacacccccugaggacuaguaauaaggaaacuguaugaaugucugugggcaggaagugaagagauccuucuguaaagguuuuuggaauuaugucugcugaauaauaaacuuuuuugaaauaauaaaucugguagaaaaaugagaucuaaaaaaaaaaaaaaaaaaaaaaaaaaaaaaaaaaaaaaaaaaaaaaaaaaaaaaaaaaaaaaaaaaaaaaaaaaaaaaaaaaaaaaaaaaaaaaaaaaaa

SEQ ID NO: 22679 - RNA, 612 nt, Artificial Sequence
  mRNA product Design b-4 (A100) comprising derived and/or modified sequence from LASV(Togo/2016/7082;Clade VI)__AMR44579__Z (opt4)
aggagagucccgcagucggcguccagcggcucugcuuguucgugugugugucguugcaggccuuauucaagcuuaccaugggcgccagacagaccaagcagccccagaucgagggcagccccagagccagccuggugcccgacgccagccaccugggcccccaguucugcaagagcugcugguucgagaacaagggccugguggagugcaacaaccacuaccugugccugaacugccugagccugcugcugagcgugagcaacagaugccccaucugcaagaugccccugcccaccaagcugagagugagcagcgcccccagcgccccccccgccgccaccgcccagcccggcacccccccccccuacagccccugaggacuaguaauaaggaaacuguaugaaugucugugggcaggaagugaagagauccuucuguaaagguuuuuggaauuaugucugcugaauaauaaacuuuuuugaaauaauaaaucugguagaaaaaugagaucuaaaaaaaaaaaaaaaaaaaaaaaaaaaaaaaaaaaaaaaaaaaaaaaaaaaaaaaaaaaaaaaaaaaaaaaaaaaaaaaaaaaaaaaaaaaaaaaaaaaa

SEQ ID NO: 22680 - RNA, 612 nt, Artificial Sequence
  mRNA product Design b-4 (A100) comprising derived and/or modified sequence from LASV(KAK-428;Clade n.d. (VII))__ANH09761__Z (opt4)
aggagagucccgcagucggcguccagcggcucugcuuguucgugugugugucguugcaggccuuauucaagcuuaccaugggcaacaagggcaccaagcccacccagaacagcgagcccagcagagccaaccuggugcccgacgccagcuaccugggcccccaguucugcaagagcugcugguucgagaacaagggccugguggagugcaacaaccacuaccugugccugaacugccugaccaugcugcugagcgugagcaacagaugccccaucugcaagaugccccugcccaccaagaucaaggccagcggcagccccagcgccccccccaccgaggccaacagcgccgugagccccccccccuacacccccugaggacuaguaauaaggaaacuguaugaaugucugugggcaggaagugaagagauccuucuguaaagguuuuuggaauuaugucugcugaauaauaaacuuuuuugaaauaauaaaucugguagaaaaaugagaucuaaaaaaaaaaaaaaaaaaaaaaaaaaaaaaaaaaaaaaaaaaaaaaaaaaaaaaaaaaaaaaaaaaaaaaaaaaaaaaaaaaaaaaaaaaaaaaaaaaaa

SEQ ID NO: 22681 - RNA, 612 nt, Artificial Sequence
  mRNA product Design b-4 (A100) comprising derived and/or modified sequence from LASV(ISTH0009-NIG-2011;Clade II)__AIT17402__Z (opt4)
aggagagucccgcagucggcguccagcggcucugcuuguucgugugugugucguugcaggccuuauucaagcuuaccaugggcaacagacaggccaagagcaccaagguggacgagcaccagagagcccaccuggugcccgacgccagccaccugggcccccaguucugcaagagcugcugguucgagaacagaggccugguggagugcaacaaccacuaccugugccugaacugccugagccugcugcugagcgugagcagcagaugccccaucugcaagaugccccugcccaccaagcugaaggccgccgcccagcccagcgcccccagcaccgagaccauccagaacaccacccccccccccuacacccccugaggacuaguaauaaggaaacuguaugaaugucugugggcaggaagugaagagauccuucuguaaagguuuuuggaauuaugucugcugaauaauaaacuuuuuugaaauaauaaaucugguagaaaaaugagaucuaaaaaaaaaaaaaaaaaaaaaaaaaaaaaaaaaaaaaaaaaaaaaaaaaaaaaaaaaaaaaaaaaaaaaaaaaaaaaaaaaaaaaaaaaaaaaaaaaaaa

SEQ ID NO: 22682 - RNA, 612 nt, Artificial Sequence
  mRNA product Design b-4 (A100) comprising derived and/or modified sequence from LASV(ISTH2010-NIG-2012;Clade II)__AIT17480__Z (opt4)
aggagagucccgcagucggcguccagcggcucugcuuguucgugugugugucguugcaggccuuauucaagcuuaccaugggcaacagacacgccaagagcaccaagguggacgagcaccagagagcccaccuggugcccgacgccagccaccugggcccccaguucugcaagagcugcugguucgagaacagaggccugguggagugcaacaaccacuaccugugccugaacugccugagccugcugcugagcgugagcagcagaugccccaucugcaagaugccccugcccaccaagcugaaggccgccgcccagcccagcgcccccagcaccgaggugauccagagcaccacccccccccccuacacccccugaggacuaguaauaaggaaacuguaugaaugucugugggcaggaagugaagagauccuucuguaaagguuuuuggaauuaugucugcugaauaauaaacuuuuuugaaauaauaaaucugguagaaaaaugagaucuaaaaaaaaaaaaaaaaaaaaaaaaaaaaaaaaaaaaaaaaaaaaaaaaaaaaaaaaaaaaaaaaaaaaaaaaaaaaaaaaaaaaaaaaaaaaaaaaaaaa

SEQ ID NO: 22683 - RNA, 612 nt, Artificial Sequence
  mRNA product Design b-4 (A100) comprising derived and/or modified sequence from LASV(Lassa virus/H.sapiens-wt/NGA/2016/ISTH_0017;Clade II)__AVO03713__Z (opt4)
aggagagucccgcagucggcguccagcggcucugcuuguucgugugugugucguugcaggccuuauucaagcuuaccaugggcaacagacaggccaagagcaccaagguggacgagcaccagagagcccaccuggugcccgacgccagccaccugggcccccaguucugcaagagcugcugguucgagaacagaggccugguggagugcaacaaccacuaccugugccugaacugccugagccugcugcugagcgugagcagcagaugccccaucugcaagaugccccugcccaccaagcugaaggccgccacccagcccagcgcccccagcaccgaggugaaccagaacaccacccccccccccuacacccccugaggacuaguaauaaggaaacuguaugaaugucugugggcaggaagugaagagauccuucuguaaagguuuuuggaauuaugucugcugaauaauaaacuuuuuugaaauaauaaaucugguagaaaaaugagaucuaaaaaaaaaaaaaaaaaaaaaaaaaaaaaaaaaaaaaaaaaaaaaaaaaaaaaaaaaaaaaaaaaaaaaaaaaaaaaaaaaaaaaaaaaaaaaaaaaaaa

SEQ ID NO: 22684 - RNA, 612 nt, Artificial Sequence
  mRNA product Design b-4 (A100) comprising derived and/or modified sequence from LASV(Lassa virus/H.sapiens-wt/NGA/2018/ISTH_0959;Clade II)__AVV65084__Z (opt4)
aggagagucccgcagucggcguccagcggcucugcuuguucgugugugugucguugcaggccuuauucaagcuuaccaugggcaacaagcaggccaagagcaccaagguggacgagcaccagagagcccaccuggugcccgacgccagccaccugggcccccaguucugcaagagcugcugguucgagaacagaggccugguggagugcaacaaccacuaccugugccugaacugccugagccugcugcugagcgugagcagcagaugccccaucugcaagaugccccugcccaccaagcugaaggccgccgcccagcccagcgcccccagcaccgaggccauccagagcaccacccccccccccuacacccccugaggacuaguaauaaggaaacuguaugaaugucugugggcaggaagugaagagauccuucuguaaagguuuuuggaauuaugucugcugaauaauaaacuuuuuugaaauaauaaaucugguagaaaaaugagaucuaaaaaaaaaaaaaaaaaaaaaaaaaaaaaaaaaaaaaaaaaaaaaaaaaaaaaaaaaaaaaaaaaaaaaaaaaaaaaaaaaaaaaaaaaaaaaaaaaaaa

SEQ ID NO: 22685 - RNA, 612 nt, Artificial Sequence
  mRNA product Design b-4 (A100) comprising derived and/or modified sequence from LASV(LASV003-NIG-2008;Clade II)__AIT17578__Z (opt4)
aggagagucccgcagucggcguccagcggcucugcuuguucgugugugugucguugcaggccuuauucaagcuuaccaugggcaacagacaggccaagagcaccaagguggacgagcaccagagagcccaccuggugcccgacgccagccaccugggcccccaguucugcaagagcugcugguucgagaacaagggccugguggagugcaacaaccacuaccugugccugaacugccugagccugcugcugagcgugagcagcagaugccccaucugcaagaugccccugcccaccaagcugagagccgccgcccagcccagcgcccccagcaccgagagcgcccagaacaccgcccccccccccuacgcccccugaggacuaguaauaaggaaacuguaugaaugucugugggcaggaagugaagagauccuucuguaaagguuuuuggaauuaugucugcugaauaauaaacuuuuuugaaauaauaaaucugguagaaaaaugagaucuaaaaaaaaaaaaaaaaaaaaaaaaaaaaaaaaaaaaaaaaaaaaaaaaaaaaaaaaaaaaaaaaaaaaaaaaaaaaaaaaaaaaaaaaaaaaaaaaaaaa

SEQ ID NO: 22686 - RNA, 612 nt, Artificial Sequence
  mRNA product Design b-4 (A100) comprising derived and/or modified sequence from LASV(LASV035-NIG-2009;Clade II)__AIT17586__Z (opt4)
aggagagucccgcagucggcguccagcggcucugcuuguucgugugugugucguugcaggccuuauucaagcuuaccaugggcaacaagcaggccaagagcaccaagguggacgagcaccagagagcccaccuggugcccgacgccagccaccugggcccccaguucugcaagagcugcugguucgagaacagaggccugguggagugcaacaaccacuaccugugccugaacugccugagccugcugcugagcgugagcagcagaugccccaucugcaagaugccccugcccaccagacugaaggccgccgcccagcccagcgcccccagcaccgaggugacccagaacaccacccccccccccuacacccccugaggacuaguaauaaggaaacuguaugaaugucugugggcaggaagugaagagauccuucuguaaagguuuuuggaauuaugucugcugaauaauaaacuuuuuugaaauaauaaaucugguagaaaaaugagaucuaaaaaaaaaaaaaaaaaaaaaaaaaaaaaaaaaaaaaaaaaaaaaaaaaaaaaaaaaaaaaaaaaaaaaaaaaaaaaaaaaaaaaaaaaaaaaaaaaaaa

SEQ ID NO: 22687 - RNA, 612 nt, Artificial Sequence
  mRNA product Design b-4 (A100) comprising derived and/or modified sequence from LASV(LASV1000-NIG-2009;Clade II)__AIT17780__Z (opt4)
aggagagucccgcagucggcguccagcggcucugcuuguucgugugugugucguugcaggccuuauucaagcuuaccaugggcaacagacagaccaagagcaccaagguggacgagcaccagagagccuaccuggugcccgacgccagccugcugggcccccaguucugcaagagcugcugguucgagaacaagggccugguggagugcaacaaccacuaccugugccugaacugccugagccugcugcugagcgugagcagcagaugccccaucugcaagaugccccugcccaccagacugaaggccgccgcccagcccagcgccccccccaccgaggccauccagaacaccacccccccccccuacacccccugaggacuaguaauaaggaaacuguaugaaugucugugggcaggaagugaagagauccuucuguaaagguuuuuggaauuaugucugcugaauaauaaacuuuuuugaaauaauaaaucugguagaaaaaugagaucuaaaaaaaaaaaaaaaaaaaaaaaaaaaaaaaaaaaaaaaaaaaaaaaaaaaaaaaaaaaaaaaaaaaaaaaaaaaaaaaaaaaaaaaaaaaaaaaaaaaa

SEQ ID NO: 22688 - RNA, 612 nt, Artificial Sequence
  mRNA product Design b-4 (A100) comprising derived and/or modified sequence from LASV(LASV221-NIG-2010;Clade II)__AIT17622__Z (opt4)
aggagagucccgcagucggcguccagcggcucugcuuguucgugugugugucguugcaggccuuauucaagcuuaccaugggcaacagacaggccaagagcaccaagguggacgagcaccagagagcccaccuggugcccgacgccagccaccugggcccccaguucugcaagagcugcugguucgagaacagaggccugguggagugcaacaaccacuaccugugccugaacugccugagccugcugcugagcgugagcagcagaugccccaucugcaagaugccccugcccaccaagcugaaggccgccacccagcccagcgcccccagcaccgaggugacccagaacaccauccccccccccuacagccccugaggacuaguaauaaggaaacuguaugaaugucugugggcaggaagugaagagauccuucuguaaagguuuuuggaauuaugucugcugaauaauaaacuuuuuugaaauaauaaaucugguagaaaaaugagaucuaaaaaaaaaaaaaaaaaaaaaaaaaaaaaaaaaaaaaaaaaaaaaaaaaaaaaaaaaaaaaaaaaaaaaaaaaaaaaaaaaaaaaaaaaaaaaaaaaaaa

SEQ ID NO: 22689 - RNA, 612 nt, Artificial Sequence
  mRNA product Design b-4 (A100) comprising derived and/or modified sequence from LASV(LASV237-NIG-2010;Clade II)__AIT17636__Z (opt4)
aggagagucccgcagucggcguccagcggcucugcuuguucgugugugugucguugcaggccuuauucaagcuuaccaugggcaacagacaggccaagagcaccaagguggacgagcaccagagagcccaccuggugcccgacgccagccaccugggcccccaguucugcaagagcugcugguucgagaacagaggccugguggagugcaacaaccacuaccugugccugaacugccugagccugcugcugagcgugagcagcagaugccccaucugcaagaugccccugcccaccaagcugaaggccgccgcccagcccagcgcccccagcaucgagaccauccagaacaccacccccccccccuacacccccugaggacuaguaauaaggaaacuguaugaaugucugugggcaggaagugaagagauccuucuguaaagguuuuuggaauuaugucugcugaauaauaaacuuuuuugaaauaauaaaucugguagaaaaaugagaucuaaaaaaaaaaaaaaaaaaaaaaaaaaaaaaaaaaaaaaaaaaaaaaaaaaaaaaaaaaaaaaaaaaaaaaaaaaaaaaaaaaaaaaaaaaaaaaaaaaaa

SEQ ID NO: 22690 - RNA, 612 nt, Artificial Sequence
  mRNA product Design b-4 (A100) comprising derived and/or modified sequence from LASV(LASV253-NIG-2011;Clade II)__AIT17668__Z (opt4)
aggagagucccgcagucggcguccagcggcucugcuuguucgugugugugucguugcaggccuuauucaagcuuaccaugggcaacagacaggccaagagcaccaagguggacgagcaccagagagcccaccuggugcccgacgccagccaccugggcccccaguucugcaagagcugcugguucgagaacaagggccugguggagugcaacaaccacuaccugugccugaacugccugagccugcugcugagcgugagcagcagaugccccaucugcaagaugccccugcccaccaagcugaagaccaccgcccagcccagcgccccccccaccgaggccgccaagaacaccgcccccccccccuacgcccccugaggacuaguaauaaggaaacuguaugaaugucugugggcaggaagugaagagauccuucuguaaagguuuuuggaauuaugucugcugaauaauaaacuuuuuugaaauaauaaaucugguagaaaaaugagaucuaaaaaaaaaaaaaaaaaaaaaaaaaaaaaaaaaaaaaaaaaaaaaaaaaaaaaaaaaaaaaaaaaaaaaaaaaaaaaaaaaaaaaaaaaaaaaaaaaaaa

SEQ ID NO: 22691 - RNA, 612 nt, Artificial Sequence
  mRNA product Design b-4 (A100) comprising derived and/or modified sequence from LASV(G1180-SLE-2010;Clade IV)__AIT17166__Z (opt4)
aggagagucccgcagucggcguccagcggcucugcuuguucgugugugugucguugcaggccuuauucaagcuuaccaugggcaacaagcaggccaaggcccccgaggccaaggacagccccagagccagccugauccccgacgccacccaccugggcccccaguucugcaagagcugcugguucgagaccaagggccugguggagugcaacaaccacuaccugugccugaacugccugacccugcugcugagcgugagcaacagaugccccaucugcaagaugccccugcccaccaagcugagacccagcgccacccccaccgccccccccaccgaggccgccgacagcaucggccccccccccuacagccccugaggacuaguaauaaggaaacuguaugaaugucugugggcaggaagugaagagauccuucuguaaagguuuuuggaauuaugucugcugaauaauaaacuuuuuugaaauaauaaaucugguagaaaaaugagaucuaaaaaaaaaaaaaaaaaaaaaaaaaaaaaaaaaaaaaaaaaaaaaaaaaaaaaaaaaaaaaaaaaaaaaaaaaaaaaaaaaaaaaaaaaaaaaaaaaaaa

SEQ ID NO: 22692 - RNA, 612 nt, Artificial Sequence
  mRNA product Design b-4 (A100) comprising derived and/or modified sequence from LASV(G1442-SLE-2011;Clade IV)__AIT17178__Z (opt4)
aggagagucccgcagucggcguccagcggcucugcuuguucgugugugugucguugcaggccuuauucaagcuuaccaugggcaacaagcaggccaaggccagcgaggccaaggacagccccagagccagccugauccccgacgccacccaccugggcccccaguucugcaagagcugcugguucgagaacaagggccugguggagugcaacaaccacuaccugugccugaacugccugagccugcugcugagcgugagcagcagaugccccaucugcaagaugccccugcccaccagacugagacccagcaccgcccccaccgccccccccgccagagccggcgacaacaucaagcccccccccuacagccccugaggacuaguaauaaggaaacuguaugaaugucugugggcaggaagugaagagauccuucuguaaagguuuuuggaauuaugucugcugaauaauaaacuuuuuugaaauaauaaaucugguagaaaaaugagaucuaaaaaaaaaaaaaaaaaaaaaaaaaaaaaaaaaaaaaaaaaaaaaaaaaaaaaaaaaaaaaaaaaaaaaaaaaaaaaaaaaaaaaaaaaaaaaaaaaaaa

SEQ ID NO: 22693 - RNA, 612 nt, Artificial Sequence
  mRNA product Design b-4 (A100) comprising derived and/or modified sequence from LASV(G502-SLE-2009;Clade IV)__AIT17124__Z (opt4)
aggagagucccgcagucggcguccagcggcucugcuuguucgugugugugucguugcaggccuuauucaagcuuaccaugggcaacaagcaggugaagacccccgaggccaaggacagccccagagccagccugauccccgacgccacccaccugggcccccaguucugcaagagcugcugguucgagaacaagggccugguggagugcaacaaccacuaccugugccugaacugccugacccugcugcugagcgugggcaacagaugccccaucugcaagaugccccugcccaccaagcugagacccagcgugacccccaccgccccccccaccagagccgccgacagcaucggccccccccccuacagccccugaggacuaguaauaaggaaacuguaugaaugucugugggcaggaagugaagagauccuucuguaaagguuuuuggaauuaugucugcugaauaauaaacuuuuuugaaauaauaaaucugguagaaaaaugagaucuaaaaaaaaaaaaaaaaaaaaaaaaaaaaaaaaaaaaaaaaaaaaaaaaaaaaaaaaaaaaaaaaaaaaaaaaaaaaaaaaaaaaaaaaaaaaaaaaaaaa

SEQ ID NO: 22694 - RNA, 612 nt, Artificial Sequence
  mRNA product Design b-4 (A100) comprising derived and/or modified sequence from LASV(G733-SLE-2010;Clade IV)__AIT17152__Z (opt4)
aggagagucccgcagucggcguccagcggcucugcuuguucgugugugugucguugcaggccuuauucaagcuuaccaugggcaacaagcaggccaagacccccgagaccaaggacagccccagagccagccugauccccgacgccacccaccugggcccccaguucugcaagagcugcugguucgagaacaagggccugguggagugcaacaaccacuaccugugccugaacugccugacccugcugcugagcgugagcaacagaugccccaucugcaagaugccccugcccaccaagcugagacccagcaccgcccccaccgccccccccgccggcgccgccgacaacaccagacccccccccuacagccccugaggacuaguaauaaggaaacuguaugaaugucugugggcaggaagugaagagauccuucuguaaagguuuuuggaauuaugucugcugaauaauaaacuuuuuugaaauaauaaaucugguagaaaaaugagaucuaaaaaaaaaaaaaaaaaaaaaaaaaaaaaaaaaaaaaaaaaaaaaaaaaaaaaaaaaaaaaaaaaaaaaaaaaaaaaaaaaaaaaaaaaaaaaaaaaaaa

SEQ ID NO: 22695 - RNA, 624 nt, Artificial Sequence
  mRNA product Design b-4 (A100) comprising derived and/or modified sequence from MOPV/LASV reassortant(IGS-1;Clade IV)__AFY05533__Z (opt4)
aggagagucccgcagucggcguccagcggcucugcuuguucgugugugugucguugcaggccuuauucaagcuuaccaugggcaagacccagagcaagggccagcccagcaccaaccugcugaaggagaccgagcccagacaccccgugauccccgacgccagaggcaccggccccgaguucugcaagagcugcugguucgagagaagaggccuggugagaugcaacgaccacuaccugugccugaacugccugacccugcugcacaccgugagcgacagaugccccaucugcaagcacaagcugcccuucagacuggagcugcagacccagcccaccgccccccccgagaucccccccagccagaaccccccccccuacagccccugaggacuaguaauaaggaaacuguaugaaugucugugggcaggaagugaagagauccuucuguaaagguuuuuggaauuaugucugcugaauaauaaacuuuuuugaaauaauaaaucugguagaaaaaugagaucuaaaaaaaaaaaaaaaaaaaaaaaaaaaaaaaaaaaaaaaaaaaaaaaaaaaaaaaaaaaaaaaaaaaaaaaaaaaaaaaaaaaaaaaaaaaaaaaaaaaa

SEQ ID NO: 22696 - RNA, 612 nt, Artificial Sequence
  mRNA product Design b-4 (A100) comprising derived and/or modified sequence from LASV(LM776-SLE-2012;Clade IV)__AIT17824__Z (opt4)
aggagagucccgcagucggcguccagcggcucugcuuguucgugugugugucguugcaggccuuauucaagcuuaccaugggcaacaagcaggccaaggccagcgaggagaagaacagccccagagccagccugauccccgacgccacccaccugggcccccaguucugcaagagcugcugguucgagaacaagggccugguggagugcaacaaccacuaccugugccugaacugccugacccugcugcugagcgugagcaacagaugccccaucugcaagaugccccugcccaccaagcugagacccagcaccacccccaccgccccccccaccggcgccgccgacagcaucagacccccccccuacagccccugaggacuaguaauaaggaaacuguaugaaugucugugggcaggaagugaagagauccuucuguaaagguuuuuggaauuaugucugcugaauaauaaacuuuuuugaaauaauaaaucugguagaaaaaugagaucuaaaaaaaaaaaaaaaaaaaaaaaaaaaaaaaaaaaaaaaaaaaaaaaaaaaaaaaaaaaaaaaaaaaaaaaaaaaaaaaaaaaaaaaaaaaaaaaaaaaa

SEQ ID NO: 22697 - RNA, 612 nt, Artificial Sequence
  mRNA product Design b-4 (A100) comprising derived and/or modified sequence from LASV(Mad39;Clade IV)__ANH09743__Z (opt4)
aggagagucccgcagucggcguccagcggcucugcuuguucgugugugugucguugcaggccuuauucaagcuuaccaugggcaacaagcaggccaaggccagcgagguggaggacggccccagagccagccugauccccgacgccacccaccugggcccccaguucugcaagagcugcugguucgagaacaagagccugguggagugcaacaaccacuaccugugccugaacugccugacccugcugcugagcgugagcaacagaugccccaucugcaagaugccccugcccaccagacugaagcccagcguggugcccaccgccccccccaccagagccggcgacggcaccagacccccccccuacagccccugaggacuaguaauaaggaaacuguaugaaugucugugggcaggaagugaagagauccuucuguaaagguuuuuggaauuaugucugcugaauaauaaacuuuuuugaaauaauaaaucugguagaaaaaugagaucuaaaaaaaaaaaaaaaaaaaaaaaaaaaaaaaaaaaaaaaaaaaaaaaaaaaaaaaaaaaaaaaaaaaaaaaaaaaaaaaaaaaaaaaaaaaaaaaaaaaa

SEQ ID NO: 22698 - RNA, 612 nt, Artificial Sequence
  mRNA product Design b-4 (A100) comprising derived and/or modified sequence from LASV(Z0947-SLE-2011;Clade IV)__AIT17838__Z (opt4)
aggagagucccgcagucggcguccagcggcucugcuuguucgugugugugucguugcaggccuuauucaagcuuaccaugggcaacaagcaggccaaggugcccgagagcaaggacagccccagagccagccugauccccgacgccacccaccugggcccccaguucugcaagagcugcugguucgagaacaagggccugguggagugcaacaaccacuaccugugccugaacugccugacccugcugcugagcgugagcaacagaugccccaucugcaagaugccccugcccaccaagcugaagcccagcgccgcccccaccgccccccccaccggcgccgccgacagcaucagacccccccccuacagccccugaggacuaguaauaaggaaacuguaugaaugucugugggcaggaagugaagagauccuucuguaaagguuuuuggaauuaugucugcugaauaauaaacuuuuuugaaauaauaaaucugguagaaaaaugagaucuaaaaaaaaaaaaaaaaaaaaaaaaaaaaaaaaaaaaaaaaaaaaaaaaaaaaaaaaaaaaaaaaaaaaaaaaaaaaaaaaaaaaaaaaaaaaaaaaaaaa

SEQ ID NO: 22699 - RNA, 612 nt, Artificial Sequence
  mRNA product Design b-4 (A100) comprising derived and/or modified sequence from LASV(Josiah;Clade IV)__ADY11072/NP_694871__Z (opt5)
aggagagucccgcagucggcguccagcggcucugcuuguucgugugugugucguugcaggccuuauucaagcuuaccaugggcaacaagcaggccaaagcucccgagagcaaggacuccccuagagccucucugaucccggaugcgacccaccucgggccccaauucugcaaaagcuguugguuugaaaauaagggacugguggagugcaacaaucauuaccuuugucugaacugccucacacugcuucuguccgucucuaaucgguguccuauuugcaaaaugccccucccuacgaagcugcgccccagcgcugccccuaccgccccgcccacaggcgcugccgacuccaucagaccucccccuuauucucccugaggacuaguaauaaggaaacuguaugaaugucugugggcaggaagugaagagauccuucuguaaagguuuuuggaauuaugucugcugaauaauaaacuuuuuugaaauaauaaaucugguagaaaaaugagaucuaaaaaaaaaaaaaaaaaaaaaaaaaaaaaaaaaaaaaaaaaaaaaaaaaaaaaaaaaaaaaaaaaaaaaaaaaaaaaaaaaaaaaaaaaaaaaaaaaaaa

SEQ ID NO: 22700 - RNA, 615 nt, Artificial Sequence
  mRNA product Design b-4 (A100) comprising derived and/or modified sequence from LASV(Pinneo-NIG-1969;Clade I)__AIT17834__Z (opt5)
aggagagucccgcagucggcguccagcggcucugcuuguucgugugugugucguugcaggccuuauucaagcuuaccaugggcaacaagcagaccagaagcccucccaaaccggagcacccccggccuacacugcuccccgacgccucccaucuggggccucaauucugcaagucuuguugguuugaaaauaaaggacuuguggagugcaacaaucacuaccugugucucaacugccugacgcuucugcucagcgucuccgaucgcugucccaucugcaagaugccucugccgaccaaacuggcuguuagaacacagcccucugccccuccccucaaucagggcaacacccagagcuccccucccccguauucuccuugaggacuaguaauaaggaaacuguaugaaugucugugggcaggaagugaagagauccuucuguaaagguuuuuggaauuaugucugcugaauaauaaacuuuuuugaaauaauaaaucugguagaaaaaugagaucuaaaaaaaaaaaaaaaaaaaaaaaaaaaaaaaaaaaaaaaaaaaaaaaaaaaaaaaaaaaaaaaaaaaaaaaaaaaaaaaaaaaaaaaaaaaaaaaaaaaa

SEQ ID NO: 22701 - RNA, 612 nt, Artificial Sequence
  mRNA product Design b-4 (A100) comprising derived and/or modified sequence from LASV(Nig08-04;Clade II)__ADU56612__Z (opt5)
aggagagucccgcagucggcguccagcggcucugcuuguucgugugugugucguugcaggccuuauucaagcuuaccaugggcaacagacagacccggcccacagaggccacggaacaaagccgcgcccaccuggugccugacgccucccaucucgggccgcaguucugcaagucuuguugguuugagaauagaggacuggucgaaugcaacaaucacuaccuuugucugaacugccucagccugcuucuguccguuucuagccggugucccaucugcaaaaugccucuccccacccgccugaaggcguccgcucagccuucugcucccccuacagaggccccgcagaauaccacacccccucccuauaccccuugaggacuaguaauaaggaaacuguaugaaugucugugggcaggaagugaagagauccuucuguaaagguuuuuggaauuaugucugcugaauaauaaacuuuuuugaaauaauaaaucugguagaaaaaugagaucuaaaaaaaaaaaaaaaaaaaaaaaaaaaaaaaaaaaaaaaaaaaaaaaaaaaaaaaaaaaaaaaaaaaaaaaaaaaaaaaaaaaaaaaaaaaaaaaaaaaa

SEQ ID NO: 22702 - RNA, 612 nt, Artificial Sequence
  mRNA product Design b-4 (A100) comprising derived and/or modified sequence from LASV(Nig08-A19;Clade III)__ADU56620__Z (opt5)
aggagagucccgcagucggcguccagcggcucugcuuguucgugugugugucguugcaggccuuauucaagcuuaccaugggcgggaagcacaccaaaccccagagagagagcaacuccccucgggccucucugaucccggacgcuacacaucucggaccccaauucugcaagagcuguugguuugaaaauaaaggccugguggagugcaacaaucacuaccuuugucugaacugccucacgcugcuucuguccgucucuaaucgcuguccuauuugcaagaugccccucccuaccagacugcgggccagcacaaaccccaccgcgccucagguugaacagguggggccgacaaaucccccucccuauuccccuugaggacuaguaauaaggaaacuguaugaaugucugugggcaggaagugaagagauccuucuguaaagguuuuuggaauuaugucugcugaauaauaaacuuuuuugaaauaauaaaucugguagaaaaaugagaucuaaaaaaaaaaaaaaaaaaaaaaaaaaaaaaaaaaaaaaaaaaaaaaaaaaaaaaaaaaaaaaaaaaaaaaaaaaaaaaaaaaaaaaaaaaaaaaaaaaaa

SEQ ID NO: 22703 - RNA, 612 nt, Artificial Sequence
  mRNA product Design b-4 (A100) comprising derived and/or modified sequence from LASV(AV;Clade V)__CCA30312__Z (opt5)
aggagagucccgcagucggcguccagcggcucugcuuguucgugugugugucguugcaggccuuauucaagcuuaccaugggcaacagacaggccaagaaucccgagguggaaaacagcccucgggcuucccugaucccggacgccacccaccucgggccccaauucugcaaaucuuguugguuugagaauaagggacuggucgaaugcaacaaucauuaccuuugucugaacugccucagccugcuucuguccguuucuaaucgcuguccuauuugcaaaaugccccucccuacaagacugcggcccacgaccacaccuaccgcgccgcagaucauuaaggagaacacaaccaaucccccucccuauacaccuugaggacuaguaauaaggaaacuguaugaaugucugugggcaggaagugaagagauccuucuguaaagguuuuuggaauuaugucugcugaauaauaaacuuuuuugaaauaauaaaucugguagaaaaaugagaucuaaaaaaaaaaaaaaaaaaaaaaaaaaaaaaaaaaaaaaaaaaaaaaaaaaaaaaaaaaaaaaaaaaaaaaaaaaaaaaaaaaaaaaaaaaaaaaaaaaaa

SEQ ID NO: 22704 - RNA, 612 nt, Artificial Sequence
  mRNA product Design b-4 (A100) comprising derived and/or modified sequence from LASV(Togo/2016/7082;Clade VI)__AMR44579__Z (opt5)
aggagagucccgcagucggcguccagcggcucugcuuguucgugugugugucguugcaggccuuauucaagcuuaccaugggcgccagacagaccaagcaaccccagaucgaggggagcccucgggcuucccuggugccggacgccucucaccucggaccccaguucugcaaaagcuguugguuugaaaacaagggccuggucgagugcaauaaccauuaccuuugucugaauugccucucccugcuucugucuguuagcaaccgcuguccuauuugcaaaaugccccucccuacaaagcugagaguguccucugcgcccagcgcuccuccggccgccacggcucagcccgggaccccucccccuuauucccccugaggacuaguaauaaggaaacuguaugaaugucugugggcaggaagugaagagauccuucuguaaagguuuuuggaauuaugucugcugaauaauaaacuuuuuugaaauaauaaaucugguagaaaaaugagaucuaaaaaaaaaaaaaaaaaaaaaaaaaaaaaaaaaaaaaaaaaaaaaaaaaaaaaaaaaaaaaaaaaaaaaaaaaaaaaaaaaaaaaaaaaaaaaaaaaaaa

SEQ ID NO: 22705 - RNA, 612 nt, Artificial Sequence
  mRNA product Design b-4 (A100) comprising derived and/or modified sequence from LASV(KAK-428;Clade n.d. (VII))__ANH09761__Z (opt5)
aggagagucccgcagucggcguccagcggcucugcuuguucgugugugugucguugcaggccuuauucaagcuuaccaugggcaacaaggggaccaaacccacacagaauagcgagccuuccagagccaaccuggugccggacgcuucuuaccucggaccccaauucugcaagagcuguugguuugaaaauaaaggccuggucgagugcaacaaucacuaucuuugucugaacugccucacgaugcugcuuuccguuuccaaucgguguccuaucugcaagaugccccugccuaccaaaauuaaggccagcgggucccccucugcgccuccgacagaagcuaacagcgccgugucucccccucccuacaccccuugaggacuaguaauaaggaaacuguaugaaugucugugggcaggaagugaagagauccuucuguaaagguuuuuggaauuaugucugcugaauaauaaacuuuuuugaaauaauaaaucugguagaaaaaugagaucuaaaaaaaaaaaaaaaaaaaaaaaaaaaaaaaaaaaaaaaaaaaaaaaaaaaaaaaaaaaaaaaaaaaaaaaaaaaaaaaaaaaaaaaaaaaaaaaaaaaa

SEQ ID NO: 22706 - RNA, 612 nt, Artificial Sequence
  mRNA product Design b-4 (A100) comprising derived and/or modified sequence from LASV(ISTH0009-NIG-2011;Clade II)__AIT17402__Z (opt5)
aggagagucccgcagucggcguccagcggcucugcuuguucgugugugugucguugcaggccuuauucaagcuuaccaugggcaacagacaggccaagagcaccaaaguggacgagcaccaacgggcucaucugguccccgaugccucccaccucgggccucaguucugcaagucuuguugguuugaaaaucgcggacugguugagugcaacaaucauuaccuuugucugaacugccucagccugcuucuguccgugucuagcagauguccgaucugcaaaaugccccucccuacaaagcugaaagcggcugcccagcccuccgccccuucuacggaaaccauucagaauacaacacccccuccguauacccccugaggacuaguaauaaggaaacuguaugaaugucugugggcaggaagugaagagauccuucuguaaagguuuuuggaauuaugucugcugaauaauaaacuuuuuugaaauaauaaaucugguagaaaaaugagaucuaaaaaaaaaaaaaaaaaaaaaaaaaaaaaaaaaaaaaaaaaaaaaaaaaaaaaaaaaaaaaaaaaaaaaaaaaaaaaaaaaaaaaaaaaaaaaaaaaaaa

SEQ ID NO: 22707 - RNA, 612 nt, Artificial Sequence
  mRNA product Design b-4 (A100) comprising derived and/or modified sequence from LASV(ISTH2010-NIG-2012;Clade II)__AIT17480__Z (opt5)
aggagagucccgcagucggcguccagcggcucugcuuguucgugugugugucguugcaggccuuauucaagcuuaccaugggcaacagacacgccaagagcaccaaaguggacgagcaucagcgggcucaccugguccccgaugccucccaucucgggccucaauucugcaagucuuguugguuugaaaaucgcggacugguugagugcaacaaucacuaccuuugucugaacugccucagccugcuucuguccgugucuagcagauguccgaucugcaaaaugccccucccuacaaagcugaaagcggcugcccagcccuccgccccuucuacggaagugauucagagcaccacacccccuccguauacccccugaggacuaguaauaaggaaacuguaugaaugucugugggcaggaagugaagagauccuucuguaaagguuuuuggaauuaugucugcugaauaauaaacuuuuuugaaauaauaaaucugguagaaaaaugagaucuaaaaaaaaaaaaaaaaaaaaaaaaaaaaaaaaaaaaaaaaaaaaaaaaaaaaaaaaaaaaaaaaaaaaaaaaaaaaaaaaaaaaaaaaaaaaaaaaaaaa

SEQ ID NO: 22708 - RNA, 612 nt, Artificial Sequence
  mRNA product Design b-4 (A100) comprising derived and/or modified sequence from LASV(Lassa virus/H.sapiens-wt/NGA/2016/ISTH_0017;Clade II)__AVO03713__Z (opt5)
aggagagucccgcagucggcguccagcggcucugcuuguucgugugugugucguugcaggccuuauucaagcuuaccaugggcaacagacaggccaagagcaccaaaguggacgagcaccaacgggcucaucugguccccgaugccucccaccucgggccucaguucugcaagucuuguugguuugaaaaucgcggacugguugagugcaacaaucauuaccuuugucugaacugccucagccugcuucuguccgugucuagcagauguccgaucugcaaaaugccccucccuacaaagcugaaagcggcuacgcagcccuccgccccuucuaccgaagugaaucagaacacaacacccccuccguauacccccugaggacuaguaauaaggaaacuguaugaaugucugugggcaggaagugaagagauccuucuguaaagguuuuuggaauuaugucugcugaauaauaaacuuuuuugaaauaauaaaucugguagaaaaaugagaucuaaaaaaaaaaaaaaaaaaaaaaaaaaaaaaaaaaaaaaaaaaaaaaaaaaaaaaaaaaaaaaaaaaaaaaaaaaaaaaaaaaaaaaaaaaaaaaaaaaaa

SEQ ID NO: 22709 - RNA, 612 nt, Artificial Sequence
  mRNA product Design b-4 (A100) comprising derived and/or modified sequence from LASV(Lassa virus/H.sapiens-wt/NGA/2018/ISTH_0959;Clade II)__AVV65084__Z (opt5)
aggagagucccgcagucggcguccagcggcucugcuuguucgugugugugucguugcaggccuuauucaagcuuaccaugggcaacaagcaggccaaaagcaccaagguggacgagcaccaaagagcucaucugguccccgaugccucccaccucgggccucaguucugcaaaucuuguugguuugaaaaucggggacugguugagugcaacaaucauuaccuuugucugaacugccucagccugcuucuguccgugucuagccgcuguccgaucugcaagaugccccucccuacaaaacugaaggcggcugcccagcccuccgccccuucuacggaagcuauucagagcaccacacccccuccguauacccccugaggacuaguaauaaggaaacuguaugaaugucugugggcaggaagugaagagauccuucuguaaagguuuuuggaauuaugucugcugaauaauaaacuuuuuugaaauaauaaaucugguagaaaaaugagaucuaaaaaaaaaaaaaaaaaaaaaaaaaaaaaaaaaaaaaaaaaaaaaaaaaaaaaaaaaaaaaaaaaaaaaaaaaaaaaaaaaaaaaaaaaaaaaaaaaaaa

SEQ ID NO: 22710 - RNA, 612 nt, Artificial Sequence
  mRNA product Design b-4 (A100) comprising derived and/or modified sequence from LASV(LASV003-NIG-2008;Clade II)__AIT17578__Z (opt5)
aggagagucccgcagucggcguccagcggcucugcuuguucgugugugugucguugcaggccuuauucaagcuuaccaugggcaacagacaggccaagagcaccaaaguggacgagcaccaacgggcucaucugguccccgaugccucccaccucgggccucaguucugcaagucuuguugguuugaaaauaaaggacugguugagugcaacaaucauuaccuuugucugaacugccucagccugcuucuguccgugucuagccgcuguccgaucugcaagaugccccucccuacaaaacugagagcggcugcccagcccuccgccccuucuacggaaagcgcucagaauaccgcucccccuccguaugcccccugaggacuaguaauaaggaaacuguaugaaugucugugggcaggaagugaagagauccuucuguaaagguuuuuggaauuaugucugcugaauaauaaacuuuuuugaaauaauaaaucugguagaaaaaugagaucuaaaaaaaaaaaaaaaaaaaaaaaaaaaaaaaaaaaaaaaaaaaaaaaaaaaaaaaaaaaaaaaaaaaaaaaaaaaaaaaaaaaaaaaaaaaaaaaaaaaa

SEQ ID NO: 22711 - RNA, 612 nt, Artificial Sequence
  mRNA product Design b-4 (A100) comprising derived and/or modified sequence from LASV(LASV035-NIG-2009;Clade II)__AIT17586__Z (opt5)
aggagagucccgcagucggcguccagcggcucugcuuguucgugugugugucguugcaggccuuauucaagcuuaccaugggcaacaagcaggccaaaagcaccaagguggacgagcaccaaagagcucaucugguccccgaugccucccaccucgggccucaguucugcaaaucuuguugguuugaaaaucggggacugguugagugcaacaaucauuaccuuugucugaacugccucagccugcuucuguccgugucuagccgcuguccgaucugcaagaugccccucccuacaagacugaaagcggcugcccagcccuccgccccuucuacggaagugacccagaauacaacacccccuccguauacccccugaggacuaguaauaaggaaacuguaugaaugucugugggcaggaagugaagagauccuucuguaaagguuuuuggaauuaugucugcugaauaauaaacuuuuuugaaauaauaaaucugguagaaaaaugagaucuaaaaaaaaaaaaaaaaaaaaaaaaaaaaaaaaaaaaaaaaaaaaaaaaaaaaaaaaaaaaaaaaaaaaaaaaaaaaaaaaaaaaaaaaaaaaaaaaaaaa

SEQ ID NO: 22712 - RNA, 612 nt, Artificial Sequence
  mRNA product Design b-4 (A100) comprising derived and/or modified sequence from LASV(LASV1000-NIG-2009;Clade II)__AIT17780__Z (opt5)
aggagagucccgcagucggcguccagcggcucugcuuguucgugugugugucguugcaggccuuauucaagcuuaccaugggcaacagacagaccaagagcacaaaaguggacgagcaccaacgggccuaccugguccccgaugcuucccuccuggggccucaguucugcaagucuuguugguuugaaaauaaaggacuuguugagugcaacaaucauuaucugugucucaacugccugagccuucugcucuccgugucuagccgcuguccgaucugcaagaugccccugccuacgagacugaaagccgcggcucagcccuccgccccucccaccgaagccauucagaauacaaccccuccgcccuacacaccuugaggacuaguaauaaggaaacuguaugaaugucugugggcaggaagugaagagauccuucuguaaagguuuuuggaauuaugucugcugaauaauaaacuuuuuugaaauaauaaaucugguagaaaaaugagaucuaaaaaaaaaaaaaaaaaaaaaaaaaaaaaaaaaaaaaaaaaaaaaaaaaaaaaaaaaaaaaaaaaaaaaaaaaaaaaaaaaaaaaaaaaaaaaaaaaaaa

SEQ ID NO: 22713 - RNA, 612 nt, Artificial Sequence
  mRNA product Design b-4 (A100) comprising derived and/or modified sequence from LASV(LASV221-NIG-2010;Clade II)__AIT17622__Z (opt5)
aggagagucccgcagucggcguccagcggcucugcuuguucgugugugugucguugcaggccuuauucaagcuuaccaugggcaacagacaggccaagagcaccaaaguggacgagcaccaacgggcucaucugguccccgaugccucccaccucgggccucaguucugcaagucuuguugguuugaaaaucgcggacugguugagugcaacaaucauuaccuuugucugaacugccucagccugcuucuguccgugucuagcagauguccgaucugcaaaaugccccucccuacaaagcugaaagcggcuacgcagcccuccgccccuucuaccgaagugacacagaauaccauucccccuccguauagccccugaggacuaguaauaaggaaacuguaugaaugucugugggcaggaagugaagagauccuucuguaaagguuuuuggaauuaugucugcugaauaauaaacuuuuuugaaauaauaaaucugguagaaaaaugagaucuaaaaaaaaaaaaaaaaaaaaaaaaaaaaaaaaaaaaaaaaaaaaaaaaaaaaaaaaaaaaaaaaaaaaaaaaaaaaaaaaaaaaaaaaaaaaaaaaaaaa

SEQ ID NO: 22714 - RNA, 612 nt, Artificial Sequence
  mRNA product Design b-4 (A100) comprising derived and/or modified sequence from LASV(LASV237-NIG-2010;Clade II)__AIT17636__Z (opt5)
aggagagucccgcagucggcguccagcggcucugcuuguucgugugugugucguugcaggccuuauucaagcuuaccaugggcaacagacaggccaagagcaccaaaguggacgagcaccaacgggcucaucugguccccgaugccucccaccucgggccucaguucugcaagucuuguugguuugaaaaucgcggacugguugagugcaacaaucauuaccuuugucugaacugccucagccugcuucuguccgugucuagcagauguccgaucugcaaaaugccccucccuacaaagcugaaagcggcugcccagcccuccgccccuucuauugaaacgauccagaauaccacacccccuccguauacccccugaggacuaguaauaaggaaacuguaugaaugucugugggcaggaagugaagagauccuucuguaaagguuuuuggaauuaugucugcugaauaauaaacuuuuuugaaauaauaaaucugguagaaaaaugagaucuaaaaaaaaaaaaaaaaaaaaaaaaaaaaaaaaaaaaaaaaaaaaaaaaaaaaaaaaaaaaaaaaaaaaaaaaaaaaaaaaaaaaaaaaaaaaaaaaaaaa

SEQ ID NO: 22715 - RNA, 612 nt, Artificial Sequence
  mRNA product Design b-4 (A100) comprising derived and/or modified sequence from LASV(LASV253-NIG-2011;Clade II)__AIT17668__Z (opt5)
aggagagucccgcagucggcguccagcggcucugcuuguucgugugugugucguugcaggccuuauucaagcuuaccaugggcaacagacaggccaagagcaccaaaguggacgagcaccaacgggcucaucugguccccgaugccucccaccucgggccucaguucugcaagucuuguugguuugaaaauaaaggacugguugagugcaacaaucauuaccuuugucugaacugccucagccugcuucuguccgugucuagccgcuguccgaucugcaagaugccccucccuacaaaacugaagacgaccgcgcagcccuccgcuccucccacagaagccgccaagaauaccgcuccuccgcccuaugccccuugaggacuaguaauaaggaaacuguaugaaugucugugggcaggaagugaagagauccuucuguaaagguuuuuggaauuaugucugcugaauaauaaacuuuuuugaaauaauaaaucugguagaaaaaugagaucuaaaaaaaaaaaaaaaaaaaaaaaaaaaaaaaaaaaaaaaaaaaaaaaaaaaaaaaaaaaaaaaaaaaaaaaaaaaaaaaaaaaaaaaaaaaaaaaaaaaa

SEQ ID NO: 22716 - RNA, 612 nt, Artificial Sequence
  mRNA product Design b-4 (A100) comprising derived and/or modified sequence from LASV(G1180-SLE-2010;Clade IV)__AIT17166__Z (opt5)
aggagagucccgcagucggcguccagcggcucugcuuguucgugugugugucguugcaggccuuauucaagcuuaccaugggcaacaagcaggccaaagcucccgaggccaaggacagcccuagagcgucccugaucccggaugcuacccaccucgggccccaauucugcaaaucuuguugguuugaaacaaagggacugguggagugcaauaaccauuaccuuugucugaauugccucacgcugcuucugagcgucuccaaccgguguccuauuugcaaaaugccccucccuaccaagcugcgccccucugccacaccuaccgccccgcccacagaagcugccgacagcaucggcccucccccuuauucccccugaggacuaguaauaaggaaacuguaugaaugucugugggcaggaagugaagagauccuucuguaaagguuuuuggaauuaugucugcugaauaauaaacuuuuuugaaauaauaaaucugguagaaaaaugagaucuaaaaaaaaaaaaaaaaaaaaaaaaaaaaaaaaaaaaaaaaaaaaaaaaaaaaaaaaaaaaaaaaaaaaaaaaaaaaaaaaaaaaaaaaaaaaaaaaaaaa

SEQ ID NO: 22717 - RNA, 612 nt, Artificial Sequence
  mRNA product Design b-4 (A100) comprising derived and/or modified sequence from LASV(G1442-SLE-2011;Clade IV)__AIT17178__Z (opt5)
aggagagucccgcagucggcguccagcggcucugcuuguucgugugugugucguugcaggccuuauucaagcuuaccaugggcaacaagcaggccaaagcuagcgaggccaaggacucccccagagcgucucugaucccugaugcuacccaccucgggccgcaauucugcaaaagcuguugguuugaaaauaagggacugguggagugcaacaaucauuaccuuugucugaacugccucucccugcuucugucugucagcucccggugucccauuugcaaaaugccucuccccacacgccugagaccuucuacggcccccaccgccccuccggcucgggccggcgacaauaucaagcccccucccuauagcccuugaggacuaguaauaaggaaacuguaugaaugucugugggcaggaagugaagagauccuucuguaaagguuuuuggaauuaugucugcugaauaauaaacuuuuuugaaauaauaaaucugguagaaaaaugagaucuaaaaaaaaaaaaaaaaaaaaaaaaaaaaaaaaaaaaaaaaaaaaaaaaaaaaaaaaaaaaaaaaaaaaaaaaaaaaaaaaaaaaaaaaaaaaaaaaaaaa

SEQ ID NO: 22718 - RNA, 612 nt, Artificial Sequence
  mRNA product Design b-4 (A100) comprising derived and/or modified sequence from LASV(G502-SLE-2009;Clade IV)__AIT17124__Z (opt5)
aggagagucccgcagucggcguccagcggcucugcuuguucgugugugugucguugcaggccuuauucaagcuuaccaugggcaacaaacaggugaagacccccgaggccaaggacagcccuagagcuucccugaucccggaugccacacaccucgggccccaauucugcaaaucuuguugguuugaaaauaagggacuggucgagugcaacaaucauuaccuuugucugaacugccucacgcugcuucugagcguuggcaaucgguguccuauuugcaaaaugccccucccuaccaagcugcgccccuccgugacaccuaccgcgccgcccacaagagcugccgacucuaucgggccucccccuuauagccccugaggacuaguaauaaggaaacuguaugaaugucugugggcaggaagugaagagauccuucuguaaagguuuuuggaauuaugucugcugaauaauaaacuuuuuugaaauaauaaaucugguagaaaaaugagaucuaaaaaaaaaaaaaaaaaaaaaaaaaaaaaaaaaaaaaaaaaaaaaaaaaaaaaaaaaaaaaaaaaaaaaaaaaaaaaaaaaaaaaaaaaaaaaaaaaaaa

SEQ ID NO: 22719 - RNA, 612 nt, Artificial Sequence
  mRNA product Design b-4 (A100) comprising derived and/or modified sequence from LASV(G733-SLE-2010;Clade IV)__AIT17152__Z (opt5)
aggagagucccgcagucggcguccagcggcucugcuuguucgugugugugucguugcaggccuuauucaagcuuaccaugggcaacaagcaggccaaaacccccgagacaaaggacagcccuagagcuucccugaucccggaugccacgcaccucgggccccaauucugcaaaucuuguugguuugaaaauaagggacugguggagugcaacaaucauuaccuuugucugaacugccucacccugcuucugagcgucuccaaucgguguccuauuugcaaaaugccccucccuacaaagcugcgccccucuaccgcgccuacagcuccgcccgccggcgccgcugacaacaccagaccucccccuuauagccccugaggacuaguaauaaggaaacuguaugaaugucugugggcaggaagugaagagauccuucuguaaagguuuuuggaauuaugucugcugaauaauaaacuuuuuugaaauaauaaaucugguagaaaaaugagaucuaaaaaaaaaaaaaaaaaaaaaaaaaaaaaaaaaaaaaaaaaaaaaaaaaaaaaaaaaaaaaaaaaaaaaaaaaaaaaaaaaaaaaaaaaaaaaaaaaaaa

SEQ ID NO: 22720 - RNA, 624 nt, Artificial Sequence
  mRNA product Design b-4 (A100) comprising derived and/or modified sequence from MOPV/LASV reassortant(IGS-1;Clade IV)__AFY05533__Z (opt5)
aggagagucccgcagucggcguccagcggcucugcuuguucgugugugugucguugcaggccuuauucaagcuuaccaugggcaagacccagagcaaagggcaacccuccacaaaccugcucaaggagacggaaccuagacacccggugauccccgacgcccggggaaccggcccugaguucugcaaaucuuguugguuugaacgcagagggcugguccggugcaaugaucauuaccuuugucugaacugccucacacugcuucacaccguuagcgaccgcugucccaucugcaagcauaaacugccuuucagacucgagcugcagacacagcccaccgcuccuccggaaauucccccuucccagaaucccccucccuauucuccgugaggacuaguaauaaggaaacuguaugaaugucugugggcaggaagugaagagauccuucuguaaagguuuuuggaauuaugucugcugaauaauaaacuuuuuugaaauaauaaaucugguagaaaaaugagaucuaaaaaaaaaaaaaaaaaaaaaaaaaaaaaaaaaaaaaaaaaaaaaaaaaaaaaaaaaaaaaaaaaaaaaaaaaaaaaaaaaaaaaaaaaaaaaaaaaaaa

SEQ ID NO: 22721 - RNA, 612 nt, Artificial Sequence
  mRNA product Design b-4 (A100) comprising derived and/or modified sequence from LASV(LM776-SLE-2012;Clade IV)__AIT17824__Z (opt5)
aggagagucccgcagucggcguccagcggcucugcuuguucgugugugugucguugcaggccuuauucaagcuuaccaugggcaacaagcaggccaaagcuagcgaggaaaagaacucccccagagccucucugaucccugacgcgacccaccucgggccgcaauucugcaaaagcuguugguuugagaauaagggacugguggaaugcaauaaccauuaccuuugucugaauugccucacacugcuucuguccgucucuaaccggugucccauuugcaaaaugccucuccccacgaagcugcgcccuagcaccacacccaccgcuccuccgacaggcgccgccgauuccaucagacccccucccuauucuccuugaggacuaguaauaaggaaacuguaugaaugucugugggcaggaagugaagagauccuucuguaaagguuuuuggaauuaugucugcugaauaauaaacuuuuuugaaauaauaaaucugguagaaaaaugagaucuaaaaaaaaaaaaaaaaaaaaaaaaaaaaaaaaaaaaaaaaaaaaaaaaaaaaaaaaaaaaaaaaaaaaaaaaaaaaaaaaaaaaaaaaaaaaaaaaaaaa

SEQ ID NO: 22722 - RNA, 612 nt, Artificial Sequence
  mRNA product Design b-4 (A100) comprising derived and/or modified sequence from LASV(Mad39;Clade IV)__ANH09743__Z (opt5)
aggagagucccgcagucggcguccagcggcucugcuuguucgugugugugucguugcaggccuuauucaagcuuaccaugggcaacaagcaggccaaagcuagcgagguggaagacgggcccagagccucccugaucccugaugcgacccaccucggaccgcaauucugcaagucuuguugguuugagaauaaaagccuggucgaaugcaacaaucauuaccuuugucugaacugccucacacugcuucuguccguuucuaaucggugucccauuugcaagaugccucuccccacgcgccugaaaccuagcguggugcccaccgcuccuccgacaagagccggcgacgggacccggcccccucccuauuccccuugaggacuaguaauaaggaaacuguaugaaugucugugggcaggaagugaagagauccuucuguaaagguuuuuggaauuaugucugcugaauaauaaacuuuuuugaaauaauaaaucugguagaaaaaugagaucuaaaaaaaaaaaaaaaaaaaaaaaaaaaaaaaaaaaaaaaaaaaaaaaaaaaaaaaaaaaaaaaaaaaaaaaaaaaaaaaaaaaaaaaaaaaaaaaaaaaa

SEQ ID NO: 22723 - RNA, 612 nt, Artificial Sequence
  mRNA product Design b-4 (A100) comprising derived and/or modified sequence from LASV(Z0947-SLE-2011;Clade IV)__AIT17838__Z (opt5)
aggagagucccgcagucggcguccagcggcucugcuuguucgugugugugucguugcaggccuuauucaagcuuaccaugggcaacaagcaggccaaagugcccgagagcaaggacuccccuagagcuucucugaucccggaugccacccaccucgggccccaauucugcaaaagcuguugguuugaaaauaagggacuggucgagugcaacaaucauuaccuuugucugaacugccucacacugcuucuguccguuucuaaucgguguccuauuugcaaaaugccccucccuacgaagcugaagcccagcgcggcuccuaccgccccgcccacaggcgccgcugacuccauccgcccucccccuuauucucccugaggacuaguaauaaggaaacuguaugaaugucugugggcaggaagugaagagauccuucuguaaagguuuuuggaauuaugucugcugaauaauaaacuuuuuugaaauaauaaaucugguagaaaaaugagaucuaaaaaaaaaaaaaaaaaaaaaaaaaaaaaaaaaaaaaaaaaaaaaaaaaaaaaaaaaaaaaaaaaaaaaaaaaaaaaaaaaaaaaaaaaaaaaaaaaaaa

SEQ ID NO: 22724 - RNA, 482 nt, Artificial Sequence
  mRNA product Design i-3 (hSL-A64-N5) comprising derived and/or modified sequence from LASV(Josiah;Clade IV)__ADY11072/NP_694871__Z (opt1)
aggagaaagcuuaccaugggcaacaagcaggccaaggcccccgagagcaaggacuccccgcgcgcgagccugauccccgacgccacccaccucgggccccaguucugcaaguccugcugguucgagaacaagggccugguggagugcaacaaccacuaccugugccucaacugccugacccugcuccugagcgucuccaaccggugccccaucugcaagaugccgcugcccacgaagcuccgccccagcgccgcccccaccgccccgcccaccggggcggccgacuccauccggcccccgcccuacagccccugaggacuaguuauaagacugacuagcccgaugggccucccaacgggcccuccuccccuccuugcaccgagauuaaucaaaggcucuuuucagagccaccaaaaaaaaaaaaaaaaaaaaaaaaaaaaaaaaaaaaaaaaaaaaaaaaaaaaaaaaaaaaaaaaagaauu

SEQ ID NO: 22725 - RNA, 485 nt, Artificial Sequence
  mRNA product Design i-3 (hSL-A64-N5) comprising derived and/or modified sequence from LASV(Pinneo-NIG-1969;Clade I)__AIT17834__Z (opt1)
aggagaaagcuuaccaugggcaacaagcagacccgcagcccgcccaagcccgagcacccccggcccacccugcuccccgacgccucccaccuggggccccaguucugcaagagcugcugguucgagaacaagggccugguggagugcaacaaccacuaccucugccugaacugccugacgcuccugcuguccgucagcgaccgcugccccaucugcaagaugccccuccccaccaagcuggccgugcggacccagcccuccgcgccgccccugaaccaggggaacacccagagcagcccgccgcccuacucccccugaggacuaguuauaagacugacuagcccgaugggccucccaacgggcccuccuccccuccuugcaccgagauuaaucaaaggcucuuuucagagccaccaaaaaaaaaaaaaaaaaaaaaaaaaaaaaaaaaaaaaaaaaaaaaaaaaaaaaaaaaaaaaaaaagaauu

SEQ ID NO: 22726 - RNA, 482 nt, Artificial Sequence
  mRNA product Design i-3 (hSL-A64-N5) comprising derived and/or modified sequence from LASV(Nig08-04;Clade II)__ADU56612__Z (opt1)
aggagaaagcuuaccaugggcaaccgccagacccggcccaccgaggccacggagcagagccgcgcccaccuggugccggacgccucccaccucgggccccaguucugcaagagcugcugguucgagaaccggggccuggucgagugcaacaaccacuaccugugccucaacugccugucccugcuccugagcguguccagccgcugccccaucugcaagaugccccugccgacccggcucaaggccuccgcccagcccagcgccccgcccaccgaggcgccccagaacaccacgcccccgcccuacacccccugaggacuaguuauaagacugacuagcccgaugggccucccaacgggcccuccuccccuccuugcaccgagauuaaucaaaggcucuuuucagagccaccaaaaaaaaaaaaaaaaaaaaaaaaaaaaaaaaaaaaaaaaaaaaaaaaaaaaaaaaaaaaaaaaagaauu

SEQ ID NO: 22727 - RNA, 482 nt, Artificial Sequence
  mRNA product Design i-3 (hSL-A64-N5) comprising derived and/or modified sequence from LASV(Nig08-A19;Clade III)__ADU56620__Z (opt1)
aggagaaagcuuaccaugggcgggaagcacaccaagccccagcgcgagagcaacuccccgcgggccagccugauccccgacgccacccaccucggcccccaguucugcaaguccugcugguucgagaacaaggggcugguggagugcaacaaccacuaccugugccucaacugccugacgcugcuccugagcguguccaaccgcugccccaucugcaagaugccccugcccacccggcuccgcgccagcaccaaccccaccgcgccccagguggagcaggucggcccgacgaacccgccgcccuacucccccugaggacuaguuauaagacugacuagcccgaugggccucccaacgggcccuccuccccuccuugcaccgagauuaaucaaaggcucuuuucagagccaccaaaaaaaaaaaaaaaaaaaaaaaaaaaaaaaaaaaaaaaaaaaaaaaaaaaaaaaaaaaaaaaaagaauu

SEQ ID NO: 22728 - RNA, 482 nt, Artificial Sequence
  mRNA product Design i-3 (hSL-A64-N5) comprising derived and/or modified sequence from LASV(AV;Clade V)__CCA30312__Z (opt1)
aggagaaagcuuaccaugggcaaccgccaggccaagaaccccgagguggagaacagcccccgggccucccugauccccgacgcgacccaccucgggccccaguucugcaagagcugcugguucgagaacaagggccuggucgagugcaacaaccacuaccugugccucaacugccugucccugcuccugagcguguccaaccgcugccccaucugcaagaugccgcugcccacccggcuccgccccacgaccacccccaccgccccgcagaucaucaaggagaacacgaccaacccgccgcccuacacccccugaggacuaguuauaagacugacuagcccgaugggccucccaacgggcccuccuccccuccuugcaccgagauuaaucaaaggcucuuuucagagccaccaaaaaaaaaaaaaaaaaaaaaaaaaaaaaaaaaaaaaaaaaaaaaaaaaaaaaaaaaaaaaaaaagaauu

SEQ ID NO: 22729 - RNA, 482 nt, Artificial Sequence
  mRNA product Design i-3 (hSL-A64-N5) comprising derived and/or modified sequence from LASV(Togo/2016/7082;Clade VI)__AMR44579__Z (opt1)
aggagaaagcuuaccaugggcgcccgccagaccaagcagccccagaucgaggggagcccccgggccucccuggugcccgacgcgagccaccucggcccccaguucugcaaguccugcugguucgagaacaaggggcuggucgagugcaacaaccacuaccugugccucaacugccugagccugcuccuguccgugagcaaccgcugccccaucugcaagaugccgcugcccaccaagcuccggguguccagcgcccccuccgcgcccccggccgccacggcccagcccggcaccccgccgcccuacagccccugaggacuaguuauaagacugacuagcccgaugggccucccaacgggcccuccuccccuccuugcaccgagauuaaucaaaggcucuuuucagagccaccaaaaaaaaaaaaaaaaaaaaaaaaaaaaaaaaaaaaaaaaaaaaaaaaaaaaaaaaaaaaaaaaagaauu

SEQ ID NO: 22730 - RNA, 482 nt, Artificial Sequence
  mRNA product Design i-3 (hSL-A64-N5) comprising derived and/or modified sequence from LASV(KAK-428;Clade n.d. (VII))__ANH09761__Z (opt1)
aggagaaagcuuaccaugggcaacaaggggaccaagcccacccagaacagcgagcccucccgcgccaaccuggugcccgacgccagcuaccucggcccccaguucugcaaguccugcugguucgagaacaaggggcuggucgagugcaacaaccacuaccugugccucaacugccugacgaugcugcucagcguguccaaccggugccccaucugcaagaugccgcugcccaccaagaucaaggccagcggcucccccagcgcgcccccgaccgaggccaacuccgccgugagcccgccgcccuacacccccugaggacuaguuauaagacugacuagcccgaugggccucccaacgggcccuccuccccuccuugcaccgagauuaaucaaaggcucuuuucagagccaccaaaaaaaaaaaaaaaaaaaaaaaaaaaaaaaaaaaaaaaaaaaaaaaaaaaaaaaaaaaaaaaaagaauu

SEQ ID NO: 22731 - RNA, 482 nt, Artificial Sequence
  mRNA product Design i-3 (hSL-A64-N5) comprising derived and/or modified sequence from LASV(ISTH0009-NIG-2011;Clade II)__AIT17402__Z (opt1)
aggagaaagcuuaccaugggcaaccgccaggccaagagcaccaagguggacgagcaccagcgggcccaccugguccccgacgcgucccaccucgggccccaguucugcaagagcugcugguucgagaaccgcggccugguggagugcaacaaccacuaccugugccucaacugccugucccugcuccugagcguguccagccggugccccaucugcaagaugccccugcccaccaagcucaaggccgccgcccagccguccgcccccagcacggagaccauccagaacaccaccccgccgcccuacacgcccugaggacuaguuauaagacugacuagcccgaugggccucccaacgggcccuccuccccuccuugcaccgagauuaaucaaaggcucuuuucagagccaccaaaaaaaaaaaaaaaaaaaaaaaaaaaaaaaaaaaaaaaaaaaaaaaaaaaaaaaaaaaaaaaaagaauu

SEQ ID NO: 22732 - RNA, 482 nt, Artificial Sequence
  mRNA product Design i-3 (hSL-A64-N5) comprising derived and/or modified sequence from LASV(ISTH2010-NIG-2012;Clade II)__AIT17480__Z (opt1)
aggagaaagcuuaccaugggcaaccgccacgccaagagcaccaagguggacgagcaccagcgggcccaccugguccccgacgcgucccaccucgggccccaguucugcaagagcugcugguucgagaaccgcggccugguggagugcaacaaccacuaccugugccucaacugccugucccugcuccugagcguguccagccggugccccaucugcaagaugccccugcccaccaagcucaaggccgccgcccagccguccgcccccagcacggaggucauccaguccaccaccccgccgcccuacacccccugaggacuaguuauaagacugacuagcccgaugggccucccaacgggcccuccuccccuccuugcaccgagauuaaucaaaggcucuuuucagagccaccaaaaaaaaaaaaaaaaaaaaaaaaaaaaaaaaaaaaaaaaaaaaaaaaaaaaaaaaaaaaaaaaagaauu

SEQ ID NO: 22733 - RNA, 482 nt, Artificial Sequence
  mRNA product Design i-3 (hSL-A64-N5) comprising derived and/or modified sequence from LASV(Lassa virus/H.sapiens-wt/NGA/2016/ISTH_0017;Clade II)__AVO03713__Z (opt1)
aggagaaagcuuaccaugggcaaccgccaggccaagagcaccaagguggacgagcaccagcgggcccaccugguccccgacgcgucccaccucgggccccaguucugcaagagcugcugguucgagaaccgcggccugguggagugcaacaaccacuaccugugccucaacugccugucccugcuccugagcguguccagccggugccccaucugcaagaugccccugcccaccaagcucaaggccgccacgcagccguccgcccccagcaccgaggucaaccagaacaccaccccgccgcccuacacgcccugaggacuaguuauaagacugacuagcccgaugggccucccaacgggcccuccuccccuccuugcaccgagauuaaucaaaggcucuuuucagagccaccaaaaaaaaaaaaaaaaaaaaaaaaaaaaaaaaaaaaaaaaaaaaaaaaaaaaaaaaaaaaaaaaagaauu

SEQ ID NO: 22734 - RNA, 482 nt, Artificial Sequence
  mRNA product Design i-3 (hSL-A64-N5) comprising derived and/or modified sequence from LASV(Lassa virus/H.sapiens-wt/NGA/2018/ISTH_0959;Clade II)__AVV65084__Z (opt1)
aggagaaagcuuaccaugggcaacaagcaggccaagagcaccaagguggacgagcaccagcgcgcccaccugguccccgacgcgucccaccucgggccccaguucugcaagagcugcugguucgagaaccggggccugguggagugcaacaaccacuaccugugccucaacugccugucccugcuccugagcguguccagccgcugccccaucugcaagaugccccugcccaccaagcucaaggccgccgcccagccguccgcccccagcacggaggcgauccaguccaccaccccgccgcccuacacccccugaggacuaguuauaagacugacuagcccgaugggccucccaacgggcccuccuccccuccuugcaccgagauuaaucaaaggcucuuuucagagccaccaaaaaaaaaaaaaaaaaaaaaaaaaaaaaaaaaaaaaaaaaaaaaaaaaaaaaaaaaaaaaaaaagaauu

SEQ ID NO: 22735 - RNA, 482 nt, Artificial Sequence
  mRNA product Design i-3 (hSL-A64-N5) comprising derived and/or modified sequence from LASV(LASV003-NIG-2008;Clade II)__AIT17578__Z (opt1)
aggagaaagcuuaccaugggcaaccgccaggccaagagcaccaagguggacgagcaccagcgggcccaccugguccccgacgcgucccaccucgggccccaguucugcaagagcugcugguucgagaacaagggccugguggagugcaacaaccacuaccugugccucaacugccugucccugcuccugagcguguccagccgcugccccaucugcaagaugccccugcccaccaagcuccgggccgccgcccagccguccgcccccagcacggaguccgcgcagaacaccgccccgccgcccuacgcccccugaggacuaguuauaagacugacuagcccgaugggccucccaacgggcccuccuccccuccuugcaccgagauuaaucaaaggcucuuuucagagccaccaaaaaaaaaaaaaaaaaaaaaaaaaaaaaaaaaaaaaaaaaaaaaaaaaaaaaaaaaaaaaaaaagaauu

SEQ ID NO: 22736 - RNA, 482 nt, Artificial Sequence
  mRNA product Design i-3 (hSL-A64-N5) comprising derived and/or modified sequence from LASV(LASV035-NIG-2009;Clade II)__AIT17586__Z (opt1)
aggagaaagcuuaccaugggcaacaagcaggccaagagcaccaagguggacgagcaccagcgcgcccaccugguccccgacgcgucccaccucgggccccaguucugcaagagcugcugguucgagaaccggggccugguggagugcaacaaccacuaccugugccucaacugccugucccugcuccugagcguguccagccgcugccccaucugcaagaugccccugcccacccggcucaaggccgccgcccagccguccgcccccagcacggaggucacccagaacaccaccccgccgcccuacacgcccugaggacuaguuauaagacugacuagcccgaugggccucccaacgggcccuccuccccuccuugcaccgagauuaaucaaaggcucuuuucagagccaccaaaaaaaaaaaaaaaaaaaaaaaaaaaaaaaaaaaaaaaaaaaaaaaaaaaaaaaaaaaaaaaaagaauu

SEQ ID NO: 22737 - RNA, 482 nt, Artificial Sequence
  mRNA product Design i-3 (hSL-A64-N5) comprising derived and/or modified sequence from LASV(LASV1000-NIG-2009;Clade II)__AIT17780__Z (opt1)
aggagaaagcuuaccaugggcaaccgccagaccaagagcaccaagguggacgagcaccagcgggccuaccugguccccgacgccucccuccuggggccccaguucugcaagagcugcugguucgagaacaagggccugguggagugcaacaaccacuaccucugccugaacugccugucccuccugcugagcguguccagccgcugccccaucugcaagaugccccuccccacgcggcugaaggcggccgcccagcccuccgccccgcccaccgaggccauccagaacaccacgccgccgcccuacacccccugaggacuaguuauaagacugacuagcccgaugggccucccaacgggcccuccuccccuccuugcaccgagauuaaucaaaggcucuuuucagagccaccaaaaaaaaaaaaaaaaaaaaaaaaaaaaaaaaaaaaaaaaaaaaaaaaaaaaaaaaaaaaaaaaagaauu

SEQ ID NO: 22738 - RNA, 482 nt, Artificial Sequence
  mRNA product Design i-3 (hSL-A64-N5) comprising derived and/or modified sequence from LASV(LASV221-NIG-2010;Clade II)__AIT17622__Z (opt1)
aggagaaagcuuaccaugggcaaccgccaggccaagagcaccaagguggacgagcaccagcgggcccaccugguccccgacgcgucccaccucgggccccaguucugcaagagcugcugguucgagaaccgcggccugguggagugcaacaaccacuaccugugccucaacugccugucccugcuccugagcguguccagccggugccccaucugcaagaugccccugcccaccaagcucaaggccgccacgcagccguccgcccccagcaccgaggucacccagaacaccaucccgccgcccuacucccccugaggacuaguuauaagacugacuagcccgaugggccucccaacgggcccuccuccccuccuugcaccgagauuaaucaaaggcucuuuucagagccaccaaaaaaaaaaaaaaaaaaaaaaaaaaaaaaaaaaaaaaaaaaaaaaaaaaaaaaaaaaaaaaaaagaauu

SEQ ID NO: 22739 - RNA, 482 nt, Artificial Sequence
  mRNA product Design i-3 (hSL-A64-N5) comprising derived and/or modified sequence from LASV(LASV237-NIG-2010;Clade II)__AIT17636__Z (opt1)
aggagaaagcuuaccaugggcaaccgccaggccaagagcaccaagguggacgagcaccagcgggcccaccugguccccgacgcgucccaccucgggccccaguucugcaagagcugcugguucgagaaccgcggccugguggagugcaacaaccacuaccugugccucaacugccugucccugcuccugagcguguccagccggugccccaucugcaagaugccccugcccaccaagcucaaggccgccgcccagccguccgcccccagcaucgagacgauccagaacaccaccccgccgcccuacacccccugaggacuaguuauaagacugacuagcccgaugggccucccaacgggcccuccuccccuccuugcaccgagauuaaucaaaggcucuuuucagagccaccaaaaaaaaaaaaaaaaaaaaaaaaaaaaaaaaaaaaaaaaaaaaaaaaaaaaaaaaaaaaaaaaagaauu

SEQ ID NO: 22740 - RNA, 482 nt, Artificial Sequence
  mRNA product Design i-3 (hSL-A64-N5) comprising derived and/or modified sequence from LASV(LASV253-NIG-2011;Clade II)__AIT17668__Z (opt1)
aggagaaagcuuaccaugggcaaccgccaggccaagagcaccaagguggacgagcaccagcgggcccaccugguccccgacgcgucccaccucgggccccaguucugcaagagcugcugguucgagaacaagggccugguggagugcaacaaccacuaccugugccucaacugccugucccugcuccugagcguguccagccgcugccccaucugcaagaugccccugcccaccaagcucaagacgaccgcccagccguccgccccgcccaccgaggccgccaagaacaccgcgcccccgcccuacgcccccugaggacuaguuauaagacugacuagcccgaugggccucccaacgggcccuccuccccuccuugcaccgagauuaaucaaaggcucuuuucagagccaccaaaaaaaaaaaaaaaaaaaaaaaaaaaaaaaaaaaaaaaaaaaaaaaaaaaaaaaaaaaaaaaaagaauu

SEQ ID NO: 22741 - RNA, 482 nt, Artificial Sequence
  mRNA product Design i-3 (hSL-A64-N5) comprising derived and/or modified sequence from LASV(G1180-SLE-2010;Clade IV)__AIT17166__Z (opt1)
aggagaaagcuuaccaugggcaacaagcaggccaaggcccccgaggcgaaggacagcccgcgcgccucccugauccccgacgccacccaccucgggccccaguucugcaagagcugcugguucgagaccaagggccugguggagugcaacaaccacuaccugugccucaacugccugacgcugcuccuguccgucagcaaccggugccccaucugcaagaugccgcugcccaccaagcuccgccccuccgccacccccaccgccccgcccacggaggcggccgacagcaucgggcccccgcccuacucccccugaggacuaguuauaagacugacuagcccgaugggccucccaacgggcccuccuccccuccuugcaccgagauuaaucaaaggcucuuuucagagccaccaaaaaaaaaaaaaaaaaaaaaaaaaaaaaaaaaaaaaaaaaaaaaaaaaaaaaaaaaaaaaaaaagaauu

SEQ ID NO: 22742 - RNA, 482 nt, Artificial Sequence
  mRNA product Design i-3 (hSL-A64-N5) comprising derived and/or modified sequence from LASV(G1442-SLE-2011;Clade IV)__AIT17178__Z (opt1)
aggagaaagcuuaccaugggcaacaagcaggccaaggccagcgaggcgaaggacagcccccgcgccucccugaucccggacgccacccaccucgggccccaguucugcaaguccugcugguucgagaacaagggccugguggagugcaacaaccacuaccugugccucaacugccugagccugcuccuguccgucagcucccggugccccaucugcaagaugccccugccgacccgccuccggcccagcacggcccccaccgcgcccccggcccgcgccggggacaacaucaagcccccgcccuacucccccugaggacuaguuauaagacugacuagcccgaugggccucccaacgggcccuccuccccuccuugcaccgagauuaaucaaaggcucuuuucagagccaccaaaaaaaaaaaaaaaaaaaaaaaaaaaaaaaaaaaaaaaaaaaaaaaaaaaaaaaaaaaaaaaaagaauu

SEQ ID NO: 22743 - RNA, 482 nt, Artificial Sequence
  mRNA product Design i-3 (hSL-A64-N5) comprising derived and/or modified sequence from LASV(G502-SLE-2009;Clade IV)__AIT17124__Z (opt1)
aggagaaagcuuaccaugggcaacaagcaggucaagacccccgaggccaaggacagcccccgcgccucccugauccccgacgcgacccaccucgggccccaguucugcaagagcugcugguucgagaacaagggccugguggagugcaacaaccacuaccugugccucaacugccugacgcugcuccuguccguggggaaccggugccccaucugcaagaugccgcugcccaccaagcuccgccccagcgugacccccaccgccccgcccacgcgggccgccgacuccaucggcccgccgcccuacagccccugaggacuaguuauaagacugacuagcccgaugggccucccaacgggcccuccuccccuccuugcaccgagauuaaucaaaggcucuuuucagagccaccaaaaaaaaaaaaaaaaaaaaaaaaaaaaaaaaaaaaaaaaaaaaaaaaaaaaaaaaaaaaaaaaagaauu

SEQ ID NO: 22744 - RNA, 482 nt, Artificial Sequence
  mRNA product Design i-3 (hSL-A64-N5) comprising derived and/or modified sequence from LASV(G733-SLE-2010;Clade IV)__AIT17152__Z (opt1)
aggagaaagcuuaccaugggcaacaagcaggccaagacccccgagaccaaggacagcccgcgcgccucccugauccccgacgcgacgcaccucgggccccaguucugcaagagcugcugguucgagaacaagggccugguggagugcaacaaccacuaccugugccucaacugccugacccugcuccuguccgucagcaaccggugccccaucugcaagaugccgcugcccaccaagcuccgccccuccaccgcccccacggccccgcccgccggggccgcggacaacacccggcccccgcccuacagccccugaggacuaguuauaagacugacuagcccgaugggccucccaacgggcccuccuccccuccuugcaccgagauuaaucaaaggcucuuuucagagccaccaaaaaaaaaaaaaaaaaaaaaaaaaaaaaaaaaaaaaaaaaaaaaaaaaaaaaaaaaaaaaaaaagaauu

SEQ ID NO: 22745 - RNA, 494 nt, Artificial Sequence
  mRNA product Design i-3 (hSL-A64-N5) comprising derived and/or modified sequence from MOPV/LASV reassortant(IGS-1;Clade IV)__AFY05533__Z (opt1)
aggagaaagcuuaccaugggcaagacccagagcaaggggcagcccuccaccaaccugcucaaggagacggagccccgccaccccgugauccccgacgcccggggcaccgggcccgaguucugcaagagcugcugguucgagcgccggggccugguccgcugcaacgaccacuaccugugccucaacugccugacccugcuccacaccguguccgaccggugccccaucugcaagcacaagcugcccuuccgccuggagcuccagacgcagcccaccgccccgcccgagaucccgcccagccagaacccgccgcccuacucccccugaggacuaguuauaagacugacuagcccgaugggccucccaacgggcccuccuccccuccuugcaccgagauuaaucaaaggcucuuuucagagccaccaaaaaaaaaaaaaaaaaaaaaaaaaaaaaaaaaaaaaaaaaaaaaaaaaaaaaaaaaaaaaaaaagaauu

SEQ ID NO: 22746 - RNA, 482 nt, Artificial Sequence
  mRNA product Design i-3 (hSL-A64-N5) comprising derived and/or modified sequence from LASV(LM776-SLE-2012;Clade IV)__AIT17824__Z (opt1)
aggagaaagcuuaccaugggcaacaagcaggccaaggccagcgaggagaagaacagcccccgcgccucccugaucccggacgccacccaccucgggccccaguucugcaaguccugcugguucgagaacaagggccugguggagugcaacaaccacuaccugugccucaacugccugacccugcuccugagcgucuccaaccggugccccaucugcaagaugccccugccgacgaagcuccgccccagcaccacccccaccgcgcccccgacgggggccgccgacuccauccggcccccgcccuacagccccugaggacuaguuauaagacugacuagcccgaugggccucccaacgggcccuccuccccuccuugcaccgagauuaaucaaaggcucuuuucagagccaccaaaaaaaaaaaaaaaaaaaaaaaaaaaaaaaaaaaaaaaaaaaaaaaaaaaaaaaaaaaaaaaaagaauu

SEQ ID NO: 22747 - RNA, 482 nt, Artificial Sequence
  mRNA product Design i-3 (hSL-A64-N5) comprising derived and/or modified sequence from LASV(Mad39;Clade IV)__ANH09743__Z (opt1)
aggagaaagcuuaccaugggcaacaagcaggccaaggccagcgagguggaggacgggccccgcgccucccugauccccgacgccacccaccucggcccccaguucugcaagagcugcugguucgagaacaagucccuggucgagugcaacaaccacuaccugugccucaacugccugacccugcuccugagcguguccaaccggugccccaucugcaagaugccccugccgacgcgccucaagcccagcgugguccccaccgcgcccccgacccgggccggggacggcacccgcccgccgcccuacucccccugaggacuaguuauaagacugacuagcccgaugggccucccaacgggcccuccuccccuccuugcaccgagauuaaucaaaggcucuuuucagagccaccaaaaaaaaaaaaaaaaaaaaaaaaaaaaaaaaaaaaaaaaaaaaaaaaaaaaaaaaaaaaaaaaagaauu

SEQ ID NO: 22748 - RNA, 482 nt, Artificial Sequence
  mRNA product Design i-3 (hSL-A64-N5) comprising derived and/or modified sequence from LASV(Z0947-SLE-2011;Clade IV)__AIT17838__Z (opt1)
aggagaaagcuuaccaugggcaacaagcaggccaaggugcccgagagcaaggacuccccgcgcgccagccugauccccgacgcgacccaccucgggccccaguucugcaaguccugcugguucgagaacaagggccuggucgagugcaacaaccacuaccugugccucaacugccugacccugcuccugagcguguccaaccgcugccccaucugcaagaugccgcugcccacgaagcucaagcccagcgccgcccccaccgccccgcccaccggggccgcggacuccauccggcccccgcccuacagccccugaggacuaguuauaagacugacuagcccgaugggccucccaacgggcccuccuccccuccuugcaccgagauuaaucaaaggcucuuuucagagccaccaaaaaaaaaaaaaaaaaaaaaaaaaaaaaaaaaaaaaaaaaaaaaaaaaaaaaaaaaaaaaaaaagaauu

SEQ ID NO: 22749 - RNA, 482 nt, Artificial Sequence
  mRNA product Design i-3 (hSL-A64-N5) comprising derived and/or modified sequence from LASV(Josiah;Clade IV)__ADY11072/NP_694871__Z (opt4)
aggagaaagcuuaccaugggcaacaagcaggccaaggcccccgagagcaaggacagccccagagccagccugauccccgacgccacccaccugggcccccaguucugcaagagcugcugguucgagaacaagggccugguggagugcaacaaccacuaccugugccugaacugccugacccugcugcugagcgugagcaacagaugccccaucugcaagaugccccugcccaccaagcugagacccagcgccgcccccaccgccccccccaccggcgccgccgacagcaucagacccccccccuacagccccugaggacuaguuauaagacugacuagcccgaugggccucccaacgggcccuccuccccuccuugcaccgagauuaaucaaaggcucuuuucagagccaccaaaaaaaaaaaaaaaaaaaaaaaaaaaaaaaaaaaaaaaaaaaaaaaaaaaaaaaaaaaaaaaaagaauu

SEQ ID NO: 22750 - RNA, 485 nt, Artificial Sequence
  mRNA product Design i-3 (hSL-A64-N5) comprising derived and/or modified sequence from LASV(Pinneo-NIG-1969;Clade I)__AIT17834__Z (opt4)
aggagaaagcuuaccaugggcaacaagcagaccagaagcccccccaagcccgagcaccccagacccacccugcugcccgacgccagccaccugggcccccaguucugcaagagcugcugguucgagaacaagggccugguggagugcaacaaccacuaccugugccugaacugccugacccugcugcugagcgugagcgacagaugccccaucugcaagaugccccugcccaccaagcuggccgugagaacccagcccagcgcccccccccugaaccagggcaacacccagagcagccccccccccuacagccccugaggacuaguuauaagacugacuagcccgaugggccucccaacgggcccuccuccccuccuugcaccgagauuaaucaaaggcucuuuucagagccaccaaaaaaaaaaaaaaaaaaaaaaaaaaaaaaaaaaaaaaaaaaaaaaaaaaaaaaaaaaaaaaaaagaauu

SEQ ID NO: 22751 - RNA, 482 nt, Artificial Sequence
  mRNA product Design i-3 (hSL-A64-N5) comprising derived and/or modified sequence from LASV(Nig08-04;Clade II)__ADU56612__Z (opt4)
aggagaaagcuuaccaugggcaacagacagaccagacccaccgaggccaccgagcagagcagagcccaccuggugcccgacgccagccaccugggcccccaguucugcaagagcugcugguucgagaacagaggccugguggagugcaacaaccacuaccugugccugaacugccugagccugcugcugagcgugagcagcagaugccccaucugcaagaugccccugcccaccagacugaaggccagcgcccagcccagcgccccccccaccgaggccccccagaacaccacccccccccccuacacccccugaggacuaguuauaagacugacuagcccgaugggccucccaacgggcccuccuccccuccuugcaccgagauuaaucaaaggcucuuuucagagccaccaaaaaaaaaaaaaaaaaaaaaaaaaaaaaaaaaaaaaaaaaaaaaaaaaaaaaaaaaaaaaaaaagaauu

SEQ ID NO: 22752 - RNA, 482 nt, Artificial Sequence
  mRNA product Design i-3 (hSL-A64-N5) comprising derived and/or modified sequence from LASV(Nig08-A19;Clade III)__ADU56620__Z (opt4)
aggagaaagcuuaccaugggcggcaagcacaccaagccccagagagagagcaacagccccagagccagccugauccccgacgccacccaccugggcccccaguucugcaagagcugcugguucgagaacaagggccugguggagugcaacaaccacuaccugugccugaacugccugacccugcugcugagcgugagcaacagaugccccaucugcaagaugccccugcccaccagacugagagccagcaccaaccccaccgccccccagguggagcaggugggccccaccaaccccccccccuacagccccugaggacuaguuauaagacugacuagcccgaugggccucccaacgggcccuccuccccuccuugcaccgagauuaaucaaaggcucuuuucagagccaccaaaaaaaaaaaaaaaaaaaaaaaaaaaaaaaaaaaaaaaaaaaaaaaaaaaaaaaaaaaaaaaaagaauu

SEQ ID NO: 22753 - RNA, 482 nt, Artificial Sequence
  mRNA product Design i-3 (hSL-A64-N5) comprising derived and/or modified sequence from LASV(AV;Clade V)__CCA30312__Z (opt4)
aggagaaagcuuaccaugggcaacagacaggccaagaaccccgagguggagaacagccccagagccagccugauccccgacgccacccaccugggcccccaguucugcaagagcugcugguucgagaacaagggccugguggagugcaacaaccacuaccugugccugaacugccugagccugcugcugagcgugagcaacagaugccccaucugcaagaugccccugcccaccagacugagacccaccaccacccccaccgccccccagaucaucaaggagaacaccaccaaccccccccccuacacccccugaggacuaguuauaagacugacuagcccgaugggccucccaacgggcccuccuccccuccuugcaccgagauuaaucaaaggcucuuuucagagccaccaaaaaaaaaaaaaaaaaaaaaaaaaaaaaaaaaaaaaaaaaaaaaaaaaaaaaaaaaaaaaaaaagaauu

SEQ ID NO: 22754 - RNA, 482 nt, Artificial Sequence
  mRNA product Design i-3 (hSL-A64-N5) comprising derived and/or modified sequence from LASV(Togo/2016/7082;Clade VI)__AMR44579__Z (opt4)
aggagaaagcuuaccaugggcgccagacagaccaagcagccccagaucgagggcagccccagagccagccuggugcccgacgccagccaccugggcccccaguucugcaagagcugcugguucgagaacaagggccugguggagugcaacaaccacuaccugugccugaacugccugagccugcugcugagcgugagcaacagaugccccaucugcaagaugccccugcccaccaagcugagagugagcagcgcccccagcgccccccccgccgccaccgcccagcccggcacccccccccccuacagccccugaggacuaguuauaagacugacuagcccgaugggccucccaacgggcccuccuccccuccuugcaccgagauuaaucaaaggcucuuuucagagccaccaaaaaaaaaaaaaaaaaaaaaaaaaaaaaaaaaaaaaaaaaaaaaaaaaaaaaaaaaaaaaaaaagaauu

SEQ ID NO: 22755 - RNA, 482 nt, Artificial Sequence
  mRNA product Design i-3 (hSL-A64-N5) comprising derived and/or modified sequence from LASV(KAK-428;Clade n.d. (VII))__ANH09761__Z (opt4)
aggagaaagcuuaccaugggcaacaagggcaccaagcccacccagaacagcgagcccagcagagccaaccuggugcccgacgccagcuaccugggcccccaguucugcaagagcugcugguucgagaacaagggccugguggagugcaacaaccacuaccugugccugaacugccugaccaugcugcugagcgugagcaacagaugccccaucugcaagaugccccugcccaccaagaucaaggccagcggcagccccagcgccccccccaccgaggccaacagcgccgugagccccccccccuacacccccugaggacuaguuauaagacugacuagcccgaugggccucccaacgggcccuccuccccuccuugcaccgagauuaaucaaaggcucuuuucagagccaccaaaaaaaaaaaaaaaaaaaaaaaaaaaaaaaaaaaaaaaaaaaaaaaaaaaaaaaaaaaaaaaaagaauu

SEQ ID NO: 22756 - RNA, 482 nt, Artificial Sequence
  mRNA product Design i-3 (hSL-A64-N5) comprising derived and/or modified sequence from LASV(ISTH0009-NIG-2011;Clade II)__AIT17402__Z (opt4)
aggagaaagcuuaccaugggcaacagacaggccaagagcaccaagguggacgagcaccagagagcccaccuggugcccgacgccagccaccugggcccccaguucugcaagagcugcugguucgagaacagaggccugguggagugcaacaaccacuaccugugccugaacugccugagccugcugcugagcgugagcagcagaugccccaucugcaagaugccccugcccaccaagcugaaggccgccgcccagcccagcgcccccagcaccgagaccauccagaacaccacccccccccccuacacccccugaggacuaguuauaagacugacuagcccgaugggccucccaacgggcccuccuccccuccuugcaccgagauuaaucaaaggcucuuuucagagccaccaaaaaaaaaaaaaaaaaaaaaaaaaaaaaaaaaaaaaaaaaaaaaaaaaaaaaaaaaaaaaaaaagaauu

SEQ ID NO: 22757 - RNA, 482 nt, Artificial Sequence
  mRNA product Design i-3 (hSL-A64-N5) comprising derived and/or modified sequence from LASV(ISTH2010-NIG-2012;Clade II)__AIT17480__Z (opt4)
aggagaaagcuuaccaugggcaacagacacgccaagagcaccaagguggacgagcaccagagagcccaccuggugcccgacgccagccaccugggcccccaguucugcaagagcugcugguucgagaacagaggccugguggagugcaacaaccacuaccugugccugaacugccugagccugcugcugagcgugagcagcagaugccccaucugcaagaugccccugcccaccaagcugaaggccgccgcccagcccagcgcccccagcaccgaggugauccagagcaccacccccccccccuacacccccugaggacuaguuauaagacugacuagcccgaugggccucccaacgggcccuccuccccuccuugcaccgagauuaaucaaaggcucuuuucagagccaccaaaaaaaaaaaaaaaaaaaaaaaaaaaaaaaaaaaaaaaaaaaaaaaaaaaaaaaaaaaaaaaaagaauu

SEQ ID NO: 22758 - RNA, 482 nt, Artificial Sequence
  mRNA product Design i-3 (hSL-A64-N5) comprising derived and/or modified sequence from LASV(Lassa virus/H.sapiens-wt/NGA/2016/ISTH_0017;Clade II)__AVO03713__Z (opt4)
aggagaaagcuuaccaugggcaacagacaggccaagagcaccaagguggacgagcaccagagagcccaccuggugcccgacgccagccaccugggcccccaguucugcaagagcugcugguucgagaacagaggccugguggagugcaacaaccacuaccugugccugaacugccugagccugcugcugagcgugagcagcagaugccccaucugcaagaugccccugcccaccaagcugaaggccgccacccagcccagcgcccccagcaccgaggugaaccagaacaccacccccccccccuacacccccugaggacuaguuauaagacugacuagcccgaugggccucccaacgggcccuccuccccuccuugcaccgagauuaaucaaaggcucuuuucagagccaccaaaaaaaaaaaaaaaaaaaaaaaaaaaaaaaaaaaaaaaaaaaaaaaaaaaaaaaaaaaaaaaaagaauu

SEQ ID NO: 22759 - RNA, 482 nt, Artificial Sequence
  mRNA product Design i-3 (hSL-A64-N5) comprising derived and/or modified sequence from LASV(Lassa virus/H.sapiens-wt/NGA/2018/ISTH_0959;Clade II)__AVV65084__Z (opt4)
aggagaaagcuuaccaugggcaacaagcaggccaagagcaccaagguggacgagcaccagagagcccaccuggugcccgacgccagccaccugggcccccaguucugcaagagcugcugguucgagaacagaggccugguggagugcaacaaccacuaccugugccugaacugccugagccugcugcugagcgugagcagcagaugccccaucugcaagaugccccugcccaccaagcugaaggccgccgcccagcccagcgcccccagcaccgaggccauccagagcaccacccccccccccuacacccccugaggacuaguuauaagacugacuagcccgaugggccucccaacgggcccuccuccccuccuugcaccgagauuaaucaaaggcucuuuucagagccaccaaaaaaaaaaaaaaaaaaaaaaaaaaaaaaaaaaaaaaaaaaaaaaaaaaaaaaaaaaaaaaaaagaauu

SEQ ID NO: 22760 - RNA, 482 nt, Artificial Sequence
  mRNA product Design i-3 (hSL-A64-N5) comprising derived and/or modified sequence from LASV(LASV003-NIG-2008;Clade II)__AIT17578__Z (opt4)
aggagaaagcuuaccaugggcaacagacaggccaagagcaccaagguggacgagcaccagagagcccaccuggugcccgacgccagccaccugggcccccaguucugcaagagcugcugguucgagaacaagggccugguggagugcaacaaccacuaccugugccugaacugccugagccugcugcugagcgugagcagcagaugccccaucugcaagaugccccugcccaccaagcugagagccgccgcccagcccagcgcccccagcaccgagagcgcccagaacaccgcccccccccccuacgcccccugaggacuaguuauaagacugacuagcccgaugggccucccaacgggcccuccuccccuccuugcaccgagauuaaucaaaggcucuuuucagagccaccaaaaaaaaaaaaaaaaaaaaaaaaaaaaaaaaaaaaaaaaaaaaaaaaaaaaaaaaaaaaaaaaagaauu

SEQ ID NO: 22761 - RNA, 482 nt, Artificial Sequence
  mRNA product Design i-3 (hSL-A64-N5) comprising derived and/or modified sequence from LASV(LASV035-NIG-2009;Clade II)__AIT17586__Z (opt4)
aggagaaagcuuaccaugggcaacaagcaggccaagagcaccaagguggacgagcaccagagagcccaccuggugcccgacgccagccaccugggcccccaguucugcaagagcugcugguucgagaacagaggccugguggagugcaacaaccacuaccugugccugaacugccugagccugcugcugagcgugagcagcagaugccccaucugcaagaugccccugcccaccagacugaaggccgccgcccagcccagcgcccccagcaccgaggugacccagaacaccacccccccccccuacacccccugaggacuaguuauaagacugacuagcccgaugggccucccaacgggcccuccuccccuccuugcaccgagauuaaucaaaggcucuuuucagagccaccaaaaaaaaaaaaaaaaaaaaaaaaaaaaaaaaaaaaaaaaaaaaaaaaaaaaaaaaaaaaaaaaagaauu

SEQ ID NO: 22762 - RNA, 482 nt, Artificial Sequence
  mRNA product Design i-3 (hSL-A64-N5) comprising derived and/or modified sequence from LASV(LASV1000-NIG-2009;Clade II)__AIT17780__Z (opt4)
aggagaaagcuuaccaugggcaacagacagaccaagagcaccaagguggacgagcaccagagagccuaccuggugcccgacgccagccugcugggcccccaguucugcaagagcugcugguucgagaacaagggccugguggagugcaacaaccacuaccugugccugaacugccugagccugcugcugagcgugagcagcagaugccccaucugcaagaugccccugcccaccagacugaaggccgccgcccagcccagcgccccccccaccgaggccauccagaacaccacccccccccccuacacccccugaggacuaguuauaagacugacuagcccgaugggccucccaacgggcccuccuccccuccuugcaccgagauuaaucaaaggcucuuuucagagccaccaaaaaaaaaaaaaaaaaaaaaaaaaaaaaaaaaaaaaaaaaaaaaaaaaaaaaaaaaaaaaaaaagaauu

SEQ ID NO: 22763 - RNA, 482 nt, Artificial Sequence
  mRNA product Design i-3 (hSL-A64-N5) comprising derived and/or modified sequence from LASV(LASV221-NIG-2010;Clade II)__AIT17622__Z (opt4)
aggagaaagcuuaccaugggcaacagacaggccaagagcaccaagguggacgagcaccagagagcccaccuggugcccgacgccagccaccugggcccccaguucugcaagagcugcugguucgagaacagaggccugguggagugcaacaaccacuaccugugccugaacugccugagccugcugcugagcgugagcagcagaugccccaucugcaagaugccccugcccaccaagcugaaggccgccacccagcccagcgcccccagcaccgaggugacccagaacaccauccccccccccuacagccccugaggacuaguuauaagacugacuagcccgaugggccucccaacgggcccuccuccccuccuugcaccgagauuaaucaaaggcucuuuucagagccaccaaaaaaaaaaaaaaaaaaaaaaaaaaaaaaaaaaaaaaaaaaaaaaaaaaaaaaaaaaaaaaaaagaauu

SEQ ID NO: 22764 - RNA, 482 nt, Artificial Sequence
  mRNA product Design i-3 (hSL-A64-N5) comprising derived and/or modified sequence from LASV(LASV237-NIG-2010;Clade II)__AIT17636__Z (opt4)
aggagaaagcuuaccaugggcaacagacaggccaagagcaccaagguggacgagcaccagagagcccaccuggugcccgacgccagccaccugggcccccaguucugcaagagcugcugguucgagaacagaggccugguggagugcaacaaccacuaccugugccugaacugccugagccugcugcugagcgugagcagcagaugccccaucugcaagaugccccugcccaccaagcugaaggccgccgcccagcccagcgcccccagcaucgagaccauccagaacaccacccccccccccuacacccccugaggacuaguuauaagacugacuagcccgaugggccucccaacgggcccuccuccccuccuugcaccgagauuaaucaaaggcucuuuucagagccaccaaaaaaaaaaaaaaaaaaaaaaaaaaaaaaaaaaaaaaaaaaaaaaaaaaaaaaaaaaaaaaaaagaauu

SEQ ID NO: 22765 - RNA, 482 nt, Artificial Sequence
  mRNA product Design i-3 (hSL-A64-N5) comprising derived and/or modified sequence from LASV(LASV253-NIG-2011;Clade II)__AIT17668__Z (opt4)
aggagaaagcuuaccaugggcaacagacaggccaagagcaccaagguggacgagcaccagagagcccaccuggugcccgacgccagccaccugggcccccaguucugcaagagcugcugguucgagaacaagggccugguggagugcaacaaccacuaccugugccugaacugccugagccugcugcugagcgugagcagcagaugccccaucugcaagaugccccugcccaccaagcugaagaccaccgcccagcccagcgccccccccaccgaggccgccaagaacaccgcccccccccccuacgcccccugaggacuaguuauaagacugacuagcccgaugggccucccaacgggcccuccuccccuccuugcaccgagauuaaucaaaggcucuuuucagagccaccaaaaaaaaaaaaaaaaaaaaaaaaaaaaaaaaaaaaaaaaaaaaaaaaaaaaaaaaaaaaaaaaagaauu

SEQ ID NO: 22766 - RNA, 482 nt, Artificial Sequence
  mRNA product Design i-3 (hSL-A64-N5) comprising derived and/or modified sequence from LASV(G1180-SLE-2010;Clade IV)__AIT17166__Z (opt4)
aggagaaagcuuaccaugggcaacaagcaggccaaggcccccgaggccaaggacagccccagagccagccugauccccgacgccacccaccugggcccccaguucugcaagagcugcugguucgagaccaagggccugguggagugcaacaaccacuaccugugccugaacugccugacccugcugcugagcgugagcaacagaugccccaucugcaagaugccccugcccaccaagcugagacccagcgccacccccaccgccccccccaccgaggccgccgacagcaucggccccccccccuacagccccugaggacuaguuauaagacugacuagcccgaugggccucccaacgggcccuccuccccuccuugcaccgagauuaaucaaaggcucuuuucagagccaccaaaaaaaaaaaaaaaaaaaaaaaaaaaaaaaaaaaaaaaaaaaaaaaaaaaaaaaaaaaaaaaaagaauu

SEQ ID NO: 22767 - RNA, 482 nt, Artificial Sequence
  mRNA product Design i-3 (hSL-A64-N5) comprising derived and/or modified sequence from LASV(G1442-SLE-2011;Clade IV)__AIT17178__Z (opt4)
aggagaaagcuuaccaugggcaacaagcaggccaaggccagcgaggccaaggacagccccagagccagccugauccccgacgccacccaccugggcccccaguucugcaagagcugcugguucgagaacaagggccugguggagugcaacaaccacuaccugugccugaacugccugagccugcugcugagcgugagcagcagaugccccaucugcaagaugccccugcccaccagacugagacccagcaccgcccccaccgccccccccgccagagccggcgacaacaucaagcccccccccuacagccccugaggacuaguuauaagacugacuagcccgaugggccucccaacgggcccuccuccccuccuugcaccgagauuaaucaaaggcucuuuucagagccaccaaaaaaaaaaaaaaaaaaaaaaaaaaaaaaaaaaaaaaaaaaaaaaaaaaaaaaaaaaaaaaaaagaauu

SEQ ID NO: 22768 - RNA, 482 nt, Artificial Sequence
  mRNA product Design i-3 (hSL-A64-N5) comprising derived and/or modified sequence from LASV(G502-SLE-2009;Clade IV)__AIT17124__Z (opt4)
aggagaaagcuuaccaugggcaacaagcaggugaagacccccgaggccaaggacagccccagagccagccugauccccgacgccacccaccugggcccccaguucugcaagagcugcugguucgagaacaagggccugguggagugcaacaaccacuaccugugccugaacugccugacccugcugcugagcgugggcaacagaugccccaucugcaagaugccccugcccaccaagcugagacccagcgugacccccaccgccccccccaccagagccgccgacagcaucggccccccccccuacagccccugaggacuaguuauaagacugacuagcccgaugggccucccaacgggcccuccuccccuccuugcaccgagauuaaucaaaggcucuuuucagagccaccaaaaaaaaaaaaaaaaaaaaaaaaaaaaaaaaaaaaaaaaaaaaaaaaaaaaaaaaaaaaaaaaagaauu

SEQ ID NO: 22769 - RNA, 482 nt, Artificial Sequence
  mRNA product Design i-3 (hSL-A64-N5) comprising derived and/or modified sequence from LASV(G733-SLE-2010;Clade IV)__AIT17152__Z (opt4)
aggagaaagcuuaccaugggcaacaagcaggccaagacccccgagaccaaggacagccccagagccagccugauccccgacgccacccaccugggcccccaguucugcaagagcugcugguucgagaacaagggccugguggagugcaacaaccacuaccugugccugaacugccugacccugcugcugagcgugagcaacagaugccccaucugcaagaugccccugcccaccaagcugagacccagcaccgcccccaccgccccccccgccggcgccgccgacaacaccagacccccccccuacagccccugaggacuaguuauaagacugacuagcccgaugggccucccaacgggcccuccuccccuccuugcaccgagauuaaucaaaggcucuuuucagagccaccaaaaaaaaaaaaaaaaaaaaaaaaaaaaaaaaaaaaaaaaaaaaaaaaaaaaaaaaaaaaaaaaagaauu

SEQ ID NO: 22770 - RNA, 494 nt, Artificial Sequence
  mRNA product Design i-3 (hSL-A64-N5) comprising derived and/or modified sequence from MOPV/LASV reassortant(IGS-1;Clade IV)__AFY05533__Z (opt4)
aggagaaagcuuaccaugggcaagacccagagcaagggccagcccagcaccaaccugcugaaggagaccgagcccagacaccccgugauccccgacgccagaggcaccggccccgaguucugcaagagcugcugguucgagagaagaggccuggugagaugcaacgaccacuaccugugccugaacugccugacccugcugcacaccgugagcgacagaugccccaucugcaagcacaagcugcccuucagacuggagcugcagacccagcccaccgccccccccgagaucccccccagccagaaccccccccccuacagccccugaggacuaguuauaagacugacuagcccgaugggccucccaacgggcccuccuccccuccuugcaccgagauuaaucaaaggcucuuuucagagccaccaaaaaaaaaaaaaaaaaaaaaaaaaaaaaaaaaaaaaaaaaaaaaaaaaaaaaaaaaaaaaaaaagaauu

SEQ ID NO: 22771 - RNA, 482 nt, Artificial Sequence
  mRNA product Design i-3 (hSL-A64-N5) comprising derived and/or modified sequence from LASV(LM776-SLE-2012;Clade IV)__AIT17824__Z (opt4)
aggagaaagcuuaccaugggcaacaagcaggccaaggccagcgaggagaagaacagccccagagccagccugauccccgacgccacccaccugggcccccaguucugcaagagcugcugguucgagaacaagggccugguggagugcaacaaccacuaccugugccugaacugccugacccugcugcugagcgugagcaacagaugccccaucugcaagaugccccugcccaccaagcugagacccagcaccacccccaccgccccccccaccggcgccgccgacagcaucagacccccccccuacagccccugaggacuaguuauaagacugacuagcccgaugggccucccaacgggcccuccuccccuccuugcaccgagauuaaucaaaggcucuuuucagagccaccaaaaaaaaaaaaaaaaaaaaaaaaaaaaaaaaaaaaaaaaaaaaaaaaaaaaaaaaaaaaaaaaagaauu

SEQ ID NO: 22772 - RNA, 482 nt, Artificial Sequence
  mRNA product Design i-3 (hSL-A64-N5) comprising derived and/or modified sequence from LASV(Mad39;Clade IV)__ANH09743__Z (opt4)
aggagaaagcuuaccaugggcaacaagcaggccaaggccagcgagguggaggacggccccagagccagccugauccccgacgccacccaccugggcccccaguucugcaagagcugcugguucgagaacaagagccugguggagugcaacaaccacuaccugugccugaacugccugacccugcugcugagcgugagcaacagaugccccaucugcaagaugccccugcccaccagacugaagcccagcguggugcccaccgccccccccaccagagccggcgacggcaccagacccccccccuacagccccugaggacuaguuauaagacugacuagcccgaugggccucccaacgggcccuccuccccuccuugcaccgagauuaaucaaaggcucuuuucagagccaccaaaaaaaaaaaaaaaaaaaaaaaaaaaaaaaaaaaaaaaaaaaaaaaaaaaaaaaaaaaaaaaaagaauu

SEQ ID NO: 22773 - RNA, 482 nt, Artificial Sequence
  mRNA product Design i-3 (hSL-A64-N5) comprising derived and/or modified sequence from LASV(Z0947-SLE-2011;Clade IV)__AIT17838__Z (opt4)
aggagaaagcuuaccaugggcaacaagcaggccaaggugcccgagagcaaggacagccccagagccagccugauccccgacgccacccaccugggcccccaguucugcaagagcugcugguucgagaacaagggccugguggagugcaacaaccacuaccugugccugaacugccugacccugcugcugagcgugagcaacagaugccccaucugcaagaugccccugcccaccaagcugaagcccagcgccgcccccaccgccccccccaccggcgccgccgacagcaucagacccccccccuacagccccugaggacuaguuauaagacugacuagcccgaugggccucccaacgggcccuccuccccuccuugcaccgagauuaaucaaaggcucuuuucagagccaccaaaaaaaaaaaaaaaaaaaaaaaaaaaaaaaaaaaaaaaaaaaaaaaaaaaaaaaaaaaaaaaaagaauu

SEQ ID NO: 22774 - RNA, 482 nt, Artificial Sequence
  mRNA product Design i-3 (hSL-A64-N5) comprising derived and/or modified sequence from LASV(Josiah;Clade IV)__ADY11072/NP_694871__Z (opt5)
aggagaaagcuuaccaugggcaacaagcaggccaaagcucccgagagcaaggacuccccuagagccucucugaucccggaugcgacccaccucgggccccaauucugcaaaagcuguugguuugaaaauaagggacugguggagugcaacaaucauuaccuuugucugaacugccucacacugcuucuguccgucucuaaucgguguccuauuugcaaaaugccccucccuacgaagcugcgccccagcgcugccccuaccgccccgcccacaggcgcugccgacuccaucagaccucccccuuauucucccugaggacuaguuauaagacugacuagcccgaugggccucccaacgggcccuccuccccuccuugcaccgagauuaaucaaaggcucuuuucagagccaccaaaaaaaaaaaaaaaaaaaaaaaaaaaaaaaaaaaaaaaaaaaaaaaaaaaaaaaaaaaaaaaaagaauu

SEQ ID NO: 22775 - RNA, 485 nt, Artificial Sequence
  mRNA product Design i-3 (hSL-A64-N5) comprising derived and/or modified sequence from LASV(Pinneo-NIG-1969;Clade I)__AIT17834__Z (opt5)
aggagaaagcuuaccaugggcaacaagcagaccagaagcccucccaaaccggagcacccccggccuacacugcuccccgacgccucccaucuggggccucaauucugcaagucuuguugguuugaaaauaaaggacuuguggagugcaacaaucacuaccugugucucaacugccugacgcuucugcucagcgucuccgaucgcugucccaucugcaagaugccucugccgaccaaacuggcuguuagaacacagcccucugccccuccccucaaucagggcaacacccagagcuccccucccccguauucuccuugaggacuaguuauaagacugacuagcccgaugggccucccaacgggcccuccuccccuccuugcaccgagauuaaucaaaggcucuuuucagagccaccaaaaaaaaaaaaaaaaaaaaaaaaaaaaaaaaaaaaaaaaaaaaaaaaaaaaaaaaaaaaaaaaagaauu

SEQ ID NO: 22776 - RNA, 482 nt, Artificial Sequence
  mRNA product Design i-3 (hSL-A64-N5) comprising derived and/or modified sequence from LASV(Nig08-04;Clade II)__ADU56612__Z (opt5)
aggagaaagcuuaccaugggcaacagacagacccggcccacagaggccacggaacaaagccgcgcccaccuggugccugacgccucccaucucgggccgcaguucugcaagucuuguugguuugagaauagaggacuggucgaaugcaacaaucacuaccuuugucugaacugccucagccugcuucuguccguuucuagccggugucccaucugcaaaaugccucuccccacccgccugaaggcguccgcucagccuucugcucccccuacagaggccccgcagaauaccacacccccucccuauaccccuugaggacuaguuauaagacugacuagcccgaugggccucccaacgggcccuccuccccuccuugcaccgagauuaaucaaaggcucuuuucagagccaccaaaaaaaaaaaaaaaaaaaaaaaaaaaaaaaaaaaaaaaaaaaaaaaaaaaaaaaaaaaaaaaaagaauu

SEQ ID NO: 22777 - RNA, 482 nt, Artificial Sequence
  mRNA product Design i-3 (hSL-A64-N5) comprising derived and/or modified sequence from LASV(Nig08-A19;Clade III)__ADU56620__Z (opt5)
aggagaaagcuuaccaugggcgggaagcacaccaaaccccagagagagagcaacuccccucgggccucucugaucccggacgcuacacaucucggaccccaauucugcaagagcuguugguuugaaaauaaaggccugguggagugcaacaaucacuaccuuugucugaacugccucacgcugcuucuguccgucucuaaucgcuguccuauuugcaagaugccccucccuaccagacugcgggccagcacaaaccccaccgcgccucagguugaacagguggggccgacaaaucccccucccuauuccccuugaggacuaguuauaagacugacuagcccgaugggccucccaacgggcccuccuccccuccuugcaccgagauuaaucaaaggcucuuuucagagccaccaaaaaaaaaaaaaaaaaaaaaaaaaaaaaaaaaaaaaaaaaaaaaaaaaaaaaaaaaaaaaaaaagaauu

SEQ ID NO: 22778 - RNA, 482 nt, Artificial Sequence
  mRNA product Design i-3 (hSL-A64-N5) comprising derived and/or modified sequence from LASV(AV;Clade V)__CCA30312__Z (opt5)
aggagaaagcuuaccaugggcaacagacaggccaagaaucccgagguggaaaacagcccucgggcuucccugaucccggacgccacccaccucgggccccaauucugcaaaucuuguugguuugagaauaagggacuggucgaaugcaacaaucauuaccuuugucugaacugccucagccugcuucuguccguuucuaaucgcuguccuauuugcaaaaugccccucccuacaagacugcggcccacgaccacaccuaccgcgccgcagaucauuaaggagaacacaaccaaucccccucccuauacaccuugaggacuaguuauaagacugacuagcccgaugggccucccaacgggcccuccuccccuccuugcaccgagauuaaucaaaggcucuuuucagagccaccaaaaaaaaaaaaaaaaaaaaaaaaaaaaaaaaaaaaaaaaaaaaaaaaaaaaaaaaaaaaaaaaagaauu

SEQ ID NO: 22779 - RNA, 482 nt, Artificial Sequence
  mRNA product Design i-3 (hSL-A64-N5) comprising derived and/or modified sequence from LASV(Togo/2016/7082;Clade VI)__AMR44579__Z (opt5)
aggagaaagcuuaccaugggcgccagacagaccaagcaaccccagaucgaggggagcccucgggcuucccuggugccggacgccucucaccucggaccccaguucugcaaaagcuguugguuugaaaacaagggccuggucgagugcaauaaccauuaccuuugucugaauugccucucccugcuucugucuguuagcaaccgcuguccuauuugcaaaaugccccucccuacaaagcugagaguguccucugcgcccagcgcuccuccggccgccacggcucagcccgggaccccucccccuuauucccccugaggacuaguuauaagacugacuagcccgaugggccucccaacgggcccuccuccccuccuugcaccgagauuaaucaaaggcucuuuucagagccaccaaaaaaaaaaaaaaaaaaaaaaaaaaaaaaaaaaaaaaaaaaaaaaaaaaaaaaaaaaaaaaaaagaauu

SEQ ID NO: 22780 - RNA, 482 nt, Artificial Sequence
  mRNA product Design i-3 (hSL-A64-N5) comprising derived and/or modified sequence from LASV(KAK-428;Clade n.d. (VII))__ANH09761__Z (opt5)
aggagaaagcuuaccaugggcaacaaggggaccaaacccacacagaauagcgagccuuccagagccaaccuggugccggacgcuucuuaccucggaccccaauucugcaagagcuguugguuugaaaauaaaggccuggucgagugcaacaaucacuaucuuugucugaacugccucacgaugcugcuuuccguuuccaaucgguguccuaucugcaagaugccccugccuaccaaaauuaaggccagcgggucccccucugcgccuccgacagaagcuaacagcgccgugucucccccucccuacaccccuugaggacuaguuauaagacugacuagcccgaugggccucccaacgggcccuccuccccuccuugcaccgagauuaaucaaaggcucuuuucagagccaccaaaaaaaaaaaaaaaaaaaaaaaaaaaaaaaaaaaaaaaaaaaaaaaaaaaaaaaaaaaaaaaaagaauu

SEQ ID NO: 22781 - RNA, 482 nt, Artificial Sequence
  mRNA product Design i-3 (hSL-A64-N5) comprising derived and/or modified sequence from LASV(ISTH0009-NIG-2011;Clade II)__AIT17402__Z (opt5)
aggagaaagcuuaccaugggcaacagacaggccaagagcaccaaaguggacgagcaccaacgggcucaucugguccccgaugccucccaccucgggccucaguucugcaagucuuguugguuugaaaaucgcggacugguugagugcaacaaucauuaccuuugucugaacugccucagccugcuucuguccgugucuagcagauguccgaucugcaaaaugccccucccuacaaagcugaaagcggcugcccagcccuccgccccuucuacggaaaccauucagaauacaacacccccuccguauacccccugaggacuaguuauaagacugacuagcccgaugggccucccaacgggcccuccuccccuccuugcaccgagauuaaucaaaggcucuuuucagagccaccaaaaaaaaaaaaaaaaaaaaaaaaaaaaaaaaaaaaaaaaaaaaaaaaaaaaaaaaaaaaaaaaagaauu

SEQ ID NO: 22782 - RNA, 482 nt, Artificial Sequence
  mRNA product Design i-3 (hSL-A64-N5) comprising derived and/or modified sequence from LASV(ISTH2010-NIG-2012;Clade II)__AIT17480__Z (opt5)
aggagaaagcuuaccaugggcaacagacacgccaagagcaccaaaguggacgagcaucagcgggcucaccugguccccgaugccucccaucucgggccucaauucugcaagucuuguugguuugaaaaucgcggacugguugagugcaacaaucacuaccuuugucugaacugccucagccugcuucuguccgugucuagcagauguccgaucugcaaaaugccccucccuacaaagcugaaagcggcugcccagcccuccgccccuucuacggaagugauucagagcaccacacccccuccguauacccccugaggacuaguuauaagacugacuagcccgaugggccucccaacgggcccuccuccccuccuugcaccgagauuaaucaaaggcucuuuucagagccaccaaaaaaaaaaaaaaaaaaaaaaaaaaaaaaaaaaaaaaaaaaaaaaaaaaaaaaaaaaaaaaaaagaauu

SEQ ID NO: 22783 - RNA, 482 nt, Artificial Sequence
  mRNA product Design i-3 (hSL-A64-N5) comprising derived and/or modified sequence from LASV(Lassa virus/H.sapiens-wt/NGA/2016/ISTH_0017;Clade II)__AVO03713__Z (opt5)
aggagaaagcuuaccaugggcaacagacaggccaagagcaccaaaguggacgagcaccaacgggcucaucugguccccgaugccucccaccucgggccucaguucugcaagucuuguugguuugaaaaucgcggacugguugagugcaacaaucauuaccuuugucugaacugccucagccugcuucuguccgugucuagcagauguccgaucugcaaaaugccccucccuacaaagcugaaagcggcuacgcagcccuccgccccuucuaccgaagugaaucagaacacaacacccccuccguauacccccugaggacuaguuauaagacugacuagcccgaugggccucccaacgggcccuccuccccuccuugcaccgagauuaaucaaaggcucuuuucagagccaccaaaaaaaaaaaaaaaaaaaaaaaaaaaaaaaaaaaaaaaaaaaaaaaaaaaaaaaaaaaaaaaaagaauu

SEQ ID NO: 22784 - RNA, 482 nt, Artificial Sequence
  mRNA product Design i-3 (hSL-A64-N5) comprising derived and/or modified sequence from LASV(Lassa virus/H.sapiens-wt/NGA/2018/ISTH_0959;Clade II)__AVV65084__Z (opt5)
aggagaaagcuuaccaugggcaacaagcaggccaaaagcaccaagguggacgagcaccaaagagcucaucugguccccgaugccucccaccucgggccucaguucugcaaaucuuguugguuugaaaaucggggacugguugagugcaacaaucauuaccuuugucugaacugccucagccugcuucuguccgugucuagccgcuguccgaucugcaagaugccccucccuacaaaacugaaggcggcugcccagcccuccgccccuucuacggaagcuauucagagcaccacacccccuccguauacccccugaggacuaguuauaagacugacuagcccgaugggccucccaacgggcccuccuccccuccuugcaccgagauuaaucaaaggcucuuuucagagccaccaaaaaaaaaaaaaaaaaaaaaaaaaaaaaaaaaaaaaaaaaaaaaaaaaaaaaaaaaaaaaaaaagaauu

SEQ ID NO: 22785 - RNA, 482 nt, Artificial Sequence
  mRNA product Design i-3 (hSL-A64-N5) comprising derived and/or modified sequence from LASV(LASV003-NIG-2008;Clade II)__AIT17578__Z (opt5)
aggagaaagcuuaccaugggcaacagacaggccaagagcaccaaaguggacgagcaccaacgggcucaucugguccccgaugccucccaccucgggccucaguucugcaagucuuguugguuugaaaauaaaggacugguugagugcaacaaucauuaccuuugucugaacugccucagccugcuucuguccgugucuagccgcuguccgaucugcaagaugccccucccuacaaaacugagagcggcugcccagcccuccgccccuucuacggaaagcgcucagaauaccgcucccccuccguaugcccccugaggacuaguuauaagacugacuagcccgaugggccucccaacgggcccuccuccccuccuugcaccgagauuaaucaaaggcucuuuucagagccaccaaaaaaaaaaaaaaaaaaaaaaaaaaaaaaaaaaaaaaaaaaaaaaaaaaaaaaaaaaaaaaaaagaauu

SEQ ID NO: 22786 - RNA, 482 nt, Artificial Sequence
  mRNA product Design i-3 (hSL-A64-N5) comprising derived and/or modified sequence from LASV(LASV035-NIG-2009;Clade II)__AIT17586__Z (opt5)
aggagaaagcuuaccaugggcaacaagcaggccaaaagcaccaagguggacgagcaccaaagagcucaucugguccccgaugccucccaccucgggccucaguucugcaaaucuuguugguuugaaaaucggggacugguugagugcaacaaucauuaccuuugucugaacugccucagccugcuucuguccgugucuagccgcuguccgaucugcaagaugccccucccuacaagacugaaagcggcugcccagcccuccgccccuucuacggaagugacccagaauacaacacccccuccguauacccccugaggacuaguuauaagacugacuagcccgaugggccucccaacgggcccuccuccccuccuugcaccgagauuaaucaaaggcucuuuucagagccaccaaaaaaaaaaaaaaaaaaaaaaaaaaaaaaaaaaaaaaaaaaaaaaaaaaaaaaaaaaaaaaaaagaauu

SEQ ID NO: 22787 - RNA, 482 nt, Artificial Sequence
  mRNA product Design i-3 (hSL-A64-N5) comprising derived and/or modified sequence from LASV(LASV1000-NIG-2009;Clade II)__AIT17780__Z (opt5)
aggagaaagcuuaccaugggcaacagacagaccaagagcacaaaaguggacgagcaccaacgggccuaccugguccccgaugcuucccuccuggggccucaguucugcaagucuuguugguuugaaaauaaaggacuuguugagugcaacaaucauuaucugugucucaacugccugagccuucugcucuccgugucuagccgcuguccgaucugcaagaugccccugccuacgagacugaaagccgcggcucagcccuccgccccucccaccgaagccauucagaauacaaccccuccgcccuacacaccuugaggacuaguuauaagacugacuagcccgaugggccucccaacgggcccuccuccccuccuugcaccgagauuaaucaaaggcucuuuucagagccaccaaaaaaaaaaaaaaaaaaaaaaaaaaaaaaaaaaaaaaaaaaaaaaaaaaaaaaaaaaaaaaaaagaauu

SEQ ID NO: 22788 - RNA, 482 nt, Artificial Sequence
  mRNA product Design i-3 (hSL-A64-N5) comprising derived and/or modified sequence from LASV(LASV221-NIG-2010;Clade II)__AIT17622__Z (opt5)
aggagaaagcuuaccaugggcaacagacaggccaagagcaccaaaguggacgagcaccaacgggcucaucugguccccgaugccucccaccucgggccucaguucugcaagucuuguugguuugaaaaucgcggacugguugagugcaacaaucauuaccuuugucugaacugccucagccugcuucuguccgugucuagcagauguccgaucugcaaaaugccccucccuacaaagcugaaagcggcuacgcagcccuccgccccuucuaccgaagugacacagaauaccauucccccuccguauagccccugaggacuaguuauaagacugacuagcccgaugggccucccaacgggcccuccuccccuccuugcaccgagauuaaucaaaggcucuuuucagagccaccaaaaaaaaaaaaaaaaaaaaaaaaaaaaaaaaaaaaaaaaaaaaaaaaaaaaaaaaaaaaaaaaagaauu

SEQ ID NO: 22789 - RNA, 482 nt, Artificial Sequence
  mRNA product Design i-3 (hSL-A64-N5) comprising derived and/or modified sequence from LASV(LASV237-NIG-2010;Clade II)__AIT17636__Z (opt5)
aggagaaagcuuaccaugggcaacagacaggccaagagcaccaaaguggacgagcaccaacgggcucaucugguccccgaugccucccaccucgggccucaguucugcaagucuuguugguuugaaaaucgcggacugguugagugcaacaaucauuaccuuugucugaacugccucagccugcuucuguccgugucuagcagauguccgaucugcaaaaugccccucccuacaaagcugaaagcggcugcccagcccuccgccccuucuauugaaacgauccagaauaccacacccccuccguauacccccugaggacuaguuauaagacugacuagcccgaugggccucccaacgggcccuccuccccuccuugcaccgagauuaaucaaaggcucuuuucagagccaccaaaaaaaaaaaaaaaaaaaaaaaaaaaaaaaaaaaaaaaaaaaaaaaaaaaaaaaaaaaaaaaaagaauu

SEQ ID NO: 22790 - RNA, 482 nt, Artificial Sequence
  mRNA product Design i-3 (hSL-A64-N5) comprising derived and/or modified sequence from LASV(LASV253-NIG-2011;Clade II)__AIT17668__Z (opt5)
aggagaaagcuuaccaugggcaacagacaggccaagagcaccaaaguggacgagcaccaacgggcucaucugguccccgaugccucccaccucgggccucaguucugcaagucuuguugguuugaaaauaaaggacugguugagugcaacaaucauuaccuuugucugaacugccucagccugcuucuguccgugucuagccgcuguccgaucugcaagaugccccucccuacaaaacugaagacgaccgcgcagcccuccgcuccucccacagaagccgccaagaauaccgcuccuccgcccuaugccccuugaggacuaguuauaagacugacuagcccgaugggccucccaacgggcccuccuccccuccuugcaccgagauuaaucaaaggcucuuuucagagccaccaaaaaaaaaaaaaaaaaaaaaaaaaaaaaaaaaaaaaaaaaaaaaaaaaaaaaaaaaaaaaaaaagaauu

SEQ ID NO: 22791 - RNA, 482 nt, Artificial Sequence
  mRNA product Design i-3 (hSL-A64-N5) comprising derived and/or modified sequence from LASV(G1180-SLE-2010;Clade IV)__AIT17166__Z (opt5)
aggagaaagcuuaccaugggcaacaagcaggccaaagcucccgaggccaaggacagcccuagagcgucccugaucccggaugcuacccaccucgggccccaauucugcaaaucuuguugguuugaaacaaagggacugguggagugcaauaaccauuaccuuugucugaauugccucacgcugcuucugagcgucuccaaccgguguccuauuugcaaaaugccccucccuaccaagcugcgccccucugccacaccuaccgccccgcccacagaagcugccgacagcaucggcccucccccuuauucccccugaggacuaguuauaagacugacuagcccgaugggccucccaacgggcccuccuccccuccuugcaccgagauuaaucaaaggcucuuuucagagccaccaaaaaaaaaaaaaaaaaaaaaaaaaaaaaaaaaaaaaaaaaaaaaaaaaaaaaaaaaaaaaaaaagaauu

SEQ ID NO: 22792 - RNA, 482 nt, Artificial Sequence
  mRNA product Design i-3 (hSL-A64-N5) comprising derived and/or modified sequence from LASV(G1442-SLE-2011;Clade IV)__AIT17178__Z (opt5)
aggagaaagcuuaccaugggcaacaagcaggccaaagcuagcgaggccaaggacucccccagagcgucucugaucccugaugcuacccaccucgggccgcaauucugcaaaagcuguugguuugaaaauaagggacugguggagugcaacaaucauuaccuuugucugaacugccucucccugcuucugucugucagcucccggugucccauuugcaaaaugccucuccccacacgccugagaccuucuacggcccccaccgccccuccggcucgggccggcgacaauaucaagcccccucccuauagcccuugaggacuaguuauaagacugacuagcccgaugggccucccaacgggcccuccuccccuccuugcaccgagauuaaucaaaggcucuuuucagagccaccaaaaaaaaaaaaaaaaaaaaaaaaaaaaaaaaaaaaaaaaaaaaaaaaaaaaaaaaaaaaaaaaagaauu

SEQ ID NO: 22793 - RNA, 482 nt, Artificial Sequence
  mRNA product Design i-3 (hSL-A64-N5) comprising derived and/or modified sequence from LASV(G502-SLE-2009;Clade IV)__AIT17124__Z (opt5)
aggagaaagcuuaccaugggcaacaaacaggugaagacccccgaggccaaggacagcccuagagcuucccugaucccggaugccacacaccucgggccccaauucugcaaaucuuguugguuugaaaauaagggacuggucgagugcaacaaucauuaccuuugucugaacugccucacgcugcuucugagcguuggcaaucgguguccuauuugcaaaaugccccucccuaccaagcugcgccccuccgugacaccuaccgcgccgcccacaagagcugccgacucuaucgggccucccccuuauagccccugaggacuaguuauaagacugacuagcccgaugggccucccaacgggcccuccuccccuccuugcaccgagauuaaucaaaggcucuuuucagagccaccaaaaaaaaaaaaaaaaaaaaaaaaaaaaaaaaaaaaaaaaaaaaaaaaaaaaaaaaaaaaaaaaagaauu

SEQ ID NO: 22794 - RNA, 482 nt, Artificial Sequence
  mRNA product Design i-3 (hSL-A64-N5) comprising derived and/or modified sequence from LASV(G733-SLE-2010;Clade IV)__AIT17152__Z (opt5)
aggagaaagcuuaccaugggcaacaagcaggccaaaacccccgagacaaaggacagcccuagagcuucccugaucccggaugccacgcaccucgggccccaauucugcaaaucuuguugguuugaaaauaagggacugguggagugcaacaaucauuaccuuugucugaacugccucacccugcuucugagcgucuccaaucgguguccuauuugcaaaaugccccucccuacaaagcugcgccccucuaccgcgccuacagcuccgcccgccggcgccgcugacaacaccagaccucccccuuauagccccugaggacuaguuauaagacugacuagcccgaugggccucccaacgggcccuccuccccuccuugcaccgagauuaaucaaaggcucuuuucagagccaccaaaaaaaaaaaaaaaaaaaaaaaaaaaaaaaaaaaaaaaaaaaaaaaaaaaaaaaaaaaaaaaaagaauu

SEQ ID NO: 22795 - RNA, 494 nt, Artificial Sequence
  mRNA product Design i-3 (hSL-A64-N5) comprising derived and/or modified sequence from MOPV/LASV reassortant(IGS-1;Clade IV)__AFY05533__Z (opt5)
aggagaaagcuuaccaugggcaagacccagagcaaagggcaacccuccacaaaccugcucaaggagacggaaccuagacacccggugauccccgacgcccggggaaccggcccugaguucugcaaaucuuguugguuugaacgcagagggcugguccggugcaaugaucauuaccuuugucugaacugccucacacugcuucacaccguuagcgaccgcugucccaucugcaagcauaaacugccuuucagacucgagcugcagacacagcccaccgcuccuccggaaauucccccuucccagaaucccccucccuauucuccgugaggacuaguuauaagacugacuagcccgaugggccucccaacgggcccuccuccccuccuugcaccgagauuaaucaaaggcucuuuucagagccaccaaaaaaaaaaaaaaaaaaaaaaaaaaaaaaaaaaaaaaaaaaaaaaaaaaaaaaaaaaaaaaaaagaauu

SEQ ID NO: 22796 - RNA, 482 nt, Artificial Sequence
  mRNA product Design i-3 (hSL-A64-N5) comprising derived and/or modified sequence from LASV(LM776-SLE-2012;Clade IV)__AIT17824__Z (opt5)
aggagaaagcuuaccaugggcaacaagcaggccaaagcuagcgaggaaaagaacucccccagagccucucugaucccugacgcgacccaccucgggccgcaauucugcaaaagcuguugguuugagaauaagggacugguggaaugcaauaaccauuaccuuugucugaauugccucacacugcuucuguccgucucuaaccggugucccauuugcaaaaugccucuccccacgaagcugcgcccuagcaccacacccaccgcuccuccgacaggcgccgccgauuccaucagacccccucccuauucuccuugaggacuaguuauaagacugacuagcccgaugggccucccaacgggcccuccuccccuccuugcaccgagauuaaucaaaggcucuuuucagagccaccaaaaaaaaaaaaaaaaaaaaaaaaaaaaaaaaaaaaaaaaaaaaaaaaaaaaaaaaaaaaaaaaagaauu

SEQ ID NO: 22797 - RNA, 482 nt, Artificial Sequence
  mRNA product Design i-3 (hSL-A64-N5) comprising derived and/or modified sequence from LASV(Mad39;Clade IV)__ANH09743__Z (opt5)
aggagaaagcuuaccaugggcaacaagcaggccaaagcuagcgagguggaagacgggcccagagccucccugaucccugaugcgacccaccucggaccgcaauucugcaagucuuguugguuugagaauaaaagccuggucgaaugcaacaaucauuaccuuugucugaacugccucacacugcuucuguccguuucuaaucggugucccauuugcaagaugccucuccccacgcgccugaaaccuagcguggugcccaccgcuccuccgacaagagccggcgacgggacccggcccccucccuauuccccuugaggacuaguuauaagacugacuagcccgaugggccucccaacgggcccuccuccccuccuugcaccgagauuaaucaaaggcucuuuucagagccaccaaaaaaaaaaaaaaaaaaaaaaaaaaaaaaaaaaaaaaaaaaaaaaaaaaaaaaaaaaaaaaaaagaauu

SEQ ID NO: 22798 - RNA, 482 nt, Artificial Sequence
  mRNA product Design i-3 (hSL-A64-N5) comprising derived and/or modified sequence from LASV(Z0947-SLE-2011;Clade IV)__AIT17838__Z (opt5)
aggagaaagcuuaccaugggcaacaagcaggccaaagugcccgagagcaaggacuccccuagagcuucucugaucccggaugccacccaccucgggccccaauucugcaaaagcuguugguuugaaaauaagggacuggucgagugcaacaaucauuaccuuugucugaacugccucacacugcuucuguccguuucuaaucgguguccuauuugcaaaaugccccucccuacgaagcugaagcccagcgcggcuccuaccgccccgcccacaggcgccgcugacuccauccgcccucccccuuauucucccugaggacuaguuauaagacugacuagcccgaugggccucccaacgggcccuccuccccuccuugcaccgagauuaaucaaaggcucuuuucagagccaccaaaaaaaaaaaaaaaaaaaaaaaaaaaaaaaaaaaaaaaaaaaaaaaaaaaaaaaaaaaaaaaaagaauu

SEQ ID NO: 22799 - RNA, 513 nt, Artificial Sequence
  mRNA product Design i-3 (hSL-A100) comprising derived and/or modified sequence from LASV(Josiah;Clade IV)__ADY11072/NP_694871__Z (opt1)
aggagaaagcuuaccaugggcaacaagcaggccaaggcccccgagagcaaggacuccccgcgcgcgagccugauccccgacgccacccaccucgggccccaguucugcaaguccugcugguucgagaacaagggccugguggagugcaacaaccacuaccugugccucaacugccugacccugcuccugagcgucuccaaccggugccccaucugcaagaugccgcugcccacgaagcuccgccccagcgccgcccccaccgccccgcccaccggggcggccgacuccauccggcccccgcccuacagccccugaggacuaguuauaagacugacuagcccgaugggccucccaacgggcccuccuccccuccuugcaccgagauuaaucaaaggcucuuuucagagccaccaaaaaaaaaaaaaaaaaaaaaaaaaaaaaaaaaaaaaaaaaaaaaaaaaaaaaaaaaaaaaaaaaaaaaaaaaaaaaaaaaaaaaaaaaaaaaaaaaaaaa

SEQ ID NO: 22800 - RNA, 516 nt, Artificial Sequence
  mRNA product Design i-3 (hSL-A100) comprising derived and/or modified sequence from LASV(Pinneo-NIG-1969;Clade I)__AIT17834__Z (opt1)
aggagaaagcuuaccaugggcaacaagcagacccgcagcccgcccaagcccgagcacccccggcccacccugcuccccgacgccucccaccuggggccccaguucugcaagagcugcugguucgagaacaagggccugguggagugcaacaaccacuaccucugccugaacugccugacgcuccugcuguccgucagcgaccgcugccccaucugcaagaugccccuccccaccaagcuggccgugcggacccagcccuccgcgccgccccugaaccaggggaacacccagagcagcccgccgcccuacucccccugaggacuaguuauaagacugacuagcccgaugggccucccaacgggcccuccuccccuccuugcaccgagauuaaucaaaggcucuuuucagagccaccaaaaaaaaaaaaaaaaaaaaaaaaaaaaaaaaaaaaaaaaaaaaaaaaaaaaaaaaaaaaaaaaaaaaaaaaaaaaaaaaaaaaaaaaaaaaaaaaaaaaa

SEQ ID NO: 22801 - RNA, 513 nt, Artificial Sequence
  mRNA product Design i-3 (hSL-A100) comprising derived and/or modified sequence from LASV(Nig08-04;Clade II)__ADU56612__Z (opt1)
aggagaaagcuuaccaugggcaaccgccagacccggcccaccgaggccacggagcagagccgcgcccaccuggugccggacgccucccaccucgggccccaguucugcaagagcugcugguucgagaaccggggccuggucgagugcaacaaccacuaccugugccucaacugccugucccugcuccugagcguguccagccgcugccccaucugcaagaugccccugccgacccggcucaaggccuccgcccagcccagcgccccgcccaccgaggcgccccagaacaccacgcccccgcccuacacccccugaggacuaguuauaagacugacuagcccgaugggccucccaacgggcccuccuccccuccuugcaccgagauuaaucaaaggcucuuuucagagccaccaaaaaaaaaaaaaaaaaaaaaaaaaaaaaaaaaaaaaaaaaaaaaaaaaaaaaaaaaaaaaaaaaaaaaaaaaaaaaaaaaaaaaaaaaaaaaaaaaaaaa

SEQ ID NO: 22802 - RNA, 513 nt, Artificial Sequence
  mRNA product Design i-3 (hSL-A100) comprising derived and/or modified sequence from LASV(Nig08-A19;Clade III)__ADU56620__Z (opt1)
aggagaaagcuuaccaugggcgggaagcacaccaagccccagcgcgagagcaacuccccgcgggccagccugauccccgacgccacccaccucggcccccaguucugcaaguccugcugguucgagaacaaggggcugguggagugcaacaaccacuaccugugccucaacugccugacgcugcuccugagcguguccaaccgcugccccaucugcaagaugccccugcccacccggcuccgcgccagcaccaaccccaccgcgccccagguggagcaggucggcccgacgaacccgccgcccuacucccccugaggacuaguuauaagacugacuagcccgaugggccucccaacgggcccuccuccccuccuugcaccgagauuaaucaaaggcucuuuucagagccaccaaaaaaaaaaaaaaaaaaaaaaaaaaaaaaaaaaaaaaaaaaaaaaaaaaaaaaaaaaaaaaaaaaaaaaaaaaaaaaaaaaaaaaaaaaaaaaaaaaaaa

SEQ ID NO: 22803 - RNA, 513 nt, Artificial Sequence
  mRNA product Design i-3 (hSL-A100) comprising derived and/or modified sequence from LASV(AV;Clade V)__CCA30312__Z (opt1)
aggagaaagcuuaccaugggcaaccgccaggccaagaaccccgagguggagaacagcccccgggccucccugauccccgacgcgacccaccucgggccccaguucugcaagagcugcugguucgagaacaagggccuggucgagugcaacaaccacuaccugugccucaacugccugucccugcuccugagcguguccaaccgcugccccaucugcaagaugccgcugcccacccggcuccgccccacgaccacccccaccgccccgcagaucaucaaggagaacacgaccaacccgccgcccuacacccccugaggacuaguuauaagacugacuagcccgaugggccucccaacgggcccuccuccccuccuugcaccgagauuaaucaaaggcucuuuucagagccaccaaaaaaaaaaaaaaaaaaaaaaaaaaaaaaaaaaaaaaaaaaaaaaaaaaaaaaaaaaaaaaaaaaaaaaaaaaaaaaaaaaaaaaaaaaaaaaaaaaaaa

SEQ ID NO: 22804 - RNA, 513 nt, Artificial Sequence
  mRNA product Design i-3 (hSL-A100) comprising derived and/or modified sequence from LASV(Togo/2016/7082;Clade VI)__AMR44579__Z (opt1)
aggagaaagcuuaccaugggcgcccgccagaccaagcagccccagaucgaggggagcccccgggccucccuggugcccgacgcgagccaccucggcccccaguucugcaaguccugcugguucgagaacaaggggcuggucgagugcaacaaccacuaccugugccucaacugccugagccugcuccuguccgugagcaaccgcugccccaucugcaagaugccgcugcccaccaagcuccggguguccagcgcccccuccgcgcccccggccgccacggcccagcccggcaccccgccgcccuacagccccugaggacuaguuauaagacugacuagcccgaugggccucccaacgggcccuccuccccuccuugcaccgagauuaaucaaaggcucuuuucagagccaccaaaaaaaaaaaaaaaaaaaaaaaaaaaaaaaaaaaaaaaaaaaaaaaaaaaaaaaaaaaaaaaaaaaaaaaaaaaaaaaaaaaaaaaaaaaaaaaaaaaaa

SEQ ID NO: 22805 - RNA, 513 nt, Artificial Sequence
  mRNA product Design i-3 (hSL-A100) comprising derived and/or modified sequence from LASV(KAK-428;Clade n.d. (VII))__ANH09761__Z (opt1)
aggagaaagcuuaccaugggcaacaaggggaccaagcccacccagaacagcgagcccucccgcgccaaccuggugcccgacgccagcuaccucggcccccaguucugcaaguccugcugguucgagaacaaggggcuggucgagugcaacaaccacuaccugugccucaacugccugacgaugcugcucagcguguccaaccggugccccaucugcaagaugccgcugcccaccaagaucaaggccagcggcucccccagcgcgcccccgaccgaggccaacuccgccgugagcccgccgcccuacacccccugaggacuaguuauaagacugacuagcccgaugggccucccaacgggcccuccuccccuccuugcaccgagauuaaucaaaggcucuuuucagagccaccaaaaaaaaaaaaaaaaaaaaaaaaaaaaaaaaaaaaaaaaaaaaaaaaaaaaaaaaaaaaaaaaaaaaaaaaaaaaaaaaaaaaaaaaaaaaaaaaaaaaa

SEQ ID NO: 22806 - RNA, 513 nt, Artificial Sequence
  mRNA product Design i-3 (hSL-A100) comprising derived and/or modified sequence from LASV(ISTH0009-NIG-2011;Clade II)__AIT17402__Z (opt1)
aggagaaagcuuaccaugggcaaccgccaggccaagagcaccaagguggacgagcaccagcgggcccaccugguccccgacgcgucccaccucgggccccaguucugcaagagcugcugguucgagaaccgcggccugguggagugcaacaaccacuaccugugccucaacugccugucccugcuccugagcguguccagccggugccccaucugcaagaugccccugcccaccaagcucaaggccgccgcccagccguccgcccccagcacggagaccauccagaacaccaccccgccgcccuacacgcccugaggacuaguuauaagacugacuagcccgaugggccucccaacgggcccuccuccccuccuugcaccgagauuaaucaaaggcucuuuucagagccaccaaaaaaaaaaaaaaaaaaaaaaaaaaaaaaaaaaaaaaaaaaaaaaaaaaaaaaaaaaaaaaaaaaaaaaaaaaaaaaaaaaaaaaaaaaaaaaaaaaaaa

SEQ ID NO: 22807 - RNA, 513 nt, Artificial Sequence
  mRNA product Design i-3 (hSL-A100) comprising derived and/or modified sequence from LASV(ISTH2010-NIG-2012;Clade II)__AIT17480__Z (opt1)
aggagaaagcuuaccaugggcaaccgccacgccaagagcaccaagguggacgagcaccagcgggcccaccugguccccgacgcgucccaccucgggccccaguucugcaagagcugcugguucgagaaccgcggccugguggagugcaacaaccacuaccugugccucaacugccugucccugcuccugagcguguccagccggugccccaucugcaagaugccccugcccaccaagcucaaggccgccgcccagccguccgcccccagcacggaggucauccaguccaccaccccgccgcccuacacccccugaggacuaguuauaagacugacuagcccgaugggccucccaacgggcccuccuccccuccuugcaccgagauuaaucaaaggcucuuuucagagccaccaaaaaaaaaaaaaaaaaaaaaaaaaaaaaaaaaaaaaaaaaaaaaaaaaaaaaaaaaaaaaaaaaaaaaaaaaaaaaaaaaaaaaaaaaaaaaaaaaaaaa

SEQ ID NO: 22808 - RNA, 513 nt, Artificial Sequence
  mRNA product Design i-3 (hSL-A100) comprising derived and/or modified sequence from LASV(Lassa virus/H.sapiens-wt/NGA/2016/ISTH_0017;Clade II)__AVO03713__Z (opt1)
aggagaaagcuuaccaugggcaaccgccaggccaagagcaccaagguggacgagcaccagcgggcccaccugguccccgacgcgucccaccucgggccccaguucugcaagagcugcugguucgagaaccgcggccugguggagugcaacaaccacuaccugugccucaacugccugucccugcuccugagcguguccagccggugccccaucugcaagaugccccugcccaccaagcucaaggccgccacgcagccguccgcccccagcaccgaggucaaccagaacaccaccccgccgcccuacacgcccugaggacuaguuauaagacugacuagcccgaugggccucccaacgggcccuccuccccuccuugcaccgagauuaaucaaaggcucuuuucagagccaccaaaaaaaaaaaaaaaaaaaaaaaaaaaaaaaaaaaaaaaaaaaaaaaaaaaaaaaaaaaaaaaaaaaaaaaaaaaaaaaaaaaaaaaaaaaaaaaaaaaaa

SEQ ID NO: 22809 - RNA, 513 nt, Artificial Sequence
  mRNA product Design i-3 (hSL-A100) comprising derived and/or modified sequence from LASV(Lassa virus/H.sapiens-wt/NGA/2018/ISTH_0959;Clade II)__AVV65084__Z (opt1)
aggagaaagcuuaccaugggcaacaagcaggccaagagcaccaagguggacgagcaccagcgcgcccaccugguccccgacgcgucccaccucgggccccaguucugcaagagcugcugguucgagaaccggggccugguggagugcaacaaccacuaccugugccucaacugccugucccugcuccugagcguguccagccgcugccccaucugcaagaugccccugcccaccaagcucaaggccgccgcccagccguccgcccccagcacggaggcgauccaguccaccaccccgccgcccuacacccccugaggacuaguuauaagacugacuagcccgaugggccucccaacgggcccuccuccccuccuugcaccgagauuaaucaaaggcucuuuucagagccaccaaaaaaaaaaaaaaaaaaaaaaaaaaaaaaaaaaaaaaaaaaaaaaaaaaaaaaaaaaaaaaaaaaaaaaaaaaaaaaaaaaaaaaaaaaaaaaaaaaaaa

SEQ ID NO: 22810 - RNA, 513 nt, Artificial Sequence
  mRNA product Design i-3 (hSL-A100) comprising derived and/or modified sequence from LASV(LASV003-NIG-2008;Clade II)__AIT17578__Z (opt1)
aggagaaagcuuaccaugggcaaccgccaggccaagagcaccaagguggacgagcaccagcgggcccaccugguccccgacgcgucccaccucgggccccaguucugcaagagcugcugguucgagaacaagggccugguggagugcaacaaccacuaccugugccucaacugccugucccugcuccugagcguguccagccgcugccccaucugcaagaugccccugcccaccaagcuccgggccgccgcccagccguccgcccccagcacggaguccgcgcagaacaccgccccgccgcccuacgcccccugaggacuaguuauaagacugacuagcccgaugggccucccaacgggcccuccuccccuccuugcaccgagauuaaucaaaggcucuuuucagagccaccaaaaaaaaaaaaaaaaaaaaaaaaaaaaaaaaaaaaaaaaaaaaaaaaaaaaaaaaaaaaaaaaaaaaaaaaaaaaaaaaaaaaaaaaaaaaaaaaaaaaa

SEQ ID NO: 22811 - RNA, 513 nt, Artificial Sequence
  mRNA product Design i-3 (hSL-A100) comprising derived and/or modified sequence from LASV(LASV035-NIG-2009;Clade II)__AIT17586__Z (opt1)
aggagaaagcuuaccaugggcaacaagcaggccaagagcaccaagguggacgagcaccagcgcgcccaccugguccccgacgcgucccaccucgggccccaguucugcaagagcugcugguucgagaaccggggccugguggagugcaacaaccacuaccugugccucaacugccugucccugcuccugagcguguccagccgcugccccaucugcaagaugccccugcccacccggcucaaggccgccgcccagccguccgcccccagcacggaggucacccagaacaccaccccgccgcccuacacgcccugaggacuaguuauaagacugacuagcccgaugggccucccaacgggcccuccuccccuccuugcaccgagauuaaucaaaggcucuuuucagagccaccaaaaaaaaaaaaaaaaaaaaaaaaaaaaaaaaaaaaaaaaaaaaaaaaaaaaaaaaaaaaaaaaaaaaaaaaaaaaaaaaaaaaaaaaaaaaaaaaaaaaa

SEQ ID NO: 22812 - RNA, 513 nt, Artificial Sequence
  mRNA product Design i-3 (hSL-A100) comprising derived and/or modified sequence from LASV(LASV1000-NIG-2009;Clade II)__AIT17780__Z (opt1)
aggagaaagcuuaccaugggcaaccgccagaccaagagcaccaagguggacgagcaccagcgggccuaccugguccccgacgccucccuccuggggccccaguucugcaagagcugcugguucgagaacaagggccugguggagugcaacaaccacuaccucugccugaacugccugucccuccugcugagcguguccagccgcugccccaucugcaagaugccccuccccacgcggcugaaggcggccgcccagcccuccgccccgcccaccgaggccauccagaacaccacgccgccgcccuacacccccugaggacuaguuauaagacugacuagcccgaugggccucccaacgggcccuccuccccuccuugcaccgagauuaaucaaaggcucuuuucagagccaccaaaaaaaaaaaaaaaaaaaaaaaaaaaaaaaaaaaaaaaaaaaaaaaaaaaaaaaaaaaaaaaaaaaaaaaaaaaaaaaaaaaaaaaaaaaaaaaaaaaaa

SEQ ID NO: 22813 - RNA, 513 nt, Artificial Sequence
  mRNA product Design i-3 (hSL-A100) comprising derived and/or modified sequence from LASV(LASV221-NIG-2010;Clade II)__AIT17622__Z (opt1)
aggagaaagcuuaccaugggcaaccgccaggccaagagcaccaagguggacgagcaccagcgggcccaccugguccccgacgcgucccaccucgggccccaguucugcaagagcugcugguucgagaaccgcggccugguggagugcaacaaccacuaccugugccucaacugccugucccugcuccugagcguguccagccggugccccaucugcaagaugccccugcccaccaagcucaaggccgccacgcagccguccgcccccagcaccgaggucacccagaacaccaucccgccgcccuacucccccugaggacuaguuauaagacugacuagcccgaugggccucccaacgggcccuccuccccuccuugcaccgagauuaaucaaaggcucuuuucagagccaccaaaaaaaaaaaaaaaaaaaaaaaaaaaaaaaaaaaaaaaaaaaaaaaaaaaaaaaaaaaaaaaaaaaaaaaaaaaaaaaaaaaaaaaaaaaaaaaaaaaaa

SEQ ID NO: 22814 - RNA, 513 nt, Artificial Sequence
  mRNA product Design i-3 (hSL-A100) comprising derived and/or modified sequence from LASV(LASV237-NIG-2010;Clade II)__AIT17636__Z (opt1)
aggagaaagcuuaccaugggcaaccgccaggccaagagcaccaagguggacgagcaccagcgggcccaccugguccccgacgcgucccaccucgggccccaguucugcaagagcugcugguucgagaaccgcggccugguggagugcaacaaccacuaccugugccucaacugccugucccugcuccugagcguguccagccggugccccaucugcaagaugccccugcccaccaagcucaaggccgccgcccagccguccgcccccagcaucgagacgauccagaacaccaccccgccgcccuacacccccugaggacuaguuauaagacugacuagcccgaugggccucccaacgggcccuccuccccuccuugcaccgagauuaaucaaaggcucuuuucagagccaccaaaaaaaaaaaaaaaaaaaaaaaaaaaaaaaaaaaaaaaaaaaaaaaaaaaaaaaaaaaaaaaaaaaaaaaaaaaaaaaaaaaaaaaaaaaaaaaaaaaaa

SEQ ID NO: 22815 - RNA, 513 nt, Artificial Sequence
  mRNA product Design i-3 (hSL-A100) comprising derived and/or modified sequence from LASV(LASV253-NIG-2011;Clade II)__AIT17668__Z (opt1)
aggagaaagcuuaccaugggcaaccgccaggccaagagcaccaagguggacgagcaccagcgggcccaccugguccccgacgcgucccaccucgggccccaguucugcaagagcugcugguucgagaacaagggccugguggagugcaacaaccacuaccugugccucaacugccugucccugcuccugagcguguccagccgcugccccaucugcaagaugccccugcccaccaagcucaagacgaccgcccagccguccgccccgcccaccgaggccgccaagaacaccgcgcccccgcccuacgcccccugaggacuaguuauaagacugacuagcccgaugggccucccaacgggcccuccuccccuccuugcaccgagauuaaucaaaggcucuuuucagagccaccaaaaaaaaaaaaaaaaaaaaaaaaaaaaaaaaaaaaaaaaaaaaaaaaaaaaaaaaaaaaaaaaaaaaaaaaaaaaaaaaaaaaaaaaaaaaaaaaaaaaa

SEQ ID NO: 22816 - RNA, 513 nt, Artificial Sequence
  mRNA product Design i-3 (hSL-A100) comprising derived and/or modified sequence from LASV(G1180-SLE-2010;Clade IV)__AIT17166__Z (opt1)
aggagaaagcuuaccaugggcaacaagcaggccaaggcccccgaggcgaaggacagcccgcgcgccucccugauccccgacgccacccaccucgggccccaguucugcaagagcugcugguucgagaccaagggccugguggagugcaacaaccacuaccugugccucaacugccugacgcugcuccuguccgucagcaaccggugccccaucugcaagaugccgcugcccaccaagcuccgccccuccgccacccccaccgccccgcccacggaggcggccgacagcaucgggcccccgcccuacucccccugaggacuaguuauaagacugacuagcccgaugggccucccaacgggcccuccuccccuccuugcaccgagauuaaucaaaggcucuuuucagagccaccaaaaaaaaaaaaaaaaaaaaaaaaaaaaaaaaaaaaaaaaaaaaaaaaaaaaaaaaaaaaaaaaaaaaaaaaaaaaaaaaaaaaaaaaaaaaaaaaaaaaa

SEQ ID NO: 22817 - RNA, 513 nt, Artificial Sequence
  mRNA product Design i-3 (hSL-A100) comprising derived and/or modified sequence from LASV(G1442-SLE-2011;Clade IV)__AIT17178__Z (opt1)
aggagaaagcuuaccaugggcaacaagcaggccaaggccagcgaggcgaaggacagcccccgcgccucccugaucccggacgccacccaccucgggccccaguucugcaaguccugcugguucgagaacaagggccugguggagugcaacaaccacuaccugugccucaacugccugagccugcuccuguccgucagcucccggugccccaucugcaagaugccccugccgacccgccuccggcccagcacggcccccaccgcgcccccggcccgcgccggggacaacaucaagcccccgcccuacucccccugaggacuaguuauaagacugacuagcccgaugggccucccaacgggcccuccuccccuccuugcaccgagauuaaucaaaggcucuuuucagagccaccaaaaaaaaaaaaaaaaaaaaaaaaaaaaaaaaaaaaaaaaaaaaaaaaaaaaaaaaaaaaaaaaaaaaaaaaaaaaaaaaaaaaaaaaaaaaaaaaaaaaa

SEQ ID NO: 22818 - RNA, 513 nt, Artificial Sequence
  mRNA product Design i-3 (hSL-A100) comprising derived and/or modified sequence from LASV(G502-SLE-2009;Clade IV)__AIT17124__Z (opt1)
aggagaaagcuuaccaugggcaacaagcaggucaagacccccgaggccaaggacagcccccgcgccucccugauccccgacgcgacccaccucgggccccaguucugcaagagcugcugguucgagaacaagggccugguggagugcaacaaccacuaccugugccucaacugccugacgcugcuccuguccguggggaaccggugccccaucugcaagaugccgcugcccaccaagcuccgccccagcgugacccccaccgccccgcccacgcgggccgccgacuccaucggcccgccgcccuacagccccugaggacuaguuauaagacugacuagcccgaugggccucccaacgggcccuccuccccuccuugcaccgagauuaaucaaaggcucuuuucagagccaccaaaaaaaaaaaaaaaaaaaaaaaaaaaaaaaaaaaaaaaaaaaaaaaaaaaaaaaaaaaaaaaaaaaaaaaaaaaaaaaaaaaaaaaaaaaaaaaaaaaaa

SEQ ID NO: 22819 - RNA, 513 nt, Artificial Sequence
  mRNA product Design i-3 (hSL-A100) comprising derived and/or modified sequence from LASV(G733-SLE-2010;Clade IV)__AIT17152__Z (opt1)
aggagaaagcuuaccaugggcaacaagcaggccaagacccccgagaccaaggacagcccgcgcgccucccugauccccgacgcgacgcaccucgggccccaguucugcaagagcugcugguucgagaacaagggccugguggagugcaacaaccacuaccugugccucaacugccugacccugcuccuguccgucagcaaccggugccccaucugcaagaugccgcugcccaccaagcuccgccccuccaccgcccccacggccccgcccgccggggccgcggacaacacccggcccccgcccuacagccccugaggacuaguuauaagacugacuagcccgaugggccucccaacgggcccuccuccccuccuugcaccgagauuaaucaaaggcucuuuucagagccaccaaaaaaaaaaaaaaaaaaaaaaaaaaaaaaaaaaaaaaaaaaaaaaaaaaaaaaaaaaaaaaaaaaaaaaaaaaaaaaaaaaaaaaaaaaaaaaaaaaaaa

SEQ ID NO: 22820 - RNA, 525 nt, Artificial Sequence
  mRNA product Design i-3 (hSL-A100) comprising derived and/or modified sequence from MOPV/LASV reassortant(IGS-1;Clade IV)__AFY05533__Z (opt1)
aggagaaagcuuaccaugggcaagacccagagcaaggggcagcccuccaccaaccugcucaaggagacggagccccgccaccccgugauccccgacgcccggggcaccgggcccgaguucugcaagagcugcugguucgagcgccggggccugguccgcugcaacgaccacuaccugugccucaacugccugacccugcuccacaccguguccgaccggugccccaucugcaagcacaagcugcccuuccgccuggagcuccagacgcagcccaccgccccgcccgagaucccgcccagccagaacccgccgcccuacucccccugaggacuaguuauaagacugacuagcccgaugggccucccaacgggcccuccuccccuccuugcaccgagauuaaucaaaggcucuuuucagagccaccaaaaaaaaaaaaaaaaaaaaaaaaaaaaaaaaaaaaaaaaaaaaaaaaaaaaaaaaaaaaaaaaaaaaaaaaaaaaaaaaaaaaaaaaaaaaaaaaaaaaa

SEQ ID NO: 22821 - RNA, 513 nt, Artificial Sequence
  mRNA product Design i-3 (hSL-A100) comprising derived and/or modified sequence from LASV(LM776-SLE-2012;Clade IV)__AIT17824__Z (opt1)
aggagaaagcuuaccaugggcaacaagcaggccaaggccagcgaggagaagaacagcccccgcgccucccugaucccggacgccacccaccucgggccccaguucugcaaguccugcugguucgagaacaagggccugguggagugcaacaaccacuaccugugccucaacugccugacccugcuccugagcgucuccaaccggugccccaucugcaagaugccccugccgacgaagcuccgccccagcaccacccccaccgcgcccccgacgggggccgccgacuccauccggcccccgcccuacagccccugaggacuaguuauaagacugacuagcccgaugggccucccaacgggcccuccuccccuccuugcaccgagauuaaucaaaggcucuuuucagagccaccaaaaaaaaaaaaaaaaaaaaaaaaaaaaaaaaaaaaaaaaaaaaaaaaaaaaaaaaaaaaaaaaaaaaaaaaaaaaaaaaaaaaaaaaaaaaaaaaaaaaa

SEQ ID NO: 22822 - RNA, 513 nt, Artificial Sequence
  mRNA product Design i-3 (hSL-A100) comprising derived and/or modified sequence from LASV(Mad39;Clade IV)__ANH09743__Z (opt1)
aggagaaagcuuaccaugggcaacaagcaggccaaggccagcgagguggaggacgggccccgcgccucccugauccccgacgccacccaccucggcccccaguucugcaagagcugcugguucgagaacaagucccuggucgagugcaacaaccacuaccugugccucaacugccugacccugcuccugagcguguccaaccggugccccaucugcaagaugccccugccgacgcgccucaagcccagcgugguccccaccgcgcccccgacccgggccggggacggcacccgcccgccgcccuacucccccugaggacuaguuauaagacugacuagcccgaugggccucccaacgggcccuccuccccuccuugcaccgagauuaaucaaaggcucuuuucagagccaccaaaaaaaaaaaaaaaaaaaaaaaaaaaaaaaaaaaaaaaaaaaaaaaaaaaaaaaaaaaaaaaaaaaaaaaaaaaaaaaaaaaaaaaaaaaaaaaaaaaaa

SEQ ID NO: 22823 - RNA, 513 nt, Artificial Sequence
  mRNA product Design i-3 (hSL-A100) comprising derived and/or modified sequence from LASV(Z0947-SLE-2011;Clade IV)__AIT17838__Z (opt1)
aggagaaagcuuaccaugggcaacaagcaggccaaggugcccgagagcaaggacuccccgcgcgccagccugauccccgacgcgacccaccucgggccccaguucugcaaguccugcugguucgagaacaagggccuggucgagugcaacaaccacuaccugugccucaacugccugacccugcuccugagcguguccaaccgcugccccaucugcaagaugccgcugcccacgaagcucaagcccagcgccgcccccaccgccccgcccaccggggccgcggacuccauccggcccccgcccuacagccccugaggacuaguuauaagacugacuagcccgaugggccucccaacgggcccuccuccccuccuugcaccgagauuaaucaaaggcucuuuucagagccaccaaaaaaaaaaaaaaaaaaaaaaaaaaaaaaaaaaaaaaaaaaaaaaaaaaaaaaaaaaaaaaaaaaaaaaaaaaaaaaaaaaaaaaaaaaaaaaaaaaaaa

SEQ ID NO: 22824 - RNA, 513 nt, Artificial Sequence
  mRNA product Design i-3 (hSL-A100) comprising derived and/or modified sequence from LASV(Josiah;Clade IV)__ADY11072/NP_694871__Z (opt4)
aggagaaagcuuaccaugggcaacaagcaggccaaggcccccgagagcaaggacagccccagagccagccugauccccgacgccacccaccugggcccccaguucugcaagagcugcugguucgagaacaagggccugguggagugcaacaaccacuaccugugccugaacugccugacccugcugcugagcgugagcaacagaugccccaucugcaagaugccccugcccaccaagcugagacccagcgccgcccccaccgccccccccaccggcgccgccgacagcaucagacccccccccuacagccccugaggacuaguuauaagacugacuagcccgaugggccucccaacgggcccuccuccccuccuugcaccgagauuaaucaaaggcucuuuucagagccaccaaaaaaaaaaaaaaaaaaaaaaaaaaaaaaaaaaaaaaaaaaaaaaaaaaaaaaaaaaaaaaaaaaaaaaaaaaaaaaaaaaaaaaaaaaaaaaaaaaaaa

SEQ ID NO: 22825 - RNA, 516 nt, Artificial Sequence
  mRNA product Design i-3 (hSL-A100) comprising derived and/or modified sequence from LASV(Pinneo-NIG-1969;Clade I)__AIT17834__Z (opt4)
aggagaaagcuuaccaugggcaacaagcagaccagaagcccccccaagcccgagcaccccagacccacccugcugcccgacgccagccaccugggcccccaguucugcaagagcugcugguucgagaacaagggccugguggagugcaacaaccacuaccugugccugaacugccugacccugcugcugagcgugagcgacagaugccccaucugcaagaugccccugcccaccaagcuggccgugagaacccagcccagcgcccccccccugaaccagggcaacacccagagcagccccccccccuacagccccugaggacuaguuauaagacugacuagcccgaugggccucccaacgggcccuccuccccuccuugcaccgagauuaaucaaaggcucuuuucagagccaccaaaaaaaaaaaaaaaaaaaaaaaaaaaaaaaaaaaaaaaaaaaaaaaaaaaaaaaaaaaaaaaaaaaaaaaaaaaaaaaaaaaaaaaaaaaaaaaaaaaaa

SEQ ID NO: 22826 - RNA, 513 nt, Artificial Sequence
  mRNA product Design i-3 (hSL-A100) comprising derived and/or modified sequence from LASV(Nig08-04;Clade II)__ADU56612__Z (opt4)
aggagaaagcuuaccaugggcaacagacagaccagacccaccgaggccaccgagcagagcagagcccaccuggugcccgacgccagccaccugggcccccaguucugcaagagcugcugguucgagaacagaggccugguggagugcaacaaccacuaccugugccugaacugccugagccugcugcugagcgugagcagcagaugccccaucugcaagaugccccugcccaccagacugaaggccagcgcccagcccagcgccccccccaccgaggccccccagaacaccacccccccccccuacacccccugaggacuaguuauaagacugacuagcccgaugggccucccaacgggcccuccuccccuccuugcaccgagauuaaucaaaggcucuuuucagagccaccaaaaaaaaaaaaaaaaaaaaaaaaaaaaaaaaaaaaaaaaaaaaaaaaaaaaaaaaaaaaaaaaaaaaaaaaaaaaaaaaaaaaaaaaaaaaaaaaaaaaa

SEQ ID NO: 22827 - RNA, 513 nt, Artificial Sequence
  mRNA product Design i-3 (hSL-A100) comprising derived and/or modified sequence from LASV(Nig08-A19;Clade III)__ADU56620__Z (opt4)
aggagaaagcuuaccaugggcggcaagcacaccaagccccagagagagagcaacagccccagagccagccugauccccgacgccacccaccugggcccccaguucugcaagagcugcugguucgagaacaagggccugguggagugcaacaaccacuaccugugccugaacugccugacccugcugcugagcgugagcaacagaugccccaucugcaagaugccccugcccaccagacugagagccagcaccaaccccaccgccccccagguggagcaggugggccccaccaaccccccccccuacagccccugaggacuaguuauaagacugacuagcccgaugggccucccaacgggcccuccuccccuccuugcaccgagauuaaucaaaggcucuuuucagagccaccaaaaaaaaaaaaaaaaaaaaaaaaaaaaaaaaaaaaaaaaaaaaaaaaaaaaaaaaaaaaaaaaaaaaaaaaaaaaaaaaaaaaaaaaaaaaaaaaaaaaa

SEQ ID NO: 22828 - RNA, 513 nt, Artificial Sequence
  mRNA product Design i-3 (hSL-A100) comprising derived and/or modified sequence from LASV(AV;Clade V)__CCA30312__Z (opt4)
aggagaaagcuuaccaugggcaacagacaggccaagaaccccgagguggagaacagccccagagccagccugauccccgacgccacccaccugggcccccaguucugcaagagcugcugguucgagaacaagggccugguggagugcaacaaccacuaccugugccugaacugccugagccugcugcugagcgugagcaacagaugccccaucugcaagaugccccugcccaccagacugagacccaccaccacccccaccgccccccagaucaucaaggagaacaccaccaaccccccccccuacacccccugaggacuaguuauaagacugacuagcccgaugggccucccaacgggcccuccuccccuccuugcaccgagauuaaucaaaggcucuuuucagagccaccaaaaaaaaaaaaaaaaaaaaaaaaaaaaaaaaaaaaaaaaaaaaaaaaaaaaaaaaaaaaaaaaaaaaaaaaaaaaaaaaaaaaaaaaaaaaaaaaaaaaa

SEQ ID NO: 22829 - RNA, 513 nt, Artificial Sequence
  mRNA product Design i-3 (hSL-A100) comprising derived and/or modified sequence from LASV(Togo/2016/7082;Clade VI)__AMR44579__Z (opt4)
aggagaaagcuuaccaugggcgccagacagaccaagcagccccagaucgagggcagccccagagccagccuggugcccgacgccagccaccugggcccccaguucugcaagagcugcugguucgagaacaagggccugguggagugcaacaaccacuaccugugccugaacugccugagccugcugcugagcgugagcaacagaugccccaucugcaagaugccccugcccaccaagcugagagugagcagcgcccccagcgccccccccgccgccaccgcccagcccggcacccccccccccuacagccccugaggacuaguuauaagacugacuagcccgaugggccucccaacgggcccuccuccccuccuugcaccgagauuaaucaaaggcucuuuucagagccaccaaaaaaaaaaaaaaaaaaaaaaaaaaaaaaaaaaaaaaaaaaaaaaaaaaaaaaaaaaaaaaaaaaaaaaaaaaaaaaaaaaaaaaaaaaaaaaaaaaaaa

SEQ ID NO: 22830 - RNA, 513 nt, Artificial Sequence
  mRNA product Design i-3 (hSL-A100) comprising derived and/or modified sequence from LASV(KAK-428;Clade n.d. (VII))__ANH09761__Z (opt4)
aggagaaagcuuaccaugggcaacaagggcaccaagcccacccagaacagcgagcccagcagagccaaccuggugcccgacgccagcuaccugggcccccaguucugcaagagcugcugguucgagaacaagggccugguggagugcaacaaccacuaccugugccugaacugccugaccaugcugcugagcgugagcaacagaugccccaucugcaagaugccccugcccaccaagaucaaggccagcggcagccccagcgccccccccaccgaggccaacagcgccgugagccccccccccuacacccccugaggacuaguuauaagacugacuagcccgaugggccucccaacgggcccuccuccccuccuugcaccgagauuaaucaaaggcucuuuucagagccaccaaaaaaaaaaaaaaaaaaaaaaaaaaaaaaaaaaaaaaaaaaaaaaaaaaaaaaaaaaaaaaaaaaaaaaaaaaaaaaaaaaaaaaaaaaaaaaaaaaaaa

SEQ ID NO: 22831 - RNA, 513 nt, Artificial Sequence
  mRNA product Design i-3 (hSL-A100) comprising derived and/or modified sequence from LASV(ISTH0009-NIG-2011;Clade II)__AIT17402__Z (opt4)
aggagaaagcuuaccaugggcaacagacaggccaagagcaccaagguggacgagcaccagagagcccaccuggugcccgacgccagccaccugggcccccaguucugcaagagcugcugguucgagaacagaggccugguggagugcaacaaccacuaccugugccugaacugccugagccugcugcugagcgugagcagcagaugccccaucugcaagaugccccugcccaccaagcugaaggccgccgcccagcccagcgcccccagcaccgagaccauccagaacaccacccccccccccuacacccccugaggacuaguuauaagacugacuagcccgaugggccucccaacgggcccuccuccccuccuugcaccgagauuaaucaaaggcucuuuucagagccaccaaaaaaaaaaaaaaaaaaaaaaaaaaaaaaaaaaaaaaaaaaaaaaaaaaaaaaaaaaaaaaaaaaaaaaaaaaaaaaaaaaaaaaaaaaaaaaaaaaaaa

SEQ ID NO: 22832 - RNA, 513 nt, Artificial Sequence
  mRNA product Design i-3 (hSL-A100) comprising derived and/or modified sequence from LASV(ISTH2010-NIG-2012;Clade II)__AIT17480__Z (opt4)
aggagaaagcuuaccaugggcaacagacacgccaagagcaccaagguggacgagcaccagagagcccaccuggugcccgacgccagccaccugggcccccaguucugcaagagcugcugguucgagaacagaggccugguggagugcaacaaccacuaccugugccugaacugccugagccugcugcugagcgugagcagcagaugccccaucugcaagaugccccugcccaccaagcugaaggccgccgcccagcccagcgcccccagcaccgaggugauccagagcaccacccccccccccuacacccccugaggacuaguuauaagacugacuagcccgaugggccucccaacgggcccuccuccccuccuugcaccgagauuaaucaaaggcucuuuucagagccaccaaaaaaaaaaaaaaaaaaaaaaaaaaaaaaaaaaaaaaaaaaaaaaaaaaaaaaaaaaaaaaaaaaaaaaaaaaaaaaaaaaaaaaaaaaaaaaaaaaaaa

SEQ ID NO: 22833 - RNA, 513 nt, Artificial Sequence
  mRNA product Design i-3 (hSL-A100) comprising derived and/or modified sequence from LASV(Lassa virus/H.sapiens-wt/NGA/2016/ISTH_0017;Clade II)__AVO03713__Z (opt4)
aggagaaagcuuaccaugggcaacagacaggccaagagcaccaagguggacgagcaccagagagcccaccuggugcccgacgccagccaccugggcccccaguucugcaagagcugcugguucgagaacagaggccugguggagugcaacaaccacuaccugugccugaacugccugagccugcugcugagcgugagcagcagaugccccaucugcaagaugccccugcccaccaagcugaaggccgccacccagcccagcgcccccagcaccgaggugaaccagaacaccacccccccccccuacacccccugaggacuaguuauaagacugacuagcccgaugggccucccaacgggcccuccuccccuccuugcaccgagauuaaucaaaggcucuuuucagagccaccaaaaaaaaaaaaaaaaaaaaaaaaaaaaaaaaaaaaaaaaaaaaaaaaaaaaaaaaaaaaaaaaaaaaaaaaaaaaaaaaaaaaaaaaaaaaaaaaaaaaa

SEQ ID NO: 22834 - RNA, 513 nt, Artificial Sequence
  mRNA product Design i-3 (hSL-A100) comprising derived and/or modified sequence from LASV(Lassa virus/H.sapiens-wt/NGA/2018/ISTH_0959;Clade II)__AVV65084__Z (opt4)
aggagaaagcuuaccaugggcaacaagcaggccaagagcaccaagguggacgagcaccagagagcccaccuggugcccgacgccagccaccugggcccccaguucugcaagagcugcugguucgagaacagaggccugguggagugcaacaaccacuaccugugccugaacugccugagccugcugcugagcgugagcagcagaugccccaucugcaagaugccccugcccaccaagcugaaggccgccgcccagcccagcgcccccagcaccgaggccauccagagcaccacccccccccccuacacccccugaggacuaguuauaagacugacuagcccgaugggccucccaacgggcccuccuccccuccuugcaccgagauuaaucaaaggcucuuuucagagccaccaaaaaaaaaaaaaaaaaaaaaaaaaaaaaaaaaaaaaaaaaaaaaaaaaaaaaaaaaaaaaaaaaaaaaaaaaaaaaaaaaaaaaaaaaaaaaaaaaaaaa

SEQ ID NO: 22835 - RNA, 513 nt, Artificial Sequence
  mRNA product Design i-3 (hSL-A100) comprising derived and/or modified sequence from LASV(LASV003-NIG-2008;Clade II)__AIT17578__Z (opt4)
aggagaaagcuuaccaugggcaacagacaggccaagagcaccaagguggacgagcaccagagagcccaccuggugcccgacgccagccaccugggcccccaguucugcaagagcugcugguucgagaacaagggccugguggagugcaacaaccacuaccugugccugaacugccugagccugcugcugagcgugagcagcagaugccccaucugcaagaugccccugcccaccaagcugagagccgccgcccagcccagcgcccccagcaccgagagcgcccagaacaccgcccccccccccuacgcccccugaggacuaguuauaagacugacuagcccgaugggccucccaacgggcccuccuccccuccuugcaccgagauuaaucaaaggcucuuuucagagccaccaaaaaaaaaaaaaaaaaaaaaaaaaaaaaaaaaaaaaaaaaaaaaaaaaaaaaaaaaaaaaaaaaaaaaaaaaaaaaaaaaaaaaaaaaaaaaaaaaaaaa

SEQ ID NO: 22836 - RNA, 513 nt, Artificial Sequence
  mRNA product Design i-3 (hSL-A100) comprising derived and/or modified sequence from LASV(LASV035-NIG-2009;Clade II)__AIT17586__Z (opt4)
aggagaaagcuuaccaugggcaacaagcaggccaagagcaccaagguggacgagcaccagagagcccaccuggugcccgacgccagccaccugggcccccaguucugcaagagcugcugguucgagaacagaggccugguggagugcaacaaccacuaccugugccugaacugccugagccugcugcugagcgugagcagcagaugccccaucugcaagaugccccugcccaccagacugaaggccgccgcccagcccagcgcccccagcaccgaggugacccagaacaccacccccccccccuacacccccugaggacuaguuauaagacugacuagcccgaugggccucccaacgggcccuccuccccuccuugcaccgagauuaaucaaaggcucuuuucagagccaccaaaaaaaaaaaaaaaaaaaaaaaaaaaaaaaaaaaaaaaaaaaaaaaaaaaaaaaaaaaaaaaaaaaaaaaaaaaaaaaaaaaaaaaaaaaaaaaaaaaaa

SEQ ID NO: 22837 - RNA, 513 nt, Artificial Sequence
  mRNA product Design i-3 (hSL-A100) comprising derived and/or modified sequence from LASV(LASV1000-NIG-2009;Clade II)__AIT17780__Z (opt4)
aggagaaagcuuaccaugggcaacagacagaccaagagcaccaagguggacgagcaccagagagccuaccuggugcccgacgccagccugcugggcccccaguucugcaagagcugcugguucgagaacaagggccugguggagugcaacaaccacuaccugugccugaacugccugagccugcugcugagcgugagcagcagaugccccaucugcaagaugccccugcccaccagacugaaggccgccgcccagcccagcgccccccccaccgaggccauccagaacaccacccccccccccuacacccccugaggacuaguuauaagacugacuagcccgaugggccucccaacgggcccuccuccccuccuugcaccgagauuaaucaaaggcucuuuucagagccaccaaaaaaaaaaaaaaaaaaaaaaaaaaaaaaaaaaaaaaaaaaaaaaaaaaaaaaaaaaaaaaaaaaaaaaaaaaaaaaaaaaaaaaaaaaaaaaaaaaaaa

SEQ ID NO: 22838 - RNA, 513 nt, Artificial Sequence
  mRNA product Design i-3 (hSL-A100) comprising derived and/or modified sequence from LASV(LASV221-NIG-2010;Clade II)__AIT17622__Z (opt4)
aggagaaagcuuaccaugggcaacagacaggccaagagcaccaagguggacgagcaccagagagcccaccuggugcccgacgccagccaccugggcccccaguucugcaagagcugcugguucgagaacagaggccugguggagugcaacaaccacuaccugugccugaacugccugagccugcugcugagcgugagcagcagaugccccaucugcaagaugccccugcccaccaagcugaaggccgccacccagcccagcgcccccagcaccgaggugacccagaacaccauccccccccccuacagccccugaggacuaguuauaagacugacuagcccgaugggccucccaacgggcccuccuccccuccuugcaccgagauuaaucaaaggcucuuuucagagccaccaaaaaaaaaaaaaaaaaaaaaaaaaaaaaaaaaaaaaaaaaaaaaaaaaaaaaaaaaaaaaaaaaaaaaaaaaaaaaaaaaaaaaaaaaaaaaaaaaaaaa

SEQ ID NO: 22839 - RNA, 513 nt, Artificial Sequence
  mRNA product Design i-3 (hSL-A100) comprising derived and/or modified sequence from LASV(LASV237-NIG-2010;Clade II)__AIT17636__Z (opt4)
aggagaaagcuuaccaugggcaacagacaggccaagagcaccaagguggacgagcaccagagagcccaccuggugcccgacgccagccaccugggcccccaguucugcaagagcugcugguucgagaacagaggccugguggagugcaacaaccacuaccugugccugaacugccugagccugcugcugagcgugagcagcagaugccccaucugcaagaugccccugcccaccaagcugaaggccgccgcccagcccagcgcccccagcaucgagaccauccagaacaccacccccccccccuacacccccugaggacuaguuauaagacugacuagcccgaugggccucccaacgggcccuccuccccuccuugcaccgagauuaaucaaaggcucuuuucagagccaccaaaaaaaaaaaaaaaaaaaaaaaaaaaaaaaaaaaaaaaaaaaaaaaaaaaaaaaaaaaaaaaaaaaaaaaaaaaaaaaaaaaaaaaaaaaaaaaaaaaaa

SEQ ID NO: 22840 - RNA, 513 nt, Artificial Sequence
  mRNA product Design i-3 (hSL-A100) comprising derived and/or modified sequence from LASV(LASV253-NIG-2011;Clade II)__AIT17668__Z (opt4)
aggagaaagcuuaccaugggcaacagacaggccaagagcaccaagguggacgagcaccagagagcccaccuggugcccgacgccagccaccugggcccccaguucugcaagagcugcugguucgagaacaagggccugguggagugcaacaaccacuaccugugccugaacugccugagccugcugcugagcgugagcagcagaugccccaucugcaagaugccccugcccaccaagcugaagaccaccgcccagcccagcgccccccccaccgaggccgccaagaacaccgcccccccccccuacgcccccugaggacuaguuauaagacugacuagcccgaugggccucccaacgggcccuccuccccuccuugcaccgagauuaaucaaaggcucuuuucagagccaccaaaaaaaaaaaaaaaaaaaaaaaaaaaaaaaaaaaaaaaaaaaaaaaaaaaaaaaaaaaaaaaaaaaaaaaaaaaaaaaaaaaaaaaaaaaaaaaaaaaaa

SEQ ID NO: 22841 - RNA, 513 nt, Artificial Sequence
  mRNA product Design i-3 (hSL-A100) comprising derived and/or modified sequence from LASV(G1180-SLE-2010;Clade IV)__AIT17166__Z (opt4)
aggagaaagcuuaccaugggcaacaagcaggccaaggcccccgaggccaaggacagccccagagccagccugauccccgacgccacccaccugggcccccaguucugcaagagcugcugguucgagaccaagggccugguggagugcaacaaccacuaccugugccugaacugccugacccugcugcugagcgugagcaacagaugccccaucugcaagaugccccugcccaccaagcugagacccagcgccacccccaccgccccccccaccgaggccgccgacagcaucggccccccccccuacagccccugaggacuaguuauaagacugacuagcccgaugggccucccaacgggcccuccuccccuccuugcaccgagauuaaucaaaggcucuuuucagagccaccaaaaaaaaaaaaaaaaaaaaaaaaaaaaaaaaaaaaaaaaaaaaaaaaaaaaaaaaaaaaaaaaaaaaaaaaaaaaaaaaaaaaaaaaaaaaaaaaaaaaa

SEQ ID NO: 22842 - RNA, 513 nt, Artificial Sequence
  mRNA product Design i-3 (hSL-A100) comprising derived and/or modified sequence from LASV(G1442-SLE-2011;Clade IV)__AIT17178__Z (opt4)
aggagaaagcuuaccaugggcaacaagcaggccaaggccagcgaggccaaggacagccccagagccagccugauccccgacgccacccaccugggcccccaguucugcaagagcugcugguucgagaacaagggccugguggagugcaacaaccacuaccugugccugaacugccugagccugcugcugagcgugagcagcagaugccccaucugcaagaugccccugcccaccagacugagacccagcaccgcccccaccgccccccccgccagagccggcgacaacaucaagcccccccccuacagccccugaggacuaguuauaagacugacuagcccgaugggccucccaacgggcccuccuccccuccuugcaccgagauuaaucaaaggcucuuuucagagccaccaaaaaaaaaaaaaaaaaaaaaaaaaaaaaaaaaaaaaaaaaaaaaaaaaaaaaaaaaaaaaaaaaaaaaaaaaaaaaaaaaaaaaaaaaaaaaaaaaaaaa

SEQ ID NO: 22843 - RNA, 513 nt, Artificial Sequence
  mRNA product Design i-3 (hSL-A100) comprising derived and/or modified sequence from LASV(G502-SLE-2009;Clade IV)__AIT17124__Z (opt4)
aggagaaagcuuaccaugggcaacaagcaggugaagacccccgaggccaaggacagccccagagccagccugauccccgacgccacccaccugggcccccaguucugcaagagcugcugguucgagaacaagggccugguggagugcaacaaccacuaccugugccugaacugccugacccugcugcugagcgugggcaacagaugccccaucugcaagaugccccugcccaccaagcugagacccagcgugacccccaccgccccccccaccagagccgccgacagcaucggccccccccccuacagccccugaggacuaguuauaagacugacuagcccgaugggccucccaacgggcccuccuccccuccuugcaccgagauuaaucaaaggcucuuuucagagccaccaaaaaaaaaaaaaaaaaaaaaaaaaaaaaaaaaaaaaaaaaaaaaaaaaaaaaaaaaaaaaaaaaaaaaaaaaaaaaaaaaaaaaaaaaaaaaaaaaaaaa

SEQ ID NO: 22844 - RNA, 513 nt, Artificial Sequence
  mRNA product Design i-3 (hSL-A100) comprising derived and/or modified sequence from LASV(G733-SLE-2010;Clade IV)__AIT17152__Z (opt4)
aggagaaagcuuaccaugggcaacaagcaggccaagacccccgagaccaaggacagccccagagccagccugauccccgacgccacccaccugggcccccaguucugcaagagcugcugguucgagaacaagggccugguggagugcaacaaccacuaccugugccugaacugccugacccugcugcugagcgugagcaacagaugccccaucugcaagaugccccugcccaccaagcugagacccagcaccgcccccaccgccccccccgccggcgccgccgacaacaccagacccccccccuacagccccugaggacuaguuauaagacugacuagcccgaugggccucccaacgggcccuccuccccuccuugcaccgagauuaaucaaaggcucuuuucagagccaccaaaaaaaaaaaaaaaaaaaaaaaaaaaaaaaaaaaaaaaaaaaaaaaaaaaaaaaaaaaaaaaaaaaaaaaaaaaaaaaaaaaaaaaaaaaaaaaaaaaaa

SEQ ID NO: 22845 - RNA, 525 nt, Artificial Sequence
  mRNA product Design i-3 (hSL-A100) comprising derived and/or modified sequence from MOPV/LASV reassortant(IGS-1;Clade IV)__AFY05533__Z (opt4)
aggagaaagcuuaccaugggcaagacccagagcaagggccagcccagcaccaaccugcugaaggagaccgagcccagacaccccgugauccccgacgccagaggcaccggccccgaguucugcaagagcugcugguucgagagaagaggccuggugagaugcaacgaccacuaccugugccugaacugccugacccugcugcacaccgugagcgacagaugccccaucugcaagcacaagcugcccuucagacuggagcugcagacccagcccaccgccccccccgagaucccccccagccagaaccccccccccuacagccccugaggacuaguuauaagacugacuagcccgaugggccucccaacgggcccuccuccccuccuugcaccgagauuaaucaaaggcucuuuucagagccaccaaaaaaaaaaaaaaaaaaaaaaaaaaaaaaaaaaaaaaaaaaaaaaaaaaaaaaaaaaaaaaaaaaaaaaaaaaaaaaaaaaaaaaaaaaaaaaaaaaaaa

SEQ ID NO: 22846 - RNA, 513 nt, Artificial Sequence
  mRNA product Design i-3 (hSL-A100) comprising derived and/or modified sequence from LASV(LM776-SLE-2012;Clade IV)__AIT17824__Z (opt4)
aggagaaagcuuaccaugggcaacaagcaggccaaggccagcgaggagaagaacagccccagagccagccugauccccgacgccacccaccugggcccccaguucugcaagagcugcugguucgagaacaagggccugguggagugcaacaaccacuaccugugccugaacugccugacccugcugcugagcgugagcaacagaugccccaucugcaagaugccccugcccaccaagcugagacccagcaccacccccaccgccccccccaccggcgccgccgacagcaucagacccccccccuacagccccugaggacuaguuauaagacugacuagcccgaugggccucccaacgggcccuccuccccuccuugcaccgagauuaaucaaaggcucuuuucagagccaccaaaaaaaaaaaaaaaaaaaaaaaaaaaaaaaaaaaaaaaaaaaaaaaaaaaaaaaaaaaaaaaaaaaaaaaaaaaaaaaaaaaaaaaaaaaaaaaaaaaaa

SEQ ID NO: 22847 - RNA, 513 nt, Artificial Sequence
  mRNA product Design i-3 (hSL-A100) comprising derived and/or modified sequence from LASV(Mad39;Clade IV)__ANH09743__Z (opt4)
aggagaaagcuuaccaugggcaacaagcaggccaaggccagcgagguggaggacggccccagagccagccugauccccgacgccacccaccugggcccccaguucugcaagagcugcugguucgagaacaagagccugguggagugcaacaaccacuaccugugccugaacugccugacccugcugcugagcgugagcaacagaugccccaucugcaagaugccccugcccaccagacugaagcccagcguggugcccaccgccccccccaccagagccggcgacggcaccagacccccccccuacagccccugaggacuaguuauaagacugacuagcccgaugggccucccaacgggcccuccuccccuccuugcaccgagauuaaucaaaggcucuuuucagagccaccaaaaaaaaaaaaaaaaaaaaaaaaaaaaaaaaaaaaaaaaaaaaaaaaaaaaaaaaaaaaaaaaaaaaaaaaaaaaaaaaaaaaaaaaaaaaaaaaaaaaa

SEQ ID NO: 22848 - RNA, 513 nt, Artificial Sequence
  mRNA product Design i-3 (hSL-A100) comprising derived and/or modified sequence from LASV(Z0947-SLE-2011;Clade IV)__AIT17838__Z (opt4)
aggagaaagcuuaccaugggcaacaagcaggccaaggugcccgagagcaaggacagccccagagccagccugauccccgacgccacccaccugggcccccaguucugcaagagcugcugguucgagaacaagggccugguggagugcaacaaccacuaccugugccugaacugccugacccugcugcugagcgugagcaacagaugccccaucugcaagaugccccugcccaccaagcugaagcccagcgccgcccccaccgccccccccaccggcgccgccgacagcaucagacccccccccuacagccccugaggacuaguuauaagacugacuagcccgaugggccucccaacgggcccuccuccccuccuugcaccgagauuaaucaaaggcucuuuucagagccaccaaaaaaaaaaaaaaaaaaaaaaaaaaaaaaaaaaaaaaaaaaaaaaaaaaaaaaaaaaaaaaaaaaaaaaaaaaaaaaaaaaaaaaaaaaaaaaaaaaaaa

SEQ ID NO: 22849 - RNA, 513 nt, Artificial Sequence
  mRNA product Design i-3 (hSL-A100) comprising derived and/or modified sequence from LASV(Josiah;Clade IV)__ADY11072/NP_694871__Z (opt5)
aggagaaagcuuaccaugggcaacaagcaggccaaagcucccgagagcaaggacuccccuagagccucucugaucccggaugcgacccaccucgggccccaauucugcaaaagcuguugguuugaaaauaagggacugguggagugcaacaaucauuaccuuugucugaacugccucacacugcuucuguccgucucuaaucgguguccuauuugcaaaaugccccucccuacgaagcugcgccccagcgcugccccuaccgccccgcccacaggcgcugccgacuccaucagaccucccccuuauucucccugaggacuaguuauaagacugacuagcccgaugggccucccaacgggcccuccuccccuccuugcaccgagauuaaucaaaggcucuuuucagagccaccaaaaaaaaaaaaaaaaaaaaaaaaaaaaaaaaaaaaaaaaaaaaaaaaaaaaaaaaaaaaaaaaaaaaaaaaaaaaaaaaaaaaaaaaaaaaaaaaaaaaa

SEQ ID NO: 22850 - RNA, 516 nt, Artificial Sequence
  mRNA product Design i-3 (hSL-A100) comprising derived and/or modified sequence from LASV(Pinneo-NIG-1969;Clade I)__AIT17834__Z (opt5)
aggagaaagcuuaccaugggcaacaagcagaccagaagcccucccaaaccggagcacccccggccuacacugcuccccgacgccucccaucuggggccucaauucugcaagucuuguugguuugaaaauaaaggacuuguggagugcaacaaucacuaccugugucucaacugccugacgcuucugcucagcgucuccgaucgcugucccaucugcaagaugccucugccgaccaaacuggcuguuagaacacagcccucugccccuccccucaaucagggcaacacccagagcuccccucccccguauucuccuugaggacuaguuauaagacugacuagcccgaugggccucccaacgggcccuccuccccuccuugcaccgagauuaaucaaaggcucuuuucagagccaccaaaaaaaaaaaaaaaaaaaaaaaaaaaaaaaaaaaaaaaaaaaaaaaaaaaaaaaaaaaaaaaaaaaaaaaaaaaaaaaaaaaaaaaaaaaaaaaaaaaaa

SEQ ID NO: 22851 - RNA, 513 nt, Artificial Sequence
  mRNA product Design i-3 (hSL-A100) comprising derived and/or modified sequence from LASV(Nig08-04;Clade II)__ADU56612__Z (opt5)
aggagaaagcuuaccaugggcaacagacagacccggcccacagaggccacggaacaaagccgcgcccaccuggugccugacgccucccaucucgggccgcaguucugcaagucuuguugguuugagaauagaggacuggucgaaugcaacaaucacuaccuuugucugaacugccucagccugcuucuguccguuucuagccggugucccaucugcaaaaugccucuccccacccgccugaaggcguccgcucagccuucugcucccccuacagaggccccgcagaauaccacacccccucccuauaccccuugaggacuaguuauaagacugacuagcccgaugggccucccaacgggcccuccuccccuccuugcaccgagauuaaucaaaggcucuuuucagagccaccaaaaaaaaaaaaaaaaaaaaaaaaaaaaaaaaaaaaaaaaaaaaaaaaaaaaaaaaaaaaaaaaaaaaaaaaaaaaaaaaaaaaaaaaaaaaaaaaaaaaa

SEQ ID NO: 22852 - RNA, 513 nt, Artificial Sequence
  mRNA product Design i-3 (hSL-A100) comprising derived and/or modified sequence from LASV(Nig08-A19;Clade III)__ADU56620__Z (opt5)
aggagaaagcuuaccaugggcgggaagcacaccaaaccccagagagagagcaacuccccucgggccucucugaucccggacgcuacacaucucggaccccaauucugcaagagcuguugguuugaaaauaaaggccugguggagugcaacaaucacuaccuuugucugaacugccucacgcugcuucuguccgucucuaaucgcuguccuauuugcaagaugccccucccuaccagacugcgggccagcacaaaccccaccgcgccucagguugaacagguggggccgacaaaucccccucccuauuccccuugaggacuaguuauaagacugacuagcccgaugggccucccaacgggcccuccuccccuccuugcaccgagauuaaucaaaggcucuuuucagagccaccaaaaaaaaaaaaaaaaaaaaaaaaaaaaaaaaaaaaaaaaaaaaaaaaaaaaaaaaaaaaaaaaaaaaaaaaaaaaaaaaaaaaaaaaaaaaaaaaaaaaa

SEQ ID NO: 22853 - RNA, 513 nt, Artificial Sequence
  mRNA product Design i-3 (hSL-A100) comprising derived and/or modified sequence from LASV(AV;Clade V)__CCA30312__Z (opt5)
aggagaaagcuuaccaugggcaacagacaggccaagaaucccgagguggaaaacagcccucgggcuucccugaucccggacgccacccaccucgggccccaauucugcaaaucuuguugguuugagaauaagggacuggucgaaugcaacaaucauuaccuuugucugaacugccucagccugcuucuguccguuucuaaucgcuguccuauuugcaaaaugccccucccuacaagacugcggcccacgaccacaccuaccgcgccgcagaucauuaaggagaacacaaccaaucccccucccuauacaccuugaggacuaguuauaagacugacuagcccgaugggccucccaacgggcccuccuccccuccuugcaccgagauuaaucaaaggcucuuuucagagccaccaaaaaaaaaaaaaaaaaaaaaaaaaaaaaaaaaaaaaaaaaaaaaaaaaaaaaaaaaaaaaaaaaaaaaaaaaaaaaaaaaaaaaaaaaaaaaaaaaaaaa

SEQ ID NO: 22854 - RNA, 513 nt, Artificial Sequence
  mRNA product Design i-3 (hSL-A100) comprising derived and/or modified sequence from LASV(Togo/2016/7082;Clade VI)__AMR44579__Z (opt5)
aggagaaagcuuaccaugggcgccagacagaccaagcaaccccagaucgaggggagcccucgggcuucccuggugccggacgccucucaccucggaccccaguucugcaaaagcuguugguuugaaaacaagggccuggucgagugcaauaaccauuaccuuugucugaauugccucucccugcuucugucuguuagcaaccgcuguccuauuugcaaaaugccccucccuacaaagcugagaguguccucugcgcccagcgcuccuccggccgccacggcucagcccgggaccccucccccuuauucccccugaggacuaguuauaagacugacuagcccgaugggccucccaacgggcccuccuccccuccuugcaccgagauuaaucaaaggcucuuuucagagccaccaaaaaaaaaaaaaaaaaaaaaaaaaaaaaaaaaaaaaaaaaaaaaaaaaaaaaaaaaaaaaaaaaaaaaaaaaaaaaaaaaaaaaaaaaaaaaaaaaaaaa

SEQ ID NO: 22855 - RNA, 513 nt, Artificial Sequence
  mRNA product Design i-3 (hSL-A100) comprising derived and/or modified sequence from LASV(KAK-428;Clade n.d. (VII))__ANH09761__Z (opt5)
aggagaaagcuuaccaugggcaacaaggggaccaaacccacacagaauagcgagccuuccagagccaaccuggugccggacgcuucuuaccucggaccccaauucugcaagagcuguugguuugaaaauaaaggccuggucgagugcaacaaucacuaucuuugucugaacugccucacgaugcugcuuuccguuuccaaucgguguccuaucugcaagaugccccugccuaccaaaauuaaggccagcgggucccccucugcgccuccgacagaagcuaacagcgccgugucucccccucccuacaccccuugaggacuaguuauaagacugacuagcccgaugggccucccaacgggcccuccuccccuccuugcaccgagauuaaucaaaggcucuuuucagagccaccaaaaaaaaaaaaaaaaaaaaaaaaaaaaaaaaaaaaaaaaaaaaaaaaaaaaaaaaaaaaaaaaaaaaaaaaaaaaaaaaaaaaaaaaaaaaaaaaaaaaa

SEQ ID NO: 22856 - RNA, 513 nt, Artificial Sequence
  mRNA product Design i-3 (hSL-A100) comprising derived and/or modified sequence from LASV(ISTH0009-NIG-2011;Clade II)__AIT17402__Z (opt5)
aggagaaagcuuaccaugggcaacagacaggccaagagcaccaaaguggacgagcaccaacgggcucaucugguccccgaugccucccaccucgggccucaguucugcaagucuuguugguuugaaaaucgcggacugguugagugcaacaaucauuaccuuugucugaacugccucagccugcuucuguccgugucuagcagauguccgaucugcaaaaugccccucccuacaaagcugaaagcggcugcccagcccuccgccccuucuacggaaaccauucagaauacaacacccccuccguauacccccugaggacuaguuauaagacugacuagcccgaugggccucccaacgggcccuccuccccuccuugcaccgagauuaaucaaaggcucuuuucagagccaccaaaaaaaaaaaaaaaaaaaaaaaaaaaaaaaaaaaaaaaaaaaaaaaaaaaaaaaaaaaaaaaaaaaaaaaaaaaaaaaaaaaaaaaaaaaaaaaaaaaaa

SEQ ID NO: 22857 - RNA, 513 nt, Artificial Sequence
  mRNA product Design i-3 (hSL-A100) comprising derived and/or modified sequence from LASV(ISTH2010-NIG-2012;Clade II)__AIT17480__Z (opt5)
aggagaaagcuuaccaugggcaacagacacgccaagagcaccaaaguggacgagcaucagcgggcucaccugguccccgaugccucccaucucgggccucaauucugcaagucuuguugguuugaaaaucgcggacugguugagugcaacaaucacuaccuuugucugaacugccucagccugcuucuguccgugucuagcagauguccgaucugcaaaaugccccucccuacaaagcugaaagcggcugcccagcccuccgccccuucuacggaagugauucagagcaccacacccccuccguauacccccugaggacuaguuauaagacugacuagcccgaugggccucccaacgggcccuccuccccuccuugcaccgagauuaaucaaaggcucuuuucagagccaccaaaaaaaaaaaaaaaaaaaaaaaaaaaaaaaaaaaaaaaaaaaaaaaaaaaaaaaaaaaaaaaaaaaaaaaaaaaaaaaaaaaaaaaaaaaaaaaaaaaaa

SEQ ID NO: 22858 - RNA, 513 nt, Artificial Sequence
  mRNA product Design i-3 (hSL-A100) comprising derived and/or modified sequence from LASV(Lassa virus/H.sapiens-wt/NGA/2016/ISTH_0017;Clade II)__AVO03713__Z (opt5)
aggagaaagcuuaccaugggcaacagacaggccaagagcaccaaaguggacgagcaccaacgggcucaucugguccccgaugccucccaccucgggccucaguucugcaagucuuguugguuugaaaaucgcggacugguugagugcaacaaucauuaccuuugucugaacugccucagccugcuucuguccgugucuagcagauguccgaucugcaaaaugccccucccuacaaagcugaaagcggcuacgcagcccuccgccccuucuaccgaagugaaucagaacacaacacccccuccguauacccccugaggacuaguuauaagacugacuagcccgaugggccucccaacgggcccuccuccccuccuugcaccgagauuaaucaaaggcucuuuucagagccaccaaaaaaaaaaaaaaaaaaaaaaaaaaaaaaaaaaaaaaaaaaaaaaaaaaaaaaaaaaaaaaaaaaaaaaaaaaaaaaaaaaaaaaaaaaaaaaaaaaaaa

SEQ ID NO: 22859 - RNA, 513 nt, Artificial Sequence
  mRNA product Design i-3 (hSL-A100) comprising derived and/or modified sequence from LASV(Lassa virus/H.sapiens-wt/NGA/2018/ISTH_0959;Clade II)__AVV65084__Z (opt5)
aggagaaagcuuaccaugggcaacaagcaggccaaaagcaccaagguggacgagcaccaaagagcucaucugguccccgaugccucccaccucgggccucaguucugcaaaucuuguugguuugaaaaucggggacugguugagugcaacaaucauuaccuuugucugaacugccucagccugcuucuguccgugucuagccgcuguccgaucugcaagaugccccucccuacaaaacugaaggcggcugcccagcccuccgccccuucuacggaagcuauucagagcaccacacccccuccguauacccccugaggacuaguuauaagacugacuagcccgaugggccucccaacgggcccuccuccccuccuugcaccgagauuaaucaaaggcucuuuucagagccaccaaaaaaaaaaaaaaaaaaaaaaaaaaaaaaaaaaaaaaaaaaaaaaaaaaaaaaaaaaaaaaaaaaaaaaaaaaaaaaaaaaaaaaaaaaaaaaaaaaaaa

SEQ ID NO: 22860 - RNA, 513 nt, Artificial Sequence
  mRNA product Design i-3 (hSL-A100) comprising derived and/or modified sequence from LASV(LASV003-NIG-2008;Clade II)__AIT17578__Z (opt5)
aggagaaagcuuaccaugggcaacagacaggccaagagcaccaaaguggacgagcaccaacgggcucaucugguccccgaugccucccaccucgggccucaguucugcaagucuuguugguuugaaaauaaaggacugguugagugcaacaaucauuaccuuugucugaacugccucagccugcuucuguccgugucuagccgcuguccgaucugcaagaugccccucccuacaaaacugagagcggcugcccagcccuccgccccuucuacggaaagcgcucagaauaccgcucccccuccguaugcccccugaggacuaguuauaagacugacuagcccgaugggccucccaacgggcccuccuccccuccuugcaccgagauuaaucaaaggcucuuuucagagccaccaaaaaaaaaaaaaaaaaaaaaaaaaaaaaaaaaaaaaaaaaaaaaaaaaaaaaaaaaaaaaaaaaaaaaaaaaaaaaaaaaaaaaaaaaaaaaaaaaaaaa

SEQ ID NO: 22861 - RNA, 513 nt, Artificial Sequence
  mRNA product Design i-3 (hSL-A100) comprising derived and/or modified sequence from LASV(LASV035-NIG-2009;Clade II)__AIT17586__Z (opt5)
aggagaaagcuuaccaugggcaacaagcaggccaaaagcaccaagguggacgagcaccaaagagcucaucugguccccgaugccucccaccucgggccucaguucugcaaaucuuguugguuugaaaaucggggacugguugagugcaacaaucauuaccuuugucugaacugccucagccugcuucuguccgugucuagccgcuguccgaucugcaagaugccccucccuacaagacugaaagcggcugcccagcccuccgccccuucuacggaagugacccagaauacaacacccccuccguauacccccugaggacuaguuauaagacugacuagcccgaugggccucccaacgggcccuccuccccuccuugcaccgagauuaaucaaaggcucuuuucagagccaccaaaaaaaaaaaaaaaaaaaaaaaaaaaaaaaaaaaaaaaaaaaaaaaaaaaaaaaaaaaaaaaaaaaaaaaaaaaaaaaaaaaaaaaaaaaaaaaaaaaaa

SEQ ID NO: 22862 - RNA, 513 nt, Artificial Sequence
  mRNA product Design i-3 (hSL-A100) comprising derived and/or modified sequence from LASV(LASV1000-NIG-2009;Clade II)__AIT17780__Z (opt5)
aggagaaagcuuaccaugggcaacagacagaccaagagcacaaaaguggacgagcaccaacgggccuaccugguccccgaugcuucccuccuggggccucaguucugcaagucuuguugguuugaaaauaaaggacuuguugagugcaacaaucauuaucugugucucaacugccugagccuucugcucuccgugucuagccgcuguccgaucugcaagaugccccugccuacgagacugaaagccgcggcucagcccuccgccccucccaccgaagccauucagaauacaaccccuccgcccuacacaccuugaggacuaguuauaagacugacuagcccgaugggccucccaacgggcccuccuccccuccuugcaccgagauuaaucaaaggcucuuuucagagccaccaaaaaaaaaaaaaaaaaaaaaaaaaaaaaaaaaaaaaaaaaaaaaaaaaaaaaaaaaaaaaaaaaaaaaaaaaaaaaaaaaaaaaaaaaaaaaaaaaaaaa

SEQ ID NO: 22863 - RNA, 513 nt, Artificial Sequence
  mRNA product Design i-3 (hSL-A100) comprising derived and/or modified sequence from LASV(LASV221-NIG-2010;Clade II)__AIT17622__Z (opt5)
aggagaaagcuuaccaugggcaacagacaggccaagagcaccaaaguggacgagcaccaacgggcucaucugguccccgaugccucccaccucgggccucaguucugcaagucuuguugguuugaaaaucgcggacugguugagugcaacaaucauuaccuuugucugaacugccucagccugcuucuguccgugucuagcagauguccgaucugcaaaaugccccucccuacaaagcugaaagcggcuacgcagcccuccgccccuucuaccgaagugacacagaauaccauucccccuccguauagccccugaggacuaguuauaagacugacuagcccgaugggccucccaacgggcccuccuccccuccuugcaccgagauuaaucaaaggcucuuuucagagccaccaaaaaaaaaaaaaaaaaaaaaaaaaaaaaaaaaaaaaaaaaaaaaaaaaaaaaaaaaaaaaaaaaaaaaaaaaaaaaaaaaaaaaaaaaaaaaaaaaaaaa

SEQ ID NO: 22864 - RNA, 513 nt, Artificial Sequence
  mRNA product Design i-3 (hSL-A100) comprising derived and/or modified sequence from LASV(LASV237-NIG-2010;Clade II)__AIT17636__Z (opt5)
aggagaaagcuuaccaugggcaacagacaggccaagagcaccaaaguggacgagcaccaacgggcucaucugguccccgaugccucccaccucgggccucaguucugcaagucuuguugguuugaaaaucgcggacugguugagugcaacaaucauuaccuuugucugaacugccucagccugcuucuguccgugucuagcagauguccgaucugcaaaaugccccucccuacaaagcugaaagcggcugcccagcccuccgccccuucuauugaaacgauccagaauaccacacccccuccguauacccccugaggacuaguuauaagacugacuagcccgaugggccucccaacgggcccuccuccccuccuugcaccgagauuaaucaaaggcucuuuucagagccaccaaaaaaaaaaaaaaaaaaaaaaaaaaaaaaaaaaaaaaaaaaaaaaaaaaaaaaaaaaaaaaaaaaaaaaaaaaaaaaaaaaaaaaaaaaaaaaaaaaaaa

SEQ ID NO: 22865 - RNA, 513 nt, Artificial Sequence
  mRNA product Design i-3 (hSL-A100) comprising derived and/or modified sequence from LASV(LASV253-NIG-2011;Clade II)__AIT17668__Z (opt5)
aggagaaagcuuaccaugggcaacagacaggccaagagcaccaaaguggacgagcaccaacgggcucaucugguccccgaugccucccaccucgggccucaguucugcaagucuuguugguuugaaaauaaaggacugguugagugcaacaaucauuaccuuugucugaacugccucagccugcuucuguccgugucuagccgcuguccgaucugcaagaugccccucccuacaaaacugaagacgaccgcgcagcccuccgcuccucccacagaagccgccaagaauaccgcuccuccgcccuaugccccuugaggacuaguuauaagacugacuagcccgaugggccucccaacgggcccuccuccccuccuugcaccgagauuaaucaaaggcucuuuucagagccaccaaaaaaaaaaaaaaaaaaaaaaaaaaaaaaaaaaaaaaaaaaaaaaaaaaaaaaaaaaaaaaaaaaaaaaaaaaaaaaaaaaaaaaaaaaaaaaaaaaaaa

SEQ ID NO: 22866 - RNA, 513 nt, Artificial Sequence
  mRNA product Design i-3 (hSL-A100) comprising derived and/or modified sequence from LASV(G1180-SLE-2010;Clade IV)__AIT17166__Z (opt5)
aggagaaagcuuaccaugggcaacaagcaggccaaagcucccgaggccaaggacagcccuagagcgucccugaucccggaugcuacccaccucgggccccaauucugcaaaucuuguugguuugaaacaaagggacugguggagugcaauaaccauuaccuuugucugaauugccucacgcugcuucugagcgucuccaaccgguguccuauuugcaaaaugccccucccuaccaagcugcgccccucugccacaccuaccgccccgcccacagaagcugccgacagcaucggcccucccccuuauucccccugaggacuaguuauaagacugacuagcccgaugggccucccaacgggcccuccuccccuccuugcaccgagauuaaucaaaggcucuuuucagagccaccaaaaaaaaaaaaaaaaaaaaaaaaaaaaaaaaaaaaaaaaaaaaaaaaaaaaaaaaaaaaaaaaaaaaaaaaaaaaaaaaaaaaaaaaaaaaaaaaaaaaa

SEQ ID NO: 22867 - RNA, 513 nt, Artificial Sequence
  mRNA product Design i-3 (hSL-A100) comprising derived and/or modified sequence from LASV(G1442-SLE-2011;Clade IV)__AIT17178__Z (opt5)
aggagaaagcuuaccaugggcaacaagcaggccaaagcuagcgaggccaaggacucccccagagcgucucugaucccugaugcuacccaccucgggccgcaauucugcaaaagcuguugguuugaaaauaagggacugguggagugcaacaaucauuaccuuugucugaacugccucucccugcuucugucugucagcucccggugucccauuugcaaaaugccucuccccacacgccugagaccuucuacggcccccaccgccccuccggcucgggccggcgacaauaucaagcccccucccuauagcccuugaggacuaguuauaagacugacuagcccgaugggccucccaacgggcccuccuccccuccuugcaccgagauuaaucaaaggcucuuuucagagccaccaaaaaaaaaaaaaaaaaaaaaaaaaaaaaaaaaaaaaaaaaaaaaaaaaaaaaaaaaaaaaaaaaaaaaaaaaaaaaaaaaaaaaaaaaaaaaaaaaaaaa

SEQ ID NO: 22868 - RNA, 513 nt, Artificial Sequence
  mRNA product Design i-3 (hSL-A100) comprising derived and/or modified sequence from LASV(G502-SLE-2009;Clade IV)__AIT17124__Z (opt5)
aggagaaagcuuaccaugggcaacaaacaggugaagacccccgaggccaaggacagcccuagagcuucccugaucccggaugccacacaccucgggccccaauucugcaaaucuuguugguuugaaaauaagggacuggucgagugcaacaaucauuaccuuugucugaacugccucacgcugcuucugagcguuggcaaucgguguccuauuugcaaaaugccccucccuaccaagcugcgccccuccgugacaccuaccgcgccgcccacaagagcugccgacucuaucgggccucccccuuauagccccugaggacuaguuauaagacugacuagcccgaugggccucccaacgggcccuccuccccuccuugcaccgagauuaaucaaaggcucuuuucagagccaccaaaaaaaaaaaaaaaaaaaaaaaaaaaaaaaaaaaaaaaaaaaaaaaaaaaaaaaaaaaaaaaaaaaaaaaaaaaaaaaaaaaaaaaaaaaaaaaaaaaaa

SEQ ID NO: 22869 - RNA, 513 nt, Artificial Sequence
  mRNA product Design i-3 (hSL-A100) comprising derived and/or modified sequence from LASV(G733-SLE-2010;Clade IV)__AIT17152__Z (opt5)
aggagaaagcuuaccaugggcaacaagcaggccaaaacccccgagacaaaggacagcccuagagcuucccugaucccggaugccacgcaccucgggccccaauucugcaaaucuuguugguuugaaaauaagggacugguggagugcaacaaucauuaccuuugucugaacugccucacccugcuucugagcgucuccaaucgguguccuauuugcaaaaugccccucccuacaaagcugcgccccucuaccgcgccuacagcuccgcccgccggcgccgcugacaacaccagaccucccccuuauagccccugaggacuaguuauaagacugacuagcccgaugggccucccaacgggcccuccuccccuccuugcaccgagauuaaucaaaggcucuuuucagagccaccaaaaaaaaaaaaaaaaaaaaaaaaaaaaaaaaaaaaaaaaaaaaaaaaaaaaaaaaaaaaaaaaaaaaaaaaaaaaaaaaaaaaaaaaaaaaaaaaaaaaa

SEQ ID NO: 22870 - RNA, 525 nt, Artificial Sequence
  mRNA product Design i-3 (hSL-A100) comprising derived and/or modified sequence from MOPV/LASV reassortant(IGS-1;Clade IV)__AFY05533__Z (opt5)
aggagaaagcuuaccaugggcaagacccagagcaaagggcaacccuccacaaaccugcucaaggagacggaaccuagacacccggugauccccgacgcccggggaaccggcccugaguucugcaaaucuuguugguuugaacgcagagggcugguccggugcaaugaucauuaccuuugucugaacugccucacacugcuucacaccguuagcgaccgcugucccaucugcaagcauaaacugccuuucagacucgagcugcagacacagcccaccgcuccuccggaaauucccccuucccagaaucccccucccuauucuccgugaggacuaguuauaagacugacuagcccgaugggccucccaacgggcccuccuccccuccuugcaccgagauuaaucaaaggcucuuuucagagccaccaaaaaaaaaaaaaaaaaaaaaaaaaaaaaaaaaaaaaaaaaaaaaaaaaaaaaaaaaaaaaaaaaaaaaaaaaaaaaaaaaaaaaaaaaaaaaaaaaaaaa

SEQ ID NO: 22871 - RNA, 513 nt, Artificial Sequence
  mRNA product Design i-3 (hSL-A100) comprising derived and/or modified sequence from LASV(LM776-SLE-2012;Clade IV)__AIT17824__Z (opt5)
aggagaaagcuuaccaugggcaacaagcaggccaaagcuagcgaggaaaagaacucccccagagccucucugaucccugacgcgacccaccucgggccgcaauucugcaaaagcuguugguuugagaauaagggacugguggaaugcaauaaccauuaccuuugucugaauugccucacacugcuucuguccgucucuaaccggugucccauuugcaaaaugccucuccccacgaagcugcgcccuagcaccacacccaccgcuccuccgacaggcgccgccgauuccaucagacccccucccuauucuccuugaggacuaguuauaagacugacuagcccgaugggccucccaacgggcccuccuccccuccuugcaccgagauuaaucaaaggcucuuuucagagccaccaaaaaaaaaaaaaaaaaaaaaaaaaaaaaaaaaaaaaaaaaaaaaaaaaaaaaaaaaaaaaaaaaaaaaaaaaaaaaaaaaaaaaaaaaaaaaaaaaaaaa

SEQ ID NO: 22872 - RNA, 513 nt, Artificial Sequence
  mRNA product Design i-3 (hSL-A100) comprising derived and/or modified sequence from LASV(Mad39;Clade IV)__ANH09743__Z (opt5)
aggagaaagcuuaccaugggcaacaagcaggccaaagcuagcgagguggaagacgggcccagagccucccugaucccugaugcgacccaccucggaccgcaauucugcaagucuuguugguuugagaauaaaagccuggucgaaugcaacaaucauuaccuuugucugaacugccucacacugcuucuguccguuucuaaucggugucccauuugcaagaugccucuccccacgcgccugaaaccuagcguggugcccaccgcuccuccgacaagagccggcgacgggacccggcccccucccuauuccccuugaggacuaguuauaagacugacuagcccgaugggccucccaacgggcccuccuccccuccuugcaccgagauuaaucaaaggcucuuuucagagccaccaaaaaaaaaaaaaaaaaaaaaaaaaaaaaaaaaaaaaaaaaaaaaaaaaaaaaaaaaaaaaaaaaaaaaaaaaaaaaaaaaaaaaaaaaaaaaaaaaaaaa

SEQ ID NO: 22873 - RNA, 513 nt, Artificial Sequence
  mRNA product Design i-3 (hSL-A100) comprising derived and/or modified sequence from LASV(Z0947-SLE-2011;Clade IV)__AIT17838__Z (opt5)
aggagaaagcuuaccaugggcaacaagcaggccaaagugcccgagagcaaggacuccccuagagcuucucugaucccggaugccacccaccucgggccccaauucugcaaaagcuguugguuugaaaauaagggacuggucgagugcaacaaucauuaccuuugucugaacugccucacacugcuucuguccguuucuaaucgguguccuauuugcaaaaugccccucccuacgaagcugaagcccagcgcggcuccuaccgccccgcccacaggcgccgcugacuccauccgcccucccccuuauucucccugaggacuaguuauaagacugacuagcccgaugggccucccaacgggcccuccuccccuccuugcaccgagauuaaucaaaggcucuuuucagagccaccaaaaaaaaaaaaaaaaaaaaaaaaaaaaaaaaaaaaaaaaaaaaaaaaaaaaaaaaaaaaaaaaaaaaaaaaaaaaaaaaaaaaaaaaaaaaaaaaaaaaa

SEQ ID NO: 22874 - RNA, 489 nt, Artificial Sequence
  mRNA product Design i-3 (A100) comprising derived and/or modified sequence from LASV(Josiah;Clade IV)__ADY11072/NP_694871__Z (opt1)
aggagaaagcuuaccaugggcaacaagcaggccaaggcccccgagagcaaggacuccccgcgcgcgagccugauccccgacgccacccaccucgggccccaguucugcaaguccugcugguucgagaacaagggccugguggagugcaacaaccacuaccugugccucaacugccugacccugcuccugagcgucuccaaccggugccccaucugcaagaugccgcugcccacgaagcuccgccccagcgccgcccccaccgccccgcccaccggggcggccgacuccauccggcccccgcccuacagccccugaggacuaguuauaagacugacuagcccgaugggccucccaacgggcccuccuccccuccuugcaccgagauuaauaaaaaaaaaaaaaaaaaaaaaaaaaaaaaaaaaaaaaaaaaaaaaaaaaaaaaaaaaaaaaaaaaaaaaaaaaaaaaaaaaaaaaaaaaaaaaaaaaaaa

SEQ ID NO: 22875 - RNA, 492 nt, Artificial Sequence
  mRNA product Design i-3 (A100) comprising derived and/or modified sequence from LASV(Pinneo-NIG-1969;Clade I)__AIT17834__Z (opt1)
aggagaaagcuuaccaugggcaacaagcagacccgcagcccgcccaagcccgagcacccccggcccacccugcuccccgacgccucccaccuggggccccaguucugcaagagcugcugguucgagaacaagggccugguggagugcaacaaccacuaccucugccugaacugccugacgcuccugcuguccgucagcgaccgcugccccaucugcaagaugccccuccccaccaagcuggccgugcggacccagcccuccgcgccgccccugaaccaggggaacacccagagcagcccgccgcccuacucccccugaggacuaguuauaagacugacuagcccgaugggccucccaacgggcccuccuccccuccuugcaccgagauuaauaaaaaaaaaaaaaaaaaaaaaaaaaaaaaaaaaaaaaaaaaaaaaaaaaaaaaaaaaaaaaaaaaaaaaaaaaaaaaaaaaaaaaaaaaaaaaaaaaaaa

SEQ ID NO: 22876 - RNA, 489 nt, Artificial Sequence
  mRNA product Design i-3 (A100) comprising derived and/or modified sequence from LASV(Nig08-04;Clade II)__ADU56612__Z (opt1)
aggagaaagcuuaccaugggcaaccgccagacccggcccaccgaggccacggagcagagccgcgcccaccuggugccggacgccucccaccucgggccccaguucugcaagagcugcugguucgagaaccggggccuggucgagugcaacaaccacuaccugugccucaacugccugucccugcuccugagcguguccagccgcugccccaucugcaagaugccccugccgacccggcucaaggccuccgcccagcccagcgccccgcccaccgaggcgccccagaacaccacgcccccgcccuacacccccugaggacuaguuauaagacugacuagcccgaugggccucccaacgggcccuccuccccuccuugcaccgagauuaauaaaaaaaaaaaaaaaaaaaaaaaaaaaaaaaaaaaaaaaaaaaaaaaaaaaaaaaaaaaaaaaaaaaaaaaaaaaaaaaaaaaaaaaaaaaaaaaaaaaa

SEQ ID NO: 22877 - RNA, 489 nt, Artificial Sequence
  mRNA product Design i-3 (A100) comprising derived and/or modified sequence from LASV(Nig08-A19;Clade III)__ADU56620__Z (opt1)
aggagaaagcuuaccaugggcgggaagcacaccaagccccagcgcgagagcaacuccccgcgggccagccugauccccgacgccacccaccucggcccccaguucugcaaguccugcugguucgagaacaaggggcugguggagugcaacaaccacuaccugugccucaacugccugacgcugcuccugagcguguccaaccgcugccccaucugcaagaugccccugcccacccggcuccgcgccagcaccaaccccaccgcgccccagguggagcaggucggcccgacgaacccgccgcccuacucccccugaggacuaguuauaagacugacuagcccgaugggccucccaacgggcccuccuccccuccuugcaccgagauuaauaaaaaaaaaaaaaaaaaaaaaaaaaaaaaaaaaaaaaaaaaaaaaaaaaaaaaaaaaaaaaaaaaaaaaaaaaaaaaaaaaaaaaaaaaaaaaaaaaaaa

SEQ ID NO: 22878 - RNA, 489 nt, Artificial Sequence
  mRNA product Design i-3 (A100) comprising derived and/or modified sequence from LASV(AV;Clade V)__CCA30312__Z (opt1)
aggagaaagcuuaccaugggcaaccgccaggccaagaaccccgagguggagaacagcccccgggccucccugauccccgacgcgacccaccucgggccccaguucugcaagagcugcugguucgagaacaagggccuggucgagugcaacaaccacuaccugugccucaacugccugucccugcuccugagcguguccaaccgcugccccaucugcaagaugccgcugcccacccggcuccgccccacgaccacccccaccgccccgcagaucaucaaggagaacacgaccaacccgccgcccuacacccccugaggacuaguuauaagacugacuagcccgaugggccucccaacgggcccuccuccccuccuugcaccgagauuaauaaaaaaaaaaaaaaaaaaaaaaaaaaaaaaaaaaaaaaaaaaaaaaaaaaaaaaaaaaaaaaaaaaaaaaaaaaaaaaaaaaaaaaaaaaaaaaaaaaaa

SEQ ID NO: 22879 - RNA, 489 nt, Artificial Sequence
  mRNA product Design i-3 (A100) comprising derived and/or modified sequence from LASV(Togo/2016/7082;Clade VI)__AMR44579__Z (opt1)
aggagaaagcuuaccaugggcgcccgccagaccaagcagccccagaucgaggggagcccccgggccucccuggugcccgacgcgagccaccucggcccccaguucugcaaguccugcugguucgagaacaaggggcuggucgagugcaacaaccacuaccugugccucaacugccugagccugcuccuguccgugagcaaccgcugccccaucugcaagaugccgcugcccaccaagcuccggguguccagcgcccccuccgcgcccccggccgccacggcccagcccggcaccccgccgcccuacagccccugaggacuaguuauaagacugacuagcccgaugggccucccaacgggcccuccuccccuccuugcaccgagauuaauaaaaaaaaaaaaaaaaaaaaaaaaaaaaaaaaaaaaaaaaaaaaaaaaaaaaaaaaaaaaaaaaaaaaaaaaaaaaaaaaaaaaaaaaaaaaaaaaaaaa

SEQ ID NO: 22880 - RNA, 489 nt, Artificial Sequence
  mRNA product Design i-3 (A100) comprising derived and/or modified sequence from LASV(KAK-428;Clade n.d. (VII))__ANH09761__Z (opt1)
aggagaaagcuuaccaugggcaacaaggggaccaagcccacccagaacagcgagcccucccgcgccaaccuggugcccgacgccagcuaccucggcccccaguucugcaaguccugcugguucgagaacaaggggcuggucgagugcaacaaccacuaccugugccucaacugccugacgaugcugcucagcguguccaaccggugccccaucugcaagaugccgcugcccaccaagaucaaggccagcggcucccccagcgcgcccccgaccgaggccaacuccgccgugagcccgccgcccuacacccccugaggacuaguuauaagacugacuagcccgaugggccucccaacgggcccuccuccccuccuugcaccgagauuaauaaaaaaaaaaaaaaaaaaaaaaaaaaaaaaaaaaaaaaaaaaaaaaaaaaaaaaaaaaaaaaaaaaaaaaaaaaaaaaaaaaaaaaaaaaaaaaaaaaaa

SEQ ID NO: 22881 - RNA, 489 nt, Artificial Sequence
  mRNA product Design i-3 (A100) comprising derived and/or modified sequence from LASV(ISTH0009-NIG-2011;Clade II)__AIT17402__Z (opt1)
aggagaaagcuuaccaugggcaaccgccaggccaagagcaccaagguggacgagcaccagcgggcccaccugguccccgacgcgucccaccucgggccccaguucugcaagagcugcugguucgagaaccgcggccugguggagugcaacaaccacuaccugugccucaacugccugucccugcuccugagcguguccagccggugccccaucugcaagaugccccugcccaccaagcucaaggccgccgcccagccguccgcccccagcacggagaccauccagaacaccaccccgccgcccuacacgcccugaggacuaguuauaagacugacuagcccgaugggccucccaacgggcccuccuccccuccuugcaccgagauuaauaaaaaaaaaaaaaaaaaaaaaaaaaaaaaaaaaaaaaaaaaaaaaaaaaaaaaaaaaaaaaaaaaaaaaaaaaaaaaaaaaaaaaaaaaaaaaaaaaaaa

SEQ ID NO: 22882 - RNA, 489 nt, Artificial Sequence
  mRNA product Design i-3 (A100) comprising derived and/or modified sequence from LASV(ISTH2010-NIG-2012;Clade II)__AIT17480__Z (opt1)
aggagaaagcuuaccaugggcaaccgccacgccaagagcaccaagguggacgagcaccagcgggcccaccugguccccgacgcgucccaccucgggccccaguucugcaagagcugcugguucgagaaccgcggccugguggagugcaacaaccacuaccugugccucaacugccugucccugcuccugagcguguccagccggugccccaucugcaagaugccccugcccaccaagcucaaggccgccgcccagccguccgcccccagcacggaggucauccaguccaccaccccgccgcccuacacccccugaggacuaguuauaagacugacuagcccgaugggccucccaacgggcccuccuccccuccuugcaccgagauuaauaaaaaaaaaaaaaaaaaaaaaaaaaaaaaaaaaaaaaaaaaaaaaaaaaaaaaaaaaaaaaaaaaaaaaaaaaaaaaaaaaaaaaaaaaaaaaaaaaaaa

SEQ ID NO: 22883 - RNA, 489 nt, Artificial Sequence
  mRNA product Design i-3 (A100) comprising derived and/or modified sequence from LASV(Lassa virus/H.sapiens-wt/NGA/2016/ISTH_0017;Clade II)__AVO03713__Z (opt1)
aggagaaagcuuaccaugggcaaccgccaggccaagagcaccaagguggacgagcaccagcgggcccaccugguccccgacgcgucccaccucgggccccaguucugcaagagcugcugguucgagaaccgcggccugguggagugcaacaaccacuaccugugccucaacugccugucccugcuccugagcguguccagccggugccccaucugcaagaugccccugcccaccaagcucaaggccgccacgcagccguccgcccccagcaccgaggucaaccagaacaccaccccgccgcccuacacgcccugaggacuaguuauaagacugacuagcccgaugggccucccaacgggcccuccuccccuccuugcaccgagauuaauaaaaaaaaaaaaaaaaaaaaaaaaaaaaaaaaaaaaaaaaaaaaaaaaaaaaaaaaaaaaaaaaaaaaaaaaaaaaaaaaaaaaaaaaaaaaaaaaaaaa

SEQ ID NO: 22884 - RNA, 489 nt, Artificial Sequence
  mRNA product Design i-3 (A100) comprising derived and/or modified sequence from LASV(Lassa virus/H.sapiens-wt/NGA/2018/ISTH_0959;Clade II)__AVV65084__Z (opt1)
aggagaaagcuuaccaugggcaacaagcaggccaagagcaccaagguggacgagcaccagcgcgcccaccugguccccgacgcgucccaccucgggccccaguucugcaagagcugcugguucgagaaccggggccugguggagugcaacaaccacuaccugugccucaacugccugucccugcuccugagcguguccagccgcugccccaucugcaagaugccccugcccaccaagcucaaggccgccgcccagccguccgcccccagcacggaggcgauccaguccaccaccccgccgcccuacacccccugaggacuaguuauaagacugacuagcccgaugggccucccaacgggcccuccuccccuccuugcaccgagauuaauaaaaaaaaaaaaaaaaaaaaaaaaaaaaaaaaaaaaaaaaaaaaaaaaaaaaaaaaaaaaaaaaaaaaaaaaaaaaaaaaaaaaaaaaaaaaaaaaaaaa

SEQ ID NO: 22885 - RNA, 489 nt, Artificial Sequence
  mRNA product Design i-3 (A100) comprising derived and/or modified sequence from LASV(LASV003-NIG-2008;Clade II)__AIT17578__Z (opt1)
aggagaaagcuuaccaugggcaaccgccaggccaagagcaccaagguggacgagcaccagcgggcccaccugguccccgacgcgucccaccucgggccccaguucugcaagagcugcugguucgagaacaagggccugguggagugcaacaaccacuaccugugccucaacugccugucccugcuccugagcguguccagccgcugccccaucugcaagaugccccugcccaccaagcuccgggccgccgcccagccguccgcccccagcacggaguccgcgcagaacaccgccccgccgcccuacgcccccugaggacuaguuauaagacugacuagcccgaugggccucccaacgggcccuccuccccuccuugcaccgagauuaauaaaaaaaaaaaaaaaaaaaaaaaaaaaaaaaaaaaaaaaaaaaaaaaaaaaaaaaaaaaaaaaaaaaaaaaaaaaaaaaaaaaaaaaaaaaaaaaaaaaa

SEQ ID NO: 22886 - RNA, 489 nt, Artificial Sequence
  mRNA product Design i-3 (A100) comprising derived and/or modified sequence from LASV(LASV035-NIG-2009;Clade II)__AIT17586__Z (opt1)
aggagaaagcuuaccaugggcaacaagcaggccaagagcaccaagguggacgagcaccagcgcgcccaccugguccccgacgcgucccaccucgggccccaguucugcaagagcugcugguucgagaaccggggccugguggagugcaacaaccacuaccugugccucaacugccugucccugcuccugagcguguccagccgcugccccaucugcaagaugccccugcccacccggcucaaggccgccgcccagccguccgcccccagcacggaggucacccagaacaccaccccgccgcccuacacgcccugaggacuaguuauaagacugacuagcccgaugggccucccaacgggcccuccuccccuccuugcaccgagauuaauaaaaaaaaaaaaaaaaaaaaaaaaaaaaaaaaaaaaaaaaaaaaaaaaaaaaaaaaaaaaaaaaaaaaaaaaaaaaaaaaaaaaaaaaaaaaaaaaaaaa

SEQ ID NO: 22887 - RNA, 489 nt, Artificial Sequence
  mRNA product Design i-3 (A100) comprising derived and/or modified sequence from LASV(LASV1000-NIG-2009;Clade II)__AIT17780__Z (opt1)
aggagaaagcuuaccaugggcaaccgccagaccaagagcaccaagguggacgagcaccagcgggccuaccugguccccgacgccucccuccuggggccccaguucugcaagagcugcugguucgagaacaagggccugguggagugcaacaaccacuaccucugccugaacugccugucccuccugcugagcguguccagccgcugccccaucugcaagaugccccuccccacgcggcugaaggcggccgcccagcccuccgccccgcccaccgaggccauccagaacaccacgccgccgcccuacacccccugaggacuaguuauaagacugacuagcccgaugggccucccaacgggcccuccuccccuccuugcaccgagauuaauaaaaaaaaaaaaaaaaaaaaaaaaaaaaaaaaaaaaaaaaaaaaaaaaaaaaaaaaaaaaaaaaaaaaaaaaaaaaaaaaaaaaaaaaaaaaaaaaaaaa

SEQ ID NO: 22888 - RNA, 489 nt, Artificial Sequence
  mRNA product Design i-3 (A100) comprising derived and/or modified sequence from LASV(LASV221-NIG-2010;Clade II)__AIT17622__Z (opt1)
aggagaaagcuuaccaugggcaaccgccaggccaagagcaccaagguggacgagcaccagcgggcccaccugguccccgacgcgucccaccucgggccccaguucugcaagagcugcugguucgagaaccgcggccugguggagugcaacaaccacuaccugugccucaacugccugucccugcuccugagcguguccagccggugccccaucugcaagaugccccugcccaccaagcucaaggccgccacgcagccguccgcccccagcaccgaggucacccagaacaccaucccgccgcccuacucccccugaggacuaguuauaagacugacuagcccgaugggccucccaacgggcccuccuccccuccuugcaccgagauuaauaaaaaaaaaaaaaaaaaaaaaaaaaaaaaaaaaaaaaaaaaaaaaaaaaaaaaaaaaaaaaaaaaaaaaaaaaaaaaaaaaaaaaaaaaaaaaaaaaaaa

SEQ ID NO: 22889 - RNA, 489 nt, Artificial Sequence
  mRNA product Design i-3 (A100) comprising derived and/or modified sequence from LASV(LASV237-NIG-2010;Clade II)__AIT17636__Z (opt1)
aggagaaagcuuaccaugggcaaccgccaggccaagagcaccaagguggacgagcaccagcgggcccaccugguccccgacgcgucccaccucgggccccaguucugcaagagcugcugguucgagaaccgcggccugguggagugcaacaaccacuaccugugccucaacugccugucccugcuccugagcguguccagccggugccccaucugcaagaugccccugcccaccaagcucaaggccgccgcccagccguccgcccccagcaucgagacgauccagaacaccaccccgccgcccuacacccccugaggacuaguuauaagacugacuagcccgaugggccucccaacgggcccuccuccccuccuugcaccgagauuaauaaaaaaaaaaaaaaaaaaaaaaaaaaaaaaaaaaaaaaaaaaaaaaaaaaaaaaaaaaaaaaaaaaaaaaaaaaaaaaaaaaaaaaaaaaaaaaaaaaaa

SEQ ID NO: 22890 - RNA, 489 nt, Artificial Sequence
  mRNA product Design i-3 (A100) comprising derived and/or modified sequence from LASV(LASV253-NIG-2011;Clade II)__AIT17668__Z (opt1)
aggagaaagcuuaccaugggcaaccgccaggccaagagcaccaagguggacgagcaccagcgggcccaccugguccccgacgcgucccaccucgggccccaguucugcaagagcugcugguucgagaacaagggccugguggagugcaacaaccacuaccugugccucaacugccugucccugcuccugagcguguccagccgcugccccaucugcaagaugccccugcccaccaagcucaagacgaccgcccagccguccgccccgcccaccgaggccgccaagaacaccgcgcccccgcccuacgcccccugaggacuaguuauaagacugacuagcccgaugggccucccaacgggcccuccuccccuccuugcaccgagauuaauaaaaaaaaaaaaaaaaaaaaaaaaaaaaaaaaaaaaaaaaaaaaaaaaaaaaaaaaaaaaaaaaaaaaaaaaaaaaaaaaaaaaaaaaaaaaaaaaaaaa

SEQ ID NO: 22891 - RNA, 489 nt, Artificial Sequence
  mRNA product Design i-3 (A100) comprising derived and/or modified sequence from LASV(G1180-SLE-2010;Clade IV)__AIT17166__Z (opt1)
aggagaaagcuuaccaugggcaacaagcaggccaaggcccccgaggcgaaggacagcccgcgcgccucccugauccccgacgccacccaccucgggccccaguucugcaagagcugcugguucgagaccaagggccugguggagugcaacaaccacuaccugugccucaacugccugacgcugcuccuguccgucagcaaccggugccccaucugcaagaugccgcugcccaccaagcuccgccccuccgccacccccaccgccccgcccacggaggcggccgacagcaucgggcccccgcccuacucccccugaggacuaguuauaagacugacuagcccgaugggccucccaacgggcccuccuccccuccuugcaccgagauuaauaaaaaaaaaaaaaaaaaaaaaaaaaaaaaaaaaaaaaaaaaaaaaaaaaaaaaaaaaaaaaaaaaaaaaaaaaaaaaaaaaaaaaaaaaaaaaaaaaaaa

SEQ ID NO: 22892 - RNA, 489 nt, Artificial Sequence
  mRNA product Design i-3 (A100) comprising derived and/or modified sequence from LASV(G1442-SLE-2011;Clade IV)__AIT17178__Z (opt1)
aggagaaagcuuaccaugggcaacaagcaggccaaggccagcgaggcgaaggacagcccccgcgccucccugaucccggacgccacccaccucgggccccaguucugcaaguccugcugguucgagaacaagggccugguggagugcaacaaccacuaccugugccucaacugccugagccugcuccuguccgucagcucccggugccccaucugcaagaugccccugccgacccgccuccggcccagcacggcccccaccgcgcccccggcccgcgccggggacaacaucaagcccccgcccuacucccccugaggacuaguuauaagacugacuagcccgaugggccucccaacgggcccuccuccccuccuugcaccgagauuaauaaaaaaaaaaaaaaaaaaaaaaaaaaaaaaaaaaaaaaaaaaaaaaaaaaaaaaaaaaaaaaaaaaaaaaaaaaaaaaaaaaaaaaaaaaaaaaaaaaaa

SEQ ID NO: 22893 - RNA, 489 nt, Artificial Sequence
  mRNA product Design i-3 (A100) comprising derived and/or modified sequence from LASV(G502-SLE-2009;Clade IV)__AIT17124__Z (opt1)
aggagaaagcuuaccaugggcaacaagcaggucaagacccccgaggccaaggacagcccccgcgccucccugauccccgacgcgacccaccucgggccccaguucugcaagagcugcugguucgagaacaagggccugguggagugcaacaaccacuaccugugccucaacugccugacgcugcuccuguccguggggaaccggugccccaucugcaagaugccgcugcccaccaagcuccgccccagcgugacccccaccgccccgcccacgcgggccgccgacuccaucggcccgccgcccuacagccccugaggacuaguuauaagacugacuagcccgaugggccucccaacgggcccuccuccccuccuugcaccgagauuaauaaaaaaaaaaaaaaaaaaaaaaaaaaaaaaaaaaaaaaaaaaaaaaaaaaaaaaaaaaaaaaaaaaaaaaaaaaaaaaaaaaaaaaaaaaaaaaaaaaaa

SEQ ID NO: 22894 - RNA, 489 nt, Artificial Sequence
  mRNA product Design i-3 (A100) comprising derived and/or modified sequence from LASV(G733-SLE-2010;Clade IV)__AIT17152__Z (opt1)
aggagaaagcuuaccaugggcaacaagcaggccaagacccccgagaccaaggacagcccgcgcgccucccugauccccgacgcgacgcaccucgggccccaguucugcaagagcugcugguucgagaacaagggccugguggagugcaacaaccacuaccugugccucaacugccugacccugcuccuguccgucagcaaccggugccccaucugcaagaugccgcugcccaccaagcuccgccccuccaccgcccccacggccccgcccgccggggccgcggacaacacccggcccccgcccuacagccccugaggacuaguuauaagacugacuagcccgaugggccucccaacgggcccuccuccccuccuugcaccgagauuaauaaaaaaaaaaaaaaaaaaaaaaaaaaaaaaaaaaaaaaaaaaaaaaaaaaaaaaaaaaaaaaaaaaaaaaaaaaaaaaaaaaaaaaaaaaaaaaaaaaaa

SEQ ID NO: 22895 - RNA, 501 nt, Artificial Sequence
  mRNA product Design i-3 (A100) comprising derived and/or modified sequence from MOPV/LASV reassortant(IGS-1;Clade IV)__AFY05533__Z (opt1)
aggagaaagcuuaccaugggcaagacccagagcaaggggcagcccuccaccaaccugcucaaggagacggagccccgccaccccgugauccccgacgcccggggcaccgggcccgaguucugcaagagcugcugguucgagcgccggggccugguccgcugcaacgaccacuaccugugccucaacugccugacccugcuccacaccguguccgaccggugccccaucugcaagcacaagcugcccuuccgccuggagcuccagacgcagcccaccgccccgcccgagaucccgcccagccagaacccgccgcccuacucccccugaggacuaguuauaagacugacuagcccgaugggccucccaacgggcccuccuccccuccuugcaccgagauuaauaaaaaaaaaaaaaaaaaaaaaaaaaaaaaaaaaaaaaaaaaaaaaaaaaaaaaaaaaaaaaaaaaaaaaaaaaaaaaaaaaaaaaaaaaaaaaaaaaaaa

SEQ ID NO: 22896 - RNA, 489 nt, Artificial Sequence
  mRNA product Design i-3 (A100) comprising derived and/or modified sequence from LASV(LM776-SLE-2012;Clade IV)__AIT17824__Z (opt1)
aggagaaagcuuaccaugggcaacaagcaggccaaggccagcgaggagaagaacagcccccgcgccucccugaucccggacgccacccaccucgggccccaguucugcaaguccugcugguucgagaacaagggccugguggagugcaacaaccacuaccugugccucaacugccugacccugcuccugagcgucuccaaccggugccccaucugcaagaugccccugccgacgaagcuccgccccagcaccacccccaccgcgcccccgacgggggccgccgacuccauccggcccccgcccuacagccccugaggacuaguuauaagacugacuagcccgaugggccucccaacgggcccuccuccccuccuugcaccgagauuaauaaaaaaaaaaaaaaaaaaaaaaaaaaaaaaaaaaaaaaaaaaaaaaaaaaaaaaaaaaaaaaaaaaaaaaaaaaaaaaaaaaaaaaaaaaaaaaaaaaaa

SEQ ID NO: 22897 - RNA, 489 nt, Artificial Sequence
  mRNA product Design i-3 (A100) comprising derived and/or modified sequence from LASV(Mad39;Clade IV)__ANH09743__Z (opt1)
aggagaaagcuuaccaugggcaacaagcaggccaaggccagcgagguggaggacgggccccgcgccucccugauccccgacgccacccaccucggcccccaguucugcaagagcugcugguucgagaacaagucccuggucgagugcaacaaccacuaccugugccucaacugccugacccugcuccugagcguguccaaccggugccccaucugcaagaugccccugccgacgcgccucaagcccagcgugguccccaccgcgcccccgacccgggccggggacggcacccgcccgccgcccuacucccccugaggacuaguuauaagacugacuagcccgaugggccucccaacgggcccuccuccccuccuugcaccgagauuaauaaaaaaaaaaaaaaaaaaaaaaaaaaaaaaaaaaaaaaaaaaaaaaaaaaaaaaaaaaaaaaaaaaaaaaaaaaaaaaaaaaaaaaaaaaaaaaaaaaaa

SEQ ID NO: 22898 - RNA, 489 nt, Artificial Sequence
  mRNA product Design i-3 (A100) comprising derived and/or modified sequence from LASV(Z0947-SLE-2011;Clade IV)__AIT17838__Z (opt1)
aggagaaagcuuaccaugggcaacaagcaggccaaggugcccgagagcaaggacuccccgcgcgccagccugauccccgacgcgacccaccucgggccccaguucugcaaguccugcugguucgagaacaagggccuggucgagugcaacaaccacuaccugugccucaacugccugacccugcuccugagcguguccaaccgcugccccaucugcaagaugccgcugcccacgaagcucaagcccagcgccgcccccaccgccccgcccaccggggccgcggacuccauccggcccccgcccuacagccccugaggacuaguuauaagacugacuagcccgaugggccucccaacgggcccuccuccccuccuugcaccgagauuaauaaaaaaaaaaaaaaaaaaaaaaaaaaaaaaaaaaaaaaaaaaaaaaaaaaaaaaaaaaaaaaaaaaaaaaaaaaaaaaaaaaaaaaaaaaaaaaaaaaaa

SEQ ID NO: 22899 - RNA, 489 nt, Artificial Sequence
  mRNA product Design i-3 (A100) comprising derived and/or modified sequence from LASV(Josiah;Clade IV)__ADY11072/NP_694871__Z (opt4)
aggagaaagcuuaccaugggcaacaagcaggccaaggcccccgagagcaaggacagccccagagccagccugauccccgacgccacccaccugggcccccaguucugcaagagcugcugguucgagaacaagggccugguggagugcaacaaccacuaccugugccugaacugccugacccugcugcugagcgugagcaacagaugccccaucugcaagaugccccugcccaccaagcugagacccagcgccgcccccaccgccccccccaccggcgccgccgacagcaucagacccccccccuacagccccugaggacuaguuauaagacugacuagcccgaugggccucccaacgggcccuccuccccuccuugcaccgagauuaauaaaaaaaaaaaaaaaaaaaaaaaaaaaaaaaaaaaaaaaaaaaaaaaaaaaaaaaaaaaaaaaaaaaaaaaaaaaaaaaaaaaaaaaaaaaaaaaaaaaa

SEQ ID NO: 22900 - RNA, 492 nt, Artificial Sequence
  mRNA product Design i-3 (A100) comprising derived and/or modified sequence from LASV(Pinneo-NIG-1969;Clade I)__AIT17834__Z (opt4)
aggagaaagcuuaccaugggcaacaagcagaccagaagcccccccaagcccgagcaccccagacccacccugcugcccgacgccagccaccugggcccccaguucugcaagagcugcugguucgagaacaagggccugguggagugcaacaaccacuaccugugccugaacugccugacccugcugcugagcgugagcgacagaugccccaucugcaagaugccccugcccaccaagcuggccgugagaacccagcccagcgcccccccccugaaccagggcaacacccagagcagccccccccccuacagccccugaggacuaguuauaagacugacuagcccgaugggccucccaacgggcccuccuccccuccuugcaccgagauuaauaaaaaaaaaaaaaaaaaaaaaaaaaaaaaaaaaaaaaaaaaaaaaaaaaaaaaaaaaaaaaaaaaaaaaaaaaaaaaaaaaaaaaaaaaaaaaaaaaaaa

SEQ ID NO: 22901 - RNA, 489 nt, Artificial Sequence
  mRNA product Design i-3 (A100) comprising derived and/or modified sequence from LASV(Nig08-04;Clade II)__ADU56612__Z (opt4)
aggagaaagcuuaccaugggcaacagacagaccagacccaccgaggccaccgagcagagcagagcccaccuggugcccgacgccagccaccugggcccccaguucugcaagagcugcugguucgagaacagaggccugguggagugcaacaaccacuaccugugccugaacugccugagccugcugcugagcgugagcagcagaugccccaucugcaagaugccccugcccaccagacugaaggccagcgcccagcccagcgccccccccaccgaggccccccagaacaccacccccccccccuacacccccugaggacuaguuauaagacugacuagcccgaugggccucccaacgggcccuccuccccuccuugcaccgagauuaauaaaaaaaaaaaaaaaaaaaaaaaaaaaaaaaaaaaaaaaaaaaaaaaaaaaaaaaaaaaaaaaaaaaaaaaaaaaaaaaaaaaaaaaaaaaaaaaaaaaa

SEQ ID NO: 22902 - RNA, 489 nt, Artificial Sequence
  mRNA product Design i-3 (A100) comprising derived and/or modified sequence from LASV(Nig08-A19;Clade III)__ADU56620__Z (opt4)
aggagaaagcuuaccaugggcggcaagcacaccaagccccagagagagagcaacagccccagagccagccugauccccgacgccacccaccugggcccccaguucugcaagagcugcugguucgagaacaagggccugguggagugcaacaaccacuaccugugccugaacugccugacccugcugcugagcgugagcaacagaugccccaucugcaagaugccccugcccaccagacugagagccagcaccaaccccaccgccccccagguggagcaggugggccccaccaaccccccccccuacagccccugaggacuaguuauaagacugacuagcccgaugggccucccaacgggcccuccuccccuccuugcaccgagauuaauaaaaaaaaaaaaaaaaaaaaaaaaaaaaaaaaaaaaaaaaaaaaaaaaaaaaaaaaaaaaaaaaaaaaaaaaaaaaaaaaaaaaaaaaaaaaaaaaaaaa

SEQ ID NO: 22903 - RNA, 489 nt, Artificial Sequence
  mRNA product Design i-3 (A100) comprising derived and/or modified sequence from LASV(AV;Clade V)__CCA30312__Z (opt4)
aggagaaagcuuaccaugggcaacagacaggccaagaaccccgagguggagaacagccccagagccagccugauccccgacgccacccaccugggcccccaguucugcaagagcugcugguucgagaacaagggccugguggagugcaacaaccacuaccugugccugaacugccugagccugcugcugagcgugagcaacagaugccccaucugcaagaugccccugcccaccagacugagacccaccaccacccccaccgccccccagaucaucaaggagaacaccaccaaccccccccccuacacccccugaggacuaguuauaagacugacuagcccgaugggccucccaacgggcccuccuccccuccuugcaccgagauuaauaaaaaaaaaaaaaaaaaaaaaaaaaaaaaaaaaaaaaaaaaaaaaaaaaaaaaaaaaaaaaaaaaaaaaaaaaaaaaaaaaaaaaaaaaaaaaaaaaaaa

SEQ ID NO: 22904 - RNA, 489 nt, Artificial Sequence
  mRNA product Design i-3 (A100) comprising derived and/or modified sequence from LASV(Togo/2016/7082;Clade VI)__AMR44579__Z (opt4)
aggagaaagcuuaccaugggcgccagacagaccaagcagccccagaucgagggcagccccagagccagccuggugcccgacgccagccaccugggcccccaguucugcaagagcugcugguucgagaacaagggccugguggagugcaacaaccacuaccugugccugaacugccugagccugcugcugagcgugagcaacagaugccccaucugcaagaugccccugcccaccaagcugagagugagcagcgcccccagcgccccccccgccgccaccgcccagcccggcacccccccccccuacagccccugaggacuaguuauaagacugacuagcccgaugggccucccaacgggcccuccuccccuccuugcaccgagauuaauaaaaaaaaaaaaaaaaaaaaaaaaaaaaaaaaaaaaaaaaaaaaaaaaaaaaaaaaaaaaaaaaaaaaaaaaaaaaaaaaaaaaaaaaaaaaaaaaaaaa

SEQ ID NO: 22905 - RNA, 489 nt, Artificial Sequence
  mRNA product Design i-3 (A100) comprising derived and/or modified sequence from LASV(KAK-428;Clade n.d. (VII))__ANH09761__Z (opt4)
aggagaaagcuuaccaugggcaacaagggcaccaagcccacccagaacagcgagcccagcagagccaaccuggugcccgacgccagcuaccugggcccccaguucugcaagagcugcugguucgagaacaagggccugguggagugcaacaaccacuaccugugccugaacugccugaccaugcugcugagcgugagcaacagaugccccaucugcaagaugccccugcccaccaagaucaaggccagcggcagccccagcgccccccccaccgaggccaacagcgccgugagccccccccccuacacccccugaggacuaguuauaagacugacuagcccgaugggccucccaacgggcccuccuccccuccuugcaccgagauuaauaaaaaaaaaaaaaaaaaaaaaaaaaaaaaaaaaaaaaaaaaaaaaaaaaaaaaaaaaaaaaaaaaaaaaaaaaaaaaaaaaaaaaaaaaaaaaaaaaaaa

SEQ ID NO: 22906 - RNA, 489 nt, Artificial Sequence
  mRNA product Design i-3 (A100) comprising derived and/or modified sequence from LASV(ISTH0009-NIG-2011;Clade II)__AIT17402__Z (opt4)
aggagaaagcuuaccaugggcaacagacaggccaagagcaccaagguggacgagcaccagagagcccaccuggugcccgacgccagccaccugggcccccaguucugcaagagcugcugguucgagaacagaggccugguggagugcaacaaccacuaccugugccugaacugccugagccugcugcugagcgugagcagcagaugccccaucugcaagaugccccugcccaccaagcugaaggccgccgcccagcccagcgcccccagcaccgagaccauccagaacaccacccccccccccuacacccccugaggacuaguuauaagacugacuagcccgaugggccucccaacgggcccuccuccccuccuugcaccgagauuaauaaaaaaaaaaaaaaaaaaaaaaaaaaaaaaaaaaaaaaaaaaaaaaaaaaaaaaaaaaaaaaaaaaaaaaaaaaaaaaaaaaaaaaaaaaaaaaaaaaaa

SEQ ID NO: 22907 - RNA, 489 nt, Artificial Sequence
  mRNA product Design i-3 (A100) comprising derived and/or modified sequence from LASV(ISTH2010-NIG-2012;Clade II)__AIT17480__Z (opt4)
aggagaaagcuuaccaugggcaacagacacgccaagagcaccaagguggacgagcaccagagagcccaccuggugcccgacgccagccaccugggcccccaguucugcaagagcugcugguucgagaacagaggccugguggagugcaacaaccacuaccugugccugaacugccugagccugcugcugagcgugagcagcagaugccccaucugcaagaugccccugcccaccaagcugaaggccgccgcccagcccagcgcccccagcaccgaggugauccagagcaccacccccccccccuacacccccugaggacuaguuauaagacugacuagcccgaugggccucccaacgggcccuccuccccuccuugcaccgagauuaauaaaaaaaaaaaaaaaaaaaaaaaaaaaaaaaaaaaaaaaaaaaaaaaaaaaaaaaaaaaaaaaaaaaaaaaaaaaaaaaaaaaaaaaaaaaaaaaaaaaa

SEQ ID NO: 22908 - RNA, 489 nt, Artificial Sequence
  mRNA product Design i-3 (A100) comprising derived and/or modified sequence from LASV(Lassa virus/H.sapiens-wt/NGA/2016/ISTH_0017;Clade II)__AVO03713__Z (opt4)
aggagaaagcuuaccaugggcaacagacaggccaagagcaccaagguggacgagcaccagagagcccaccuggugcccgacgccagccaccugggcccccaguucugcaagagcugcugguucgagaacagaggccugguggagugcaacaaccacuaccugugccugaacugccugagccugcugcugagcgugagcagcagaugccccaucugcaagaugccccugcccaccaagcugaaggccgccacccagcccagcgcccccagcaccgaggugaaccagaacaccacccccccccccuacacccccugaggacuaguuauaagacugacuagcccgaugggccucccaacgggcccuccuccccuccuugcaccgagauuaauaaaaaaaaaaaaaaaaaaaaaaaaaaaaaaaaaaaaaaaaaaaaaaaaaaaaaaaaaaaaaaaaaaaaaaaaaaaaaaaaaaaaaaaaaaaaaaaaaaaa

SEQ ID NO: 22909 - RNA, 489 nt, Artificial Sequence
  mRNA product Design i-3 (A100) comprising derived and/or modified sequence from LASV(Lassa virus/H.sapiens-wt/NGA/2018/ISTH_0959;Clade II)__AVV65084__Z (opt4)
aggagaaagcuuaccaugggcaacaagcaggccaagagcaccaagguggacgagcaccagagagcccaccuggugcccgacgccagccaccugggcccccaguucugcaagagcugcugguucgagaacagaggccugguggagugcaacaaccacuaccugugccugaacugccugagccugcugcugagcgugagcagcagaugccccaucugcaagaugccccugcccaccaagcugaaggccgccgcccagcccagcgcccccagcaccgaggccauccagagcaccacccccccccccuacacccccugaggacuaguuauaagacugacuagcccgaugggccucccaacgggcccuccuccccuccuugcaccgagauuaauaaaaaaaaaaaaaaaaaaaaaaaaaaaaaaaaaaaaaaaaaaaaaaaaaaaaaaaaaaaaaaaaaaaaaaaaaaaaaaaaaaaaaaaaaaaaaaaaaaaa

SEQ ID NO: 22910 - RNA, 489 nt, Artificial Sequence
  mRNA product Design i-3 (A100) comprising derived and/or modified sequence from LASV(LASV003-NIG-2008;Clade II)__AIT17578__Z (opt4)
aggagaaagcuuaccaugggcaacagacaggccaagagcaccaagguggacgagcaccagagagcccaccuggugcccgacgccagccaccugggcccccaguucugcaagagcugcugguucgagaacaagggccugguggagugcaacaaccacuaccugugccugaacugccugagccugcugcugagcgugagcagcagaugccccaucugcaagaugccccugcccaccaagcugagagccgccgcccagcccagcgcccccagcaccgagagcgcccagaacaccgcccccccccccuacgcccccugaggacuaguuauaagacugacuagcccgaugggccucccaacgggcccuccuccccuccuugcaccgagauuaauaaaaaaaaaaaaaaaaaaaaaaaaaaaaaaaaaaaaaaaaaaaaaaaaaaaaaaaaaaaaaaaaaaaaaaaaaaaaaaaaaaaaaaaaaaaaaaaaaaaa

SEQ ID NO: 22911 - RNA, 489 nt, Artificial Sequence
  mRNA product Design i-3 (A100) comprising derived and/or modified sequence from LASV(LASV035-NIG-2009;Clade II)__AIT17586__Z (opt4)
aggagaaagcuuaccaugggcaacaagcaggccaagagcaccaagguggacgagcaccagagagcccaccuggugcccgacgccagccaccugggcccccaguucugcaagagcugcugguucgagaacagaggccugguggagugcaacaaccacuaccugugccugaacugccugagccugcugcugagcgugagcagcagaugccccaucugcaagaugccccugcccaccagacugaaggccgccgcccagcccagcgcccccagcaccgaggugacccagaacaccacccccccccccuacacccccugaggacuaguuauaagacugacuagcccgaugggccucccaacgggcccuccuccccuccuugcaccgagauuaauaaaaaaaaaaaaaaaaaaaaaaaaaaaaaaaaaaaaaaaaaaaaaaaaaaaaaaaaaaaaaaaaaaaaaaaaaaaaaaaaaaaaaaaaaaaaaaaaaaaa

SEQ ID NO: 22912 - RNA, 489 nt, Artificial Sequence
  mRNA product Design i-3 (A100) comprising derived and/or modified sequence from LASV(LASV1000-NIG-2009;Clade II)__AIT17780__Z (opt4)
aggagaaagcuuaccaugggcaacagacagaccaagagcaccaagguggacgagcaccagagagccuaccuggugcccgacgccagccugcugggcccccaguucugcaagagcugcugguucgagaacaagggccugguggagugcaacaaccacuaccugugccugaacugccugagccugcugcugagcgugagcagcagaugccccaucugcaagaugccccugcccaccagacugaaggccgccgcccagcccagcgccccccccaccgaggccauccagaacaccacccccccccccuacacccccugaggacuaguuauaagacugacuagcccgaugggccucccaacgggcccuccuccccuccuugcaccgagauuaauaaaaaaaaaaaaaaaaaaaaaaaaaaaaaaaaaaaaaaaaaaaaaaaaaaaaaaaaaaaaaaaaaaaaaaaaaaaaaaaaaaaaaaaaaaaaaaaaaaaa

SEQ ID NO: 22913 - RNA, 489 nt, Artificial Sequence
  mRNA product Design i-3 (A100) comprising derived and/or modified sequence from LASV(LASV221-NIG-2010;Clade II)__AIT17622__Z (opt4)
aggagaaagcuuaccaugggcaacagacaggccaagagcaccaagguggacgagcaccagagagcccaccuggugcccgacgccagccaccugggcccccaguucugcaagagcugcugguucgagaacagaggccugguggagugcaacaaccacuaccugugccugaacugccugagccugcugcugagcgugagcagcagaugccccaucugcaagaugccccugcccaccaagcugaaggccgccacccagcccagcgcccccagcaccgaggugacccagaacaccauccccccccccuacagccccugaggacuaguuauaagacugacuagcccgaugggccucccaacgggcccuccuccccuccuugcaccgagauuaauaaaaaaaaaaaaaaaaaaaaaaaaaaaaaaaaaaaaaaaaaaaaaaaaaaaaaaaaaaaaaaaaaaaaaaaaaaaaaaaaaaaaaaaaaaaaaaaaaaaa

SEQ ID NO: 22914 - RNA, 489 nt, Artificial Sequence
  mRNA product Design i-3 (A100) comprising derived and/or modified sequence from LASV(LASV237-NIG-2010;Clade II)__AIT17636__Z (opt4)
aggagaaagcuuaccaugggcaacagacaggccaagagcaccaagguggacgagcaccagagagcccaccuggugcccgacgccagccaccugggcccccaguucugcaagagcugcugguucgagaacagaggccugguggagugcaacaaccacuaccugugccugaacugccugagccugcugcugagcgugagcagcagaugccccaucugcaagaugccccugcccaccaagcugaaggccgccgcccagcccagcgcccccagcaucgagaccauccagaacaccacccccccccccuacacccccugaggacuaguuauaagacugacuagcccgaugggccucccaacgggcccuccuccccuccuugcaccgagauuaauaaaaaaaaaaaaaaaaaaaaaaaaaaaaaaaaaaaaaaaaaaaaaaaaaaaaaaaaaaaaaaaaaaaaaaaaaaaaaaaaaaaaaaaaaaaaaaaaaaaa

SEQ ID NO: 22915 - RNA, 489 nt, Artificial Sequence
  mRNA product Design i-3 (A100) comprising derived and/or modified sequence from LASV(LASV253-NIG-2011;Clade II)__AIT17668__Z (opt4)
aggagaaagcuuaccaugggcaacagacaggccaagagcaccaagguggacgagcaccagagagcccaccuggugcccgacgccagccaccugggcccccaguucugcaagagcugcugguucgagaacaagggccugguggagugcaacaaccacuaccugugccugaacugccugagccugcugcugagcgugagcagcagaugccccaucugcaagaugccccugcccaccaagcugaagaccaccgcccagcccagcgccccccccaccgaggccgccaagaacaccgcccccccccccuacgcccccugaggacuaguuauaagacugacuagcccgaugggccucccaacgggcccuccuccccuccuugcaccgagauuaauaaaaaaaaaaaaaaaaaaaaaaaaaaaaaaaaaaaaaaaaaaaaaaaaaaaaaaaaaaaaaaaaaaaaaaaaaaaaaaaaaaaaaaaaaaaaaaaaaaaa

SEQ ID NO: 22916 - RNA, 489 nt, Artificial Sequence
  mRNA product Design i-3 (A100) comprising derived and/or modified sequence from LASV(G1180-SLE-2010;Clade IV)__AIT17166__Z (opt4)
aggagaaagcuuaccaugggcaacaagcaggccaaggcccccgaggccaaggacagccccagagccagccugauccccgacgccacccaccugggcccccaguucugcaagagcugcugguucgagaccaagggccugguggagugcaacaaccacuaccugugccugaacugccugacccugcugcugagcgugagcaacagaugccccaucugcaagaugccccugcccaccaagcugagacccagcgccacccccaccgccccccccaccgaggccgccgacagcaucggccccccccccuacagccccugaggacuaguuauaagacugacuagcccgaugggccucccaacgggcccuccuccccuccuugcaccgagauuaauaaaaaaaaaaaaaaaaaaaaaaaaaaaaaaaaaaaaaaaaaaaaaaaaaaaaaaaaaaaaaaaaaaaaaaaaaaaaaaaaaaaaaaaaaaaaaaaaaaaa

SEQ ID NO: 22917 - RNA, 489 nt, Artificial Sequence
  mRNA product Design i-3 (A100) comprising derived and/or modified sequence from LASV(G1442-SLE-2011;Clade IV)__AIT17178__Z (opt4)
aggagaaagcuuaccaugggcaacaagcaggccaaggccagcgaggccaaggacagccccagagccagccugauccccgacgccacccaccugggcccccaguucugcaagagcugcugguucgagaacaagggccugguggagugcaacaaccacuaccugugccugaacugccugagccugcugcugagcgugagcagcagaugccccaucugcaagaugccccugcccaccagacugagacccagcaccgcccccaccgccccccccgccagagccggcgacaacaucaagcccccccccuacagccccugaggacuaguuauaagacugacuagcccgaugggccucccaacgggcccuccuccccuccuugcaccgagauuaauaaaaaaaaaaaaaaaaaaaaaaaaaaaaaaaaaaaaaaaaaaaaaaaaaaaaaaaaaaaaaaaaaaaaaaaaaaaaaaaaaaaaaaaaaaaaaaaaaaaa

SEQ ID NO: 22918 - RNA, 489 nt, Artificial Sequence
  mRNA product Design i-3 (A100) comprising derived and/or modified sequence from LASV(G502-SLE-2009;Clade IV)__AIT17124__Z (opt4)
aggagaaagcuuaccaugggcaacaagcaggugaagacccccgaggccaaggacagccccagagccagccugauccccgacgccacccaccugggcccccaguucugcaagagcugcugguucgagaacaagggccugguggagugcaacaaccacuaccugugccugaacugccugacccugcugcugagcgugggcaacagaugccccaucugcaagaugccccugcccaccaagcugagacccagcgugacccccaccgccccccccaccagagccgccgacagcaucggccccccccccuacagccccugaggacuaguuauaagacugacuagcccgaugggccucccaacgggcccuccuccccuccuugcaccgagauuaauaaaaaaaaaaaaaaaaaaaaaaaaaaaaaaaaaaaaaaaaaaaaaaaaaaaaaaaaaaaaaaaaaaaaaaaaaaaaaaaaaaaaaaaaaaaaaaaaaaaa

SEQ ID NO: 22919 - RNA, 489 nt, Artificial Sequence
  mRNA product Design i-3 (A100) comprising derived and/or modified sequence from LASV(G733-SLE-2010;Clade IV)__AIT17152__Z (opt4)
aggagaaagcuuaccaugggcaacaagcaggccaagacccccgagaccaaggacagccccagagccagccugauccccgacgccacccaccugggcccccaguucugcaagagcugcugguucgagaacaagggccugguggagugcaacaaccacuaccugugccugaacugccugacccugcugcugagcgugagcaacagaugccccaucugcaagaugccccugcccaccaagcugagacccagcaccgcccccaccgccccccccgccggcgccgccgacaacaccagacccccccccuacagccccugaggacuaguuauaagacugacuagcccgaugggccucccaacgggcccuccuccccuccuugcaccgagauuaauaaaaaaaaaaaaaaaaaaaaaaaaaaaaaaaaaaaaaaaaaaaaaaaaaaaaaaaaaaaaaaaaaaaaaaaaaaaaaaaaaaaaaaaaaaaaaaaaaaaa

SEQ ID NO: 22920 - RNA, 501 nt, Artificial Sequence
  mRNA product Design i-3 (A100) comprising derived and/or modified sequence from MOPV/LASV reassortant(IGS-1;Clade IV)__AFY05533__Z (opt4)
aggagaaagcuuaccaugggcaagacccagagcaagggccagcccagcaccaaccugcugaaggagaccgagcccagacaccccgugauccccgacgccagaggcaccggccccgaguucugcaagagcugcugguucgagagaagaggccuggugagaugcaacgaccacuaccugugccugaacugccugacccugcugcacaccgugagcgacagaugccccaucugcaagcacaagcugcccuucagacuggagcugcagacccagcccaccgccccccccgagaucccccccagccagaaccccccccccuacagccccugaggacuaguuauaagacugacuagcccgaugggccucccaacgggcccuccuccccuccuugcaccgagauuaauaaaaaaaaaaaaaaaaaaaaaaaaaaaaaaaaaaaaaaaaaaaaaaaaaaaaaaaaaaaaaaaaaaaaaaaaaaaaaaaaaaaaaaaaaaaaaaaaaaaa

SEQ ID NO: 22921 - RNA, 489 nt, Artificial Sequence
  mRNA product Design i-3 (A100) comprising derived and/or modified sequence from LASV(LM776-SLE-2012;Clade IV)__AIT17824__Z (opt4)
aggagaaagcuuaccaugggcaacaagcaggccaaggccagcgaggagaagaacagccccagagccagccugauccccgacgccacccaccugggcccccaguucugcaagagcugcugguucgagaacaagggccugguggagugcaacaaccacuaccugugccugaacugccugacccugcugcugagcgugagcaacagaugccccaucugcaagaugccccugcccaccaagcugagacccagcaccacccccaccgccccccccaccggcgccgccgacagcaucagacccccccccuacagccccugaggacuaguuauaagacugacuagcccgaugggccucccaacgggcccuccuccccuccuugcaccgagauuaauaaaaaaaaaaaaaaaaaaaaaaaaaaaaaaaaaaaaaaaaaaaaaaaaaaaaaaaaaaaaaaaaaaaaaaaaaaaaaaaaaaaaaaaaaaaaaaaaaaaa

SEQ ID NO: 22922 - RNA, 489 nt, Artificial Sequence
  mRNA product Design i-3 (A100) comprising derived and/or modified sequence from LASV(Mad39;Clade IV)__ANH09743__Z (opt4)
aggagaaagcuuaccaugggcaacaagcaggccaaggccagcgagguggaggacggccccagagccagccugauccccgacgccacccaccugggcccccaguucugcaagagcugcugguucgagaacaagagccugguggagugcaacaaccacuaccugugccugaacugccugacccugcugcugagcgugagcaacagaugccccaucugcaagaugccccugcccaccagacugaagcccagcguggugcccaccgccccccccaccagagccggcgacggcaccagacccccccccuacagccccugaggacuaguuauaagacugacuagcccgaugggccucccaacgggcccuccuccccuccuugcaccgagauuaauaaaaaaaaaaaaaaaaaaaaaaaaaaaaaaaaaaaaaaaaaaaaaaaaaaaaaaaaaaaaaaaaaaaaaaaaaaaaaaaaaaaaaaaaaaaaaaaaaaaa

SEQ ID NO: 22923 - RNA, 489 nt, Artificial Sequence
  mRNA product Design i-3 (A100) comprising derived and/or modified sequence from LASV(Z0947-SLE-2011;Clade IV)__AIT17838__Z (opt4)
aggagaaagcuuaccaugggcaacaagcaggccaaggugcccgagagcaaggacagccccagagccagccugauccccgacgccacccaccugggcccccaguucugcaagagcugcugguucgagaacaagggccugguggagugcaacaaccacuaccugugccugaacugccugacccugcugcugagcgugagcaacagaugccccaucugcaagaugccccugcccaccaagcugaagcccagcgccgcccccaccgccccccccaccggcgccgccgacagcaucagacccccccccuacagccccugaggacuaguuauaagacugacuagcccgaugggccucccaacgggcccuccuccccuccuugcaccgagauuaauaaaaaaaaaaaaaaaaaaaaaaaaaaaaaaaaaaaaaaaaaaaaaaaaaaaaaaaaaaaaaaaaaaaaaaaaaaaaaaaaaaaaaaaaaaaaaaaaaaaa

SEQ ID NO: 22924 - RNA, 489 nt, Artificial Sequence
  mRNA product Design i-3 (A100) comprising derived and/or modified sequence from LASV(Josiah;Clade IV)__ADY11072/NP_694871__Z (opt5)
aggagaaagcuuaccaugggcaacaagcaggccaaagcucccgagagcaaggacuccccuagagccucucugaucccggaugcgacccaccucgggccccaauucugcaaaagcuguugguuugaaaauaagggacugguggagugcaacaaucauuaccuuugucugaacugccucacacugcuucuguccgucucuaaucgguguccuauuugcaaaaugccccucccuacgaagcugcgccccagcgcugccccuaccgccccgcccacaggcgcugccgacuccaucagaccucccccuuauucucccugaggacuaguuauaagacugacuagcccgaugggccucccaacgggcccuccuccccuccuugcaccgagauuaauaaaaaaaaaaaaaaaaaaaaaaaaaaaaaaaaaaaaaaaaaaaaaaaaaaaaaaaaaaaaaaaaaaaaaaaaaaaaaaaaaaaaaaaaaaaaaaaaaaaa

SEQ ID NO: 22925 - RNA, 492 nt, Artificial Sequence
  mRNA product Design i-3 (A100) comprising derived and/or modified sequence from LASV(Pinneo-NIG-1969;Clade I)__AIT17834__Z (opt5)
aggagaaagcuuaccaugggcaacaagcagaccagaagcccucccaaaccggagcacccccggccuacacugcuccccgacgccucccaucuggggccucaauucugcaagucuuguugguuugaaaauaaaggacuuguggagugcaacaaucacuaccugugucucaacugccugacgcuucugcucagcgucuccgaucgcugucccaucugcaagaugccucugccgaccaaacuggcuguuagaacacagcccucugccccuccccucaaucagggcaacacccagagcuccccucccccguauucuccuugaggacuaguuauaagacugacuagcccgaugggccucccaacgggcccuccuccccuccuugcaccgagauuaauaaaaaaaaaaaaaaaaaaaaaaaaaaaaaaaaaaaaaaaaaaaaaaaaaaaaaaaaaaaaaaaaaaaaaaaaaaaaaaaaaaaaaaaaaaaaaaaaaaaa

SEQ ID NO: 22926 - RNA, 489 nt, Artificial Sequence
  mRNA product Design i-3 (A100) comprising derived and/or modified sequence from LASV(Nig08-04;Clade II)__ADU56612__Z (opt5)
aggagaaagcuuaccaugggcaacagacagacccggcccacagaggccacggaacaaagccgcgcccaccuggugccugacgccucccaucucgggccgcaguucugcaagucuuguugguuugagaauagaggacuggucgaaugcaacaaucacuaccuuugucugaacugccucagccugcuucuguccguuucuagccggugucccaucugcaaaaugccucuccccacccgccugaaggcguccgcucagccuucugcucccccuacagaggccccgcagaauaccacacccccucccuauaccccuugaggacuaguuauaagacugacuagcccgaugggccucccaacgggcccuccuccccuccuugcaccgagauuaauaaaaaaaaaaaaaaaaaaaaaaaaaaaaaaaaaaaaaaaaaaaaaaaaaaaaaaaaaaaaaaaaaaaaaaaaaaaaaaaaaaaaaaaaaaaaaaaaaaaa

SEQ ID NO: 22927 - RNA, 489 nt, Artificial Sequence
  mRNA product Design i-3 (A100) comprising derived and/or modified sequence from LASV(Nig08-A19;Clade III)__ADU56620__Z (opt5)
aggagaaagcuuaccaugggcgggaagcacaccaaaccccagagagagagcaacuccccucgggccucucugaucccggacgcuacacaucucggaccccaauucugcaagagcuguugguuugaaaauaaaggccugguggagugcaacaaucacuaccuuugucugaacugccucacgcugcuucuguccgucucuaaucgcuguccuauuugcaagaugccccucccuaccagacugcgggccagcacaaaccccaccgcgccucagguugaacagguggggccgacaaaucccccucccuauuccccuugaggacuaguuauaagacugacuagcccgaugggccucccaacgggcccuccuccccuccuugcaccgagauuaauaaaaaaaaaaaaaaaaaaaaaaaaaaaaaaaaaaaaaaaaaaaaaaaaaaaaaaaaaaaaaaaaaaaaaaaaaaaaaaaaaaaaaaaaaaaaaaaaaaaa

SEQ ID NO: 22928 - RNA, 489 nt, Artificial Sequence
  mRNA product Design i-3 (A100) comprising derived and/or modified sequence from LASV(AV;Clade V)__CCA30312__Z (opt5)
aggagaaagcuuaccaugggcaacagacaggccaagaaucccgagguggaaaacagcccucgggcuucccugaucccggacgccacccaccucgggccccaauucugcaaaucuuguugguuugagaauaagggacuggucgaaugcaacaaucauuaccuuugucugaacugccucagccugcuucuguccguuucuaaucgcuguccuauuugcaaaaugccccucccuacaagacugcggcccacgaccacaccuaccgcgccgcagaucauuaaggagaacacaaccaaucccccucccuauacaccuugaggacuaguuauaagacugacuagcccgaugggccucccaacgggcccuccuccccuccuugcaccgagauuaauaaaaaaaaaaaaaaaaaaaaaaaaaaaaaaaaaaaaaaaaaaaaaaaaaaaaaaaaaaaaaaaaaaaaaaaaaaaaaaaaaaaaaaaaaaaaaaaaaaaa

SEQ ID NO: 22929 - RNA, 489 nt, Artificial Sequence
  mRNA product Design i-3 (A100) comprising derived and/or modified sequence from LASV(Togo/2016/7082;Clade VI)__AMR44579__Z (opt5)
aggagaaagcuuaccaugggcgccagacagaccaagcaaccccagaucgaggggagcccucgggcuucccuggugccggacgccucucaccucggaccccaguucugcaaaagcuguugguuugaaaacaagggccuggucgagugcaauaaccauuaccuuugucugaauugccucucccugcuucugucuguuagcaaccgcuguccuauuugcaaaaugccccucccuacaaagcugagaguguccucugcgcccagcgcuccuccggccgccacggcucagcccgggaccccucccccuuauucccccugaggacuaguuauaagacugacuagcccgaugggccucccaacgggcccuccuccccuccuugcaccgagauuaauaaaaaaaaaaaaaaaaaaaaaaaaaaaaaaaaaaaaaaaaaaaaaaaaaaaaaaaaaaaaaaaaaaaaaaaaaaaaaaaaaaaaaaaaaaaaaaaaaaaa

SEQ ID NO: 22930 - RNA, 489 nt, Artificial Sequence
  mRNA product Design i-3 (A100) comprising derived and/or modified sequence from LASV(KAK-428;Clade n.d. (VII))__ANH09761__Z (opt5)
aggagaaagcuuaccaugggcaacaaggggaccaaacccacacagaauagcgagccuuccagagccaaccuggugccggacgcuucuuaccucggaccccaauucugcaagagcuguugguuugaaaauaaaggccuggucgagugcaacaaucacuaucuuugucugaacugccucacgaugcugcuuuccguuuccaaucgguguccuaucugcaagaugccccugccuaccaaaauuaaggccagcgggucccccucugcgccuccgacagaagcuaacagcgccgugucucccccucccuacaccccuugaggacuaguuauaagacugacuagcccgaugggccucccaacgggcccuccuccccuccuugcaccgagauuaauaaaaaaaaaaaaaaaaaaaaaaaaaaaaaaaaaaaaaaaaaaaaaaaaaaaaaaaaaaaaaaaaaaaaaaaaaaaaaaaaaaaaaaaaaaaaaaaaaaaa

SEQ ID NO: 22931 - RNA, 489 nt, Artificial Sequence
  mRNA product Design i-3 (A100) comprising derived and/or modified sequence from LASV(ISTH0009-NIG-2011;Clade II)__AIT17402__Z (opt5)
aggagaaagcuuaccaugggcaacagacaggccaagagcaccaaaguggacgagcaccaacgggcucaucugguccccgaugccucccaccucgggccucaguucugcaagucuuguugguuugaaaaucgcggacugguugagugcaacaaucauuaccuuugucugaacugccucagccugcuucuguccgugucuagcagauguccgaucugcaaaaugccccucccuacaaagcugaaagcggcugcccagcccuccgccccuucuacggaaaccauucagaauacaacacccccuccguauacccccugaggacuaguuauaagacugacuagcccgaugggccucccaacgggcccuccuccccuccuugcaccgagauuaauaaaaaaaaaaaaaaaaaaaaaaaaaaaaaaaaaaaaaaaaaaaaaaaaaaaaaaaaaaaaaaaaaaaaaaaaaaaaaaaaaaaaaaaaaaaaaaaaaaaa

SEQ ID NO: 22932 - RNA, 489 nt, Artificial Sequence
  mRNA product Design i-3 (A100) comprising derived and/or modified sequence from LASV(ISTH2010-NIG-2012;Clade II)__AIT17480__Z (opt5)
aggagaaagcuuaccaugggcaacagacacgccaagagcaccaaaguggacgagcaucagcgggcucaccugguccccgaugccucccaucucgggccucaauucugcaagucuuguugguuugaaaaucgcggacugguugagugcaacaaucacuaccuuugucugaacugccucagccugcuucuguccgugucuagcagauguccgaucugcaaaaugccccucccuacaaagcugaaagcggcugcccagcccuccgccccuucuacggaagugauucagagcaccacacccccuccguauacccccugaggacuaguuauaagacugacuagcccgaugggccucccaacgggcccuccuccccuccuugcaccgagauuaauaaaaaaaaaaaaaaaaaaaaaaaaaaaaaaaaaaaaaaaaaaaaaaaaaaaaaaaaaaaaaaaaaaaaaaaaaaaaaaaaaaaaaaaaaaaaaaaaaaaa

SEQ ID NO: 22933 - RNA, 489 nt, Artificial Sequence
  mRNA product Design i-3 (A100) comprising derived and/or modified sequence from LASV(Lassa virus/H.sapiens-wt/NGA/2016/ISTH_0017;Clade II)__AVO03713__Z (opt5)
aggagaaagcuuaccaugggcaacagacaggccaagagcaccaaaguggacgagcaccaacgggcucaucugguccccgaugccucccaccucgggccucaguucugcaagucuuguugguuugaaaaucgcggacugguugagugcaacaaucauuaccuuugucugaacugccucagccugcuucuguccgugucuagcagauguccgaucugcaaaaugccccucccuacaaagcugaaagcggcuacgcagcccuccgccccuucuaccgaagugaaucagaacacaacacccccuccguauacccccugaggacuaguuauaagacugacuagcccgaugggccucccaacgggcccuccuccccuccuugcaccgagauuaauaaaaaaaaaaaaaaaaaaaaaaaaaaaaaaaaaaaaaaaaaaaaaaaaaaaaaaaaaaaaaaaaaaaaaaaaaaaaaaaaaaaaaaaaaaaaaaaaaaaa

SEQ ID NO: 22934 - RNA, 489 nt, Artificial Sequence
  mRNA product Design i-3 (A100) comprising derived and/or modified sequence from LASV(Lassa virus/H.sapiens-wt/NGA/2018/ISTH_0959;Clade II)__AVV65084__Z (opt5)
aggagaaagcuuaccaugggcaacaagcaggccaaaagcaccaagguggacgagcaccaaagagcucaucugguccccgaugccucccaccucgggccucaguucugcaaaucuuguugguuugaaaaucggggacugguugagugcaacaaucauuaccuuugucugaacugccucagccugcuucuguccgugucuagccgcuguccgaucugcaagaugccccucccuacaaaacugaaggcggcugcccagcccuccgccccuucuacggaagcuauucagagcaccacacccccuccguauacccccugaggacuaguuauaagacugacuagcccgaugggccucccaacgggcccuccuccccuccuugcaccgagauuaauaaaaaaaaaaaaaaaaaaaaaaaaaaaaaaaaaaaaaaaaaaaaaaaaaaaaaaaaaaaaaaaaaaaaaaaaaaaaaaaaaaaaaaaaaaaaaaaaaaaa

SEQ ID NO: 22935 - RNA, 489 nt, Artificial Sequence
  mRNA product Design i-3 (A100) comprising derived and/or modified sequence from LASV(LASV003-NIG-2008;Clade II)__AIT17578__Z (opt5)
aggagaaagcuuaccaugggcaacagacaggccaagagcaccaaaguggacgagcaccaacgggcucaucugguccccgaugccucccaccucgggccucaguucugcaagucuuguugguuugaaaauaaaggacugguugagugcaacaaucauuaccuuugucugaacugccucagccugcuucuguccgugucuagccgcuguccgaucugcaagaugccccucccuacaaaacugagagcggcugcccagcccuccgccccuucuacggaaagcgcucagaauaccgcucccccuccguaugcccccugaggacuaguuauaagacugacuagcccgaugggccucccaacgggcccuccuccccuccuugcaccgagauuaauaaaaaaaaaaaaaaaaaaaaaaaaaaaaaaaaaaaaaaaaaaaaaaaaaaaaaaaaaaaaaaaaaaaaaaaaaaaaaaaaaaaaaaaaaaaaaaaaaaaa

SEQ ID NO: 22936 - RNA, 489 nt, Artificial Sequence
  mRNA product Design i-3 (A100) comprising derived and/or modified sequence from LASV(LASV035-NIG-2009;Clade II)__AIT17586__Z (opt5)
aggagaaagcuuaccaugggcaacaagcaggccaaaagcaccaagguggacgagcaccaaagagcucaucugguccccgaugccucccaccucgggccucaguucugcaaaucuuguugguuugaaaaucggggacugguugagugcaacaaucauuaccuuugucugaacugccucagccugcuucuguccgugucuagccgcuguccgaucugcaagaugccccucccuacaagacugaaagcggcugcccagcccuccgccccuucuacggaagugacccagaauacaacacccccuccguauacccccugaggacuaguuauaagacugacuagcccgaugggccucccaacgggcccuccuccccuccuugcaccgagauuaauaaaaaaaaaaaaaaaaaaaaaaaaaaaaaaaaaaaaaaaaaaaaaaaaaaaaaaaaaaaaaaaaaaaaaaaaaaaaaaaaaaaaaaaaaaaaaaaaaaaa

SEQ ID NO: 22937 - RNA, 489 nt, Artificial Sequence
  mRNA product Design i-3 (A100) comprising derived and/or modified sequence from LASV(LASV1000-NIG-2009;Clade II)__AIT17780__Z (opt5)
aggagaaagcuuaccaugggcaacagacagaccaagagcacaaaaguggacgagcaccaacgggccuaccugguccccgaugcuucccuccuggggccucaguucugcaagucuuguugguuugaaaauaaaggacuuguugagugcaacaaucauuaucugugucucaacugccugagccuucugcucuccgugucuagccgcuguccgaucugcaagaugccccugccuacgagacugaaagccgcggcucagcccuccgccccucccaccgaagccauucagaauacaaccccuccgcccuacacaccuugaggacuaguuauaagacugacuagcccgaugggccucccaacgggcccuccuccccuccuugcaccgagauuaauaaaaaaaaaaaaaaaaaaaaaaaaaaaaaaaaaaaaaaaaaaaaaaaaaaaaaaaaaaaaaaaaaaaaaaaaaaaaaaaaaaaaaaaaaaaaaaaaaaaa

SEQ ID NO: 22938 - RNA, 489 nt, Artificial Sequence
  mRNA product Design i-3 (A100) comprising derived and/or modified sequence from LASV(LASV221-NIG-2010;Clade II)__AIT17622__Z (opt5)
aggagaaagcuuaccaugggcaacagacaggccaagagcaccaaaguggacgagcaccaacgggcucaucugguccccgaugccucccaccucgggccucaguucugcaagucuuguugguuugaaaaucgcggacugguugagugcaacaaucauuaccuuugucugaacugccucagccugcuucuguccgugucuagcagauguccgaucugcaaaaugccccucccuacaaagcugaaagcggcuacgcagcccuccgccccuucuaccgaagugacacagaauaccauucccccuccguauagccccugaggacuaguuauaagacugacuagcccgaugggccucccaacgggcccuccuccccuccuugcaccgagauuaauaaaaaaaaaaaaaaaaaaaaaaaaaaaaaaaaaaaaaaaaaaaaaaaaaaaaaaaaaaaaaaaaaaaaaaaaaaaaaaaaaaaaaaaaaaaaaaaaaaaa

SEQ ID NO: 22939 - RNA, 489 nt, Artificial Sequence
  mRNA product Design i-3 (A100) comprising derived and/or modified sequence from LASV(LASV237-NIG-2010;Clade II)__AIT17636__Z (opt5)
aggagaaagcuuaccaugggcaacagacaggccaagagcaccaaaguggacgagcaccaacgggcucaucugguccccgaugccucccaccucgggccucaguucugcaagucuuguugguuugaaaaucgcggacugguugagugcaacaaucauuaccuuugucugaacugccucagccugcuucuguccgugucuagcagauguccgaucugcaaaaugccccucccuacaaagcugaaagcggcugcccagcccuccgccccuucuauugaaacgauccagaauaccacacccccuccguauacccccugaggacuaguuauaagacugacuagcccgaugggccucccaacgggcccuccuccccuccuugcaccgagauuaauaaaaaaaaaaaaaaaaaaaaaaaaaaaaaaaaaaaaaaaaaaaaaaaaaaaaaaaaaaaaaaaaaaaaaaaaaaaaaaaaaaaaaaaaaaaaaaaaaaaa

SEQ ID NO: 22940 - RNA, 489 nt, Artificial Sequence
  mRNA product Design i-3 (A100) comprising derived and/or modified sequence from LASV(LASV253-NIG-2011;Clade II)__AIT17668__Z (opt5)
aggagaaagcuuaccaugggcaacagacaggccaagagcaccaaaguggacgagcaccaacgggcucaucugguccccgaugccucccaccucgggccucaguucugcaagucuuguugguuugaaaauaaaggacugguugagugcaacaaucauuaccuuugucugaacugccucagccugcuucuguccgugucuagccgcuguccgaucugcaagaugccccucccuacaaaacugaagacgaccgcgcagcccuccgcuccucccacagaagccgccaagaauaccgcuccuccgcccuaugccccuugaggacuaguuauaagacugacuagcccgaugggccucccaacgggcccuccuccccuccuugcaccgagauuaauaaaaaaaaaaaaaaaaaaaaaaaaaaaaaaaaaaaaaaaaaaaaaaaaaaaaaaaaaaaaaaaaaaaaaaaaaaaaaaaaaaaaaaaaaaaaaaaaaaaa

SEQ ID NO: 22941 - RNA, 489 nt, Artificial Sequence
  mRNA product Design i-3 (A100) comprising derived and/or modified sequence from LASV(G1180-SLE-2010;Clade IV)__AIT17166__Z (opt5)
aggagaaagcuuaccaugggcaacaagcaggccaaagcucccgaggccaaggacagcccuagagcgucccugaucccggaugcuacccaccucgggccccaauucugcaaaucuuguugguuugaaacaaagggacugguggagugcaauaaccauuaccuuugucugaauugccucacgcugcuucugagcgucuccaaccgguguccuauuugcaaaaugccccucccuaccaagcugcgccccucugccacaccuaccgccccgcccacagaagcugccgacagcaucggcccucccccuuauucccccugaggacuaguuauaagacugacuagcccgaugggccucccaacgggcccuccuccccuccuugcaccgagauuaauaaaaaaaaaaaaaaaaaaaaaaaaaaaaaaaaaaaaaaaaaaaaaaaaaaaaaaaaaaaaaaaaaaaaaaaaaaaaaaaaaaaaaaaaaaaaaaaaaaaa

SEQ ID NO: 22942 - RNA, 489 nt, Artificial Sequence
  mRNA product Design i-3 (A100) comprising derived and/or modified sequence from LASV(G1442-SLE-2011;Clade IV)__AIT17178__Z (opt5)
aggagaaagcuuaccaugggcaacaagcaggccaaagcuagcgaggccaaggacucccccagagcgucucugaucccugaugcuacccaccucgggccgcaauucugcaaaagcuguugguuugaaaauaagggacugguggagugcaacaaucauuaccuuugucugaacugccucucccugcuucugucugucagcucccggugucccauuugcaaaaugccucuccccacacgccugagaccuucuacggcccccaccgccccuccggcucgggccggcgacaauaucaagcccccucccuauagcccuugaggacuaguuauaagacugacuagcccgaugggccucccaacgggcccuccuccccuccuugcaccgagauuaauaaaaaaaaaaaaaaaaaaaaaaaaaaaaaaaaaaaaaaaaaaaaaaaaaaaaaaaaaaaaaaaaaaaaaaaaaaaaaaaaaaaaaaaaaaaaaaaaaaaa

SEQ ID NO: 22943 - RNA, 489 nt, Artificial Sequence
  mRNA product Design i-3 (A100) comprising derived and/or modified sequence from LASV(G502-SLE-2009;Clade IV)__AIT17124__Z (opt5)
aggagaaagcuuaccaugggcaacaaacaggugaagacccccgaggccaaggacagcccuagagcuucccugaucccggaugccacacaccucgggccccaauucugcaaaucuuguugguuugaaaauaagggacuggucgagugcaacaaucauuaccuuugucugaacugccucacgcugcuucugagcguuggcaaucgguguccuauuugcaaaaugccccucccuaccaagcugcgccccuccgugacaccuaccgcgccgcccacaagagcugccgacucuaucgggccucccccuuauagccccugaggacuaguuauaagacugacuagcccgaugggccucccaacgggcccuccuccccuccuugcaccgagauuaauaaaaaaaaaaaaaaaaaaaaaaaaaaaaaaaaaaaaaaaaaaaaaaaaaaaaaaaaaaaaaaaaaaaaaaaaaaaaaaaaaaaaaaaaaaaaaaaaaaaa

SEQ ID NO: 22944 - RNA, 489 nt, Artificial Sequence
  mRNA product Design i-3 (A100) comprising derived and/or modified sequence from LASV(G733-SLE-2010;Clade IV)__AIT17152__Z (opt5)
aggagaaagcuuaccaugggcaacaagcaggccaaaacccccgagacaaaggacagcccuagagcuucccugaucccggaugccacgcaccucgggccccaauucugcaaaucuuguugguuugaaaauaagggacugguggagugcaacaaucauuaccuuugucugaacugccucacccugcuucugagcgucuccaaucgguguccuauuugcaaaaugccccucccuacaaagcugcgccccucuaccgcgccuacagcuccgcccgccggcgccgcugacaacaccagaccucccccuuauagccccugaggacuaguuauaagacugacuagcccgaugggccucccaacgggcccuccuccccuccuugcaccgagauuaauaaaaaaaaaaaaaaaaaaaaaaaaaaaaaaaaaaaaaaaaaaaaaaaaaaaaaaaaaaaaaaaaaaaaaaaaaaaaaaaaaaaaaaaaaaaaaaaaaaaa

SEQ ID NO: 22945 - RNA, 501 nt, Artificial Sequence
  mRNA product Design i-3 (A100) comprising derived and/or modified sequence from MOPV/LASV reassortant(IGS-1;Clade IV)__AFY05533__Z (opt5)
aggagaaagcuuaccaugggcaagacccagagcaaagggcaacccuccacaaaccugcucaaggagacggaaccuagacacccggugauccccgacgcccggggaaccggcccugaguucugcaaaucuuguugguuugaacgcagagggcugguccggugcaaugaucauuaccuuugucugaacugccucacacugcuucacaccguuagcgaccgcugucccaucugcaagcauaaacugccuuucagacucgagcugcagacacagcccaccgcuccuccggaaauucccccuucccagaaucccccucccuauucuccgugaggacuaguuauaagacugacuagcccgaugggccucccaacgggcccuccuccccuccuugcaccgagauuaauaaaaaaaaaaaaaaaaaaaaaaaaaaaaaaaaaaaaaaaaaaaaaaaaaaaaaaaaaaaaaaaaaaaaaaaaaaaaaaaaaaaaaaaaaaaaaaaaaaaa

SEQ ID NO: 22946 - RNA, 489 nt, Artificial Sequence
  mRNA product Design i-3 (A100) comprising derived and/or modified sequence from LASV(LM776-SLE-2012;Clade IV)__AIT17824__Z (opt5)
aggagaaagcuuaccaugggcaacaagcaggccaaagcuagcgaggaaaagaacucccccagagccucucugaucccugacgcgacccaccucgggccgcaauucugcaaaagcuguugguuugagaauaagggacugguggaaugcaauaaccauuaccuuugucugaauugccucacacugcuucuguccgucucuaaccggugucccauuugcaaaaugccucuccccacgaagcugcgcccuagcaccacacccaccgcuccuccgacaggcgccgccgauuccaucagacccccucccuauucuccuugaggacuaguuauaagacugacuagcccgaugggccucccaacgggcccuccuccccuccuugcaccgagauuaauaaaaaaaaaaaaaaaaaaaaaaaaaaaaaaaaaaaaaaaaaaaaaaaaaaaaaaaaaaaaaaaaaaaaaaaaaaaaaaaaaaaaaaaaaaaaaaaaaaaa

SEQ ID NO: 22947 - RNA, 489 nt, Artificial Sequence
  mRNA product Design i-3 (A100) comprising derived and/or modified sequence from LASV(Mad39;Clade IV)__ANH09743__Z (opt5)
aggagaaagcuuaccaugggcaacaagcaggccaaagcuagcgagguggaagacgggcccagagccucccugaucccugaugcgacccaccucggaccgcaauucugcaagucuuguugguuugagaauaaaagccuggucgaaugcaacaaucauuaccuuugucugaacugccucacacugcuucuguccguuucuaaucggugucccauuugcaagaugccucuccccacgcgccugaaaccuagcguggugcccaccgcuccuccgacaagagccggcgacgggacccggcccccucccuauuccccuugaggacuaguuauaagacugacuagcccgaugggccucccaacgggcccuccuccccuccuugcaccgagauuaauaaaaaaaaaaaaaaaaaaaaaaaaaaaaaaaaaaaaaaaaaaaaaaaaaaaaaaaaaaaaaaaaaaaaaaaaaaaaaaaaaaaaaaaaaaaaaaaaaaaa

SEQ ID NO: 22948 - RNA, 489 nt, Artificial Sequence
  mRNA product Design i-3 (A100) comprising derived and/or modified sequence from LASV(Z0947-SLE-2011;Clade IV)__AIT17838__Z (opt5)
aggagaaagcuuaccaugggcaacaagcaggccaaagugcccgagagcaaggacuccccuagagcuucucugaucccggaugccacccaccucgggccccaauucugcaaaagcuguugguuugaaaauaagggacuggucgagugcaacaaucauuaccuuugucugaacugccucacacugcuucuguccguuucuaaucgguguccuauuugcaaaaugccccucccuacgaagcugaagcccagcgcggcuccuaccgccccgcccacaggcgccgcugacuccauccgcccucccccuuauucucccugaggacuaguuauaagacugacuagcccgaugggccucccaacgggcccuccuccccuccuugcaccgagauuaauaaaaaaaaaaaaaaaaaaaaaaaaaaaaaaaaaaaaaaaaaaaaaaaaaaaaaaaaaaaaaaaaaaaaaaaaaaaaaaaaaaaaaaaaaaaaaaaaaaaa

SEQ ID NO: 22949 - protein, 491 aa, Artificial Sequence
  derived and/or modified protein sequence (artificial) from LASV(Josiah;Clade IV)__NP_694870__GPCmut2
MGQIVTFFQEVPHVIEEVMNIVLIALSVLAVLKGLYNFATCGLVGLVTFLLLCGRSCTTSLYKGVYELQTLELNMETLNMCMPLSCTKNNSHHYIMVGNETGLELTLTNTSIINHKFCNLSDAHKKNLYDHALMSIISTFHLSIPNFNQYEAMSCDFNGGKISVQYNLSHSYAGDAANHCGTVANGVLQTFMRMAWGGSYIALDSGRGNWDCIMTSYQYLIIQNTTWEDHCQFSRPSPIGYLGLLSQRTRDIYISRRRRGTFTWTLSDSEGKDTPGGYCLTRWMLIEAELKCFGNTAVAKCNEKHDEEFCDMLRLFDFCKQAIQRLKAPAQMSIQLINKAVNALINDQLIMKNHLRDIMGIPYCNYSKYWYLNHTTTGRTSLPKCWLVSNGSYLNETHFSDDIEQQADNMITEMLQKEYMERQGKTPLGLVDLFVFSTSFYLISIFLHLVKIPTHRHIVGKSCPKPHRLNHMGICSCGLYKQPGVPVKWKR

SEQ ID NO: 22950 - protein, 490 aa, Artificial Sequence
  derived and/or modified protein sequence (artificial) from LASV(LP;Clade I)__AAF86701__GPCmut2
MGQIITFFQEVPHVIEEVMNIVLIALSLLAILKGLYNIATCGIIGLVAFLFLCGKSCSLTLKGGYELQTLELNMETLNMCMPLSCTKNSSHHYIRVGNETGLELTLTNTSIINHKFCNLSDAHKKNLYDHALMSIISTFHLSIPNFNQYEAMSCDFNGGKISVQYNLSHSYAGDAAEHCGTVANGVLQTFMRMAWGGRYIALDSGKGNWDCIMTSYQYLIIQNTTWEDHCQFSRPSPIGYLGLLSQRTRDIYISRRRRGTFTWTLSDSEGNETPGGYCLTRWMLIEAELKCFGNTAVAKCNEKHDEEFCDMLRLFDFCKQAIRRLKAPAQMSIQLINKAVNALINDQLIMKNHLRDIMGIPYCNYSKYWYLNHTSSGRTSLPKCWLISNGSYLNETQFSDDIEQQADNMITEMLQKEYIERQGKTPLGLVDIFIFSTSFYLISIFLHLIKIPTHRHIVGKPCPKPHRLNHMGVCSCGLYKHPGVPTKWKR

SEQ ID NO: 22951 - protein, 490 aa, Artificial Sequence
  derived and/or modified protein sequence (artificial) from LASV(803213;Clade II)__AAF86703__GPCmut2
MGQIITFFQEVPHVIEEVMNIVLIALSLLAILKGIYNVATCGLFGLISFLLLCGRSCSVTYKGVYELQTLELNMANLNMCMPLSCTKNNSHHYIMVGNETGLELTLTNTSIINHKFCNLSDAHKKNLYDHALMSIISTFHLSIPNFNQYEAMSCDFNGGKISVQYNLSHSFAVDAANHCGTIANGVLQTFMRMAWGGSYIALDSGKGNWDCIMTSYQYLIIQNTTWEDHCQFSRPSPIGYLGLLSQRTRDIYISRRRRGTFTWTLSDSEGNEAPGGYCLTRWMLIEAELKCFGNTAVAKCNEKHDEEFCDMLRLFDFCKQAIKRLKTPAQMSIQLINKAVNALINDQLIMKNHLRDIMGIPYCNYSRYWYLNHTVTGKTSLPRCWLVSNGSYLNETHFSDDIEQQADNMITEMLQKEYMDRQGKTPLGLVDLFVFSTSFYLISIFLHLVKIPTHRHIVGKPCPKPHRLNHMGICSCGLYKHPGVPVKWKR

SEQ ID NO: 22952 - protein, 490 aa, Artificial Sequence
  derived and/or modified protein sequence (artificial) from LASV(GA391;Clade III)__CAA36645__GPCmut2
MGQIVTFFQEVPHVIEEVMNIVLIALSILAILKGLYNVATCGLIGLVTFLLLSGRSCSLIYKGTYELQTLELNMETLNMCMPLSCTKNNSHHYIRVGNETGLELTLTNTSILNHKFCNLSDAHKRNLYDHSLMSIISTFHLSIPNFNQYEAMSCDFNGGKITVQYNLSHSFAVDAAGHCGTLANGVLQTFMRMAWGGSYIALDSGRGNWDCIMTSYQYLIIQNTTWDDHCQFSRPSPIGYLGLLSQRTRDIYISRRRRGTFTWTLSDSEGNETPGGYCLTRWMLIEAELKCFGNTAVAKCNEKHDEEFCDMLRLFDFCKQAIRRLKTPAQMSIQLINKAVNALINDQLIMKNHLRDIMGIPYCNYSRYWYLNHTSTGKTSLPRCWLISNGSYLNETKFSDDIEQQADNMITEMLQKEYIDRQGKTPLGLVDLFVFSTSFYLISIFLHLVKIPTHRHIVGKPCPKPHRLNHMGICSCGLYKQPGVPVRWKR

SEQ ID NO: 22953 - protein, 491 aa, Artificial Sequence
  derived and/or modified protein sequence (artificial) from LASV(AV;Clade V)__CCA30314__GPCmut2
MGQIVTFFQEVPHVIEEVMNIVLIALSILAVLKGLYNIATCGLIGLITFLLLCGRSCSSNLYKGVYELQSLDLNMETLNMCMPLSCTKNNSHHYIRVGNDTGLELTLTNTSILNHKFCNLSDAHKKDLYDHALMSIISTFHLSIPNFNQYEAMSCDFNGGKISVQYNLSHSYAIDAANHCGTVANGILQTFMRMAWGGSYIALDSGRGNWDCIMTSYQYLIIQNTTWENHCQFSRPSPIGYLGLLSQRTRDIYISRRRRGTFTWTLSDSEGNATPGGYCLTRWMLIEAELKCFGNTAVAKCNEKHDEEFCDMLRLFDFCKQAISRLKSPAQMSIQLINKAVNALINDQLIMKNHLRDIMGIPYCNYSKYWYLNHTITGKTSLPKCWLVSNGSYLNETHFSDDIEQQADNMITEMLQKEYMERQGKTPLGLVDLFVFSTSFYLISIFLRLVKIPTHRHIVGKPCPKPHRLNHMGICSCGLYKQPGVPVRWKR

SEQ ID NO: 22954 - protein, 490 aa, Artificial Sequence
  derived and/or modified protein sequence (artificial) from LASV(Togo/2016/7082;Clade VI)__AMR44577__GPCmut2
MGQIITFFQEVPHVIEEVMNIVLIALSLLAILKGVYNVATCGIIGLVTFLFLCGRSCSLIYKGSYELQTLELNMETLNMCMPLSCTKNSSHHYIRVGNETGLELTLTNTSIINHKFCNLSDAHKRNLYDHALMSILSTFHLSIPNFNQYEAMSCDFNGGKISVQYNLSHAYAVDAAEHCGTVANGVLQTFMRMAWGGSYIALDSGRGNWDCIMTSYQYLIIQNTTWEDHCQFSRPSPIGYLGLLSQRTRDIYISRRRRGTFTWTLSDSEGNETPGGYCLTRWMLIEAELKCFGNTAVAKCNEKHDEEFCDMLRLFDFCKQAIQRLKSPAQMSIQLINKAVNALINDQLIMKNHLRDMMGIPYCNYSKYWYLNHTSSGRTSLPKCWLVSNGSYLNETHFSDDIEQQADNMITEMLQKEYIDRQGKTPLGLVDLFVFSTSFYLISIFLHLIKIPTHRHIVGKPCPKPHRLNHMGICSCGLYKQPGVPTRWKR

SEQ ID NO: 22955 - protein, 490 aa, Artificial Sequence
  derived and/or modified protein sequence (artificial) from LASV(KAK-428;Clade n.d. (VII))__ANH09740__GPCmut2
MGQIVTFFQEVPHVIEEVMNIVLIALSLLAILKGLYNFATCGVIGLITFLLLCGRSCSATYKGQYELQTLELNMESLNMCMPLSCTKNNSHHYIRAGNNTGLELTLTNTSIISHKFCNLSDAHKKNLYDHTLMSIITTFHLSIPNFNQYEAMSCDFNGGKISIQYNLSHSYAGDAAQHCGTVANGVLQTFMRMAWGGSYLALDSGRRGWDCIISSYQYLIIQNTTWDDHCQFSRPSPIGYLGFVSQKTRDIYISRRRRGTFTWTLSDSEGHDMPGGYCLTRWMLIEADLKCFGNTAVAKCNEKHDEEFCDMWRLFDFCKQAIQRLKAPAQMNIQLINKAVNALINDQLMMKNHLRDIMGIPYCNYSKFWYLNNTTTGRTSLPRCWLISNGSYLNETHFSDDIEQQADNMITEMLQKEYMDRQGKTPLGLVDLFVFSTSFYLITIFLHLVKIPTHRHIVGKPCPKPHRLNHMGICSCGLYKQPGVPVRWKR

SEQ ID NO: 22956 - protein, 490 aa, Artificial Sequence; identical to SEQ ID NO: 22950
  derived and/or modified protein sequence (artificial) from LASV(Pinneo-NIG-1969;Clade I)__AIT17836__GPCmut2

SEQ ID NO: 22957 - protein, 490 aa, Artificial Sequence
  derived and/or modified protein sequence (artificial) from LASV(ISTH0009-NIG-2011;Clade II)__AIT17404__GPCmut2
MGQIITFFQEVPHVIEEVMNIVLIALSLLAILKGIYNVATCGLFGLVSFLLLCGRSCSTTYKGVYELQTLELDMASLNMCMPLSCTKNNSHHYIMVGNETGLELTLTNTSIINHKFCNLSDAHKKNLYDHALMSIISTFHLSIPNFNQYEAMSCDFNGGKISVQYNLSHAYAVDAANHCGTIANGVLQTFMRMAWGGSYIALDSGKGSWDCIMTSYQYLIIQNTTWEDHCQFSRPSPIGYLGLLSQRTRDIYISRRRRGTFTWTLSDSEGNETPGGYCLTRWMLIEAELKCFGNTAVAKCNEKHDEEFCDMLRLFDFCKQAIRRLKTPAQMSIQLINKAVNALINDQLIMKNHLRDIMGIPYCNYSKYWYLNHTVTGKTSLPRCWLVSNGSYLNETHFSDDIEQQADNMITELLQKEYMDRQGKTPLGLVDLFVFSTSFYLISIFLHLIKIPTHRHITGKPCPKPHRLNHMGICSCGLYKHPGVPVKWKR

SEQ ID NO: 22958 - protein, 490 aa, Artificial Sequence
  derived and/or modified protein sequence (artificial) from LASV(ISTH2010-NIG-2012;Clade II)__AIT17482__GPCmut2
MGQIITFFQEVPHVIEEVMNIVLIALSLLAILKGIYNVATCGLFGLVSFLLLCGRSCSTTYKGVYELQTLELDMASLNMCMPLSCTKNNSHHYIMVGNETGLELTLTNTSIINHKFCNLSDAHKKNLYDHALMSIISTFHLSIPNFNQYEAMSCDFNGGKISVQYNLSHAYAVDAANHCGTIANGVLQTFMRMAWGGSYIALDSGKGSWDCIMTSYQYLIIQNITWEDHCQFSRPSPIGYLGLLSQRTRDIYISRRRRGTFTWTLSDSEGNETPGGYCLTRWMLIEAELKCFGNTAVAKCNEKHDEEFCDMLRLFDFCKQAIRRLKTPAQMSIQLINKAVNALINDQLIMKNHLRDIMGIPYCNYSKYWYLNHTVTGKTSLPRCWLVSNGSYLNETHFSDDIEQQADNMITELLQKEYIDRQGKTPLGLVDLFVFSTSFYLISIFLHLVKIPTHRHVVGKPCPKPHRLNHMGICSCGLYKHPGVPVKWKR

SEQ ID NO: 22959 - protein, 490 aa, Artificial Sequence
  derived and/or modified protein sequence (artificial) from LASV(Lassa virus/H.sapiens-wt/NGA/2015/ISTH_0543;Clade II)__AVO03639__GPCmut2
MGQIITFFQEVPHVIEEVMNIVLIALSLLAILKGIYNVATCGLFGLVSFLLLCGRSCSTTYKGVYELQTLELDMANLNMCMPLSCTKNNSHHYIMVGNETGLELTLTNTSIINHKFCNLSDAHKKNLYDHALMSIISTFHLSIPNFNQYEAMSCDFNGGKISVQYNLSHTYAVDAANHCGTIANGVLQTFMRMAWGGSYIALDSGKGSWDCIMTSYQYLVIQNTTWEDHCQFSRPSPIGYLGLLSQRTRDIYISRRRRGTFTWTLSDSEGNETPGGYCLTRWMLIEAELKCFGNTAVAKCNEKHDEEFCDMLRLFDFCKQAIRRLKTPAQMSIQLINKAVNALINDQLIMKNHLRDIMGIPYCNYSKYWYLNHTVTGKTSLPRCWLVSNGSYLNETHFSDDIEQQADNMITELLQKEYIDRQGKTPLGLVDLFVFSTSFYLISIFLHLVKIPTHRHITGKPCPKPHRLNHMGICSCGLYKHPGVPVKWKR

SEQ ID NO: 22960 - protein, 490 aa, Artificial Sequence
  derived and/or modified protein sequence (artificial) from LASV(Lassa virus/H.sapiens-wt/NGA/2016/ISTH_0009;Clade II)__AVO03571__GPCmut2
MGQIITFFQEVPHVIEEVMNIVLIALSLLAILKGIYNVATCGLLGLVSFLLLCGRSCSTTYKGVYELQTLELDMASLNMCMPLSCTKNNSHHYIMVGNETGLELTLTNTSIINHKFCNLSDAHKKNLYDHALMSIISTFHLSIPNFNQYEAMSCDFNGGRISVQYNLSHSYAVDAANHCGTIANGVLQTFMRMAWGGSYIALDSGKGSWDCIMTSYQYLIIQNTTWEDHCQFSRPSPIGYLGLLSQRTRDIYISRRRRGTFTWTLSDSEGNETPGGYCLTRWMLIEAELKCFGNTAVAKCNEKHDEEFCDMLRLFDFCKQAIRRLKTPAQMSIQLINKAVNALINDQLIMKNHLRDIMGIPYCNYSKYWYLNHTVTGKTSLPRCWLVSNGSYLNETHFSDDIEQQADNMITELLQKEYIDRQGKTPLGLVDLFVFSTSFYLISIFLHLVKIPTHRHITGKPCPKPHRLNHMGICSCGLYNHPGVPVKWKR

SEQ ID NO: 22961 - protein, 490 aa, Artificial Sequence
  derived and/or modified protein sequence (artificial) from LASV(Lassa virus/H.sapiens-wt/NGA/2016/ISTH_0017;Clade II)__AVO03567__GPCmut2
MGQIITFFQEVPHVIEEVMNIVLIALSLLAILKGIYNVATCGLFGLVSFLLLCGRSCSTTYKGVYELQTLELDMASLNMCMPLSCTKNNSHHYIMVGNETGLELTLTNTSIINHKFCNLSDAHKKNLYDHALMSIISTFHLSIPNFNQYEAMSCDFNGGKISVQYNLSHTYAIDAANHCGTIANGVLQTFMRMAWGGSYIALDSGKGSWDCIMTSYQYLIIQNTTWEDHCQFSRPSPIGYLGLLSQRTRDIYISRRRRGTFTWTLSDSEGNETPGGYCLTRWMLIEAELKCFGNTAVAKCNEKHDEEFCDMLRLFDFCKQAIRRLKTPAQMSIQLINKAVNALINDQLIMKNHLRDIMGIPYCNYSKYWYLNHTVTGKTSLPRCWLVSNGSYLNETHFSDDIEQQADNMITELLQKEYMDRQGKTPLGLVDLFVFSTSFYLISIFLHLVRIPTHRHVIGKPCPKPHRLNHMGICSCGLYKHPGVPVKWKR

SEQ ID NO: 22962 - protein, 490 aa, Artificial Sequence
  derived and/or modified protein sequence (artificial) from LASV(Lassa virus/H.sapiens-wt/NGA/2018/ISTH_0959;Clade II)__AVV65099__GPCmut2
MGQIITFFQEVPHVIEEVMNIVLIALSLLAILKGIYNVVTCGLFGLVSFLLLCGRSCSTTYKGVYELQTLELDMASLNMCMPLSCTKNNSHHYIMVGNETGLELTLTNTSIINHKFCNLSDAHKKNLYDHALMSIISTFHLSIPNFNQYEAMSCDFNGGKISVQYNLSHAYAIDAANHCGTIANGVLQTFMRMAWGGSYIALDSGKGSWDCIMTSYQYLIIQNTTWEDHCQFSRPSPIGYLGLLSQRTRDIYISRRRRGTFTWTLSDSEGNETPGGYCLTRWMLIEAELKCFGNTAVAKCNEKHDEEFCDMLRLFDFCKQAIRRLKTPAQMSIQLINKAVNALINDQLIMKNHLRDIMGIPYCNYSKYWYLNHTVTGKTSLPRCWLVSNGSYLNETHFSDDIEQQADNMITELLQKEYIDRQGKTPLGLVDLFVFSTSFYLISIFLHLVKIPTHRHVIGKPCPKPHRLNHMGICSCGLYKHPGVPVKWKR

SEQ ID NO: 22963 - protein, 490 aa, Artificial Sequence
  derived and/or modified protein sequence (artificial) from LASV(LASV003-NIG-2008;Clade II)__AIT17580__GPCmut2
MGQIITFFQEVPHVIEEVMNIVLIALSLLAILKGIYNVATCGLFGLVSFLLLCGRSCSTTYKGVYELQTLELDMASLNMCMPLSCTKNNSHHYIMVGNETGLELTLTNTSIINHKFCNLSDAHKKNLYDHALMSIISTFHLSIPNFNQYEAMSCDFNGGKISVQYNLSHTYAVDAANHCGTIANGVLQTFMRMAWGGSYIALDSGKGSWDCIMTSYQYLIIQNTTWEDHCQFSRPSPIGYLGLLSQRTRDIYISRRRRGTFTWTLSDSESNETPGGYCLTRWMLIEAELKCFGNTAVAKCNEKHDEEFCDMLRLFDFCKQAIRRLKAPAQMSIQLINKAVNALINDQLIMKNHLRDIMGIPYCNYSKYWYLNHTVTGRTSLPRCWLVSNGSYLNETHFSDDIEQQADNMITELLQKEYMDRQGKTPLGLVDLFVFSTSFYLISIFLHLVKIPTHRHVIGKPCPKPHRLNHMGICSCGLYKHPGVPVKWKR

SEQ ID NO: 22964 - protein, 490 aa, Artificial Sequence
  derived and/or modified protein sequence (artificial) from LASV(LASV035-NIG-2009;Clade II)__AIT17588__GPCmut2
MGQIITFFQEVPHVIEEVMNIVLIALSLLAILKGIYNVATCGLFGLVSFLLLCGRSCSTTYKGVYELQTLELDMASLNMCMPLSCTKNNSHHYIMVGNETGLELTLTNTSIINHKFCNLSDAHKKNLYDHALMSIISTFHLSIPNFNQYEAMSCDFNGGKISVQYNLSHAYAVDAANHCGTIANGVLQTFMRMAWGGSYIALDSGKGSWDCIMTSYQYLIIQNTTWEDHCQFSRPSPIGYLGLLSQRTRDIYISRRRRGTFTWTLSDSEGNETPGGYCLTRWMLIEAELKCFGNTAVAKCNEKHDEEFCDMLRLFDFCKQAIRRLKAPAQMSIQLINKAVNALINDQLIMKNHLRDIMGIPYCNYSKYWYLNHTVTGKTSLPRCWLVSNGSYLNETHFSDDIEQQADNMITELLQKEYIDRQGKTPLGLVDLFVFSTSFYLISIFLHLVKIPTHRHVIGKPCPKPHRLNHMGICSCGLYKHPGVPVKWKR

SEQ ID NO: 22965 - protein, 490 aa, Artificial Sequence
  derived and/or modified protein sequence (artificial) from LASV(LASV1000-NIG-2009;Clade II)__AIT17782__GPCmut2
MGQIITFFQEVPHVIEEVMNIVLIALSLLAILKGIYNVATCGLFGLVSFLLLCGRSCSTTYKGVYELQTLELDMASLNMCMPLSCTKNNSHHYIMVGNETGLELTLTNTSIINHKFCNLSDAHKKNLYDHALMSIISTFHLSIPNFNQYEAMSCDFNGGKISVQYNLSHTYAVDAANHCGTIANGVLQTFMRMAWGGSYIALDSGKGSWDCIMTSYQYLIIQNTTWEDHCQFSRPSPIGYLGLLSQRTRDIYISRRRRGTFTWTLSDSEGNETPGGYCLTRWMLIEAELKCFGNTAVAKCNEKHDEEFCDMLRLFDFCKQAIKRLKTPAQMSIQLINKAVNALINDQLIMKNHLRDIMGIPYCNYSKYWYLNHTVTGKTSLPRCWLVSNGSYLNETHFSDDIEQQADNMITELLQKEYIDRQGKTPLGLVDLFVFSTSFYLISIFLHLVKIPTHRHVVGKPCPKPHRLNHMGICSCGLYKHPGVPVKWKR

SEQ ID NO: 22966 - protein, 490 aa, Artificial Sequence
  derived and/or modified protein sequence (artificial) from LASV(LASV221-NIG-2010;Clade II)__AIT17624__GPCmut2
MGQIITFFQEVPHVIEEVMNIVLIALSLLAILKGIYNVATCGLFGLVSFLLLCGRSCSTTYKGVYELQTLELDMASLNMCMPLSCTKNNSHHYIMVGNETGLELTLTNTSIINHKFCNLSDAHKKNLYDHALMSIISTFHLSIPNFNQYEAMSCDFNGGKISVQYNLSHTYAIDAANHCGTIANGVLQTFMRMAWGGSYIALDSGKGSWDCIMTSYQYLIIQNTTWEDHCQFSRPSPIGYLGLLSQRTRDIYISRRRRGTFTWTLSDSEGNETPGGYCLTRWMLIEAELKCFGNTAVAKCNEKHDEEFCDMLRLFDFCKQAIRRLKTPAQMSIQLINKAVNALINDQLIMKNHLRDIMGIPYCNYSKYWYLNHTVTGKTSLPRCWLVSNGSYLNETHFSDDIEQQADNMITEMLQKEYMDRQGKTPLGLVDLFVFSTSFYLISIFLHLVKIPTHRHVIGKPCPKPHRLNHMGICSCGLYKHPGVPVKWKR

SEQ ID NO: 22967 - protein, 490 aa, Artificial Sequence
  derived and/or modified protein sequence (artificial) from LASV(LASV237-NIG-2010;Clade II)__AIT17638__GPCmut2
MGQIITFFQEVPHVIEEVMNIVLIALSLLAILKGIYNVATCGLFGLVSFLLLCGRSCSTTYKGVYELQTLELDMASLNMCMPLSCTKNNSHHYIMVGNETGLELTLTNTSIINHKFCNLSDAHKKDLYDHALMSIISTFHLSIPNFNQYEAMSCDFNGGKISVQYNLSHTYAVDAANHCGTIANGVLQTFMRMAWGGSYIALDSGKGSWDCIMTSYQYLIIQNTTWEDHCQFSRPSPIGYLGLLSQRTRDIYISRRRRGTFTWTLSDSEGNETPGGYCLTRWMLIEAELKCFGNTAVAKCNEKHDEEFCDMLRLFDFCKQAIRRLKTPAQMSIQLINKAVNALINDQLIMKNHLRDIMGIPYCNYSKYWYLNHTVTGKTSLPRCWLVSNGSYLNETHFSDDIEQQADNMITELLQKEYMDRQGKTPLGLVDLFVFSTSFYLISIFLHLIKIPTHRHITGKPCPKPHRLNHMGICSCGLYKHPGVPVKWKR

SEQ ID NO: 22968 - protein, 490 aa, Artificial Sequence
  derived and/or modified protein sequence (artificial) from LASV(LASV253-NIG-2011;Clade II)__AIT17670__GPCmut2
MGQIITFFQEVPHVIEEVMNIVLIALSLLAILKGIYNVATCGLFGLVSFLLLCGRSCSTTYKGVYELQTLELDMASLNMCMPLSCTKNNSHHYIMVGNETGLELTLTNTSIINHKFCNLSDAHKKNLYDHALMSIISTFHLSIPNFNQYEAMSCDFNGGKISVQYNLSHTYAVDAANHCGTIANGVLQTFMRMAWGGSYIALDSGKGSWDCIMTSYQYLIIQNTTWEDHCQFSRPSPIGYLGLLSQRTRDIYISRRRRGTFTWTLSDSEGNETPGGYCLTRWMLIEAELKCFGNTAVAKCNEKHDEEFCDMLRLFDFCKQAIRRLKAPAQMSIQLINKAVNALINDQLIMKNHLRDIMGIPYCNYSKYWYLNHTVTGRTSLPRCWLVSNGSYLNETHFSDDIEQQADNMITELLQKEYIDRQGKTPLGLVDLFVFSTSFYLISIFLHLVKIPTHRHIIGKPCPKPHRLNHMGICSCGLYKHPGVPVKWKR

SEQ ID NO: 22969 - protein, 490 aa, Artificial Sequence
  derived and/or modified protein sequence (artificial) from LASV(LASV254-NIG-2011;Clade II)__AIT17674__GPCmut2
MGQIITFFQEVPHVIEEVMNIVLIALSLLAILKGIYNVATCGLFGLVSFLLLCGRSCSTTYKGVYELQTLELDMTNLNMCMPLSCTKNNSHHYIMVGNETGLELTLTNTSIINHKFCNLSDAHKKNLYNHALMSIISTFHLSIPNFNQYEAMSCDFNGGKISVQYNLSHSYAVDAANHCGTIANGVLQTFMRMAWGGSYIALDSGKGNWDCIMTSYQYLIIQNTTWEDHCQFSRPSPIGYLGLLSQRTRDIYISRRRRGTFTWTLSDSEGNETPGGYCLTRWMLIEAELKCFGNTAVAKCNEKHDEEFCDMLRLFDFCKQAIRRLKTPAQANIQLINKAVNALINDQLIMKNHLRDIMGIPYCNYSKYWYLNHTVTGKTSLPRCWLVSNGSYLNETHFSDDIEQQADNMITELLQKEYMDRQGKTPLGLVDLFVFSTSFYLISIFLHLVKIPTHRHVIGKPCPKPHRLNHMGICSCGLYKHPGVPVKWKR

SEQ ID NO: 22970 - protein, 490 aa, Artificial Sequence
  derived and/or modified protein sequence (artificial) from LASV(Nig08-A19;Clade III)__ADU56618__GPCmut2
MGQIVTFFQEVPHVIEEVMNIVLIALSILAILKGLYNIATCGLIGLVTFLLLSGRSCSMTYKGVYELQTLELNMNTLNMCMPLSCTKNNSHHYIMVGNETGLELTLTNTSLLHHKFCNLSDAHKKNLYDHTLMSIISTFHLSIPNFNQYEAMSCDFNGGKITVQYNLSHSYAIDAANHCGTVANGVLQTFMRMAWGGSYIALDSGRGKWDCIMTSYQYLIIQNTTWEDHCQFSRPSPIGYLGLLSQRTRDIYISRRRRGTFTWTLSDSEGNETPGGYCLTRWMLIEAELKCFGNTAVAKCNEKHDEEFCDMLRLFDFCKQAIRRLKAPAQMSIQLINKAVNALINDQLIMKNHLRDIMGIPYCNYSKYWYLNHTSTGRTSLPRCWLVSNGSYLNETHFSDDIEQQADNMITEMLQKEYLDRQGKTPLGLVDLFVFSTSFYLISIFLHLVKIPTHRHIVGKPCPKPHRLNHMGICSCGLYKQPGVPVRWKR

SEQ ID NO: 22971 - protein, 491 aa, Artificial Sequence
  derived and/or modified protein sequence (artificial) from LASV(G1180-SLE-2010;Clade IV)__AIT17168__GPCmut2
MGQIVTFFQEVPHVIEEVMNIVLIALSILAVLKGLYNFATCGLVGLLTFLLLCGRSCTASRYKGVYELQTLELNMETLNMCMPLSCTKNNSHHYIMVGNETGLELTLTNTSIINHKFCNLSDAHKKNLYDHALMSIISTFHLSIPNFNQYEAMSCDFNGGKISVQYNLSHSYAGDAANHCGTVANGVLQTFMRMAWGGSYIALDSGHGSWDCIMTSYQYLIIQNTTWEDHCQFSRPSPIGYLGLLSQRTRDIYISRRRRGTFTWTLSDSEGKDTPGGYCLTRWMLIEAELKCFGNTAVAKCNEKHDEEFCDMLRLFDFCKQAIQRLKAPAQMSIQLINKAVNALINDQLIMKNHLRDIMGIPYCNYSKYWYLNHTTTGKTSLPKCWLVSNGSYLNETHFSDDIEQQADNMITEMLQKEYMERQGKTPLGLVDLFVFSTSFYLISIFLHLVKIPTHRHIVGKSCPKPHRLNHMGICSCGLYKQPGVPVKWKR

SEQ ID NO: 22972 - protein, 491 aa, Artificial Sequence
  derived and/or modified protein sequence (artificial) from LASV(G1442-SLE-2011;Clade IV)__AIT17180__GPCmut2
MGQIVTFFQEVPHVIEEVMNIVLIALSILAVLKGLYNVATCGLIGLVTFLLLCGRSCTTTLYKGVYELQTLELNMETLNMCMPLSCTKNNSHHYIRVGNETGLELTLTNTSIINHKFCNLSDAHKKNLYDHALMSIISTFHLSIPNFNQYEAMSCDFNGGKISVQYNLSHSYAGDAANHCGTVANGVLQTFMRMAWGGSYIALDSGRGNWDCIMTSYQYLIIQNTTWDDHCQFSRPSPIGYLGLLSQRTRDVYISRRRRGTFTWTLSDSEGKDTPGGYCLTRWMLIEAELKCFGNTAVAKCNEKHDEEFCDMLRLFDFCKQAIQRLKAPAQMSIQLINKAVNALINDQLIMKNHLRDIMGIPYCNYSKYWYLNNTATGKTSLPKCWLISNGSYLNETHFSDDIEQEADNMITEMLQKEYMERQGKTPLGLVDLFVFSTSFYLISIFLHLVKIPTHRHIVGKSCPKPHRLNHMGICSCGLYKQPGVPVRWKR

SEQ ID NO: 22973 - protein, 491 aa, Artificial Sequence
  derived and/or modified protein sequence (artificial) from LASV(G3010-SLE-2013;Clade IV)__AIT17344__GPCmut2
MGQIVTFFQEVPHVIEEVMNIVLIALSILAVLKGLYNFATCGLVGLVTFLLLCGRSCTTSLYKGVYELQTLELNMETLNMCMPLSCTKNNSHHYIMVGNETGLELTLTNTSIINHKFCNLSDAHKKNLYNHALMSIISTFHLSIPNFNQYEAMSCDFNGGKISVQYNLSHSYAGDAASHCGTVANGVLQTFMRMAWGGSYIALDSGYGKWDCIMTSYQYLIIQNTTWEDHCQFSRPSPIGYLGLLSQRTRDIYISRRRRGTFTWTLSDSEGKDTPGGYCLTRWMLIEAELKCFGNTAVAKCNEKHDEEFCDMLRLFDFCKQAIQRLKTPAQMSIQLINKAVNALINDQLIMKNHLRDIMGIPYCNYSKYWYLNHTTTGKTSLPKCWLVSNGSYLNETHFSDDIEQQADNMITEMLQKEYMERQGKTPLGLVDLFVFSTSFYLISIFLHLVKIPTHRHIVGKSCPKPHRLNHMGICSCGLYKQPGVPVRWKR

SEQ ID NO: 22974 - protein, 491 aa, Artificial Sequence
  derived and/or modified protein sequence (artificial) from LASV(G502-SLE-2009;Clade IV)__AIT17126__GPCmut2
MGQIVTFFQEVPHVIEEVMNIVLIALSILAVLKGLYNFATCGLVGLLTFLLLCGRSCTTGLYKGVYELQTLELNMETLNMCMPLSCTKNNSHHYIMVGNETGLELTLTNTSIINHKFCNLSDAHKKNLYDHALMSIISTFHLSIPNFNQYEAMSCDFNGGKISVQYNLSHSYAGDAADHCGTVANGVLQTFMRMAWGGSYIALDSGRGRWDCIMTSYQYLIIQNTTWEDHCQFSRPSPIGYLGLLSQRTRDIYISRRRRGTFTWTLSDSEGKDTPGGYCLTRWMLIEAELKCFGNTAVAKCNEKHDEEFCDMLRLFDFCKQAIQRLKAPAQMSIQLINKAVNALINDQLVMKNHLRDIMGIPYCNYSRYWYLNHTTTGRTSLPKCWLVSNGSYLNETHFSDDIEQQADNMITEMLQKEYMERQGKTPLGLVDLFVFSTSFYLISIFLHLVKIPTHRHIVGKSCPKPHRLNHMGICSCGLYKQPGVPVKWKR

SEQ ID NO: 22975 - protein, 491 aa, Artificial Sequence
  derived and/or modified protein sequence (artificial) from LASV(G733-SLE-2010;Clade IV)__AIT17154__GPCmut2
MGQIVTFFQEVPHVIEEVMNIVLIALSILAVLKGLYNFATCGIVGLVSFLLLCGRSCTTSLYKGVYELQTLELNMETLNMCMPLSCTKNNSHHYIMVGNETGLELTLTNTSIINHKFCNLSDAHKKNLYDHALMSIISTFHLSIPNFNQYEAMSCDFNGGKISVQYNLSHSYAGDAANHCGTIANGVLQTFMRMAWGGSYIALDSGRDRWDCIMTSYQYLIIQNTTWEDHCQFSRPSPIGYLGLLSQRTRDIYISRRRRGTFTWTLSDSEGKDTPGGYCLTRWMLIEAELKCFGNTAVAKCNEKHDEEFCDMLRLFDFCKQAIQRLKAPAQMSIQLINKAVNALINDQLIMKNHLRDIMGIPYCNYSKYWYLNHTTTGKTSLPKCWLVSNGSYLNETHFSDDIEQQADNMITEMLQKEYMERQGKTPLGLVDLFVFSTSFYLISIFLHLVKIPTHRHVVGKSCPKPHRLNHMGICSCGLYGQPGVPVKWKR

SEQ ID NO: 22976 - protein, 491 aa, Artificial Sequence
  derived and/or modified protein sequence (artificial) from MOPV/LASV reassortant(IGS-1;Clade IV)__AFY05576__GPCmut2
MGQIVTFFQEVPHVIEEVMNIVLIALSVLAVLKGLYNFATCGLVGLVTFLLLCGRSCTTSLYKGVYELQTLELNMETLNMCMPLSCTKNNSHHYIMVGNETGLELTLTNTSIINHKFCNLSDAHKKNLYDHALMSIISTFHLSIPNFNQYEAMSCDFNGGKISVQYNLSHSYAGDAANHCGTVANGVLQTFMRMAWGGSYIALDSGRGNWDCIMTSYQYLIIQNTTWEDHCQFSRPSPIGYLGLLSQRTRDIYISRRRRGTFTWTLSDSEGEDTPGGYCLTRWMLIEAELKCFGNTAVAKCNEKHDEEFCDMLRLFDFCKQAIQRLKAPAQMSIQLINKAVNALINDQLIMKNHLRDIMGIPYCNYSKYWYLNHTTTGRTSLPKCWLVSNGSYLNETHFSDDIEQQADNMITEMLQKEYMERQGKTPLGLVDLFVFSTSFYLISIFLHLVKIPTHRHIVGKSCPKPHRLNHMGICSCGLYKQPGVPVKWKR

SEQ ID NO: 22977 - protein, 491 aa, Artificial Sequence
  derived and/or modified protein sequence (artificial) from LASV(LM765-SLE-2012;Clade IV)__AIT17814__GPCmut2
MGQIVTFFQEVPHVIEEVMNIVLIALSILAVLKGLYNFATCGLVGLVTFLLLCGRSCTTSLYKGVYELQTLELNMETLNMCMPLSCTKNNSHHYIMVGNETGLELTLTNTSIIDHKFCNLSDAHRKNLYDHALMSIISTFHLSIPNFNQYEAMSCDFNGGKISVQYNLSHSYAKDAADHCGTVANGVLQTFMRMAWGGSYIALDSGRGRWDCIMTSYQYLIIQNTTWEDHCQFSRPSPIGYLGLLSQRTRDIYISRRRRGTFTWTLSDSEGKDTPGGYCLTRWMLIEAELKCFGNTAVAKCNEKHDEEFCDMLRLFDFCKQAIQRLKAPAQMSIQLINKAVNALINDQLIMKNHLRDIMGIPYCNYSKYWYLNHTTTGKTSLPKCWLVSNGSYLNETHFSDDIEQQADNMITEMLQKEYMERQGKTPLGLVDLFVFSTSFYLISIFLHLVKIPTHRHIVGKPCPKPHRLNHMGICSCGLYKQPGVPVKWKR

SEQ ID NO: 22978 - protein, 491 aa, Artificial Sequence
  derived and/or modified protein sequence (artificial) from LASV(LM776-SLE-2012;Clade IV)__AIT17824__GPCmut2
MGQIVTFFQEVPHVIEEVMNIVLIALSILAVLKGLYNFATCGLVGLVTFLLLCGRSCTTSVYKGVYELQTLELNMETLNMCMPLSCTKNNSHHYIMVGNETGLELTLTNTSIINHKFCNLSDAHKKNLYDHALMSIISTFHLSIPNFNQYEAMSCDFNGGKISVQYNLSHSYAGDAANHCGTVANGVLQTFMRMAWGGSYIALDSGHGKWDCIMTSYQYLIIQNTTWEDHCQFSRPSPIGYLGLLSQRTRDIYISRRRRGTFTWTLSDSEGKDTPGGYCLTRWMLIEAELKCFGNTAVAKCNEKHDEEFCDMLRLFDFCKQAIQRLKAPAQMSIQLINKAVNALINDQLIMKNHLRDIMGIPYCNYSKYWYLNHTTTGKTSLPKCWLVSNGSYLNETHFSDDIEQQADNMITEMLQKEYMERQGKTPLGLVDLFVFSTSFYLISIFLHLVKIPTHRHIVGKSCPKPHRLNHMGICSCGLYKQPGVPVRWKR

SEQ ID NO: 22979 - protein, 491 aa, Artificial Sequence
  derived and/or modified protein sequence (artificial) from LASV(Mad39;Clade IV)__ANH09722__GPCmut2
MGQIVTFFQEVPHVIEEVMNIVLIALSILAVLKGLYNVATCGLIGLVTFLLLCGRSCTTTLYKGVYELQALELNMETLNMCMPLSCTKNNSHHYIRVGNETGLELTLTNTSLINHKFCNLSDAHKKNLYDHALMSIISTFHLSIPNFNQYEAMSCDFNDGKISVQYNLSHTYAGDTANHCGTVANGVLQTFMRMAWGGSYIALDSGRGGWDCIMTSYQYLIIQNTTWEDHCQFSRPSPIGYLGLLSQRTRDIYISRRRRGTFTWTLSDSEGKDTPGGYCLTRWMLIEAELKCFGNTAVAKCNEKHDEEFCDMLRLFDFCKQAIQRLKAPAQMSIQLINKAVNALINDQLIMKNHLRDIMGIPYCNYSKYWYLNHTVTGKTSLPKCWLVSNGSYLNETHFSDDIEQQADNMITEMLQKEYMERQGKTPLGLVDLFVFSTSFYLISIFLHLVKIPTHRHVVGKPCPKPHRLNHMGICSCGFYKQPGVPVRWKR

SEQ ID NO: 22980 - protein, 491 aa, Artificial Sequence
  derived and/or modified protein sequence (artificial) from LASV(Z0947-SLE-2011;Clade IV)__AIT17840__GPCmut2
MGQIVTFFQEVPHVIEEVMNIVLIALSILAVLKGLYNFATCGLVGLVTFLLLCGRSCTISLYKGVYELQTLELNMETLNMCMPLSCTKNNSHHYIMVGNETGLELTLTNTSIINHKFCNLSDAHKKNLYDHALMSIISTFHLSIPNFNQYEAMSCDFNGGKISVQYNLSHSYAGDAANHCGTVANGVLQTFMRMAWGGSYIALDSGRDRWDCIMTSYQYLIIQNTTWEDHCQFSRPSPIGYLGLLSQRTRDIYISRRRRGTFTWTLSDSEGKDTPGGYCLTRWMLIEAELKCFGNTAVAKCNEKHDEEFCDMLRLFDFCKQAIQRLKAPAQMSIQLINKAVNALINDQLIMKNHLRDIMGIPYCNYSKYWYLNHTTTGKTSLPKCWLVSNGSYLNETHFSDDIEQQADNMITEMLQKEYMERQGKTPLGLVDLFVFSTSFYLISIFLHLVKIPTHRHIVGKPCPKPHRLNHMGICSCGLYKQPGVPVKWKR

SEQ ID NO: 22981 - RNA, 1476 nt, Artificial Sequence
  derived and/or modified CDS sequence (opt1) from LASV(Josiah;Clade IV)__NP_694870__GPCmut2
augggccagaucgugaccuucuuccaggaggucccccacgugaucgaggaggugaugaacaucguccugaucgcccucagcgugcuggccgugcugaaggggcucuacaacuucgcgaccugcggccuggucgggcuggugacguuccuccugcugugcggccgcuccugcaccaccagccucuacaaggggguguacgagcugcagacccuggagcucaacauggagacgcugaacaugugcaugccgcuguccugcaccaagaacaacagccaccacuacaucauggucggcaacgagaccggccucgagcugacgcugaccaacaccuccaucaucaaccacaaguucugcaaccucagcgacgcccacaagaagaaccuguacgaccacgcccugauguccaucaucagcaccuuccaccucuccauccccaacuucaaccaguacgaggccaugagcugcgacuucaacgggggcaagaucuccgugcaguacaaccugagccacuccuacgccggggacgcggccaaccacugcggcacgguggccaacgggguccugcagaccuucaugcggauggccuggggcggcagcuacaucgcgcucgacuccgggcgcggcaacugggacugcaucaugaccagcuaccaguaccugaucauccagaacaccacgugggaggaccacugccaguucucccggcccagccccaucggguaccugggccuccugucccagcgcacccgggacaucuacaucagccgccggcgccggggcaccuucaccuggacgcugagcgacuccgaggggaaggacaccccgggcggguacugccugacccgcuggaugcucaucgaggccgagcugaagugcuucggcaacaccgccguggccaagugcaacgagaagcacgacgaggaguucugcgacaugcugcggcuguucgacuucugcaagcaggccauccagcgccugaaggcgcccgcccagaugagcauccagcugaucaacaaggccgugaacgcccucaucaacgaccagcugaucaugaagaaccaccuccgggacaucauggggauccccuacugcaacuacuccaaguacugguaccucaaccacacgaccaccggccgcaccagccugcccaagugcuggcuggucuccaacggcagcuaccucaacgagacgcacuucuccgacgacaucgagcagcaggccgacaacaugaucaccgagaugcugcagaaggaguacauggagcggcaggggaagacgccccugggccucguggaccuguucguguucagcaccuccuucuaccugaucagcaucuuccugcaccucgucaagaucccgacccaccgccacaucguggggaaguccugccccaagccccaccggcugaaccacaugggcaucugcagcugcgggcuguacaagcagcccggcgugccggucaaguggaagcgcuga

SEQ ID NO: 22982 - RNA, 1473 nt, Artificial Sequence
  derived and/or modified CDS sequence (opt1) from LASV(LP;Clade I)__AAF86701__GPCmut2
augggccagaucaucaccuucuuccaggaggugccccacgucaucgaggaggugaugaacaucgugcugaucgcccucagccugcuggccauccucaaggggcuguacaacaucgcgaccugcggcaucaucgggcuggucgccuuccucuuccugugcggcaaguccugcagccugacgcucaagggcggguacgagcugcagacccuggagcucaacauggagacccugaacaugugcaugccgcuguccugcacgaagaacagcucccaccacuacauccgcgugggcaacgagaccgggcucgagcugacccugaccaacacgagcaucaucaaccacaaguucugcaaccucuccgacgcccacaagaagaaccuguacgaccacgcccugaugagcaucaucuccaccuuccaccucagcauccccaacuucaaccaguacgaggccauguccugcgacuucaacggcgggaagaucagcgugcaguacaaccugucccacagcuacgcgggcgacgccgccgagcacugcgggaccgucgccaacggcgugcugcagaccuucaugcggauggcguggggcgggcgcuacaucgcccucgacuccggcaaggggaacugggacugcaucaugacgagcuaccaguaccugaucauccagaacaccaccugggaggaccacugccaguucucccggcccagccccaucggcuaccugggccuccugucccagcgcacccgggacaucuacaucagccgccggcgccgggggacguucaccuggacccugagcgacuccgagggcaacgagacccccgggggcuacugccugacgcgcuggaugcucaucgaggccgagcugaagugcuucgggaacaccgccguggccaagugcaacgagaagcacgacgaggaguucugcgacaugcugcggcuguucgacuucugcaagcaggcgauccgccggcugaaggcccccgcccagaugagcauccagcugaucaacaaggccgucaacgcccucaucaacgaccagcugaucaugaagaaccaccuccgcgacaucaugggcauccccuacugcaacuacuccaaguacugguaccucaaccacaccagcuccggccggaccagccugcccaagugcuggcugaucuccaacgggagcuaccucaacgagacgcaguucuccgacgacaucgagcagcaggcggacaacaugaucaccgagaugcugcagaaggaguacaucgagcgccagggcaagaccccgcuggggcucguggacaucuucaucuucagcaccuccuucuaccugaucagcaucuuccugcaccugaucaagaucccgacgcaccggcacaucgugggcaagcccugccccaagccccaccgccucaaccacaugggggucugcuccugcggccuguacaagcacccgggcgugcccaccaaguggaagcgguga

SEQ ID NO: 22983 - RNA, 1473 nt, Artificial Sequence
  derived and/or modified CDS sequence (opt1) from LASV(803213;Clade II)__AAF86703__GPCmut2
augggccagaucaucaccuucuuccaggaggugccccacgucaucgaggaggugaugaacaucgugcugaucgcccucagccugcuggccauccucaaggggaucuacaacgucgcgaccugcggccuguucgggcugaucuccuuccuccugcugugcggccgcagcugcuccgugacguacaaggggguguacgagcuccagacccuggagcugaacauggccaaccucaacaugugcaugccgcugagcugcaccaagaacaacucccaccacuacaucauggucggcaacgagacgggccuggagcucacccugaccaacaccagcaucaucaaccacaaguucugcaaccuguccgacgcccacaagaagaaccucuacgaccacgcccugaugagcaucaucuccacguuccaccugagcauccccaacuucaaccaguacgaggccauguccugcgacuucaacgggggcaagaucagcgugcaguacaaccucucccacagcuucgcgguggacgccgccaaccacugcgggaccaucgccaacggcguccugcagaccuucaugcggauggcguggggcggguccuacaucgcccuggacagcggcaaggggaacugggacugcaucaugaccuccuaccaguaccucaucauccagaacacgaccugggaggaccacugccaguucagccgccccucccccaucggcuaccuggggcugcucagccagcggacccgcgacaucuacaucagccggcgccgccggggcaccuucacguggacccucuccgacagcgagggcaacgaggcccccgggggcuacugccugacccgguggaugcugaucgaggccgagcucaagugcuucgggaacaccgccguggcgaagugcaacgagaagcacgacgaggaguucugcgacaugcugcgccuguucgacuucugcaagcaggccaucaagcggcucaagacgcccgcccagauguccauccagcugaucaacaaggccgugaacgcccugaucaacgaccagcucaucaugaagaaccaccuccgcgacaucaugggcauccccuacugcaacuacagccgguacugguaccugaaccacaccgucaccgggaagaccucccugccccgcugcuggcuggugagcaacggcuccuaccugaacgagacgcacuucagcgacgacaucgagcagcaggcggacaacaugaucaccgagaugcuccagaaggaguacauggaccggcagggcaagaccccgcuggggcugguggaccucuucgucuucuccaccagcuucuaccugaucuccaucuuccugcaccuggugaagaucccgacgcaccgccacaucgugggcaagcccugccccaagccccaccggcucaaccacauggggaucugcagcugcggccuguacaagcacccggggguccccgugaaguggaagcgcuga

SEQ ID NO: 22984 - RNA, 1473 nt, Artificial Sequence
  derived and/or modified CDS sequence (opt1) from LASV(GA391;Clade III)__CAA36645__GPCmut2
augggccagaucgugaccuucuuccaggaggucccccacgugaucgaggaggugaugaacaucguccugaucgcccucagcauccuggccauccugaaggggcucuacaacguggcgaccugcggccugaucgggcuggugacguuccuccugcuguccggccgcagcugcucccucaucuacaaggggaccuacgagcugcagacccuggagcucaacauggagacccugaacaugugcaugccgcugagcugcaccaagaacaacucccaccacuacauccgggucggcaacgagaccggccucgagcugacccugacgaacaccagcauccucaaccacaaguucugcaaccuguccgacgcccacaagcgcaaccuguacgaccacagccucauguccaucaucagcaccuuccaccuguccauccccaacuucaaccaguacgaggccaugagcugcgacuucaacgggggcaagaucaccgugcaguacaaccugucccacagcuucgccguggacgccgcggggcacugcggcacgcucgccaacgggguccugcagaccuucaugcggauggccuggggcggcuccuacaucgcccuggacagcgggcgcggcaacugggacugcaucaugaccuccuaccaguaccucaucauccagaacaccacgugggacgaccacugccaguucagccggcccucccccaucggguaccugggccugcucagccagcgcacccgggacaucuacaucagccgccggcgccggggcaccuucaccuggacgcucuccgacagcgaggggaacgagaccccgggcggguacugccugacccgcuggaugcugaucgaggcggagcucaagugcuucggcaacaccgccguggccaagugcaacgagaagcacgacgaggaguucugcgacaugcugcggcuguucgacuucugcaagcaggccauccgccggcucaagacgcccgcccagauguccauccagcugaucaacaaggcggugaacgcccugaucaacgaccagcucaucaugaagaaccaccuccgcgacaucauggggauccccuacugcaacuacagccgguacugguaccugaaccacaccuccaccggcaagaccagccugccccgcugcuggcugaucuccaacggcagcuaccugaacgagacgaaguucuccgacgacaucgagcagcaggccgacaacaugaucaccgagaugcuccagaaggaguacaucgaccggcaggggaagacgccccugggccuggucgaccuguucguguucagcaccuccuucuaccucaucagcaucuuccugcaccuggugaagaucccgacccaccgccacaucgucgggaagcccugccccaagccccaccggcucaaccacaugggcaucugcuccugcgggcuguacaagcagccgggcgugcccgugcgcuggaagcgguga

SEQ ID NO: 22985 - RNA, 1476 nt, Artificial Sequence
  derived and/or modified CDS sequence (opt1) from LASV(AV;Clade V)__CCA30314__GPCmut2
augggccagaucgugaccuucuuccaggaggucccccacgugaucgaggaggugaugaacaucguccugaucgcccucagcauccuggccgugcugaaggggcucuacaacaucgcgaccugcggccugaucgggcugaucacguuccuccugcugugcggccgcuccugcagcuccaaccucuacaaggggguguacgagcugcagagccuggaccucaacauggagacccugaacaugugcaugccgcuguccugcaccaagaacaacagccaccacuacauccgggucggcaacgacacgggccucgagcugacccugaccaacaccuccauccucaaccacaaguucugcaaccugagcgacgcccacaagaaggaccuguacgaccacgcccucauguccaucaucagcacguuccaccuguccauccccaacuucaaccaguacgaggccaugagcugcgacuucaacgggggcaagaucuccgugcaguacaaccugagccacuccuacgccaucgacgcggccaaccacugcgggaccguggccaacggcauccuccagaccuucaugcgcauggccuggggcgggagcuacaucgcgcuggacuccggccgggggaacugggacugcaucaugaccagcuaccaguaccugaucauccagaacacgaccugggagaaccacugccaguucucccgccccagccccaucggcuaccucgggcugcugagccagcggacccgcgacaucuacaucucccggcgccgccggggcaccuucacguggacccugagcgacuccgagggcaacgccacccccgggggcuacugccucacccgguggaugcugaucgaggccgagcugaagugcuucgggaacacggccgucgccaagugcaacgagaagcacgacgaggaguucugcgacaugcuccgccuguucgacuucugcaagcaggcgaucagccggcugaagucccccgcccagaugagcauccagcucaucaacaaggccgugaacgcccugaucaacgaccagcugaucaugaagaaccaccuccgcgacaucaugggcauccccuacugcaacuacuccaaguacugguaccugaaccacaccaucaccgggaagaccagccugcccaagugcuggcucguguccaacggcagcuaccugaacgagacgcacuucuccgacgacaucgagcagcaggccgacaacaugaucaccgagaugcugcagaaggaguacauggagcggcagggcaagaccccgcucgggcuggucgaccuguucguguucagcaccuccuucuaccugaucagcaucuuccuccgccuggugaagaucccgacgcaccggcacaucgucggcaagcccugccccaagccccaccgccugaaccacauggggaucugcuccugcggccucuacaagcagccgggggugcccgugcgguggaagcgcuga

SEQ ID NO: 22986 - RNA, 1473 nt, Artificial Sequence
  derived and/or modified CDS sequence (opt1) from LASV(Togo/2016/7082;Clade VI)__AMR44577__GPCmut2
augggccagaucaucaccuucuuccaggaggugccccacgucaucgaggaggugaugaacaucgugcugaucgcccucagccugcuggccauccucaagggggucuacaacguggcgaccugcggcaucaucgggcuggugacguuccuguuccucugcggccgcuccugcagccugaucuacaagggguccuacgagcugcagacccucgagcugaacauggagacccugaacaugugcaugccgcucagcugcacgaagaacuccagccaccacuacauccgggucggcaacgagaccggccuggagcugacccucaccaacacguccaucaucaaccacaaguucugcaaccugagcgacgcccacaagcgcaaccuguacgaccacgcccucauguccauccugagcaccuuccaccuguccauccccaacuucaaccaguacgaggccaugagcugcgacuucaacgggggcaagaucuccgugcaguacaaccucagccacgccuacgcgguggacgccgccgagcacugcgggaccgucgccaacggcgugcugcagaccuucaugcggauggcguggggcggguccuacaucgcccuggacagcggccgcgggaacugggacugcaucaugacguccuaccaguaccucaucauccagaacaccaccugggaggaccacugccaguucagccggcccucccccaucggcuaccuggggcugcucagccagcgcacccgggacaucuacaucagccgccggcgccggggcacguucaccuggacccucuccgacagcgagggcaacgagacccccgggggcuacugccugacgcgcuggaugcugaucgaggccgagcucaagugcuucgggaacaccgccguggccaagugcaacgagaagcacgacgaggaguucugcgacaugcugcggcuguucgacuucugcaagcaggcgauccagcgccucaagucccccgcccagaugagcauccagcugaucaacaaggccgucaacgcccugaucaacgaccagcucaucaugaagaaccaccuccgggacaugaugggcauccccuacugcaacuacuccaaguacugguaccugaaccacaccagcuccgggcgcaccagccugcccaagugcuggcugguguccaacggcagcuaccugaacgagacgcacuucuccgacgacaucgagcagcaggccgacaacaugaucaccgagaugcuccagaaggaguacaucgaccggcagggcaagaccccgcuggggcugguggaccucuucgucuucagcaccuccuucuaccugaucagcaucuuccugcaccugaucaagaucccgacgcaccgccacaucgugggcaagcccugccccaagccccaccggcucaaccacauggggaucugcuccugcggccuguacaagcagccgggggugcccacccgcuggaagcgguga

SEQ ID NO: 22987 - RNA, 1473 nt, Artificial Sequence
  derived and/or modified CDS sequence (opt1) from LASV(KAK-428;Clade n.d. (VII))__ANH09740__GPCmut2
augggccagaucgugaccuucuuccaggaggucccccacgugaucgaggaggugaugaacaucguccugaucgcccucagccugcuggccauccucaaggggcuguacaacuucgcgaccugcggcgugaucgggcugaucacguuccuccugcugugcggccgcuccugcagcgccaccuacaaggggcaguacgagcuccagacccuggagcugaacauggagucccucaacaugugcaugccgcugagcugcacgaagaacaacucccaccacuacauccgggccggcaacaacaccggccuggagcucacccugaccaacacgagcaucaucucccacaaguucugcaaccugagcgacgcccacaagaagaaccucuacgaccacacccugauguccaucaucaccaccuuccaccugagcauccccaacuucaaccaguacgaggccauguccugcgacuucaacgggggcaagaucagcauccaguacaaccucucccacagcuacgcgggggacgccgcccagcacugcggcacgguggccaacgggguccugcagaccuucaugcgcauggcguggggcggcuccuaccuggcccucgacagcgggcggcgcggcugggacugcaucaucuccagcuaccaguaccugaucauccagaacaccaccugggacgaccacugccaguucucccggcccagccccaucggguaccugggcuucgugagccagaagacgcgcgacaucuacaucucccggcgccgccggggcaccuucaccuggacccugagcgacuccgaggggcacgacaugccgggcggguacugccucacgcgguggaugcugaucgaggccgaccugaagugcuucggcaacaccgccguggccaagugcaacgagaagcacgacgaggaguucugcgacauguggcgccucuucgacuucugcaagcaggcgauccagcggcugaaggcccccgcccagaugaacauccagcugaucaacaaggccgucaacgcccucaucaacgaccagcugaugaugaagaaccaccuccgcgacaucauggggauccccuacugcaacuacagcaaguucugguaccugaacaacaccaccacgggccggaccucccugccccgcugcuggcugaucagcaacggcuccuaccucaacgagacccacuucagcgacgacaucgagcagcaggcggacaacaugaucaccgagaugcugcagaaggaguacauggaccggcaggggaagacgccccugggccucguggaccuguucguguucuccaccagcuucuaccugaucaccaucuuccuccaccuggucaagaucccgacccaccgccacaucguggggaagcccugccccaagccccaccggcugaaccacaugggcaucugcuccugcgggcuguacaagcagccgggcgugcccguccgcuggaagcgguga

SEQ ID NO: 22988 - RNA, 1473 nt, Artificial Sequence; identical to SEQ ID NO: 22982
  derived and/or modified CDS sequence (opt1) from LASV(Pinneo-NIG-1969;Clade I)__AIT17836__GPCmut2

SEQ ID NO: 22989 - RNA, 1473 nt, Artificial Sequence
  derived and/or modified CDS sequence (opt1) from LASV(ISTH0009-NIG-2011;Clade II)__AIT17404__GPCmut2
augggccagaucaucaccuucuuccaggaggugccccacgucaucgaggaggugaugaacaucgugcugaucgcccucagccugcuggccauccucaaggggaucuacaacgucgcgaccugcggccuguucgggcugguguccuuccuccugcugugcggccgcagcugcuccacgaccuacaaggggguguacgagcuccagacccuggagcuggacauggccagccucaacaugugcaugccgcuguccugcacgaagaacaacagccaccacuacaucauggucggcaacgagaccggccuggagcucacccugaccaacacguccaucaucaaccacaaguucugcaaccugagcgacgcccacaagaagaaccucuacgaccacgcccugauguccaucaucagcaccuuccaccuguccauccccaacuucaaccaguacgaggccaugagcugcgacuucaacgggggcaagaucuccgugcaguacaaccucagccacgcguacgccguggacgccgccaaccacugcgggaccaucgcgaacggcguccugcagaccuucaugcggauggccuggggcggguccuacaucgcccuggacagcggcaagggguccugggacugcaucaugacgagcuaccaguaccucaucauccagaacaccaccugggaggaccacugccaguucucccgccccagccccaucggcuaccuggggcugcucagccagcggacccgcgacaucuacaucucccggcgccgccggggcacguucaccuggacccucagcgacuccgagggcaacgagacccccgggggcuacugccugacgcgguggaugcugaucgaggccgagcucaagugcuucgggaacaccgccguggcgaagugcaacgagaagcacgacgaggaguucugcgacaugcugcgccuguucgacuucugcaagcaggccauccggcgccucaagacccccgcccagaugagcauccagcugaucaacaaggccgugaacgcccugaucaacgaccagcucaucaugaagaaccaccuccgggacaucaugggcaucccguacugcaacuacuccaaguacugguaccugaaccacaccgucacggggaagaccagccugccccgcugcuggcugguguccaacggcagcuaccugaacgagacccacuucuccgacgacaucgagcagcaggcggacaacaugaucaccgagcuccugcagaaggaguacauggaccggcagggcaagacgccccuggggcucguggaccuguucgucuucagcaccuccuucuaccugaucagcaucuuccugcaccucaucaagaucccgacccaccgccacaucaccggcaagcccugccccaagccccaccggcugaaccacauggggaucugcuccugcggccuguacaagcacccgggggugcccgugaaguggaagcgcuga

SEQ ID NO: 22990 - RNA, 1473 nt, Artificial Sequence
  derived and/or modified CDS sequence (opt1) from LASV(ISTH2010-NIG-2012;Clade II)__AIT17482__GPCmut2
augggccagaucaucaccuucuuccaggaggugccccacgucaucgaggaggugaugaacaucgugcugaucgcccucagccugcuggccauccucaaggggaucuacaacgucgcgaccugcggccuguucgggcugguguccuuccuccugcugugcggccgcagcugcuccacgaccuacaaggggguguacgagcuccagacccuggagcuggacauggccagccucaacaugugcaugccgcuguccugcacgaagaacaacagccaccacuacaucauggucggcaacgagaccggccuggagcucacccugaccaacacguccaucaucaaccacaaguucugcaaccugagcgacgcccacaagaagaaccucuacgaccacgcccugauguccaucaucagcaccuuccaccuguccauccccaacuucaaccaguacgaggccaugagcugcgacuucaacgggggcaagaucuccgugcaguacaaccucagccacgcguacgccguggacgccgccaaccacugcgggaccaucgcgaacggcguccugcagaccuucaugcggauggccuggggcggguccuacaucgcccuggacagcggcaagggguccugggacugcaucaugacgagcuaccaguaccucaucauccagaacaucaccugggaggaccacugccaguucucccgccccagccccaucggcuaccuggggcugcucagccagcggacccgcgacaucuacaucucccggcgccgccggggcaccuucacguggacccucagcgacuccgagggcaacgagacccccgggggcuacugccugacccgguggaugcugaucgaggccgagcucaagugcuucgggaacacggccguggcgaagugcaacgagaagcacgacgaggaguucugcgacaugcugcgccuguucgacuucugcaagcaggccauccggcgccucaagacccccgcccagaugagcauccagcugaucaacaaggccgugaacgcccugaucaacgaccagcucaucaugaagaaccaccuccgggacaucaugggcauccccuacugcaacuacuccaaguacugguaccugaaccacaccgucaccgggaagacgagccugccccgcugcuggcugguguccaacggcagcuaccugaacgagacccacuucuccgacgacaucgagcagcaggcggacaacaugaucaccgagcuccugcagaaggaguacaucgaccggcagggcaagaccccgcuggggcucguggaccuguucgucuucagcacguccuucuaccugaucagcaucuuccugcaccucgugaagaucccgacccaccgccacguggucggcaagcccugccccaagccccaccggcugaaccacauggggaucugcuccugcggccuguacaagcacccgggggugcccgugaaguggaagcgcuga

SEQ ID NO: 22991 - RNA, 1473 nt, Artificial Sequence
  derived and/or modified CDS sequence (opt1) from LASV(Lassa virus/H.sapiens-wt/NGA/2015/ISTH_0543;Clade II)__AVO03639__GPCmut2
augggccagaucaucaccuucuuccaggaggugccccacgucaucgaggaggugaugaacaucgugcugaucgcccucagccugcuggccauccucaaggggaucuacaacgucgcgaccugcggccuguucgggcugguguccuuccuccugcugugcggccgcagcugcuccacgaccuacaaggggguguacgagcuccagacccuggagcuggacauggccaaccucaacaugugcaugccgcugagcugcacgaagaacaacucccaccacuacaucauggucggcaacgagaccggccuggagcucacccugaccaacacgagcaucaucaaccacaaguucugcaaccuguccgacgcccacaagaagaaccucuacgaccacgcccugaugagcaucaucuccaccuuccaccugagcauccccaacuucaaccaguacgaggccauguccugcgacuucaacgggggcaagaucagcgugcaguacaaccucucccacaccuacgcgguggacgccgccaaccacugcgggaccaucgccaacggcguccugcagacguucaugcggauggcguggggcgggagcuacaucgcccuggacuccggcaaggggagcugggacugcaucaugaccuccuaccaguaccucgugauccagaacaccaccugggaggaccacugccaguucagccgccccucccccaucggcuaccuggggcugcucagccagcggacgcgcgacaucuacaucagccggcgccgccggggcaccuucaccuggacccucuccgacagcgagggcaacgagacgcccgggggcuacugccugacccgguggaugcugaucgaggccgagcucaagugcuucgggaacaccgccguggccaagugcaacgagaagcacgacgaggaguucugcgacaugcugcgccuguucgacuucugcaagcaggcgauccggcgccucaagacccccgcccagauguccauccagcugaucaacaaggccgucaacgcccugaucaacgaccagcucaucaugaagaaccaccuccgggacaucaugggcauccccuacugcaacuacagcaaguacugguaccugaaccacacggugaccgggaagaccucccugccccgcugcuggcuggugagcaacggcuccuaccugaacgagacccacuucagcgacgacaucgagcagcaggccgacaacaugaucacggagcuccugcagaaggaguacaucgaccggcagggcaagaccccgcuggggcucgucgaccuguucguguucuccaccagcuucuaccugaucuccaucuuccugcaccucgugaagaucccgacccaccgccacaucacgggcaagcccugccccaagccccaccggcugaaccacauggggaucugcagcugcggccuguacaagcacccggggguccccgugaaguggaagcgcuga

SEQ ID NO: 22992 - RNA, 1473 nt, Artificial Sequence
  derived and/or modified CDS sequence (opt1) from LASV(Lassa virus/H.sapiens-wt/NGA/2016/ISTH_0009;Clade II)__AVO03571__GPCmut2
augggccagaucaucaccuucuuccaggaggugccccacgucaucgaggaggugaugaacaucgugcugaucgcccucagccugcuggccauccucaaggggaucuacaacgucgcgaccugcggccugcuggggcucguguccuuccugcugcucugcggccgcagcugcuccacgaccuacaaggggguguacgagcugcagacccuggagcucgacauggccagccugaacaugugcaugccgcuguccugcacgaagaacaacagccaccacuacaucauggucggcaacgagaccggccucgagcugacccugaccaacacguccaucaucaaccacaaguucugcaaccucagcgacgcccacaagaagaaccuguacgaccacgcccugauguccaucaucagcaccuuccaccucuccauccccaacuucaaccaguacgaggccaugagcugcgacuucaacgggggccggaucuccgugcaguacaaccugagccacuccuacgcgguggacgccgccaaccacugcgggaccaucgccaacggcguccugcagaccuucaugcgcauggcguggggcgggagcuacaucgcccucgacuccggcaaggggagcugggacugcaucaugacguccuaccaguaccugaucauccagaacaccaccugggaggaccacugccaguucagccggcccagccccaucggcuaccuggggcuccugucccagcgcacccgggacaucuacaucagccgccggcgccggggcacguucaccuggacccuguccgacagcgagggcaacgagacccccgggggcuacugccugacgcgcuggaugcucaucgaggccgagcugaagugcuucgggaacaccgccguggccaagugcaacgagaagcacgacgaggaguucugcgacaugcugcggcuguucgacuucugcaagcaggcgauccgccggcugaagacccccgcccagauguccauccagcugaucaacaaggccgugaacgcccucaucaacgaccagcugaucaugaagaaccaccuccgcgacaucaugggcaucccguacugcaacuacagcaaguacugguaccucaaccacaccgucacggggaagaccucccugccccggugcuggcuggugagcaacggcuccuaccucaacgagacccacuucagcgacgacaucgagcagcaggccgacaacaugaucaccgagcugcugcagaaggaguacaucgaccgccagggcaagacgccccucgggcugguggaccuguucgucuucuccaccagcuucuaccugaucuccaucuuccuccaccuggugaagaucccgacccaccggcacaucaccggcaagcccugccccaagccccaccgccugaaccacauggggaucugcagcugcggccucuacaaccacccgggggugcccgucaaguggaagcgguga

SEQ ID NO: 22993 - RNA, 1473 nt, Artificial Sequence
  derived and/or modified CDS sequence (opt1) from LASV(Lassa virus/H.sapiens-wt/NGA/2016/ISTH_0017;Clade II)__AVO03567__GPCmut2
augggccagaucaucaccuucuuccaggaggugccccacgucaucgaggaggugaugaacaucgugcugaucgcccucagccugcuggccauccucaaggggaucuacaacgucgcgaccugcggccuguucgggcugguguccuuccuccugcugugcggccgcagcugcuccacgaccuacaaggggguguacgagcuccagacccuggagcuggacauggccagccucaacaugugcaugccgcuguccugcacgaagaacaacagccaccacuacaucauggucggcaacgagaccggccuggagcucacccugaccaacacguccaucaucaaccacaaguucugcaaccugagcgacgcccacaagaagaaccucuacgaccacgcccugauguccaucaucagcaccuuccaccuguccauccccaacuucaaccaguacgaggccaugagcugcgacuucaacgggggcaagaucuccgugcaguacaaccucagccacaccuacgcgaucgacgccgccaaccacugcgggaccaucgccaacggcgugcugcagacguucaugcggauggcguggggcggguccuacaucgcccuggacagcggcaagggguccugggacugcaucaugaccagcuaccaguaccucaucauccagaacaccaccugggaggaccacugccaguucucccgccccagccccaucggcuaccuggggcugcucagccagcggacgcgcgacaucuacaucucccggcgccgccggggcaccuucaccuggacccucagcgacuccgagggcaacgagacgcccgggggcuacugccugacccgguggaugcugaucgaggccgagcucaagugcuucgggaacaccgccgucgccaagugcaacgagaagcacgacgaggaguucugcgacaugcugcgccuguucgacuucugcaagcaggcgauccggcgccucaagacccccgcccagaugagcauccagcugaucaacaaggccgugaacgcccugaucaacgaccagcucaucaugaagaaccaccuccgggacaucaugggcauccccuacugcaacuacuccaaguacugguaccugaaccacacggugaccgggaagaccagccugccccgcugcuggcuggucuccaacggcagcuaccugaacgagacccacuucuccgacgacaucgagcagcaggccgacaacaugaucacggagcuccugcagaaggaguacauggaccggcagggcaagaccccgcuggggcucguggaccuguucguguucagcaccuccuucuaccugaucagcaucuuccugcaccucguccgcaucccgacccaccggcacgugaucggcaagcccugccccaagccccaccgccugaaccacauggggaucugcuccugcggccuguacaagcacccgggggugcccgucaaguggaagcgguga

SEQ ID NO: 22994 - RNA, 1473 nt, Artificial Sequence
  derived and/or modified CDS sequence (opt1) from LASV(Lassa virus/H.sapiens-wt/NGA/2018/ISTH_0959;Clade II)__AVV65099__GPCmut2
augggccagaucaucaccuucuuccaggaggugccccacgucaucgaggaggugaugaacaucgugcugaucgcccucagccugcuggccauccucaaggggaucuacaacgucgugaccugcggccuguucgggcugguguccuuccuccugcugugcggccgcagcugcuccacgaccuacaagggggucuacgagcuccagacccuggagcuggacauggcgagccucaacaugugcaugccgcuguccugcacgaagaacaacagccaccacuacaucauggugggcaacgagaccggccuggagcucacccugaccaacacguccaucaucaaccacaaguucugcaaccugagcgacgcccacaagaagaaccucuacgaccacgcccugauguccaucaucagcaccuuccaccuguccauccccaacuucaaccaguacgaggccaugagcugcgacuucaacgggggcaagaucuccgugcaguacaaccucagccacgccuacgcgaucgacgccgccaaccacugcgggaccaucgccaacggcguccugcagaccuucaugcggauggcguggggcggguccuacaucgcccuggacagcggcaagggguccugggacugcaucaugacgagcuaccaguaccucaucauccagaacaccaccugggaggaccacugccaguucucccgccccagccccaucggcuaccuggggcugcucagccagcggacccgcgacaucuacaucucccggcgccgccggggcacguucaccuggacccucagcgacuccgagggcaacgagacccccgggggcuacugccugacgcgguggaugcugaucgaggccgagcucaagugcuucgggaacaccgccguggccaagugcaacgagaagcacgacgaggaguucugcgacaugcugcgccuguucgacuucugcaagcaggcgauccggcgccucaagacccccgcccagaugagcauccagcugaucaacaaggccgugaacgcccugaucaacgaccagcucaucaugaagaaccaccuccgggacaucaugggcaucccguacugcaacuacuccaaguacugguaccugaaccacaccgucacggggaagaccagccugccccgcugcuggcugguguccaacggcagcuaccugaacgagacccacuucuccgacgacaucgagcagcaggccgacaacaugaucaccgagcuccugcagaaggaguacaucgaccggcagggcaagacgccccuggggcucguggaccuguucgucuucagcaccuccuucuaccugaucagcaucuuccugcaccucgugaagaucccgacccaccgccacgugaucggcaagcccugccccaagccccaccggcugaaccacauggggaucugcuccugcggccuguacaagcacccggggguccccgugaaguggaagcgcuga

SEQ ID NO: 22995 - RNA, 1473 nt, Artificial Sequence
  derived and/or modified CDS sequence (opt1) from LASV(LASV003-NIG-2008;Clade II)__AIT17580__GPCmut2
augggccagaucaucaccuucuuccaggaggugccccacgucaucgaggaggugaugaacaucgugcugaucgcccucagccugcuggccauccucaaggggaucuacaacgucgcgaccugcggccuguucgggcugguguccuuccuccugcugugcggccgcagcugcuccacgaccuacaaggggguguacgagcuccagacccuggagcuggacauggccagccucaacaugugcaugccgcuguccugcacgaagaacaacagccaccacuacaucauggucggcaacgagaccggccuggagcucacccugaccaacacguccaucaucaaccacaaguucugcaaccugagcgacgcccacaagaagaaccucuacgaccacgcccugauguccaucaucagcaccuuccaccuguccauccccaacuucaaccaguacgaggccaugagcugcgacuucaacgggggcaagaucuccgugcaguacaaccucagccacaccuacgcgguggacgccgccaaccacugcgggaccaucgccaacggcguccugcagacguucaugcggauggcguggggcggguccuacaucgcccuggacagcggcaagggguccugggacugcaucaugaccagcuaccaguaccucaucauccagaacaccaccugggaggaccacugccaguucucccgccccagccccaucggcuaccuggggcugcucagccagcggacgcgcgacaucuacaucucccggcgccgccggggcaccuucaccuggacccucagcgacuccgagagcaacgagacgccgggcggguacugccugacccgguggaugcugaucgaggccgagcucaagugcuucggcaacaccgccguggccaagugcaacgagaagcacgacgaggaguucugcgacaugcugcgccuguucgacuucugcaagcaggcgauccggcgccucaaggcccccgcccagauguccauccagcugaucaacaaggccgugaacgcccugaucaacgaccagcucaucaugaagaaccaccuccgggacaucauggggauccccuacugcaacuacagcaaguacugguaccugaaccacaccgucacgggccgcaccucccugccccggugcuggcuggugagcaacggguccuaccugaacgagacccacuucagcgacgacaucgagcagcaggcggacaacaugaucaccgagcuccugcagaaggaguacauggaccgccagggcaagacgccccugggccucguggaccuguucgucuucuccaccagcuucuaccugaucuccaucuuccugcaccucgugaagaucccgacccaccggcacgugaucgggaagcccugccccaagccccaccgccugaaccacaugggcaucugcagcugcgggcuguacaagcacccgggcguccccgugaaguggaagcgguga

SEQ ID NO: 22996 - RNA, 1473 nt, Artificial Sequence
  derived and/or modified CDS sequence (opt1) from LASV(LASV035-NIG-2009;Clade II)__AIT17588__GPCmut2
augggccagaucaucaccuucuuccaggaggugccccacgucaucgaggaggugaugaacaucgugcugaucgcccucagccugcuggccauccucaaggggaucuacaacgucgcgaccugcggccuguucgggcugguguccuuccuccugcugugcggccgcagcugcuccacgaccuacaaggggguguacgagcuccagacccuggagcuggacauggccagccucaacaugugcaugccgcuguccugcacgaagaacaacagccaccacuacaucauggucggcaacgagaccggccuggagcucacccugaccaacacguccaucaucaaccacaaguucugcaaccugagcgacgcccacaagaagaaccucuacgaccacgcccugauguccaucaucagcaccuuccaccuguccauccccaacuucaaccaguacgaggccaugagcugcgacuucaacgggggcaagaucuccgugcaguacaaccucagccacgcguacgccguggacgccgccaaccacugcgggaccaucgcgaacggcguccugcagaccuucaugcggauggccuggggcggguccuacaucgcccuggacagcggcaagggguccugggacugcaucaugacgagcuaccaguaccucaucauccagaacaccaccugggaggaccacugccaguucucccgccccagccccaucggcuaccuggggcugcucagccagcggacccgcgacaucuacaucucccggcgccgccggggcacguucaccuggacccucagcgacuccgagggcaacgagacccccgggggcuacugccugacgcgguggaugcugaucgaggccgagcucaagugcuucgggaacaccgccguggcgaagugcaacgagaagcacgacgaggaguucugcgacaugcugcgccuguucgacuucugcaagcaggccauccggcgccucaaggcccccgcccagaugagcauccagcugaucaacaaggccgugaacgcgcugaucaacgaccagcucaucaugaagaaccaccuccgggacaucaugggcauccccuacugcaacuacuccaaguacugguaccugaaccacaccgucaccgggaagacgagccugccccgcugcuggcugguguccaacggcagcuaccugaacgagacccacuucuccgacgacaucgagcagcaggccgacaacaugaucaccgagcuccugcagaaggaguacaucgaccggcagggcaagaccccgcuggggcucguggaccuguucgucuucagcacguccuucuaccugaucagcaucuuccugcaccucgugaagaucccgacccaccgccacgugaucggcaagcccugccccaagccccaccggcugaaccacauggggaucugcuccugcggccuguacaagcacccggggguccccgugaaguggaagcgcuga

SEQ ID NO: 22997 - RNA, 1473 nt, Artificial Sequence
  derived and/or modified CDS sequence (opt1) from LASV(LASV1000-NIG-2009;Clade II)__AIT17782__GPCmut2
augggccagaucaucaccuucuuccaggaggugccccacgucaucgaggaggugaugaacaucgugcugaucgcccucagccugcuggccauccucaaggggaucuacaacgucgcgaccugcggccuguucgggcugguguccuuccuccugcugugcggccgcagcugcuccacgaccuacaaggggguguacgagcuccagacccuggagcuggacauggccagccucaacaugugcaugccgcuguccugcacgaagaacaacagccaccacuacaucauggucggcaacgagaccggccuggagcucacccugaccaacacguccaucaucaaccacaaguucugcaaccugagcgacgcccacaagaagaaccucuacgaccacgcccugauguccaucaucagcaccuuccaccuguccauccccaacuucaaccaguacgaggccaugagcugcgacuucaacgggggcaagaucuccgugcaguacaaccucagccacaccuacgcgguggacgccgccaaccacugcgggaccaucgccaacggcguccugcagacguucaugcggauggcguggggcggguccuacaucgcccuggacagcggcaagggguccugggacugcaucaugaccagcuaccaguaccucaucauccagaacaccaccugggaggaccacugccaguucucccgccccagccccaucggcuaccuggggcugcucagccagcggacgcgcgacaucuacaucucccggcgccgccggggcaccuucaccuggacccucagcgacuccgagggcaacgagacgcccgggggcuacugccugacccgguggaugcugaucgaggccgagcucaagugcuucgggaacaccgccguggccaagugcaacgagaagcacgacgaggaguucugcgacaugcugcgccuguucgacuucugcaagcaggcgaucaagcggcucaagacccccgcccagaugagcauccagcugaucaacaaggccgugaacgcccugaucaacgaccagcucaucaugaagaaccaccuccgcgacaucaugggcauccccuacugcaacuacuccaaguacugguaccugaaccacacggucaccgggaagaccagccugccccggugcuggcugguguccaacggcagcuaccugaacgagacccacuucuccgacgacaucgagcagcaggccgacaacaugaucacggagcuccugcagaaggaguacaucgaccgccagggcaagaccccgcuggggcucguggaccuguucgucuucagcaccuccuucuaccugaucagcaucuuccugcaccucgugaagaucccgacccaccggcacguggucggcaagcccugccccaagccccaccgccugaaccacauggggaucugcuccugcggccuguacaagcacccgggggugcccgugaaguggaagcgguga

SEQ ID NO: 22998 - RNA, 1473 nt, Artificial Sequence
  derived and/or modified CDS sequence (opt1) from LASV(LASV221-NIG-2010;Clade II)__AIT17624__GPCmut2
augggccagaucaucaccuucuuccaggaggugccccacgucaucgaggaggugaugaacaucgugcugaucgcccucagccugcuggccauccucaaggggaucuacaacgucgcgaccugcggccuguucgggcugguguccuuccuccugcugugcggccgcagcugcuccacgaccuacaaggggguguacgagcuccagacccuggagcuggacauggccagccucaacaugugcaugccgcuguccugcacgaagaacaacagccaccacuacaucauggucggcaacgagaccggccuggagcucacccugaccaacacguccaucaucaaccacaaguucugcaaccugagcgacgcccacaagaagaaccucuacgaccacgcccugauguccaucaucagcaccuuccaccuguccauccccaacuucaaccaguacgaggccaugagcugcgacuucaacgggggcaagaucuccgugcaguacaaccucagccacaccuacgcgaucgacgccgccaaccacugcgggaccaucgccaacggcgugcugcagacguucaugcggauggcguggggcggguccuacaucgcccuggacagcggcaagggguccugggacugcaucaugaccagcuaccaguaccucaucauccagaacaccaccugggaggaccacugccaguucucccgccccagccccaucggcuaccuggggcugcucagccagcggacgcgcgacaucuacaucucccggcgccgccggggcaccuucaccuggacccucagcgacuccgagggcaacgagacgcccgggggcuacugccugacccgguggaugcugaucgaggccgagcucaagugcuucgggaacaccgccgucgccaagugcaacgagaagcacgacgaggaguucugcgacaugcugcgccuguucgacuucugcaagcaggcgauccggcgccucaagacccccgcccagaugagcauccagcugaucaacaaggccgugaacgcccugaucaacgaccagcucaucaugaagaaccaccuccgggacaucaugggcauccccuacugcaacuacuccaaguacugguaccugaaccacacggugaccgggaagaccagccugccccgcugcuggcuggucuccaacggcagcuaccugaacgagacccacuucuccgacgacaucgagcagcaggccgacaacaugaucacggagaugcuccagaaggaguacauggaccggcagggcaagaccccgcuggggcugguggaccucuucguguucagcaccuccuucuaccugaucagcaucuuccugcaccuggucaagaucccgacccaccgccacgugaucggcaagcccugccccaagccccaccggcucaaccacauggggaucugcuccugcggccuguacaagcacccgggggugcccgucaaguggaagcgcuga

SEQ ID NO: 22999 - RNA, 1473 nt, Artificial Sequence
  derived and/or modified CDS sequence (opt1) from LASV(LASV237-NIG-2010;Clade II)__AIT17638__GPCmut2
augggccagaucaucaccuucuuccaggaggugccccacgucaucgaggaggugaugaacaucgugcugaucgcccucagccugcuggccauccucaaggggaucuacaacgucgcgaccugcggccuguucgggcugguguccuuccuccugcugugcggccgcagcugcuccacgaccuacaaggggguguacgagcuccagacccuggagcuggacauggccagccucaacaugugcaugccgcuguccugcacgaagaacaacagccaccacuacaucauggucggcaacgagaccggccuggagcucacccugaccaacacguccaucaucaaccacaaguucugcaaccugagcgacgcccacaagaaggaccucuacgaccacgcccugauguccaucaucagcaccuuccaccuguccauccccaacuucaaccaguacgaggccaugagcugcgacuucaacgggggcaagaucuccgugcaguacaaccucagccacaccuacgcgguggacgccgccaaccacugcgggaccaucgccaacggcguccugcagacguucaugcggauggcguggggcggguccuacaucgcccuggacagcggcaagggguccugggacugcaucaugaccagcuaccaguaccucaucauccagaacaccaccugggaggaccacugccaguucucccgccccagccccaucggcuaccuggggcugcucagccagcggacgcgcgacaucuacaucucccggcgccgccggggcaccuucaccuggacccucagcgacuccgagggcaacgagacgcccgggggcuacugccugacccgguggaugcugaucgaggccgagcucaagugcuucgggaacaccgccguggccaagugcaacgagaagcacgacgaggaguucugcgacaugcugcgccuguucgacuucugcaagcaggcgauccggcgccucaagacccccgcccagaugagcauccagcugaucaacaaggccgugaacgcccugaucaacgaccagcucaucaugaagaaccaccuccgggacaucaugggcauccccuacugcaacuacuccaaguacugguaccugaaccacacggucaccgggaagaccagccugccccgcugcuggcugguguccaacggcagcuaccugaacgagacccacuucuccgacgacaucgagcagcaggccgacaacaugaucacggagcuccugcagaaggaguacauggaccggcagggcaagaccccgcuggggcucguggaccuguucgucuucagcaccuccuucuaccugaucagcaucuuccugcaccucaucaagaucccgacccaccgccacaucacgggcaagcccugccccaagccccaccggcugaaccacauggggaucugcuccugcggccuguacaagcacccgggggugcccgugaaguggaagcgcuga

SEQ ID NO: 23000 - RNA, 1473 nt, Artificial Sequence
  derived and/or modified CDS sequence (opt1) from LASV(LASV253-NIG-2011;Clade II)__AIT17670__GPCmut2
augggccagaucaucaccuucuuccaggaggugccccacgucaucgaggaggugaugaacaucgugcugaucgcccucagccugcuggccauccucaaggggaucuacaacgucgcgaccugcggccuguucgggcugguguccuuccuccugcugugcggccgcagcugcuccacgaccuacaaggggguguacgagcuccagacccuggagcuggacauggccagccucaacaugugcaugccgcuguccugcacgaagaacaacagccaccacuacaucauggucggcaacgagaccggccuggagcucacccugaccaacacguccaucaucaaccacaaguucugcaaccugagcgacgcccacaagaagaaccucuacgaccacgcccugauguccaucaucagcaccuuccaccuguccauccccaacuucaaccaguacgaggccaugagcugcgacuucaacgggggcaagaucuccgugcaguacaaccucagccacaccuacgcgguggacgccgccaaccacugcgggaccaucgccaacggcguccugcagacguucaugcggauggcguggggcggguccuacaucgcccuggacagcggcaagggguccugggacugcaucaugaccagcuaccaguaccucaucauccagaacaccaccugggaggaccacugccaguucucccgccccagccccaucggcuaccuggggcugcucagccagcggacgcgcgacaucuacaucucccggcgccgccggggcaccuucaccuggacccucagcgacuccgagggcaacgagacgcccgggggcuacugccugacccgguggaugcugaucgaggccgagcucaagugcuucgggaacaccgccguggccaagugcaacgagaagcacgacgaggaguucugcgacaugcugcgccuguucgacuucugcaagcaggcgauccggcgccucaaggcccccgcccagaugagcauccagcugaucaacaaggccgugaacgcccugaucaacgaccagcucaucaugaagaaccaccuccgggacaucaugggcaucccguacugcaacuacuccaaguacugguaccugaaccacaccgucacggggcgcaccagccugccccggugcuggcugguguccaacggcagcuaccugaacgagacccacuucuccgacgacaucgagcagcaggcggacaacaugaucaccgagcuccugcagaaggaguacaucgaccgccagggcaagacgccccuggggcucguggaccuguucgucuucagcaccuccuucuaccugaucagcaucuuccugcaccucgugaagaucccgacccaccggcacaucaucggcaagcccugccccaagccccaccgccugaaccacauggggaucugcuccugcggccuguacaagcacccgggggugcccgucaaguggaagcgguga

SEQ ID NO: 23001 - RNA, 1473 nt, Artificial Sequence
  derived and/or modified CDS sequence (opt1) from LASV(LASV254-NIG-2011;Clade II)__AIT17674__GPCmut2
augggccagaucaucaccuucuuccaggaggugccccacgucaucgaggaggugaugaacaucgugcugaucgcccucagccugcuggccauccucaaggggaucuacaacgucgcgaccugcggccuguucgggcugguguccuuccuccugcugugcggccgcagcugcuccacgaccuacaaggggguguacgagcuccagacccuggagcuggacaugaccaaccucaacaugugcaugccgcugagcugcaccaagaacaacucccaccacuacaucauggucggcaacgagaccggccuggagcucacccugacgaacaccagcaucaucaaccacaaguucugcaaccuguccgacgcccacaagaagaaccucuacaaccacgcccugaugagcaucaucuccaccuuccaccugagcauccccaacuucaaccaguacgaggccauguccugcgacuucaacgggggcaagaucagcgugcaguacaaccucucccacagcuacgccguggacgcggccaaccacugcgggaccaucgccaacggcguccugcagacguucaugcggauggccuggggcggguccuacaucgcgcuggacagcggcaaggggaacugggacugcaucaugaccuccuaccaguaccucaucauccagaacaccaccugggaggaccacugccaguucagccgccccucccccaucggcuaccuggggcugcucagccagcggacgcgcgacaucuacaucagccggcgccgccggggcaccuucaccuggacccucuccgacagcgagggcaacgagacgcccgggggcuacugccugacccgguggaugcugaucgaggccgagcucaagugcuucgggaacaccgccguggccaagugcaacgagaagcacgacgaggaguucugcgacaugcugcgccuguucgacuucugcaagcaggccauccggcgccucaagacccccgcgcaggccaacauccagcugaucaacaaggccgugaacgcccugaucaacgaccagcucaucaugaagaaccaccuccgggacaucaugggcauccccuacugcaacuacuccaaguacugguaccugaaccacacggucaccgggaagaccagccugccccgcugcuggcugguguccaacggcagcuaccugaacgagacccacuucuccgacgacaucgagcagcaggccgacaacaugaucacggagcuccugcagaaggaguacauggaccggcagggcaagaccccgcuggggcucguggaccuguucgucuucagcaccuccuucuaccugaucagcaucuuccugcaccucgugaagaucccgacccaccgccacgugaucggcaagcccugccccaagccccaccggcugaaccacauggggaucugcuccugcggccuguacaagcacccggggguccccgugaaguggaagcgcuga

SEQ ID NO: 23002 - RNA, 1473 nt, Artificial Sequence
  derived and/or modified CDS sequence (opt1) from LASV(Nig08-A19;Clade III)__ADU56618__GPCmut2
augggccagaucgugaccuucuuccaggaggucccccacgugaucgaggaggugaugaacaucguccugaucgcccucagcauccuggccauccugaaggggcucuacaacaucgcgaccugcggccugaucgggcuggugacguuccuccugcuguccggccgcagcugcuccaugaccuacaaggggguguacgagcuccagacccuggagcugaacaugaacacccucaacaugugcaugccgcugagcugcaccaagaacaacucccaccacuacaucauggucggcaacgagaccggccuggagcucacccugacgaacaccagccugcuccaccacaaguucugcaaccuguccgacgcccacaagaagaaccuguacgaccacacccucaugagcaucaucuccaccuuccaccugagcauccccaacuucaaccaguacgaggccauguccugcgacuucaacgggggcaagaucacggugcaguacaaccugagccacuccuacgccaucgacgccgcgaaccacugcgggaccguggccaacggcguccuccagaccuucaugcggauggccuggggcgggagcuacaucgcccuggacuccggccgcgggaagugggacugcaucaugaccagcuaccaguaccugaucauccagaacacgaccugggaggaccacugccaguucucccggcccagccccaucggcuaccucgggcugcugucccagcgcacccgggacaucuacaucagccgccggcgccggggcaccuucacguggacccugagcgacuccgagggcaacgagacccccgggggcuacugccucacccgcuggaugcugaucgaggcggagcugaagugcuucgggaacacggccguggccaagugcaacgagaagcacgacgaggaguucugcgacaugcuccggcuguucgacuucugcaagcaggccauccgccggcugaaggcccccgcgcagaugagcauccagcucaucaacaaggccgugaacgcccugaucaacgaccagcugaucaugaagaaccaccuccgcgacaucaugggcauccccuacugcaacuacuccaaguacugguaccugaaccacaccagcaccgggcggaccucccugccccgcugcuggcucgucagcaacggcuccuaccugaacgagacgcacuucagcgacgacaucgagcagcaggccgacaacaugaucaccgagaugcugcagaaggaguaccucgaccggcagggcaagaccccgcuggggcugguggaccuguucguguucuccaccagcuucuaccucaucuccaucuuccugcaccuggucaagaucccgacgcaccgccacaucgugggcaagcccugccccaagccccaccggcucaaccacauggggaucugcagcugcggccuguacaagcagccgggggugcccguccgcuggaagcgguga

SEQ ID NO: 23003 - RNA, 1476 nt, Artificial Sequence
  derived and/or modified CDS sequence (opt1) from LASV(G1180-SLE-2010;Clade IV)__AIT17168__GPCmut2
augggccagaucgugaccuucuuccaggaggucccccacgugaucgaggaggugaugaacaucguccugaucgcccucagcauccuggccgugcugaaggggcucuacaacuucgcgaccugcggccugguggggcugcucaccuuccugcugcucugcggccgcuccugcaccgccagccgguacaagggggucuacgagcugcagacccuggagcucaacauggagacccugaacaugugcaugccgcuguccugcaccaagaacaacagccaccacuacaucauggugggcaacgagaccggccucgagcugacccugacgaacaccuccaucaucaaccacaaguucugcaaccucagcgacgcccacaagaagaaccuguacgaccacgcccugauguccaucaucagcaccuuccaccucuccauccccaacuucaaccaguacgaggccaugagcugcgacuucaacgggggcaagaucuccgugcaguacaaccugagccacuccuacgcgggggacgccgccaaccacugcggcaccgucgccaacggggugcugcagacguucaugcgcauggcguggggcggcagcuacaucgcccucgacuccgggcacggcagcugggacugcaucaugaccuccuaccaguaccugaucauccagaacaccaccugggaggaccacugccaguucagccggcccucccccaucggguaccugggccuccugagccagcgcacgcgggacaucuacaucagccgccggcgccggggcaccuucaccuggacccuguccgacagcgaggggaaggacacgccgggcggguacugccugacccgcuggaugcucaucgaggccgagcugaagugcuucggcaacaccgccguggccaagugcaacgagaagcacgacgaggaguucugcgacaugcugcggcuguucgacuucugcaagcaggcgauccagcgccugaaggcccccgcccagauguccauccagcugaucaacaaggccgucaacgcccucaucaacgaccagcugaucaugaagaaccaccuccgggacaucauggggauccccuacugcaacuacagcaaguacugguaccucaaccacaccacgaccggcaagaccucccugcccaagugcuggcuggugagcaacggcuccuaccucaacgagacccacuucagcgacgacaucgagcagcaggcggacaacaugaucacggagaugcugcagaaggaguacauggagcgccaggggaagacgccccugggccucguggaccuguucgucuucuccaccagcuucuaccugaucuccaucuuccugcaccucgugaagaucccgacccaccggcacaucgugggcaagagcugccccaagccccaccgccugaaccacauggggaucugcuccugcgggcuguacaagcagcccggcgucccggugaaguggaagcgguga

SEQ ID NO: 23004 - RNA, 1476 nt, Artificial Sequence
  derived and/or modified CDS sequence (opt1) from LASV(G1442-SLE-2011;Clade IV)__AIT17180__GPCmut2
augggccagaucgugaccuucuuccaggaggucccccacgugaucgaggaggugaugaacaucguccugaucgcccucagcauccuggccgugcugaaggggcucuacaacguggcgaccugcggccugaucgggcuggucacguuccuccugcugugcggccgcuccugcaccaccacccucuacaaggggguguacgagcugcagacgcuggagcucaacauggagacccugaacaugugcaugccgcugagcugcaccaagaacaacucccaccacuacauccgggugggcaacgagacgggccucgagcugacccugaccaacaccagcaucaucaaccacaaguucugcaaccucuccgacgcccacaagaagaaccuguacgaccacgcccugaugagcaucaucuccacguuccaccucagcauccccaacuucaaccaguacgaggccauguccugcgacuucaacgggggcaagaucagcguccaguacaaccugucccacagcuacgccggggacgcggccaaccacugcggcaccguggccaacggggugcugcagaccuucaugcgcauggccuggggcggcuccuacaucgcgcucgacagcgggcggggcaacugggacugcaucaugaccuccuaccaguaccugaucauccagaacacgaccugggacgaccacugccaguucagccgccccucccccaucggguaccugggccuccugagccagcggacccgcgacgucuacaucucccggcgccgccggggcaccuucacguggacccugagcgacagcgaggggaaggacaccccgggcggguacugccugacccgguggaugcucaucgaggccgagcugaagugcuucggcaacacggccguggccaagugcaacgagaagcacgacgaggaguucugcgacaugcugcgccucuucgacuucugcaagcaggccauccagcggcugaaggcgcccgcccagauguccauccagcugaucaacaaggccgugaacgcccucaucaacgaccagcugaucaugaagaaccaccuccgcgacaucauggggauccccuacugcaacuacagcaaguacugguaccugaacaacaccgccaccggcaagaccucccugcccaagugcuggcugaucagcaacggcuccuaccucaacgagacgcacuucagcgacgacaucgagcaggaggcggacaacaugaucaccgagaugcugcagaaggaguacauggagcggcaggggaagacgccccugggccucgucgaccuguucguguucuccaccagcuucuaccugaucuccaucuuccugcaccucgugaagaucccgacccaccgccacaucgucggcaagagcugccccaagccccaccggcugaaccacauggggaucugcuccugcgggcuguacaagcagcccggcgugccggugcgcuggaagcgguga

SEQ ID NO: 23005 - RNA, 1476 nt, Artificial Sequence
  derived and/or modified CDS sequence (opt1) from LASV(G3010-SLE-2013;Clade IV)__AIT17344__GPCmut2
augggccagaucgugaccuucuuccaggaggucccccacgugaucgaggaggugaugaacaucguccugaucgcccucagcauccuggccgugcugaaggggcucuacaacuucgcgaccugcggccugguggggcuggucacguuccuccugcugugcggccgcuccugcaccaccagccucuacaaggggguguacgagcugcagacccuggagcucaacauggagacgcugaacaugugcaugccgcuguccugcaccaagaacaacagccaccacuacaucauggugggcaacgagaccggccucgagcugacgcugaccaacaccuccaucaucaaccacaaguucugcaaccucagcgacgcccacaagaagaaccuguacaaccacgcccugauguccaucaucagcaccuuccaccucuccauccccaacuucaaccaguacgaggccaugagcugcgacuucaacgggggcaagaucuccguccaguacaaccugagccacuccuacgccggggacgcggccagccacugcggcacgguggccaacggggugcugcagaccuucaugcggauggccuggggcggcuccuacaucgcgcucgacagcggguacggcaagugggacugcaucaugaccuccuaccaguaccugaucauccagaacaccacgugggaggaccacugccaguucagccgccccucccccaucggguaccugggccuccugagccagcggacccgcgacaucuacaucagccggcgccgccggggcaccuucaccuggacgcuguccgacagcgaggggaaggacaccccgggcggguacugccugacccgguggaugcucaucgaggccgagcugaagugcuucggcaacaccgccgucgccaagugcaacgagaagcacgacgaggaguucugcgacaugcugcgccucuucgacuucugcaagcaggccauccagcggcugaagacgcccgcgcagauguccauccagcugaucaacaaggccgugaacgcccucaucaacgaccagcugaucaugaagaaccaccuccgcgacaucauggggauccccuacugcaacuacagcaaguacugguaccugaaccacaccaccaccggcaagacgucccugcccaagugcuggcuggugagcaacggcuccuaccucaacgagacccacuucagcgacgacaucgagcagcaggccgacaacaugaucaccgagaugcugcagaaggaguacauggagcggcaggggaagacgccccugggccucgucgaccuguucguguucuccaccagcuucuaccugaucuccaucuuccugcaccucgugaagaucccgacccaccgccacaucgucggcaagagcugccccaagccccaccggcugaaccacauggggaucugcuccugcgggcuguacaagcagcccggcgugccggugcgcuggaagcgguga

SEQ ID NO: 23006 - RNA, 1476 nt, Artificial Sequence
  derived and/or modified CDS sequence (opt1) from LASV(G502-SLE-2009;Clade IV)__AIT17126__GPCmut2
augggccagaucgugaccuucuuccaggaggucccccacgugaucgaggaggugaugaacaucguccugaucgcccucagcauccuggccgugcugaaggggcucuacaacuucgcgaccugcggccugguggggcugcucacguuccugcugcucugcggccgcuccugcaccaccgggcuguacaagggcgucuacgagcugcagacccucgagcugaacauggagacgcugaacaugugcaugccgcucagcugcaccaagaacaacucccaccacuacaucauggugggcaacgagaccgggcuggagcugacgcucaccaacaccagcaucaucaaccacaaguucugcaaccuguccgacgcccacaagaagaaccuguacgaccacgcccucaugagcaucaucuccaccuuccaccugagcauccccaacuucaaccaguacgaggccauguccugcgacuucaacggcgggaagaucagcgugcaguacaaccugucccacagcuacgccggcgacgcggccgaccacugcgggacggucgccaacggcgugcuccagaccuucaugcggauggccuggggcggguccuacaucgcgcuggacagcggccgcgggcggugggacugcaucaugaccuccuaccaguaccugaucauccagaacaccacgugggaggaccacugccaguucagccgccccucccccaucggcuaccucggccugcugagccagcggacccgcgacaucuacaucucccggcgccgccgggggaccuucaccuggacgcugagcgacagcgagggcaaggacacccccgggggcuacugccucacccgguggaugcugaucgaggccgagcugaagugcuucgggaacaccgccguggccaagugcaacgagaagcacgacgaggaguucugcgacaugcuccgccuguucgacuucugcaagcaggccauccagcggcugaaggcgcccgcccagauguccauccagcucaucaacaaggccgucaacgcccugaucaacgaccagcuggugaugaagaaccaccuccgcgacaucaugggcauccccuacugcaacuacagccgguacugguaccugaaccacacgaccaccggccgcaccucccugcccaagugcuggcucgugagcaacggguccuaccugaacgagacgcacuucagcgacgacaucgagcagcaggccgacaacaugaucaccgagaugcugcagaaggaguacauggagcggcagggcaagaccccgcucgggcuggucgaccuguucguguucuccaccagcuucuaccugaucuccaucuuccuccaccuggugaagaucccgacgcaccgccacaucgucggcaagagcugccccaagccccaccggcugaaccacauggggaucugcuccugcggccucuacaagcagcccggcgugccggugaaguggaagcgcuga

SEQ ID NO: 23007 - RNA, 1476 nt, Artificial Sequence
  derived and/or modified CDS sequence (opt1) from LASV(G733-SLE-2010;Clade IV)__AIT17154__GPCmut2
augggccagaucgugaccuucuuccaggaggucccccacgugaucgaggaggugaugaacaucguccugaucgcccucagcauccuggccgugcugaaggggcucuacaacuucgcgaccugcggcaucguggggcuggucuccuuccugcuccugugcggccgcagcugcacgaccucccuguacaaggggguguacgagcuccagacccuggagcugaacauggagacccucaacaugugcaugccgcugagcugcaccaagaacaacucccaccacuacaucauggugggcaacgagaccggccuggagcucacccugacgaacaccagcaucaucaaccacaaguucugcaaccuguccgacgcccacaagaagaaccucuacgaccacgcccugaugagcaucaucuccaccuuccaccugagcauccccaacuucaaccaguacgaggccauguccugcgacuucaacgggggcaagaucagcguccaguacaaccucucccacagcuacgccggggacgcggccaaccacugcggcaccaucgccaacggggugcugcagacguucaugcggauggccuggggcggcuccuacaucgcgcuggacagcgggcgcgaccggugggacugcaucaugaccuccuaccaguaccucaucauccagaacaccaccugggaggaccacugccaguucagccgccccucccccaucggcuaccuggggcugcucagccagcggacgcgcgacaucuacaucagccggcgccgccggggcaccuucaccuggacccucuccgacagcgagggcaaggacacgcccgggggcuacugccugacccgguggaugcugaucgaggccgagcucaagugcuucgggaacaccgccguggccaagugcaacgagaagcacgacgaggaguucugcgacaugcugcgccuguucgacuucugcaagcaggccauccagcggcucaaggcgcccgcccagauguccauccagcugaucaacaaggccgucaacgcccugaucaacgaccagcucaucaugaagaaccaccuccgcgacaucaugggcauccccuacugcaacuacagcaaguacugguaccugaaccacaccacgaccgggaagaccucccugcccaagugcuggcuggugagcaacggcuccuaccugaacgagacccacuucagcgacgacaucgagcagcaggccgacaacaugaucacggagaugcuccagaaggaguacauggagcggcagggcaagaccccgcuggggcugguggaccucuucgucuucuccaccagcuucuaccugaucuccaucuuccugcaccuggugaagaucccgacccaccgccacguggucggcaagagcugccccaagccccaccggcucaaccacauggggaucugcuccugcggccuguacgggcagcccggcgugccggugaaguggaagcgcuga

SEQ ID NO: 23008 - RNA, 1476 nt, Artificial Sequence
  derived and/or modified CDS sequence (opt1) from MOPV/LASV reassortant(IGS-1;Clade IV)__AFY05576__GPCmut2
augggccagaucgugaccuucuuccaggaggucccccacgugaucgaggaggugaugaacaucguccugaucgcccucagcgugcuggccgugcugaaggggcucuacaacuucgcgaccugcggccuggucgggcuggugacguuccuccugcugugcggccgcuccugcaccaccagccucuacaaggggguguacgagcugcagacccuggagcucaacauggagacgcugaacaugugcaugccgcuguccugcaccaagaacaacagccaccacuacaucauggucggcaacgagaccggccucgagcugacgcugaccaacaccuccaucaucaaccacaaguucugcaaccucagcgacgcccacaagaagaaccuguacgaccacgcccugauguccaucaucagcaccuuccaccucuccauccccaacuucaaccaguacgaggccaugagcugcgacuucaacgggggcaagaucuccgugcaguacaaccugagccacuccuacgccggggacgcggccaaccacugcggcacgguggccaacgggguccugcagaccuucaugcggauggccuggggcggcagcuacaucgcgcucgacuccgggcgcggcaacugggacugcaucaugaccagcuaccaguaccugaucauccagaacaccacgugggaggaccacugccaguucucccggcccagccccaucggguaccugggccuccugucccagcgcacccgggacaucuacaucagccgccggcgccggggcaccuucaccuggacgcugagcgacuccgagggggaggacaccccgggcggguacugccugacccgcuggaugcucaucgaggccgagcugaagugcuucggcaacaccgccguggccaagugcaacgagaagcacgacgaggaguucugcgacaugcugcggcuguucgacuucugcaagcaggccauccagcgccugaaggcgcccgcccagaugagcauccagcugaucaacaaggccgugaacgcccucaucaacgaccagcugaucaugaagaaccaccuccgggacaucauggggauccccuacugcaacuacuccaaguacugguaccucaaccacacgaccaccggccgcaccagccugcccaagugcuggcuggucuccaacggcagcuaccucaacgagacgcacuucuccgacgacaucgagcagcaggccgacaacaugaucaccgagaugcugcagaaggaguacauggagcggcaggggaagacgccccugggccucguggaccuguucguguucagcaccuccuucuaccugaucagcaucuuccugcaccucgucaagaucccgacccaccgccacaucguggggaaguccugccccaagccccaccggcugaaccacaugggcaucugcagcugcgggcuguacaagcagcccggcgugccggucaaguggaagcgcuga

SEQ ID NO: 23009 - RNA, 1476 nt, Artificial Sequence
  derived and/or modified CDS sequence (opt1) from LASV(LM765-SLE-2012;Clade IV)__AIT17814__GPCmut2
augggccagaucgugaccuucuuccaggaggucccccacgugaucgaggaggugaugaacaucguccugaucgcccucagcauccuggccgugcugaaggggcucuacaacuucgcgaccugcggccugguggggcuggucacguuccuccugcugugcggccgcuccugcaccaccagccucuacaaggggguguacgagcugcagacccuggagcucaacauggagacgcugaacaugugcaugccgcuguccugcaccaagaacaacagccaccacuacaucauggugggcaacgagaccggccucgagcugacgcugaccaacaccuccaucaucgaccacaaguucugcaaccucagcgacgcccaccggaagaaccuguacgaccacgcccugauguccaucaucagcaccuuccaccucuccauccccaacuucaaccaguacgaggccaugagcugcgacuucaacgggggcaagaucuccguccaguacaaccugagccacuccuacgccaaggacgcggccgaccacugcgggacgguggccaacggcgugcugcagaccuucaugcgcauggccuggggcgggagcuacaucgcgcucgacuccggccgggggcgcugggacugcaucaugaccagcuaccaguaccugaucauccagaacaccacgugggaggaccacugccaguucucccggcccagccccaucggcuaccuggggcuccugucccagcgcacccgggacaucuacaucagccgccggcgccggggcaccuucaccuggacgcugagcgacuccgagggcaaggacacccccgggggcuacugccugacccgcuggaugcucaucgaggccgagcugaagugcuucgggaacaccgccgucgccaagugcaacgagaagcacgacgaggaguucugcgacaugcugcggcuguucgacuucugcaagcaggccauccagcgccugaaggcgcccgcccagaugagcauccagcugaucaacaaggccgugaacgcccucaucaacgaccagcugaucaugaagaaccaccuccgggacaucaugggcauccccuacugcaacuacuccaaguacugguaccucaaccacacgaccaccgggaagaccagccugcccaagugcuggcugguguccaacggcagcuaccucaacgagacgcacuucuccgacgacaucgagcagcaggccgacaacaugaucaccgagaugcugcagaaggaguacauggagcgccagggcaagaccccgcuggggcucgucgaccuguucguguucagcaccuccuucuaccugaucagcaucuuccugcaccucgugaagaucccgacgcaccggcacaucgucggcaagcccugccccaagccccaccgccugaaccacauggggaucugcuccugcggccuguacaagcagccgggggugcccgugaaguggaagcgguga

SEQ ID NO: 23010 - RNA, 1476 nt, Artificial Sequence
  derived and/or modified CDS sequence (opt1) from LASV(LM776-SLE-2012;Clade IV)__AIT17824__GPCmut2
augggccagaucgugaccuucuuccaggaggucccccacgugaucgaggaggugaugaacaucguccugaucgcccucagcauccuggccgugcugaaggggcucuacaacuucgcgaccugcggccugguggggcuggucacguuccuccugcugugcggccgcuccugcaccaccagcguguacaaggggguguacgagcuccagacccuggagcugaacauggagacgcucaacaugugcaugccgcuguccugcaccaagaacaacagccaccacuacaucauggucggcaacgagaccggccuggagcucacgcugaccaacaccuccaucaucaaccacaaguucugcaaccugagcgacgcccacaagaagaaccucuacgaccacgcccugauguccaucaucagcaccuuccaccuguccauccccaacuucaaccaguacgaggccaugagcugcgacuucaacgggggcaagaucuccgugcaguacaaccucagccacuccuacgccggggacgcggccaaccacugcggcacgguggccaacgggguccugcagaccuucaugcggauggccuggggcggcagcuacaucgcgcuggacuccgggcacggcaagugggacugcaucaugaccagcuaccaguaccucaucauccagaacaccacgugggaggaccacugccaguucucccgccccagccccaucggguaccugggccugcucucccagcggacccgcgacaucuacaucagccggcgccgccggggcaccuucaccuggacgcucagcgacuccgaggggaaggacaccccgggcggguacugccugacccgguggaugcugaucgaggccgagcucaagugcuucggcaacaccgccguggccaagugcaacgagaagcacgacgaggaguucugcgacaugcugcgccuguucgacuucugcaagcaggccauccagcggcucaaggcgcccgcccagaugagcauccagcugaucaacaaggccgugaacgcccugaucaacgaccagcucaucaugaagaaccaccuccgcgacaucauggggauccccuacugcaacuacuccaaguacugguaccugaaccacacgaccaccggcaagaccagccugcccaagugcuggcuggucuccaacggcagcuaccugaacgagacgcacuucuccgacgacaucgagcagcaggccgacaacaugaucaccgagaugcuccagaaggaguacauggagcggcaggggaagacgccccugggccugguggaccucuucguguucagcaccuccuucuaccugaucagcaucuuccugcaccuggucaagaucccgacccaccgccacaucguggggaaguccugccccaagccccaccggcucaaccacaugggcaucugcagcugcgggcuguacaagcagcccggcgugccgguccgcuggaagcgguga

SEQ ID NO: 23011 - RNA, 1476 nt, Artificial Sequence
  derived and/or modified CDS sequence (opt1) from LASV(Mad39;Clade IV)__ANH09722__GPCmut2
augggccagaucgugaccuucuuccaggaggucccccacgugaucgaggaggugaugaacaucguccugaucgcccucagcauccuggccgugcugaaggggcucuacaacguggcgaccugcggccugaucgggcuggucacguuccuccugcugugcggccgcuccugcaccaccacccucuacaaggggguguacgagcugcaggcccuggagcucaacauggagacgcugaacaugugcaugccgcugagcugcaccaagaacaacucccaccacuacauccgggugggcaacgagaccggccucgagcugacgcugaccaacaccagccucaucaaccacaaguucugcaaccuguccgacgcccacaagaagaaccuguacgaccacgcccucaugagcaucaucuccaccuuccaccugagcauccccaacuucaaccaguacgaggccauguccugcgacuucaacgacgggaagaucagcguccaguacaaccugucccacacguacgcgggcgacaccgccaaccacugcgggaccguggccaacggcgugcuccagaccuucaugcgcauggccuggggcgggagcuacaucgcgcuggacuccggccgcgggggcugggacugcaucaugacgagcuaccaguaccugaucauccagaacaccaccugggaggaccacugccaguucucccggcccagccccaucggguaccucggccugcugucccagcggacccgcgacaucuacaucagccggcgccgccggggcacguucaccuggacccuguccgacagcgaggggaaggacaccccgggcggguacugccucacgcgguggaugcugaucgaggccgagcugaagugcuucggcaacaccgccgucgccaagugcaacgagaagcacgacgaggaguucugcgacaugcuccgccuguucgacuucugcaagcaggccauccagcggcugaaggcgcccgcccagaugagcauccagcucaucaacaaggccgugaacgcccugaucaacgaccagcugaucaugaagaaccaccuccgcgacaucauggggauccccuacugcaacuacuccaaguacugguaccugaaccacaccgugaccggcaagacgagccugcccaagugcuggcucgucuccaacggcagcuaccugaacgagacccacuucuccgacgacaucgagcagcaggccgacaacaugaucaccgagaugcugcagaaggaguacauggagcggcaggggaagacgccccucggccugguggaccuguucguguucagcaccuccuucuaccugaucagcaucuuccuccaccuggucaagaucccgacccaccgccacgugguggggaagcccugccccaagccccaccggcugaaccacaugggcaucugcuccugcggguucuacaagcagccgggcguccccgugcgcuggaagcgguga

SEQ ID NO: 23012 - RNA, 1476 nt, Artificial Sequence
  derived and/or modified CDS sequence (opt1) from LASV(Z0947-SLE-2011;Clade IV)__AIT17840__GPCmut2
augggccagaucgugaccuucuuccaggaggucccccacgugaucgaggaggugaugaacaucguccugaucgcccucagcauccuggccgugcugaaggggcucuacaacuucgcgaccugcggccugguggggcuggucacguuccuccugcugugcggccgcuccugcaccaucagccucuacaaggggguguacgagcugcagacccuggagcucaacauggagacccugaacaugugcaugccgcuguccugcaccaagaacaacagccaccacuacaucauggugggcaacgagaccggccucgagcugacccugacgaacaccuccaucaucaaccacaaguucugcaaccucagcgacgcccacaagaagaaccuguacgaccacgcccugauguccaucaucagcaccuuccaccucuccauccccaacuucaaccaguacgaggccaugagcugcgacuucaacgggggcaagaucuccguccaguacaaccugagccacuccuacgccggggacgcggccaaccacugcggcaccguggccaacggggugcugcagacguucaugcggauggccuggggcggcagcuacaucgcgcucgacuccgggcgcgaccggugggacugcaucaugaccagcuaccaguaccugaucauccagaacaccaccugggaggaccacugccaguucucccgccccagccccaucggcuaccuggggcuccugucccagcggacgcgcgacaucuacaucagccggcgccgccggggcaccuucaccuggacccugagcgacuccgagggcaaggacacgcccgggggcuacugccugacccgguggaugcucaucgaggccgagcugaagugcuucgggaacaccgccgucgccaagugcaacgagaagcacgacgaggaguucugcgacaugcugcgccucuucgacuucugcaagcaggccauccagcggcugaaggcgcccgcccagaugagcauccagcugaucaacaaggccgugaacgcccucaucaacgaccagcugaucaugaagaaccaccuccgcgacaucaugggcauccccuacugcaacuacuccaaguacugguaccugaaccacaccacgaccgggaagaccagccugcccaagugcuggcugguguccaacggcagcuaccucaacgagacccacuucuccgacgacaucgagcagcaggccgacaacaugaucacggagaugcugcagaaggaguacauggagcggcagggcaagaccccgcuggggcucgucgaccuguucguguucagcaccuccuucuaccugaucagcaucuuccugcaccucgugaagaucccgacccaccgccacaucgucggcaagcccugccccaagccccaccggcugaaccacauggggaucugcuccugcggccuguacaagcagccgggggugcccgugaaguggaagcgcuga

SEQ ID NO: 23013 - RNA, 1476 nt, Artificial Sequence
  derived and/or modified CDS sequence (opt1) from LASV(Josiah;Clade IV)__NP_694870__GPCmut2
augggccagaucgugaccuucuuccaggaggucccccacgugaucgaggaggugaugaacaucguccugaucgcccucagcgugcuggccgugcugaaggggcucuacaacuucgcgaccugcggccuggucgggcuggugacguuccuccugcugugcggccgcuccugcaccaccagccucuacaaggggguguacgagcugcagacccuggagcucaacauggagacgcugaacaugugcaugccgcuguccugcaccaagaacaacagccaccacuacaucauggucggcaacgagaccggccucgagcugacccugacgaacaccuccaucaucaaccacaaguucugcaaccucagcgacgcccacaagaagaaccuguacgaccacgcccugauguccaucaucagcaccuuccaccucuccauccccaacuucaaccaguacgaggccaugagcugcgacuucaacgggggcaagaucuccgugcaguacaaccugagccacuccuacgccggggacgcggccaaccacugcggcaccguggccaacgggguccugcagacguucaugcggauggccuggggcggcagcuacaucgcgcucgacuccgggcgcggcaacugggacugcaucaugaccagcuaccaguaccugaucauccagaacaccaccugggaggaccacugccaguucucccggcccagccccaucggguaccugggccuccugucccagcgcacgcgggacaucuacaucagccgccggcgccggggcaccuucaccuggacccugagcgacuccgaggggaaggacacgccgggcggguacugccucacccgcuggaugcugaucgaggccgagcugaagugcuucggcaacaccgccguggccaagugcaacgagaagcacgacgaggaguucugcgacaugcuccggcuguucgacuucugcaagcaggccauccagcgccugaaggcgcccgcccagaugagcauccagcucaucaacaaggccgugaacgcccugaucaacgaccagcugaucaugaagaaccaccuccgggacaucauggggauccccuacugcaacuacuccaaguacugguaccugaaccacaccacgaccggccgcaccagccugcccaagugcuggcucgucuccaacggcagcuaccugaacgagacccacuucuccgacgacaucgagcagcaggccgacaacaugaucacggagaugcugcagaaggaguacauggagcggcaggggaagaccccgcucggccugguggaccuguucguguucagcaccuccuucuaccugaucagcaucuuccuccaccuggucaagauccccacccaccgccacaucguggggaaguccugccccaagccccaccggcugaaccacaugggcaucugcagcugcgggcucuacaagcagccgggcgugcccgucaaguggaagcgcuga

SEQ ID NO: 23014 - RNA, 1473 nt, Artificial Sequence
  derived and/or modified CDS sequence (opt1) from LASV(LP;Clade I)__AAF86701__GPCmut2
augggccagaucaucaccuucuuccaggaggugccccacgucaucgaggaggugaugaacaucgugcugaucgcccucagccugcuggccauccucaaggggcuguacaacaucgcgaccugcggcaucaucgggcuggucgccuuccucuuccugugcggcaaguccugcagccugacgcucaagggcggguacgagcugcagacccuggagcucaacauggagacccugaacaugugcaugccgcuguccugcaccaagaacagcucccaccacuacauccgcgugggcaacgagacggggcucgagcugacccugaccaacaccagcaucaucaaccacaaguucugcaaccucuccgacgcccacaagaagaaccuguacgaccacgcccugaugagcaucaucuccacguuccaccucagcauccccaacuucaaccaguacgaggccauguccugcgacuucaacggcgggaagaucagcgugcaguacaaccugucccacagcuacgcgggcgacgccgccgagcacugcgggaccgucgccaacggcgugcugcagaccuucaugcggauggcguggggcgggcgcuacaucgcccucgacuccggcaaggggaacugggacugcaucaugaccagcuaccaguaccugaucauccagaacacgaccugggaggaccacugccaguucucccggcccagccccaucggcuaccugggccuccugucccagcgcacccgggacaucuacaucagccgccggcgccgggggaccuucacguggacccugagcgacuccgagggcaacgagacccccgggggcuacugccucacccgcuggaugcugaucgaggccgagcugaagugcuucgggaacacggccguggccaagugcaacgagaagcacgacgaggaguucugcgacaugcuccggcuguucgacuucugcaagcaggcgauccgccggcugaaggccccggcccagaugagcauccagcucaucaacaaggccgucaacgcccugaucaacgaccagcugaucaugaagaaccaccuccgcgacaucaugggcauccccuacugcaacuacuccaaguacugguaccugaaccacaccagcuccggccggaccagccugcccaagugcuggcucaucuccaacgggagcuaccugaacgagacccaguucuccgacgacaucgagcagcaggcggacaacaugaucacggagaugcugcagaaggaguacaucgagcgccagggcaagaccccgcucgggcugguggacaucuucaucuucagcaccuccuucuaccugaucagcaucuuccugcaccucaucaagauccccacccaccggcacaucgugggcaagcccugccccaagccgcaccgccugaaccacaugggggucugcuccugcggccuguacaagcaccccggcgugcccacgaaguggaagcgguga

SEQ ID NO: 23015 - RNA, 1473 nt, Artificial Sequence
  derived and/or modified CDS sequence (opt1) from LASV(803213;Clade II)__AAF86703__GPCmut2
augggccagaucaucaccuucuuccaggaggugccccacgucaucgaggaggugaugaacaucgugcugaucgcccucagccugcuggccauccucaaggggaucuacaacgucgcgaccugcggccuguucgggcugaucuccuuccuccugcugugcggccgcagcugcuccgugacguacaaggggguguacgagcuccagacccuggagcugaacauggccaaccucaacaugugcaugccgcugagcugcaccaagaacaacucccaccacuacaucauggucggcaacgagaccggccuggagcucacgcugaccaacaccagcaucaucaaccacaaguucugcaaccuguccgacgcccacaagaagaaccucuacgaccacgcccugaugagcaucaucuccaccuuccaccugagcauccccaacuucaaccaguacgaggccauguccugcgacuucaacgggggcaagaucagcgugcaguacaaccucucccacagcuucgcgguggacgccgccaaccacugcgggacgaucgccaacggcguccugcagaccuucaugcggauggcguggggcggguccuacaucgcccuggacagcggcaaggggaacugggacugcaucaugaccuccuaccaguaccucaucauccagaacaccacgugggaggaccacugccaguucagccgccccucccccaucggcuaccuggggcugcucagccagcggacccgcgacaucuacaucagccggcgccggcgcggcaccuucaccuggacgcuguccgacagcgagggcaacgaggcccccgggggcuacugccugacccgguggaugcucaucgaggccgagcugaagugcuucgggaacaccgccguggcgaagugcaacgagaagcacgacgaggaguucugcgacaugcugcgccucuucgacuucugcaagcaggccaucaagcggcugaagaccccggcccagauguccauccagcugaucaacaaggccgugaacgcccucaucaacgaccagcugaucaugaagaaccaccuccgcgacaucaugggcauccccuacugcaacuacagccgguacugguaccugaaccacacggucaccgggaagaccucccugccccgcugcuggcuggugagcaacggcuccuaccucaacgagacccacuucagcgacgacaucgagcagcaggcggacaacaugaucacggagaugcugcagaaggaguacauggaccggcagggcaagaccccgcuggggcucguggaccuguucgucuucuccaccagcuucuaccugaucuccaucuuccugcaccucgugaagauccccacccaccgccacaucgugggcaagcccugccccaagccgcaccggcugaaccacauggggaucugcagcugcggccuguacaagcaccccgggguccccgugaaguggaagcgcuga

SEQ ID NO: 23016 - RNA, 1473 nt, Artificial Sequence
  derived and/or modified CDS sequence (opt1) from LASV(GA391;Clade III)__CAA36645__GPCmut2
augggccagaucgugaccuucuuccaggaggucccccacgugaucgaggaggugaugaacaucguccugaucgcccucagcauccuggccauccugaaggggcucuacaacguggcgaccugcggccugaucgggcuggugacguuccuccugcuguccggccgcagcugcucccucaucuacaaggggaccuacgagcugcagacccuggagcucaacauggagacccugaacaugugcaugccgcugagcugcacgaagaacaacucccaccacuacauccgggucggcaacgagaccggccucgagcugacccugaccaacacgagcauccucaaccacaaguucugcaaccuguccgacgcccacaagcgcaaccuguacgaccacagccucauguccaucaucagcaccuuccaccuguccauccccaacuucaaccaguacgaggccaugagcugcgacuucaacgggggcaagaucaccgugcaguacaaccugucccacagcuucgccguggacgccgcggggcacugcggcacccucgccaacgggguccugcagacguucaugcggauggccuggggcggcuccuacaucgcccuggacagcgggcgcggcaacugggacugcaucaugaccuccuaccaguaccucaucauccagaacaccaccugggacgaccacugccaguucagccggcccucccccaucggguaccugggccugcucagccagcgcacgcgggacaucuacaucagccgccggcgccggggcaccuucaccuggacccuguccgacagcgaggggaacgagacgccgggcggguacugccugacccgcuggaugcucaucgaggcggagcugaagugcuucggcaacaccgccguggccaagugcaacgagaagcacgacgaggaguucugcgacaugcugcggcuguucgacuucugcaagcaggccauccgccggcugaagacccccgcccagauguccauccagcugaucaacaaggcggugaacgcccucaucaacgaccagcugaucaugaagaaccaccuccgcgacaucauggggauccccuacugcaacuacagccgguacugguaccucaaccacacguccaccggcaagaccagccugccccgcugcuggcugaucuccaacggcagcuaccucaacgagaccaaguucuccgacgacaucgagcagcaggccgacaacaugaucacggagaugcugcagaaggaguacaucgaccggcaggggaagaccccgcugggccuggucgaccucuucguguucagcaccuccuucuaccugaucagcaucuuccugcaccucgugaagauccccacccaccgccacaucgucgggaagcccugccccaagccgcaccggcugaaccacaugggcaucugcuccugcgggcuguacaagcagcccggcgugcccgugcgcuggaagcgcuga

SEQ ID NO: 23017 - RNA, 1476 nt, Artificial Sequence
  derived and/or modified CDS sequence (opt1) from LASV(AV;Clade V)__CCA30314__GPCmut2
augggccagaucgugaccuucuuccaggaggucccccacgugaucgaggaggugaugaacaucguccugaucgcccucagcauccuggccgugcugaaggggcucuacaacaucgcgaccugcggccugaucgggcugaucacguuccuccugcugugcggccgcuccugcagcuccaaccucuacaaggggguguacgagcugcagagccuggaccucaacauggagacccugaacaugugcaugccgcuguccugcaccaagaacaacagccaccacuacauccgggucggcaacgacaccggccucgagcugacgcugaccaacaccuccauccucaaccacaaguucugcaaccugagcgacgcccacaagaaggaccuguacgaccacgcccucauguccaucaucagcaccuuccaccuguccauccccaacuucaaccaguacgaggccaugagcugcgacuucaacgggggcaagaucuccgugcaguacaaccugagccacuccuacgccaucgacgcggccaaccacugcgggacgguggccaacggcauccuccagaccuucaugcgcauggccuggggcgggagcuacaucgcgcuggacuccggccgggggaacugggacugcaucaugaccagcuaccaguaccugaucauccagaacaccacgugggagaaccacugccaguucucccgccccagccccaucggcuaccucgggcugcugagccagcggacccgcgacaucuacaucucccggcgccggcgcggcaccuucaccuggacgcucagcgacuccgagggcaacgccacccccgggggcuacugccugacccgguggaugcugaucgaggccgagcucaagugcuucgggaacaccgccgucgccaagugcaacgagaagcacgacgaggaguucugcgacaugcugcgccuguucgacuucugcaagcaggcgaucagccggcucaaguccccggcccagaugagcauccagcugaucaacaaggccgugaacgcccugaucaacgaccagcucaucaugaagaaccaccuccgcgacaucaugggcauccccuacugcaacuacuccaaguacugguaccugaaccacacgaucaccgggaagaccagccugcccaagugcuggcugguguccaacggcagcuaccugaacgagacccacuucuccgacgacaucgagcagcaggccgacaacaugaucacggagaugcuccagaaggaguacauggagcggcagggcaagaccccgcuggggcuggucgaccuguucguguucagcaccuccuucuaccucaucagcaucuuccugcgccuggugaagauccccacccaccggcacaucgucggcaagcccugccccaagccgcaccgccucaaccacauggggaucugcuccugcggccuguacaagcagcccggggugcccgugcgguggaagcgcuga

SEQ ID NO: 23018 - RNA, 1473 nt, Artificial Sequence
  derived and/or modified CDS sequence (opt1) from LASV(Togo/2016/7082;Clade VI)__AMR44577__GPCmut2
augggccagaucaucaccuucuuccaggaggugccccacgucaucgaggaggugaugaacaucgugcugaucgcccucagccugcuggccauccucaagggggucuacaacguggcgaccugcggcaucaucgggcuggugacguuccuguuccucugcggccgcuccugcagccugaucuacaagggguccuacgagcugcagacccucgagcugaacauggagacccugaacaugugcaugccgcucagcugcaccaagaacuccagccaccacuacauccgggucggcaacgagacgggccuggagcugacccucaccaacaccuccaucaucaaccacaaguucugcaaccugagcgacgcccacaagcgcaaccuguacgaccacgcccucauguccauccugagcacguuccaccuguccauccccaacuucaaccaguacgaggccaugagcugcgacuucaacgggggcaagaucuccgugcaguacaaccucagccacgccuacgcgguggacgccgccgagcacugcgggaccgucgccaacggcgugcugcagaccuucaugcggauggcguggggcggguccuacaucgcccuggacagcggccgcgggaacugggacugcaucaugaccuccuaccaguaccucaucauccagaacacgaccugggaggaccacugccaguucagccggcccucccccaucggcuaccuggggcugcucagccagcgcacccgggacaucuacaucagccgccggcgccggggcaccuucacguggacccuguccgacagcgagggcaacgagacccccgggggcuacugccugacccgcuggaugcucaucgaggccgagcugaagugcuucgggaacacggccguggccaagugcaacgagaagcacgacgaggaguucugcgacaugcugcggcuguucgacuucugcaagcaggcgauccagcgccugaaguccccggcccagaugagcauccagcugaucaacaaggccgucaacgcccucaucaacgaccagcugaucaugaagaaccaccuccgggacaugaugggcauccccuacugcaacuacuccaaguacugguaccucaaccacaccagcuccgggcgcaccagccugcccaagugcuggcugguguccaacggcagcuaccucaacgagacccacuucuccgacgacaucgagcagcaggccgacaacaugaucacggagaugcugcagaaggaguacaucgaccggcagggcaagaccccgcuggggcucguggaccuguucgucuucagcaccuccuucuaccugaucagcaucuuccugcaccucaucaagauccccacccaccgccacaucgugggcaagcccugccccaagccgcaccggcugaaccacauggggaucugcuccugcggccuguacaagcagcccggggugcccacgcgcuggaagcgguga

SEQ ID NO: 23019 - RNA, 1473 nt, Artificial Sequence
  derived and/or modified CDS sequence (opt1) from LASV(KAK-428;Clade n.d. (VII))__ANH09740__GPCmut2
augggccagaucgugaccuucuuccaggaggucccccacgugaucgaggaggugaugaacaucguccugaucgcccucagccugcuggccauccucaaggggcuguacaacuucgcgaccugcggcgugaucgggcugaucacguuccuccugcugugcggccgcuccugcagcgccaccuacaaggggcaguacgagcuccagacccuggagcugaacauggagucccucaacaugugcaugccgcugagcugcaccaagaacaacucccaccacuacauccgggccggcaacaacacgggccuggagcucacccugaccaacaccagcaucaucucccacaaguucugcaaccugagcgacgcccacaagaagaaccucuacgaccacacgcugauguccaucaucaccaccuuccaccugagcauccccaacuucaaccaguacgaggccauguccugcgacuucaacgggggcaagaucagcauccaguacaaccucucccacagcuacgcgggggacgccgcccagcacugcggcaccguggccaacgggguccugcagacguucaugcgcauggcguggggcggcuccuaccuggcccucgacagcgggcggcgcggcugggacugcaucaucuccagcuaccaguaccugaucauccagaacaccaccugggacgaccacugccaguucucccggcccagccccaucggguaccugggcuucgugagccagaagacccgcgacaucuacaucucccggcgccggcgcggcacguucaccuggacccucagcgacuccgaggggcacgacaugccgggcggguacugccugacccgguggaugcugaucgaggccgaccucaagugcuucggcaacacggccguggccaagugcaacgagaagcacgacgaggaguucugcgacauguggcgccuguucgacuucugcaagcaggcgauccagcggcugaaggcccccgcccagaugaacauccagcucaucaacaaggccgucaacgcccugaucaacgaccagcugaugaugaagaaccaccuccgcgacaucauggggauccccuacugcaacuacagcaaguucugguaccugaacaacaccaccaccggccggacgucccugccccgcugcuggcucaucagcaacggcuccuaccugaacgagacccacuucagcgacgacaucgagcagcaggcggacaacaugaucaccgagaugcugcagaaggaguacauggaccggcaggggaagaccccgcucggccugguggaccuguucguguucuccacgagcuucuaccucaucaccaucuuccugcaccuggucaagauccccacccaccgccacaucguggggaagcccugccccaagccgcaccggcugaaccacaugggcaucugcuccugcgggcucuacaagcagcccggcgugcccguccgcuggaagcgguga

SEQ ID NO: 23020 - RNA, 1473 nt, Artificial Sequence; identical to SEQ ID NO: 23014
  derived and/or modified CDS sequence (opt1) from LASV(Pinneo-NIG-1969;Clade I)__AIT17836__GPCmut2

SEQ ID NO: 23021 - RNA, 1473 nt, Artificial Sequence
  derived and/or modified CDS sequence (opt1) from LASV(ISTH0009-NIG-2011;Clade II)__AIT17404__GPCmut2
augggccagaucaucaccuucuuccaggaggugccccacgucaucgaggaggugaugaacaucgugcugaucgcccucagccugcuggccauccucaaggggaucuacaacgucgcgaccugcggccuguucgggcugguguccuuccuccugcugugcggccgcagcugcuccacgaccuacaaggggguguacgagcuccagacccuggagcuggacauggccagccucaacaugugcaugccgcuguccugcaccaagaacaacagccaccacuacaucauggucggcaacgagacgggccuggagcucacccugaccaacaccuccaucaucaaccacaaguucugcaaccugagcgacgcccacaagaagaaccucuacgaccacgcccugauguccaucaucagcacguuccaccuguccauccccaacuucaaccaguacgaggccaugagcugcgacuucaacgggggcaagaucuccgugcaguacaaccucagccacgcguacgccguggacgccgccaaccacugcgggaccaucgcgaacggcguccugcagaccuucaugcggauggccuggggcggguccuacaucgcccuggacagcggcaagggguccugggacugcaucaugaccagcuaccaguaccucaucauccagaacacgaccugggaggaccacugccaguucucccgccccagccccaucggcuaccuggggcugcucagccagcggacccgcgacaucuacaucucccggcgccggcgcggcaccuucacguggacccugagcgacuccgagggcaacgagacccccgggggcuacugccugacccgguggaugcucaucgaggccgagcugaagugcuucgggaacacggccguggcgaagugcaacgagaagcacgacgaggaguucugcgacaugcugcgccucuucgacuucugcaagcaggccauccggcgccugaagaccccggcccagaugagcauccagcugaucaacaaggccgugaacgcccucaucaacgaccagcugaucaugaagaaccaccuccgggacaucaugggcauccccuacugcaacuacuccaaguacugguaccugaaccacaccgucaccgggaagacgagccugccccgcugcuggcugguguccaacggcagcuaccucaacgagacccacuucuccgacgacaucgagcagcaggcggacaacaugaucaccgagcugcugcagaaggaguacauggaccggcagggcaagaccccgcucgggcugguggaccuguucgucuucagcacguccuucuaccugaucagcaucuuccuccaccugaucaagauccccacccaccgccacaucaccggcaagcccugccccaagccgcaccggcugaaccacauggggaucugcuccugcggccucuacaagcaccccggggugcccgugaaguggaagcgcuga

SEQ ID NO: 23022 - RNA, 1473 nt, Artificial Sequence
  derived and/or modified CDS sequence (opt1) from LASV(ISTH2010-NIG-2012;Clade II)__AIT17482__GPCmut2
augggccagaucaucaccuucuuccaggaggugccccacgucaucgaggaggugaugaacaucgugcugaucgcccucagccugcuggccauccucaaggggaucuacaacgucgcgaccugcggccuguucgggcugguguccuuccuccugcugugcggccgcagcugcuccacgaccuacaaggggguguacgagcuccagacccuggagcuggacauggccagccucaacaugugcaugccgcuguccugcaccaagaacaacagccaccacuacaucauggucggcaacgagacgggccuggagcucacccugaccaacaccuccaucaucaaccacaaguucugcaaccugagcgacgcccacaagaagaaccucuacgaccacgcccugauguccaucaucagcacguuccaccuguccauccccaacuucaaccaguacgaggccaugagcugcgacuucaacgggggcaagaucuccgugcaguacaaccucagccacgcguacgccguggacgccgccaaccacugcgggaccaucgcgaacggcguccugcagaccuucaugcggauggccuggggcggguccuacaucgcccuggacagcggcaagggguccugggacugcaucaugaccagcuaccaguaccucaucauccagaacaucacgugggaggaccacugccaguucucccgccccagccccaucggcuaccuggggcugcucagccagcggacccgcgacaucuacaucucccggcgccggcgcggcaccuucaccuggacgcugagcgacuccgagggcaacgagacccccgggggcuacugccugacccgguggaugcucaucgaggccgagcugaagugcuucgggaacaccgccguggcgaagugcaacgagaagcacgacgaggaguucugcgacaugcugcgccucuucgacuucugcaagcaggccauccggcgccugaagacgccggcccagaugagcauccagcugaucaacaaggccgugaacgcccucaucaacgaccagcugaucaugaagaaccaccuccgggacaucaugggcauccccuacugcaacuacuccaaguacugguaccugaaccacaccgucaccgggaagaccagccugccccgcugcuggcugguguccaacggcagcuaccucaacgagacgcacuucuccgacgacaucgagcagcaggcggacaacaugaucaccgagcugcugcagaaggaguacaucgaccggcagggcaagaccccgcucgggcugguggaccuguucgucuucagcaccuccuucuaccugaucagcaucuuccuccaccuggugaagauccccacgcaccgccacguggucggcaagcccugccccaagccgcaccggcugaaccacauggggaucugcuccugcggccucuacaagcaccccggggugcccgugaaguggaagcgcuga

SEQ ID NO: 23023 - RNA, 1473 nt, Artificial Sequence
  derived and/or modified CDS sequence (opt1) from LASV(Lassa virus/H.sapiens-wt/NGA/2015/ISTH_0543;Clade II)__AVO03639__GPCmut2
augggccagaucaucaccuucuuccaggaggugccccacgucaucgaggaggugaugaacaucgugcugaucgcccucagccugcuggccauccucaaggggaucuacaacgucgcgaccugcggccuguucgggcugguguccuuccuccugcugugcggccgcagcugcuccacgaccuacaaggggguguacgagcuccagacccuggagcuggacauggccaaccucaacaugugcaugccgcugagcugcaccaagaacaacucccaccacuacaucauggucggcaacgagacgggccuggagcucacccugaccaacaccagcaucaucaaccacaaguucugcaaccuguccgacgcccacaagaagaaccucuacgaccacgcccugaugagcaucaucuccacguuccaccugagcauccccaacuucaaccaguacgaggccauguccugcgacuucaacgggggcaagaucagcgugcaguacaaccucucccacaccuacgcgguggacgccgccaaccacugcgggaccaucgccaacggcguccugcagaccuucaugcggauggcguggggcgggagcuacaucgcccuggacuccggcaaggggagcugggacugcaucaugacguccuaccaguaccucgugauccagaacaccaccugggaggaccacugccaguucagccgccccucccccaucggcuaccuggggcugcucagccagcggacccgcgacaucuacaucagccggcgccggcgcggcacguucaccuggacccuguccgacagcgagggcaacgagacccccgggggcuacugccugacgcgguggaugcucaucgaggccgagcugaagugcuucgggaacaccgccguggccaagugcaacgagaagcacgacgaggaguucugcgacaugcugcgccucuucgacuucugcaagcaggcgauccggcgccugaagaccccggcccagauguccauccagcugaucaacaaggccgucaacgcccucaucaacgaccagcugaucaugaagaaccaccuccgggacaucaugggcauccccuacugcaacuacagcaaguacugguaccugaaccacaccgugacggggaagaccucccugccccgcugcuggcuggugagcaacggcuccuaccucaacgagacccacuucagcgacgacaucgagcagcaggccgacaacaugaucaccgagcugcugcagaaggaguacaucgaccggcagggcaagacgccgcucgggcuggucgaccuguucguguucuccaccagcuucuaccugaucuccaucuuccuccaccuggugaagauccccacccaccgccacaucaccggcaagcccugccccaagccgcaccggcugaaccacauggggaucugcagcugcggccucuacaagcaccccgggguccccgugaaguggaagcgcuga

SEQ ID NO: 23024 - RNA, 1473 nt, Artificial Sequence
  derived and/or modified CDS sequence (opt1) from LASV(Lassa virus/H.sapiens-wt/NGA/2016/ISTH_0009;Clade II)__AVO03571__GPCmut2
augggccagaucaucaccuucuuccaggaggugccccacgucaucgaggaggugaugaacaucgugcugaucgcccucagccugcuggccauccucaaggggaucuacaacgucgcgaccugcggccugcuggggcucguguccuuccugcugcucugcggccgcagcugcuccacgaccuacaaggggguguacgagcugcagacccuggagcucgacauggccagccugaacaugugcaugccgcuguccugcaccaagaacaacagccaccacuacaucauggucggcaacgagacgggccucgagcugacccugaccaacaccuccaucaucaaccacaaguucugcaaccucagcgacgcccacaagaagaaccuguacgaccacgcccugauguccaucaucagcacguuccaccucuccauccccaacuucaaccaguacgaggccaugagcugcgacuucaacgggggccggaucuccgugcaguacaaccugagccacuccuacgcgguggacgccgccaaccacugcgggaccaucgccaacggcguccugcagaccuucaugcgcauggcguggggcgggagcuacaucgcccucgacuccggcaaggggagcugggacugcaucaugaccuccuaccaguaccugaucauccagaacacgaccugggaggaccacugccaguucagccggcccagccccaucggcuaccuggggcuccugucccagcgcacccgggacaucuacaucagccgccggcgccggggcaccuucacguggacccuguccgacagcgagggcaacgagacccccgggggcuacugccucacccgcuggaugcugaucgaggccgagcugaagugcuucgggaacacggccguggccaagugcaacgagaagcacgacgaggaguucugcgacaugcuccggcuguucgacuucugcaagcaggcgauccgccggcugaagaccccggcccagauguccauccagcucaucaacaaggccgugaacgcccugaucaacgaccagcugaucaugaagaaccaccuccgcgacaucaugggcauccccuacugcaacuacagcaaguacugguaccugaaccacaccgucaccgggaagacgucccugccccggugcuggcucgugagcaacggcuccuaccugaacgagacccacuucagcgacgacaucgagcagcaggccgacaacaugaucaccgagcugcuccagaaggaguacaucgaccgccagggcaagaccccgcuggggcugguggaccuguucgucuucuccacgagcuucuaccucaucuccaucuuccugcaccuggugaagauccccacccaccggcacaucaccggcaagcccugccccaagccgcaccgccucaaccacauggggaucugcagcugcggccuguacaaccaccccggggugcccgucaaguggaagcgguga

SEQ ID NO: 23025 - RNA, 1473 nt, Artificial Sequence
  derived and/or modified CDS sequence (opt1) from LASV(Lassa virus/H.sapiens-wt/NGA/2016/ISTH_0017;Clade II)__AVO03567__GPCmut2
augggccagaucaucaccuucuuccaggaggugccccacgucaucgaggaggugaugaacaucgugcugaucgcccucagccugcuggccauccucaaggggaucuacaacgucgcgaccugcggccuguucgggcugguguccuuccuccugcugugcggccgcagcugcuccacgaccuacaaggggguguacgagcuccagacccuggagcuggacauggccagccucaacaugugcaugccgcuguccugcaccaagaacaacagccaccacuacaucauggucggcaacgagacgggccuggagcucacccugaccaacaccuccaucaucaaccacaaguucugcaaccugagcgacgcccacaagaagaaccucuacgaccacgcccugauguccaucaucagcacguuccaccuguccauccccaacuucaaccaguacgaggccaugagcugcgacuucaacgggggcaagaucuccgugcaguacaaccucagccacaccuacgcgaucgacgccgccaaccacugcgggaccaucgccaacggcgugcugcagaccuucaugcggauggcguggggcggguccuacaucgcccuggacagcggcaagggguccugggacugcaucaugacgagcuaccaguaccucaucauccagaacaccaccugggaggaccacugccaguucucccgccccagccccaucggcuaccuggggcugcucagccagcggacccgcgacaucuacaucucccggcgccggcgcggcacguucaccuggacccugagcgacuccgagggcaacgagacccccgggggcuacugccugacgcgguggaugcucaucgaggccgagcugaagugcuucgggaacaccgccgucgccaagugcaacgagaagcacgacgaggaguucugcgacaugcugcgccucuucgacuucugcaagcaggcgauccggcgccugaagaccccggcccagaugagcauccagcugaucaacaaggccgugaacgcccucaucaacgaccagcugaucaugaagaaccaccuccgggacaucaugggcauccccuacugcaacuacuccaaguacugguaccugaaccacaccgugacggggaagaccagccugccccgcugcuggcuggucuccaacggcagcuaccucaacgagacccacuucuccgacgacaucgagcagcaggccgacaacaugaucaccgagcugcugcagaaggaguacauggaccggcagggcaagacgccgcucgggcugguggaccuguucguguucagcaccuccuucuaccugaucagcaucuuccuccaccugguccgcauccccacccaccggcacgugaucggcaagcccugccccaagccgcaccgccugaaccacauggggaucugcuccugcggccucuacaagcaccccggggugcccgucaaguggaagcgguga

SEQ ID NO: 23026 - RNA, 1473 nt, Artificial Sequence
  derived and/or modified CDS sequence (opt1) from LASV(Lassa virus/H.sapiens-wt/NGA/2018/ISTH_0959;Clade II)__AVV65099__GPCmut2
augggccagaucaucaccuucuuccaggaggugccccacgucaucgaggaggugaugaacaucgugcugaucgcccucagccugcuggccauccucaaggggaucuacaacgucgugaccugcggccuguucgggcugguguccuuccuccugcugugcggccgcagcugcuccacgaccuacaagggggucuacgagcuccagacccuggagcuggacauggcgagccucaacaugugcaugccgcuguccugcaccaagaacaacagccaccacuacaucauggugggcaacgagacgggccuggagcucacccugaccaacaccuccaucaucaaccacaaguucugcaaccugagcgacgcccacaagaagaaccucuacgaccacgcccugauguccaucaucagcacguuccaccuguccauccccaacuucaaccaguacgaggccaugagcugcgacuucaacgggggcaagaucuccgugcaguacaaccucagccacgccuacgcgaucgacgccgccaaccacugcgggaccaucgccaacggcguccugcagaccuucaugcggauggcguggggcggguccuacaucgcccuggacagcggcaagggguccugggacugcaucaugaccagcuaccaguaccucaucauccagaacacgaccugggaggaccacugccaguucucccgccccagccccaucggcuaccuggggcugcucagccagcggacccgcgacaucuacaucucccggcgccggcgcggcaccuucacguggacccugagcgacuccgagggcaacgagacccccgggggcuacugccugacccgguggaugcucaucgaggccgagcugaagugcuucgggaacacggccguggccaagugcaacgagaagcacgacgaggaguucugcgacaugcugcgccucuucgacuucugcaagcaggcgauccggcgccugaagaccccggcccagaugagcauccagcugaucaacaaggccgugaacgcccucaucaacgaccagcugaucaugaagaaccaccuccgggacaucaugggcauccccuacugcaacuacuccaaguacugguaccugaaccacaccgucaccgggaagacgagccugccccgcugcuggcugguguccaacggcagcuaccucaacgagacccacuucuccgacgacaucgagcagcaggccgacaacaugaucaccgagcugcugcagaaggaguacaucgaccggcagggcaagaccccgcucgggcugguggaccuguucgucuucagcacguccuucuaccugaucagcaucuuccuccaccuggugaagauccccacccaccgccacgugaucggcaagcccugccccaagccgcaccggcugaaccacauggggaucugcuccugcggccucuacaagcaccccgggguccccgugaaguggaagcgcuga

SEQ ID NO: 23027 - RNA, 1473 nt, Artificial Sequence
  derived and/or modified CDS sequence (opt1) from LASV(LASV003-NIG-2008;Clade II)__AIT17580__GPCmut2
augggccagaucaucaccuucuuccaggaggugccccacgucaucgaggaggugaugaacaucgugcugaucgcccucagccugcuggccauccucaaggggaucuacaacgucgcgaccugcggccuguucgggcugguguccuuccuccugcugugcggccgcagcugcuccacgaccuacaaggggguguacgagcuccagacccuggagcuggacauggccagccucaacaugugcaugccgcuguccugcaccaagaacaacagccaccacuacaucauggucggcaacgagacgggccuggagcucacccugaccaacaccuccaucaucaaccacaaguucugcaaccugagcgacgcccacaagaagaaccucuacgaccacgcccugauguccaucaucagcacguuccaccuguccauccccaacuucaaccaguacgaggccaugagcugcgacuucaacgggggcaagaucuccgugcaguacaaccucagccacaccuacgcgguggacgccgccaaccacugcgggaccaucgccaacggcguccugcagaccuucaugcggauggcguggggcggguccuacaucgcccuggacagcggcaagggguccugggacugcaucaugacgagcuaccaguaccucaucauccagaacaccaccugggaggaccacugccaguucucccgccccagccccaucggcuaccuggggcugcucagccagcggacccgcgacaucuacaucucccggcgccggcgcggcacguucaccuggacccugagcgacuccgagagcaacgagaccccgggcggguacugccugacgcgguggaugcucaucgaggccgagcugaagugcuucggcaacaccgccguggccaagugcaacgagaagcacgacgaggaguucugcgacaugcugcgccucuucgacuucugcaagcaggcgauccggcgccugaaggcccccgcccagauguccauccagcugaucaacaaggccgugaacgcccucaucaacgaccagcugaucaugaagaaccaccuccgggacaucauggggauccccuacugcaacuacagcaaguacugguaccugaaccacaccgucaccggccgcacgucccugccccggugcuggcuggugagcaacggguccuaccucaacgagacccacuucagcgacgacaucgagcagcaggcggacaacaugaucaccgagcugcugcagaaggaguacauggaccgccagggcaagaccccgcucggccugguggaccuguucgucuucuccacgagcuucuaccugaucuccaucuuccuccaccuggugaagauccccacccaccggcacgugaucgggaagcccugccccaagccgcaccgccugaaccacaugggcaucugcagcugcgggcucuacaagcaccccggcguccccgugaaguggaagcgguga

SEQ ID NO: 23028 - RNA, 1473 nt, Artificial Sequence
  derived and/or modified CDS sequence (opt1) from LASV(LASV035-NIG-2009;Clade II)__AIT17588__GPCmut2
augggccagaucaucaccuucuuccaggaggugccccacgucaucgaggaggugaugaacaucgugcugaucgcccucagccugcuggccauccucaaggggaucuacaacgucgcgaccugcggccuguucgggcugguguccuuccuccugcugugcggccgcagcugcuccacgaccuacaaggggguguacgagcuccagacccuggagcuggacauggccagccucaacaugugcaugccgcuguccugcaccaagaacaacagccaccacuacaucauggucggcaacgagacgggccuggagcucacccugaccaacaccuccaucaucaaccacaaguucugcaaccugagcgacgcccacaagaagaaccucuacgaccacgcccugauguccaucaucagcacguuccaccuguccauccccaacuucaaccaguacgaggccaugagcugcgacuucaacgggggcaagaucuccgugcaguacaaccucagccacgcguacgccguggacgccgccaaccacugcgggaccaucgcgaacggcguccugcagaccuucaugcggauggccuggggcggguccuacaucgcccuggacagcggcaagggguccugggacugcaucaugaccagcuaccaguaccucaucauccagaacacgaccugggaggaccacugccaguucucccgccccagccccaucggcuaccuggggcugcucagccagcggacccgcgacaucuacaucucccggcgccggcgcggcaccuucacguggacccugagcgacuccgagggcaacgagacccccgggggcuacugccugacccgguggaugcucaucgaggccgagcugaagugcuucgggaacacggccguggcgaagugcaacgagaagcacgacgaggaguucugcgacaugcugcgccucuucgacuucugcaagcaggccauccggcgccugaaggccccggcccagaugagcauccagcugaucaacaaggccgugaacgcgcucaucaacgaccagcugaucaugaagaaccaccuccgggacaucaugggcauccccuacugcaacuacuccaaguacugguaccugaaccacaccgucaccgggaagaccagccugccccgcugcuggcugguguccaacggcagcuaccucaacgagacgcacuucuccgacgacaucgagcagcaggccgacaacaugaucaccgagcugcugcagaaggaguacaucgaccggcagggcaagaccccgcucgggcugguggaccuguucgucuucagcaccuccuucuaccugaucagcaucuuccuccaccuggugaagauccccacgcaccgccacgugaucggcaagcccugccccaagccgcaccggcugaaccacauggggaucugcuccugcggccucuacaagcaccccgggguccccgugaaguggaagcgcuga

SEQ ID NO: 23029 - RNA, 1473 nt, Artificial Sequence
  derived and/or modified CDS sequence (opt1) from LASV(LASV1000-NIG-2009;Clade II)__AIT17782__GPCmut2
augggccagaucaucaccuucuuccaggaggugccccacgucaucgaggaggugaugaacaucgugcugaucgcccucagccugcuggccauccucaaggggaucuacaacgucgcgaccugcggccuguucgggcugguguccuuccuccugcugugcggccgcagcugcuccacgaccuacaaggggguguacgagcuccagacccuggagcuggacauggccagccucaacaugugcaugccgcuguccugcaccaagaacaacagccaccacuacaucauggucggcaacgagacgggccuggagcucacccugaccaacaccuccaucaucaaccacaaguucugcaaccugagcgacgcccacaagaagaaccucuacgaccacgcccugauguccaucaucagcacguuccaccuguccauccccaacuucaaccaguacgaggccaugagcugcgacuucaacgggggcaagaucuccgugcaguacaaccucagccacaccuacgcgguggacgccgccaaccacugcgggaccaucgccaacggcguccugcagaccuucaugcggauggcguggggcggguccuacaucgcccuggacagcggcaagggguccugggacugcaucaugacgagcuaccaguaccucaucauccagaacaccaccugggaggaccacugccaguucucccgccccagccccaucggcuaccuggggcugcucagccagcggacccgcgacaucuacaucucccggcgccggcgcggcacguucaccuggacccugagcgacuccgagggcaacgagacccccgggggcuacugccugacgcgguggaugcucaucgaggccgagcugaagugcuucgggaacaccgccguggccaagugcaacgagaagcacgacgaggaguucugcgacaugcugcgccucuucgacuucugcaagcaggcgaucaagcggcugaagaccccggcccagaugagcauccagcugaucaacaaggccgugaacgcccucaucaacgaccagcugaucaugaagaaccaccuccgcgacaucaugggcauccccuacugcaacuacuccaaguacugguaccugaaccacaccgucacggggaagaccagccugccccggugcuggcugguguccaacggcagcuaccucaacgagacccacuucuccgacgacaucgagcagcaggccgacaacaugaucaccgagcugcugcagaaggaguacaucgaccgccagggcaagacgccgcucgggcugguggaccuguucgucuucagcaccuccuucuaccugaucagcaucuuccuccaccuggugaagauccccacccaccggcacguggucggcaagcccugccccaagccgcaccgccugaaccacauggggaucugcuccugcggccucuacaagcaccccggggugcccgugaaguggaagcgguga

SEQ ID NO: 23030 - RNA, 1473 nt, Artificial Sequence
  derived and/or modified CDS sequence (opt1) from LASV(LASV221-NIG-2010;Clade II)__AIT17624__GPCmut2
augggccagaucaucaccuucuuccaggaggugccccacgucaucgaggaggugaugaacaucgugcugaucgcccucagccugcuggccauccucaaggggaucuacaacgucgcgaccugcggccuguucgggcugguguccuuccuccugcugugcggccgcagcugcuccacgaccuacaaggggguguacgagcuccagacccuggagcuggacauggccagccucaacaugugcaugccgcuguccugcaccaagaacaacagccaccacuacaucauggucggcaacgagacgggccuggagcucacccugaccaacaccuccaucaucaaccacaaguucugcaaccugagcgacgcccacaagaagaaccucuacgaccacgcccugauguccaucaucagcacguuccaccuguccauccccaacuucaaccaguacgaggccaugagcugcgacuucaacgggggcaagaucuccgugcaguacaaccucagccacaccuacgcgaucgacgccgccaaccacugcgggaccaucgccaacggcgugcugcagaccuucaugcggauggcguggggcggguccuacaucgcccuggacagcggcaagggguccugggacugcaucaugacgagcuaccaguaccucaucauccagaacaccaccugggaggaccacugccaguucucccgccccagccccaucggcuaccuggggcugcucagccagcggacccgcgacaucuacaucucccggcgccggcgcggcacguucaccuggacccugagcgacuccgagggcaacgagacccccgggggcuacugccugacgcgguggaugcucaucgaggccgagcugaagugcuucgggaacaccgccgucgccaagugcaacgagaagcacgacgaggaguucugcgacaugcugcgccucuucgacuucugcaagcaggcgauccggcgccugaagaccccggcccagaugagcauccagcugaucaacaaggccgugaacgcccucaucaacgaccagcugaucaugaagaaccaccuccgggacaucaugggcauccccuacugcaacuacuccaaguacugguaccugaaccacaccgugacggggaagaccagccugccccgcugcuggcuggucuccaacggcagcuaccucaacgagacccacuucuccgacgacaucgagcagcaggccgacaacaugaucaccgagaugcugcagaaggaguacauggaccggcagggcaagacgccgcuggggcucguggaccuguucguguucagcaccuccuucuaccugaucagcaucuuccugcaccucgucaagauccccacccaccgccacgugaucggcaagcccugccccaagccgcaccggcugaaccacauggggaucugcuccugcggccuguacaagcaccccggggugcccgucaaguggaagcgcuga

SEQ ID NO: 23031 - RNA, 1473 nt, Artificial Sequence
  derived and/or modified CDS sequence (opt1) from LASV(LASV237-NIG-2010;Clade II)__AIT17638__GPCmut2
augggccagaucaucaccuucuuccaggaggugccccacgucaucgaggaggugaugaacaucgugcugaucgcccucagccugcuggccauccucaaggggaucuacaacgucgcgaccugcggccuguucgggcugguguccuuccuccugcugugcggccgcagcugcuccacgaccuacaaggggguguacgagcuccagacccuggagcuggacauggccagccucaacaugugcaugccgcuguccugcaccaagaacaacagccaccacuacaucauggucggcaacgagacgggccuggagcucacccugaccaacaccuccaucaucaaccacaaguucugcaaccugagcgacgcccacaagaaggaccucuacgaccacgcccugauguccaucaucagcacguuccaccuguccauccccaacuucaaccaguacgaggccaugagcugcgacuucaacgggggcaagaucuccgugcaguacaaccucagccacaccuacgcgguggacgccgccaaccacugcgggaccaucgccaacggcguccugcagaccuucaugcggauggcguggggcggguccuacaucgcccuggacagcggcaagggguccugggacugcaucaugacgagcuaccaguaccucaucauccagaacaccaccugggaggaccacugccaguucucccgccccagccccaucggcuaccuggggcugcucagccagcggacccgcgacaucuacaucucccggcgccggcgcggcacguucaccuggacccugagcgacuccgagggcaacgagacccccgggggcuacugccugacgcgguggaugcucaucgaggccgagcugaagugcuucgggaacaccgccguggccaagugcaacgagaagcacgacgaggaguucugcgacaugcugcgccucuucgacuucugcaagcaggcgauccggcgccugaagaccccggcccagaugagcauccagcugaucaacaaggccgugaacgcccucaucaacgaccagcugaucaugaagaaccaccuccgggacaucaugggcauccccuacugcaacuacuccaaguacugguaccugaaccacaccgucacggggaagaccagccugccccgcugcuggcugguguccaacggcagcuaccucaacgagacccacuucuccgacgacaucgagcagcaggccgacaacaugaucaccgagcugcugcagaaggaguacauggaccggcagggcaagacgccgcucgggcugguggaccuguucgucuucagcaccuccuucuaccugaucagcaucuuccuccaccugaucaagauccccacccaccgccacaucaccggcaagcccugccccaagccgcaccggcugaaccacauggggaucugcuccugcggccucuacaagcaccccggggugcccgugaaguggaagcgcuga

SEQ ID NO: 23032 - RNA, 1473 nt, Artificial Sequence
  derived and/or modified CDS sequence (opt1) from LASV(LASV253-NIG-2011;Clade II)__AIT17670__GPCmut2
augggccagaucaucaccuucuuccaggaggugccccacgucaucgaggaggugaugaacaucgugcugaucgcccucagccugcuggccauccucaaggggaucuacaacgucgcgaccugcggccuguucgggcugguguccuuccuccugcugugcggccgcagcugcuccacgaccuacaaggggguguacgagcuccagacccuggagcuggacauggccagccucaacaugugcaugccgcuguccugcaccaagaacaacagccaccacuacaucauggucggcaacgagacgggccuggagcucacccugaccaacaccuccaucaucaaccacaaguucugcaaccugagcgacgcccacaagaagaaccucuacgaccacgcccugauguccaucaucagcacguuccaccuguccauccccaacuucaaccaguacgaggccaugagcugcgacuucaacgggggcaagaucuccgugcaguacaaccucagccacaccuacgcgguggacgccgccaaccacugcgggaccaucgccaacggcguccugcagaccuucaugcggauggcguggggcggguccuacaucgcccuggacagcggcaagggguccugggacugcaucaugacgagcuaccaguaccucaucauccagaacaccaccugggaggaccacugccaguucucccgccccagccccaucggcuaccuggggcugcucagccagcggacccgcgacaucuacaucucccggcgccggcgcggcacguucaccuggacccugagcgacuccgagggcaacgagacccccgggggcuacugccugacgcgguggaugcucaucgaggccgagcugaagugcuucgggaacaccgccguggccaagugcaacgagaagcacgacgaggaguucugcgacaugcugcgccucuucgacuucugcaagcaggcgauccggcgccugaaggccccggcccagaugagcauccagcugaucaacaaggccgugaacgcccucaucaacgaccagcugaucaugaagaaccaccuccgggacaucaugggcauccccuacugcaacuacuccaaguacugguaccugaaccacaccgucaccgggcgcacgagccugccccggugcuggcugguguccaacggcagcuaccucaacgagacccacuucuccgacgacaucgagcagcaggcggacaacaugaucaccgagcugcugcagaaggaguacaucgaccgccagggcaagaccccgcucgggcugguggaccuguucgucuucagcacguccuucuaccugaucagcaucuuccuccaccuggugaagauccccacccaccggcacaucaucggcaagcccugccccaagccgcaccgccugaaccacauggggaucugcuccugcggccucuacaagcaccccggggugcccgucaaguggaagcgguga

SEQ ID NO: 23033 - RNA, 1473 nt, Artificial Sequence
  derived and/or modified CDS sequence (opt1) from LASV(LASV254-NIG-2011;Clade II)__AIT17674__GPCmut2
augggccagaucaucaccuucuuccaggaggugccccacgucaucgaggaggugaugaacaucgugcugaucgcccucagccugcuggccauccucaaggggaucuacaacgucgcgaccugcggccuguucgggcugguguccuuccuccugcugugcggccgcagcugcuccacgaccuacaaggggguguacgagcuccagacccuggagcuggacaugaccaaccucaacaugugcaugccgcugagcugcacgaagaacaacucccaccacuacaucauggucggcaacgagaccggccuggagcucacccugaccaacacgagcaucaucaaccacaaguucugcaaccuguccgacgcccacaagaagaaccucuacaaccacgcccugaugagcaucaucuccaccuuccaccugagcauccccaacuucaaccaguacgaggccauguccugcgacuucaacgggggcaagaucagcgugcaguacaaccucucccacagcuacgccguggacgcggccaaccacugcgggaccaucgccaacggcguccugcagaccuucaugcggauggccuggggcggguccuacaucgcgcuggacagcggcaaggggaacugggacugcaucaugacguccuaccaguaccucaucauccagaacaccaccugggaggaccacugccaguucagccgccccucccccaucggcuaccuggggcugcucagccagcggacccgcgacaucuacaucagccggcgccggcgcggcacguucaccuggacccuguccgacagcgagggcaacgagacccccgggggcuacugccugacgcgguggaugcucaucgaggccgagcugaagugcuucgggaacaccgccguggccaagugcaacgagaagcacgacgaggaguucugcgacaugcugcgccucuucgacuucugcaagcaggccauccggcgccugaagaccccggcgcaggccaacauccagcugaucaacaaggccgugaacgcccucaucaacgaccagcugaucaugaagaaccaccuccgggacaucaugggcauccccuacugcaacuacuccaaguacugguaccugaaccacaccgucacggggaagaccagccugccccgcugcuggcugguguccaacggcagcuaccucaacgagacccacuucuccgacgacaucgagcagcaggccgacaacaugaucaccgagcugcugcagaaggaguacauggaccggcagggcaagacgccgcucgggcugguggaccuguucgucuucagcaccuccuucuaccugaucagcaucuuccuccaccuggugaagauccccacccaccgccacgugaucggcaagcccugccccaagccgcaccggcugaaccacauggggaucugcuccugcggccucuacaagcaccccgggguccccgugaaguggaagcgcuga

SEQ ID NO: 23034 - RNA, 1473 nt, Artificial Sequence
  derived and/or modified CDS sequence (opt1) from LASV(Nig08-A19;Clade III)__ADU56618__GPCmut2
augggccagaucgugaccuucuuccaggaggucccccacgugaucgaggaggugaugaacaucguccugaucgcccucagcauccuggccauccugaaggggcucuacaacaucgcgaccugcggccugaucgggcuggugacguuccuccugcuguccggccgcagcugcuccaugaccuacaaggggguguacgagcuccagacccuggagcugaacaugaacacccucaacaugugcaugccgcugagcugcacgaagaacaacucccaccacuacaucauggucggcaacgagaccggccuggagcucacccugaccaacacgagccugcuccaccacaaguucugcaaccuguccgacgcccacaagaagaaccuguacgaccacacccucaugagcaucaucuccaccuuccaccugagcauccccaacuucaaccaguacgaggccauguccugcgacuucaacgggggcaagaucaccgugcaguacaaccugagccacuccuacgccaucgacgccgcgaaccacugcgggacgguggccaacggcguccuccagaccuucaugcggauggccuggggcgggagcuacaucgcccuggacuccggccgcgggaagugggacugcaucaugaccagcuaccaguaccugaucauccagaacaccacgugggaggaccacugccaguucucccggcccagccccaucggcuaccucgggcugcugucccagcgcacccgggacaucuacaucagccgccggcgccggggcaccuucaccuggacgcucagcgacuccgagggcaacgagacccccgggggcuacugccugacccgcuggaugcugaucgaggcggagcucaagugcuucgggaacaccgccguggccaagugcaacgagaagcacgacgaggaguucugcgacaugcugcggcuguucgacuucugcaagcaggccauccgccggcucaaggccccggcgcagaugagcauccagcugaucaacaaggccgugaacgcccugaucaacgaccagcucaucaugaagaaccaccuccgcgacaucaugggcauccccuacugcaacuacuccaaguacugguaccugaaccacacgagcaccgggcggaccucccugccccgcugcuggcuggucagcaacggcuccuaccugaacgagacccacuucagcgacgacaucgagcagcaggccgacaacaugaucacggagaugcuccagaaggaguaccuggaccggcagggcaagaccccgcuggggcugguggaccucuucguguucuccaccagcuucuaccugaucuccaucuuccugcaccucgucaagauccccacccaccgccacaucgugggcaagcccugccccaagccgcaccggcugaaccacauggggaucugcagcugcggccuguacaagcagcccggggugcccguccgcuggaagcgguga

SEQ ID NO: 23035 - RNA, 1476 nt, Artificial Sequence
  derived and/or modified CDS sequence (opt1) from LASV(G1180-SLE-2010;Clade IV)__AIT17168__GPCmut2
augggccagaucgugaccuucuuccaggaggucccccacgugaucgaggaggugaugaacaucguccugaucgcccucagcauccuggccgugcugaaggggcucuacaacuucgcgaccugcggccugguggggcugcucacguuccugcugcucugcggccgcuccugcaccgccagccgguacaagggggucuacgagcugcagacccuggagcucaacauggagacccugaacaugugcaugccgcuguccugcacgaagaacaacagccaccacuacaucauggugggcaacgagaccggccucgagcugacccugaccaacacguccaucaucaaccacaaguucugcaaccucagcgacgcccacaagaagaaccuguacgaccacgcccugauguccaucaucagcaccuuccaccucuccauccccaacuucaaccaguacgaggccaugagcugcgacuucaacgggggcaagaucuccgugcaguacaaccugagccacuccuacgcgggggacgccgccaaccacugcggcaccgucgccaacggggugcugcagaccuucaugcgcauggcguggggcggcagcuacaucgcccucgacuccgggcacggcagcugggacugcaucaugacguccuaccaguaccugaucauccagaacaccaccugggaggaccacugccaguucagccggcccucccccaucggguaccugggccuccugagccagcgcacccgggacaucuacaucagccgccggcgccggggcacguucaccuggacccuguccgacagcgaggggaaggacaccccgggcggguacugccucacgcgcuggaugcugaucgaggccgagcugaagugcuucggcaacaccgccguggccaagugcaacgagaagcacgacgaggaguucugcgacaugcuccggcuguucgacuucugcaagcaggcgauccagcgccugaaggcccccgcccagauguccauccagcucaucaacaaggccgucaacgcccugaucaacgaccagcugaucaugaagaaccaccuccgggacaucauggggauccccuacugcaacuacagcaaguacugguaccugaaccacaccaccacgggcaagaccucccugcccaagugcuggcucgugagcaacggcuccuaccugaacgagacccacuucagcgacgacaucgagcagcaggcggacaacaugaucaccgagaugcugcagaaggaguacauggagcgccaggggaagacgccgcucggccugguggaccuguucgucuucuccaccagcuucuaccugaucuccaucuuccuccaccuggugaagauccccacccaccggcacaucgugggcaagagcugccccaagccccaccgccugaaccacauggggaucugcuccugcgggcucuacaagcagccgggcguccccgugaaguggaagcgguga

SEQ ID NO: 23036 - RNA, 1476 nt, Artificial Sequence
  derived and/or modified CDS sequence (opt1) from LASV(G1442-SLE-2011;Clade IV)__AIT17180__GPCmut2
augggccagaucgugaccuucuuccaggaggucccccacgugaucgaggaggugaugaacaucguccugaucgcccucagcauccuggccgugcugaaggggcucuacaacguggcgaccugcggccugaucgggcuggucacguuccuccugcugugcggccgcuccugcaccaccacccucuacaaggggguguacgagcugcagacgcuggagcucaacauggagacccugaacaugugcaugccgcugagcugcaccaagaacaacucccaccacuacauccgggugggcaacgagaccggccucgagcugacgcugaccaacaccagcaucaucaaccacaaguucugcaaccucuccgacgcccacaagaagaaccuguacgaccacgcccugaugagcaucaucuccaccuuccaccucagcauccccaacuucaaccaguacgaggccauguccugcgacuucaacgggggcaagaucagcguccaguacaaccugucccacagcuacgccggggacgcggccaaccacugcggcacgguggccaacggggugcugcagaccuucaugcgcauggccuggggcggcuccuacaucgcgcucgacagcgggcggggcaacugggacugcaucaugaccuccuaccaguaccugaucauccagaacaccacgugggacgaccacugccaguucagccgccccucccccaucggguaccugggccuccugagccagcggacccgcgacgucuacaucucccggcgccggcgcggcaccuucaccuggacgcugagcgacagcgaggggaaggacaccccgggcggguacugccucacccgguggaugcugaucgaggccgagcugaagugcuucggcaacaccgccguggccaagugcaacgagaagcacgacgaggaguucugcgacaugcuccgccuguucgacuucugcaagcaggccauccagcggcugaaggcgcccgcccagauguccauccagcucaucaacaaggccgugaacgcccugaucaacgaccagcugaucaugaagaaccaccuccgcgacaucauggggauccccuacugcaacuacagcaaguacugguaccugaacaacacggccaccggcaagaccucccugcccaagugcuggcucaucagcaacggcuccuaccugaacgagacccacuucagcgacgacaucgagcaggaggcggacaacaugaucacggagaugcugcagaaggaguacauggagcggcaggggaagaccccgcucggccuggucgaccuguucguguucuccaccagcuucuaccugaucuccaucuuccuccaccuggugaagauccccacccaccgccacaucgucggcaagagcugccccaagccccaccggcugaaccacauggggaucugcuccugcgggcucuacaagcagccgggcgugcccgugcgcuggaagcgguga

SEQ ID NO: 23037 - RNA, 1476 nt, Artificial Sequence
  derived and/or modified CDS sequence (opt1) from LASV(G3010-SLE-2013;Clade IV)__AIT17344__GPCmut2
augggccagaucgugaccuucuuccaggaggucccccacgugaucgaggaggugaugaacaucguccugaucgcccucagcauccuggccgugcugaaggggcucuacaacuucgcgaccugcggccugguggggcuggucacguuccuccugcugugcggccgcuccugcaccaccagccucuacaaggggguguacgagcugcagacccuggagcucaacauggagacgcugaacaugugcaugccgcuguccugcaccaagaacaacagccaccacuacaucauggugggcaacgagaccggccucgagcugacccugacgaacaccuccaucaucaaccacaaguucugcaaccucagcgacgcccacaagaagaaccuguacaaccacgcccugauguccaucaucagcaccuuccaccucuccauccccaacuucaaccaguacgaggccaugagcugcgacuucaacgggggcaagaucuccguccaguacaaccugagccacuccuacgccggggacgcggccagccacugcggcaccguggccaacggggugcugcagacguucaugcggauggccuggggcggcuccuacaucgcgcucgacagcggguacggcaagugggacugcaucaugaccuccuaccaguaccugaucauccagaacaccaccugggaggaccacugccaguucagccgccccucccccaucggguaccugggccuccugagccagcggacgcgcgacaucuacaucagccggcgccggcgcggcaccuucaccuggacccuguccgacagcgaggggaaggacacgccgggcggguacugccucacccgguggaugcugaucgaggccgagcugaagugcuucggcaacaccgccgucgccaagugcaacgagaagcacgacgaggaguucugcgacaugcuccgccuguucgacuucugcaagcaggccauccagcggcugaagacccccgcgcagauguccauccagcucaucaacaaggccgugaacgcccugaucaacgaccagcugaucaugaagaaccaccuccgcgacaucauggggauccccuacugcaacuacagcaaguacugguaccugaaccacacgaccaccggcaagaccucccugcccaagugcuggcucgugagcaacggcuccuaccugaacgagacgcacuucagcgacgacaucgagcagcaggccgacaacaugaucaccgagaugcugcagaaggaguacauggagcggcaggggaagaccccgcucggccuggucgaccuguucguguucuccaccagcuucuaccugaucuccaucuuccuccaccuggugaagauccccacgcaccgccacaucgucggcaagagcugccccaagccccaccggcugaaccacauggggaucugcuccugcgggcucuacaagcagccgggcgugcccgugcgcuggaagcgguga

SEQ ID NO: 23038 - RNA, 1476 nt, Artificial Sequence
  derived and/or modified CDS sequence (opt1) from LASV(G502-SLE-2009;Clade IV)__AIT17126__GPCmut2
augggccagaucgugaccuucuuccaggaggucccccacgugaucgaggaggugaugaacaucguccugaucgcccucagcauccuggccgugcugaaggggcucuacaacuucgcgaccugcggccugguggggcugcucacguuccugcugcucugcggccgcuccugcaccaccgggcuguacaagggcgucuacgagcugcagacccucgagcugaacauggagacgcugaacaugugcaugccgcucagcugcaccaagaacaacucccaccacuacaucauggugggcaacgagaccgggcuggagcugacccucacgaacaccagcaucaucaaccacaaguucugcaaccuguccgacgcccacaagaagaaccuguacgaccacgcccucaugagcaucaucuccaccuuccaccugagcauccccaacuucaaccaguacgaggccauguccugcgacuucaacggcgggaagaucagcgugcaguacaaccugucccacagcuacgccggcgacgcggccgaccacugcgggaccgucgccaacggcgugcuccagacguucaugcggauggccuggggcggguccuacaucgcgcuggacagcggccgcgggcggugggacugcaucaugaccuccuaccaguaccugaucauccagaacaccaccugggaggaccacugccaguucagccgccccucccccaucggcuaccucggccugcugagccagcggacgcgcgacaucuacaucucccggcgccggcgcgggaccuucaccuggacccucagcgacagcgagggcaaggacacgcccgggggcuacugccugacccgguggaugcugaucgaggccgagcucaagugcuucgggaacaccgccguggccaagugcaacgagaagcacgacgaggaguucugcgacaugcugcgccuguucgacuucugcaagcaggccauccagcggcucaaggcgccggcccagauguccauccagcugaucaacaaggccgucaacgcccugaucaacgaccagcucgugaugaagaaccaccuccgcgacaucaugggcauccccuacugcaacuacagccgguacugguaccugaaccacaccacgaccggccgcaccucccugcccaagugcuggcuggugagcaacggguccuaccugaacgagacccacuucagcgacgacaucgagcagcaggccgacaacaugaucacggagaugcuccagaaggaguacauggagcggcagggcaagaccccgcuggggcuggucgaccuguucguguucuccaccagcuucuaccucaucuccaucuuccugcaccuggugaagauccccacccaccgccacaucgucggcaagagcugccccaagccccaccggcucaaccacauggggaucugcuccugcggccuguacaagcagccgggcgugcccgugaaguggaagcgcuga

SEQ ID NO: 23039 - RNA, 1476 nt, Artificial Sequence
  derived and/or modified CDS sequence (opt1) from LASV(G733-SLE-2010;Clade IV)__AIT17154__GPCmut2
augggccagaucgugaccuucuuccaggaggucccccacgugaucgaggaggugaugaacaucguccugaucgcccucagcauccuggccgugcugaaggggcucuacaacuucgcgaccugcggcaucguggggcuggucuccuuccugcuccugugcggccgcagcugcacgaccucccuguacaaggggguguacgagcuccagacccuggagcugaacauggagacccucaacaugugcaugccgcugagcugcacgaagaacaacucccaccacuacaucauggugggcaacgagaccggccuggagcucacccugaccaacacgagcaucaucaaccacaaguucugcaaccuguccgacgcccacaagaagaaccucuacgaccacgcccugaugagcaucaucuccaccuuccaccugagcauccccaacuucaaccaguacgaggccauguccugcgacuucaacgggggcaagaucagcguccaguacaaccucucccacagcuacgccggggacgcggccaaccacugcggcaccaucgccaacggggugcugcagaccuucaugcggauggccuggggcggcuccuacaucgcgcuggacagcgggcgcgaccggugggacugcaucaugacguccuaccaguaccucaucauccagaacaccaccugggaggaccacugccaguucagccgccccucccccaucggcuaccuggggcugcucagccagcggacccgcgacaucuacaucagccggcgccggcgcggcacguucaccuggacccuguccgacagcgagggcaaggacacccccgggggcuacugccugacgcgguggaugcucaucgaggccgagcugaagugcuucgggaacaccgccguggccaagugcaacgagaagcacgacgaggaguucugcgacaugcugcgccucuucgacuucugcaagcaggccauccagcggcugaaggcgccggcccagauguccauccagcugaucaacaaggccgucaacgcccucaucaacgaccagcugaucaugaagaaccaccuccgcgacaucaugggcauccccuacugcaacuacagcaaguacugguaccugaaccacaccaccacggggaagaccucccugcccaagugcuggcuggugagcaacggcuccuaccucaacgagacccacuucagcgacgacaucgagcagcaggccgacaacaugaucaccgagaugcugcagaaggaguacauggagcggcagggcaagacgccgcuggggcucguggaccuguucgucuucuccaccagcuucuaccugaucuccaucuuccugcaccucgugaagauccccacccaccgccacguggucggcaagagcugccccaagccccaccggcugaaccacauggggaucugcuccugcggccuguacgggcagccgggcgugcccgugaaguggaagcgcuga

SEQ ID NO: 23040 - RNA, 1476 nt, Artificial Sequence
  derived and/or modified CDS sequence (opt1) from MOPV/LASV reassortant(IGS-1;Clade IV)__AFY05576__GPCmut2
augggccagaucgugaccuucuuccaggaggucccccacgugaucgaggaggugaugaacaucguccugaucgcccucagcgugcuggccgugcugaaggggcucuacaacuucgcgaccugcggccuggucgggcuggugacguuccuccugcugugcggccgcuccugcaccaccagccucuacaaggggguguacgagcugcagacccuggagcucaacauggagacgcugaacaugugcaugccgcuguccugcaccaagaacaacagccaccacuacaucauggucggcaacgagaccggccucgagcugacccugacgaacaccuccaucaucaaccacaaguucugcaaccucagcgacgcccacaagaagaaccuguacgaccacgcccugauguccaucaucagcaccuuccaccucuccauccccaacuucaaccaguacgaggccaugagcugcgacuucaacgggggcaagaucuccgugcaguacaaccugagccacuccuacgccggggacgcggccaaccacugcggcaccguggccaacgggguccugcagacguucaugcggauggccuggggcggcagcuacaucgcgcucgacuccgggcgcggcaacugggacugcaucaugaccagcuaccaguaccugaucauccagaacaccaccugggaggaccacugccaguucucccggcccagccccaucggguaccugggccuccugucccagcgcacgcgggacaucuacaucagccgccggcgccggggcaccuucaccuggacccugagcgacuccgagggggaggacacgccgggcggguacugccucacccgcuggaugcugaucgaggccgagcugaagugcuucggcaacaccgccguggccaagugcaacgagaagcacgacgaggaguucugcgacaugcuccggcuguucgacuucugcaagcaggccauccagcgccugaaggcgcccgcccagaugagcauccagcucaucaacaaggccgugaacgcccugaucaacgaccagcugaucaugaagaaccaccuccgggacaucauggggauccccuacugcaacuacuccaaguacugguaccugaaccacaccacgaccggccgcaccagccugcccaagugcuggcucgucuccaacggcagcuaccugaacgagacccacuucuccgacgacaucgagcagcaggccgacaacaugaucacggagaugcugcagaaggaguacauggagcggcaggggaagaccccgcucggccugguggaccuguucguguucagcaccuccuucuaccugaucagcaucuuccuccaccuggucaagauccccacccaccgccacaucguggggaaguccugccccaagccccaccggcugaaccacaugggcaucugcagcugcgggcucuacaagcagccgggcgugcccgucaaguggaagcgcuga

SEQ ID NO: 23041 - RNA, 1476 nt, Artificial Sequence
  derived and/or modified CDS sequence (opt1) from LASV(LM765-SLE-2012;Clade IV)__AIT17814__GPCmut2
augggccagaucgugaccuucuuccaggaggucccccacgugaucgaggaggugaugaacaucguccugaucgcccucagcauccuggccgugcugaaggggcucuacaacuucgcgaccugcggccugguggggcuggucacguuccuccugcugugcggccgcuccugcaccaccagccucuacaaggggguguacgagcugcagacccuggagcucaacauggagacgcugaacaugugcaugccgcuguccugcaccaagaacaacagccaccacuacaucauggugggcaacgagaccggccucgagcugacccugacgaacaccuccaucaucgaccacaaguucugcaaccucagcgacgcccaccggaagaaccuguacgaccacgcccugauguccaucaucagcaccuuccaccucuccauccccaacuucaaccaguacgaggccaugagcugcgacuucaacgggggcaagaucuccguccaguacaaccugagccacuccuacgccaaggacgcggccgaccacugcgggaccguggccaacggcgugcugcagacguucaugcgcauggccuggggcgggagcuacaucgcgcucgacuccggccgggggcgcugggacugcaucaugaccagcuaccaguaccugaucauccagaacaccaccugggaggaccacugccaguucucccggcccagccccaucggcuaccuggggcuccugucccagcgcacgcgggacaucuacaucagccgccggcgccggggcaccuucaccuggacccugagcgacuccgagggcaaggacacgcccgggggcuacugccucacccgcuggaugcugaucgaggccgagcugaagugcuucgggaacaccgccgucgccaagugcaacgagaagcacgacgaggaguucugcgacaugcuccggcuguucgacuucugcaagcaggccauccagcgccugaaggcgccggcccagaugagcauccagcucaucaacaaggccgugaacgcccugaucaacgaccagcugaucaugaagaaccaccuccgggacaucaugggcauccccuacugcaacuacuccaaguacugguaccugaaccacaccacgaccgggaagaccagccugcccaagugcuggcucguguccaacggcagcuaccugaacgagacccacuucuccgacgacaucgagcagcaggccgacaacaugaucacggagaugcugcagaaggaguacauggagcgccagggcaagaccccgcucgggcuggucgaccuguucguguucagcaccuccuucuaccugaucagcaucuuccuccaccuggugaagauccccacccaccggcacaucgucggcaagcccugccccaagccgcaccgccugaaccacauggggaucugcuccugcggccucuacaagcagcccggggugcccgugaaguggaagcgguga

SEQ ID NO: 23042 - RNA, 1476 nt, Artificial Sequence
  derived and/or modified CDS sequence (opt1) from LASV(LM776-SLE-2012;Clade IV)__AIT17824__GPCmut2
augggccagaucgugaccuucuuccaggaggucccccacgugaucgaggaggugaugaacaucguccugaucgcccucagcauccuggccgugcugaaggggcucuacaacuucgcgaccugcggccugguggggcuggucacguuccuccugcugugcggccgcuccugcaccaccagcguguacaaggggguguacgagcuccagacccuggagcugaacauggagacgcucaacaugugcaugccgcuguccugcaccaagaacaacagccaccacuacaucauggucggcaacgagaccggccuggagcucacccugacgaacaccuccaucaucaaccacaaguucugcaaccugagcgacgcccacaagaagaaccucuacgaccacgcccugauguccaucaucagcaccuuccaccuguccauccccaacuucaaccaguacgaggccaugagcugcgacuucaacgggggcaagaucuccgugcaguacaaccucagccacuccuacgccggggacgcggccaaccacugcggcaccguggccaacgggguccugcagacguucaugcggauggccuggggcggcagcuacaucgcgcuggacuccgggcacggcaagugggacugcaucaugaccagcuaccaguaccucaucauccagaacaccaccugggaggaccacugccaguucucccgccccagccccaucggguaccugggccugcucucccagcggacgcgcgacaucuacaucagccggcgccggcgcggcaccuucaccuggacccugagcgacuccgaggggaaggacacgccgggcggguacugccugacccgguggaugcucaucgaggccgagcugaagugcuucggcaacaccgccguggccaagugcaacgagaagcacgacgaggaguucugcgacaugcugcgccucuucgacuucugcaagcaggccauccagcggcugaaggcgcccgcccagaugagcauccagcugaucaacaaggccgugaacgcccucaucaacgaccagcugaucaugaagaaccaccuccgcgacaucauggggauccccuacugcaacuacuccaaguacugguaccugaaccacaccacgaccggcaagaccagccugcccaagugcuggcuggucuccaacggcagcuaccucaacgagacccacuucuccgacgacaucgagcagcaggccgacaacaugaucacggagaugcugcagaaggaguacauggagcggcaggggaagaccccgcugggccucguggaccuguucguguucagcaccuccuucuaccugaucagcaucuuccugcaccucgucaagauccccacccaccgccacaucguggggaaguccugccccaagccccaccggcugaaccacaugggcaucugcagcugcgggcuguacaagcagccgggcgugcccguccgcuggaagcgguga

SEQ ID NO: 23043 - RNA, 1476 nt, Artificial Sequence
  derived and/or modified CDS sequence (opt1) from LASV(Mad39;Clade IV)__ANH09722__GPCmut2
augggccagaucgugaccuucuuccaggaggucccccacgugaucgaggaggugaugaacaucguccugaucgcccucagcauccuggccgugcugaaggggcucuacaacguggcgaccugcggccugaucgggcuggucacguuccuccugcugugcggccgcuccugcaccaccacccucuacaaggggguguacgagcugcaggcccuggagcucaacauggagacgcugaacaugugcaugccgcugagcugcaccaagaacaacucccaccacuacauccgggugggcaacgagaccggccucgagcugacccugacgaacaccagccucaucaaccacaaguucugcaaccuguccgacgcccacaagaagaaccuguacgaccacgcccucaugagcaucaucuccaccuuccaccugagcauccccaacuucaaccaguacgaggccauguccugcgacuucaacgacgggaagaucagcguccaguacaaccugucccacaccuacgcgggcgacacggccaaccacugcgggaccguggccaacggcgugcuccagaccuucaugcgcauggccuggggcgggagcuacaucgcgcuggacuccggccgcgggggcugggacugcaucaugaccagcuaccaguaccugaucauccagaacacgaccugggaggaccacugccaguucucccggcccagccccaucggguaccucggccugcugucccagcggacccgcgacaucuacaucagccggcgccggcgcggcaccuucacguggacccucuccgacagcgaggggaaggacaccccgggcggguacugccugacccgguggaugcugaucgaggccgagcucaagugcuucggcaacacggccgucgccaagugcaacgagaagcacgacgaggaguucugcgacaugcugcgccuguucgacuucugcaagcaggccauccagcggcucaaggcgcccgcccagaugagcauccagcugaucaacaaggccgugaacgcccugaucaacgaccagcucaucaugaagaaccaccuccgcgacaucauggggauccccuacugcaacuacuccaaguacugguaccugaaccacaccgugaccggcaagaccagccugcccaagugcuggcuggucuccaacggcagcuaccugaacgagacgcacuucuccgacgacaucgagcagcaggccgacaacaugaucaccgagaugcuccagaaggaguacauggagcggcaggggaagaccccgcugggccugguggaccuguucguguucagcaccuccuucuaccucaucagcaucuuccugcaccuggucaagauccccacgcaccgccacgugguggggaagcccugccccaagccgcaccggcucaaccacaugggcaucugcuccugcggguucuacaagcagcccggcguccccgugcgcuggaagcgguga

SEQ ID NO: 23044 - RNA, 1476 nt, Artificial Sequence
  derived and/or modified CDS sequence (opt1) from LASV(Z0947-SLE-2011;Clade IV)__AIT17840__GPCmut2
augggccagaucgugaccuucuuccaggaggucccccacgugaucgaggaggugaugaacaucguccugaucgcccucagcauccuggccgugcugaaggggcucuacaacuucgcgaccugcggccugguggggcuggucacguuccuccugcugugcggccgcuccugcaccaucagccucuacaaggggguguacgagcugcagacccuggagcucaacauggagacccugaacaugugcaugccgcuguccugcacgaagaacaacagccaccacuacaucauggugggcaacgagaccggccucgagcugacccugaccaacacguccaucaucaaccacaaguucugcaaccucagcgacgcccacaagaagaaccuguacgaccacgcccugauguccaucaucagcaccuuccaccucuccauccccaacuucaaccaguacgaggccaugagcugcgacuucaacgggggcaagaucuccguccaguacaaccugagccacuccuacgccggggacgcggccaaccacugcggcaccguggccaacggggugcugcagaccuucaugcggauggccuggggcggcagcuacaucgcgcucgacuccgggcgcgaccggugggacugcaucaugacgagcuaccaguaccugaucauccagaacaccaccugggaggaccacugccaguucucccgccccagccccaucggcuaccuggggcuccugucccagcggacccgcgacaucuacaucagccggcgccggcgcggcacguucaccuggacccugagcgacuccgagggcaaggacacccccgggggcuacugccucacgcgguggaugcugaucgaggccgagcugaagugcuucgggaacaccgccgucgccaagugcaacgagaagcacgacgaggaguucugcgacaugcuccgccuguucgacuucugcaagcaggccauccagcggcugaaggcgccggcccagaugagcauccagcucaucaacaaggccgugaacgcccugaucaacgaccagcugaucaugaagaaccaccuccgcgacaucaugggcauccccuacugcaacuacuccaaguacugguaccugaaccacaccaccacggggaagaccagccugcccaagugcuggcucguguccaacggcagcuaccugaacgagacccacuucuccgacgacaucgagcagcaggccgacaacaugaucaccgagaugcugcagaaggaguacauggagcggcagggcaagacgccgcucgggcuggucgaccuguucguguucagcaccuccuucuaccugaucagcaucuuccuccaccuggugaagauccccacccaccgccacaucgucggcaagcccugccccaagccgcaccggcugaaccacauggggaucugcuccugcggccucuacaagcagcccggggugcccgugaaguggaagcgcuga

SEQ ID NO: 23045 - RNA, 1476 nt, Artificial Sequence
  derived and/or modified CDS sequence (opt4) from LASV(Josiah;Clade IV)__NP_694870__GPCmut2
augggccagaucgugaccuucuuccaggaggugccccacgugaucgaggaggugaugaacaucgugcugaucgcccugagcgugcuggccgugcugaagggccuguacaacuucgccaccugcggccuggugggccuggugaccuuccugcugcugugcggcagaagcugcaccaccagccuguacaagggcguguacgagcugcagacccuggagcugaacauggagacccugaacaugugcaugccccugagcugcaccaagaacaacagccaccacuacaucauggugggcaacgagaccggccuggagcugacccugaccaacaccagcaucaucaaccacaaguucugcaaccugagcgacgcccacaagaagaaccuguacgaccacgcccugaugagcaucaucagcaccuuccaccugagcauccccaacuucaaccaguacgaggccaugagcugcgacuucaacggcggcaagaucagcgugcaguacaaccugagccacagcuacgccggcgacgccgccaaccacugcggcaccguggccaacggcgugcugcagaccuucaugagaauggccuggggcggcagcuacaucgcccuggacagcggcagaggcaacugggacugcaucaugaccagcuaccaguaccugaucauccagaacaccaccugggaggaccacugccaguucagcagacccagccccaucggcuaccugggccugcugagccagagaaccagagacaucuacaucagcagaagaagaagaggcaccuucaccuggacccugagcgacagcgagggcaaggacacccccggcggcuacugccugaccagauggaugcugaucgaggccgagcugaagugcuucggcaacaccgccguggccaagugcaacgagaagcacgacgaggaguucugcgacaugcugagacuguucgacuucugcaagcaggccauccagagacugaaggcccccgcccagaugagcauccagcugaucaacaaggccgugaacgcccugaucaacgaccagcugaucaugaagaaccaccugagagacaucaugggcauccccuacugcaacuacagcaaguacugguaccugaaccacaccaccaccggcagaaccagccugcccaagugcuggcuggugagcaacggcagcuaccugaacgagacccacuucagcgacgacaucgagcagcaggccgacaacaugaucaccgagaugcugcagaaggaguacauggagagacagggcaagaccccccugggccugguggaccuguucguguucagcaccagcuucuaccugaucagcaucuuccugcaccuggugaagauccccacccacagacacaucgugggcaagagcugccccaagccccacagacugaaccacaugggcaucugcagcugcggccuguacaagcagcccggcgugcccgugaaguggaagagauga

SEQ ID NO: 23046 - RNA, 1473 nt, Artificial Sequence
  derived and/or modified CDS sequence (opt4) from LASV(LP;Clade I)__AAF86701__GPCmut2
augggccagaucaucaccuucuuccaggaggugccccacgugaucgaggaggugaugaacaucgugcugaucgcccugagccugcuggccauccugaagggccuguacaacaucgccaccugcggcaucaucggccugguggccuuccuguuccugugcggcaagagcugcagccugacccugaagggcggcuacgagcugcagacccuggagcugaacauggagacccugaacaugugcaugccccugagcugcaccaagaacagcagccaccacuacaucagagugggcaacgagaccggccuggagcugacccugaccaacaccagcaucaucaaccacaaguucugcaaccugagcgacgcccacaagaagaaccuguacgaccacgcccugaugagcaucaucagcaccuuccaccugagcauccccaacuucaaccaguacgaggccaugagcugcgacuucaacggcggcaagaucagcgugcaguacaaccugagccacagcuacgccggcgacgccgccgagcacugcggcaccguggccaacggcgugcugcagaccuucaugagaauggccuggggcggcagauacaucgcccuggacagcggcaagggcaacugggacugcaucaugaccagcuaccaguaccugaucauccagaacaccaccugggaggaccacugccaguucagcagacccagccccaucggcuaccugggccugcugagccagagaaccagagacaucuacaucagcagaagaagaagaggcaccuucaccuggacccugagcgacagcgagggcaacgagacccccggcggcuacugccugaccagauggaugcugaucgaggccgagcugaagugcuucggcaacaccgccguggccaagugcaacgagaagcacgacgaggaguucugcgacaugcugagacuguucgacuucugcaagcaggccaucagaagacugaaggcccccgcccagaugagcauccagcugaucaacaaggccgugaacgcccugaucaacgaccagcugaucaugaagaaccaccugagagacaucaugggcauccccuacugcaacuacagcaaguacugguaccugaaccacaccagcagcggcagaaccagccugcccaagugcuggcugaucagcaacggcagcuaccugaacgagacccaguucagcgacgacaucgagcagcaggccgacaacaugaucaccgagaugcugcagaaggaguacaucgagagacagggcaagaccccccugggccugguggacaucuucaucuucagcaccagcuucuaccugaucagcaucuuccugcaccugaucaagauccccacccacagacacaucgugggcaagcccugccccaagccccacagacugaaccacaugggcgugugcagcugcggccuguacaagcaccccggcgugcccaccaaguggaagagauga

SEQ ID NO: 23047 - RNA, 1473 nt, Artificial Sequence
  derived and/or modified CDS sequence (opt4) from LASV(803213;Clade II)__AAF86703__GPCmut2
augggccagaucaucaccuucuuccaggaggugccccacgugaucgaggaggugaugaacaucgugcugaucgcccugagccugcuggccauccugaagggcaucuacaacguggccaccugcggccuguucggccugaucagcuuccugcugcugugcggcagaagcugcagcgugaccuacaagggcguguacgagcugcagacccuggagcugaacauggccaaccugaacaugugcaugccccugagcugcaccaagaacaacagccaccacuacaucauggugggcaacgagaccggccuggagcugacccugaccaacaccagcaucaucaaccacaaguucugcaaccugagcgacgcccacaagaagaaccuguacgaccacgcccugaugagcaucaucagcaccuuccaccugagcauccccaacuucaaccaguacgaggccaugagcugcgacuucaacggcggcaagaucagcgugcaguacaaccugagccacagcuucgccguggacgccgccaaccacugcggcaccaucgccaacggcgugcugcagaccuucaugagaauggccuggggcggcagcuacaucgcccuggacagcggcaagggcaacugggacugcaucaugaccagcuaccaguaccugaucauccagaacaccaccugggaggaccacugccaguucagcagacccagccccaucggcuaccugggccugcugagccagagaaccagagacaucuacaucagcagaagaagaagaggcaccuucaccuggacccugagcgacagcgagggcaacgaggcccccggcggcuacugccugaccagauggaugcugaucgaggccgagcugaagugcuucggcaacaccgccguggccaagugcaacgagaagcacgacgaggaguucugcgacaugcugagacuguucgacuucugcaagcaggccaucaagagacugaagacccccgcccagaugagcauccagcugaucaacaaggccgugaacgcccugaucaacgaccagcugaucaugaagaaccaccugagagacaucaugggcauccccuacugcaacuacagcagauacugguaccugaaccacaccgugaccggcaagaccagccugcccagaugcuggcuggugagcaacggcagcuaccugaacgagacccacuucagcgacgacaucgagcagcaggccgacaacaugaucaccgagaugcugcagaaggaguacauggacagacagggcaagaccccccugggccugguggaccuguucguguucagcaccagcuucuaccugaucagcaucuuccugcaccuggugaagauccccacccacagacacaucgugggcaagcccugccccaagccccacagacugaaccacaugggcaucugcagcugcggccuguacaagcaccccggcgugcccgugaaguggaagagauga

SEQ ID NO: 23048 - RNA, 1473 nt, Artificial Sequence
  derived and/or modified CDS sequence (opt4) from LASV(GA391;Clade III)__CAA36645__GPCmut2
augggccagaucgugaccuucuuccaggaggugccccacgugaucgaggaggugaugaacaucgugcugaucgcccugagcauccuggccauccugaagggccuguacaacguggccaccugcggccugaucggccuggugaccuuccugcugcugagcggcagaagcugcagccugaucuacaagggcaccuacgagcugcagacccuggagcugaacauggagacccugaacaugugcaugccccugagcugcaccaagaacaacagccaccacuacaucagagugggcaacgagaccggccuggagcugacccugaccaacaccagcauccugaaccacaaguucugcaaccugagcgacgcccacaagagaaaccuguacgaccacagccugaugagcaucaucagcaccuuccaccugagcauccccaacuucaaccaguacgaggccaugagcugcgacuucaacggcggcaagaucaccgugcaguacaaccugagccacagcuucgccguggacgccgccggccacugcggcacccuggccaacggcgugcugcagaccuucaugagaauggccuggggcggcagcuacaucgcccuggacagcggcagaggcaacugggacugcaucaugaccagcuaccaguaccugaucauccagaacaccaccugggacgaccacugccaguucagcagacccagccccaucggcuaccugggccugcugagccagagaaccagagacaucuacaucagcagaagaagaagaggcaccuucaccuggacccugagcgacagcgagggcaacgagacccccggcggcuacugccugaccagauggaugcugaucgaggccgagcugaagugcuucggcaacaccgccguggccaagugcaacgagaagcacgacgaggaguucugcgacaugcugagacuguucgacuucugcaagcaggccaucagaagacugaagacccccgcccagaugagcauccagcugaucaacaaggccgugaacgcccugaucaacgaccagcugaucaugaagaaccaccugagagacaucaugggcauccccuacugcaacuacagcagauacugguaccugaaccacaccagcaccggcaagaccagccugcccagaugcuggcugaucagcaacggcagcuaccugaacgagaccaaguucagcgacgacaucgagcagcaggccgacaacaugaucaccgagaugcugcagaaggaguacaucgacagacagggcaagaccccccugggccugguggaccuguucguguucagcaccagcuucuaccugaucagcaucuuccugcaccuggugaagauccccacccacagacacaucgugggcaagcccugccccaagccccacagacugaaccacaugggcaucugcagcugcggccuguacaagcagcccggcgugcccgugagauggaagagauga

SEQ ID NO: 23049 - RNA, 1476 nt, Artificial Sequence
  derived and/or modified CDS sequence (opt4) from LASV(AV;Clade V)__CCA30314__GPCmut2
augggccagaucgugaccuucuuccaggaggugccccacgugaucgaggaggugaugaacaucgugcugaucgcccugagcauccuggccgugcugaagggccuguacaacaucgccaccugcggccugaucggccugaucaccuuccugcugcugugcggcagaagcugcagcagcaaccuguacaagggcguguacgagcugcagagccuggaccugaacauggagacccugaacaugugcaugccccugagcugcaccaagaacaacagccaccacuacaucagagugggcaacgacaccggccuggagcugacccugaccaacaccagcauccugaaccacaaguucugcaaccugagcgacgcccacaagaaggaccuguacgaccacgcccugaugagcaucaucagcaccuuccaccugagcauccccaacuucaaccaguacgaggccaugagcugcgacuucaacggcggcaagaucagcgugcaguacaaccugagccacagcuacgccaucgacgccgccaaccacugcggcaccguggccaacggcauccugcagaccuucaugagaauggccuggggcggcagcuacaucgcccuggacagcggcagaggcaacugggacugcaucaugaccagcuaccaguaccugaucauccagaacaccaccugggagaaccacugccaguucagcagacccagccccaucggcuaccugggccugcugagccagagaaccagagacaucuacaucagcagaagaagaagaggcaccuucaccuggacccugagcgacagcgagggcaacgccacccccggcggcuacugccugaccagauggaugcugaucgaggccgagcugaagugcuucggcaacaccgccguggccaagugcaacgagaagcacgacgaggaguucugcgacaugcugagacuguucgacuucugcaagcaggccaucagcagacugaagagccccgcccagaugagcauccagcugaucaacaaggccgugaacgcccugaucaacgaccagcugaucaugaagaaccaccugagagacaucaugggcauccccuacugcaacuacagcaaguacugguaccugaaccacaccaucaccggcaagaccagccugcccaagugcuggcuggugagcaacggcagcuaccugaacgagacccacuucagcgacgacaucgagcagcaggccgacaacaugaucaccgagaugcugcagaaggaguacauggagagacagggcaagaccccccugggccugguggaccuguucguguucagcaccagcuucuaccugaucagcaucuuccugagacuggugaagauccccacccacagacacaucgugggcaagcccugccccaagccccacagacugaaccacaugggcaucugcagcugcggccuguacaagcagcccggcgugcccgugagauggaagagauga

SEQ ID NO: 23050 - RNA, 1473 nt, Artificial Sequence
  derived and/or modified CDS sequence (opt4) from LASV(Togo/2016/7082;Clade VI)__AMR44577__GPCmut2
augggccagaucaucaccuucuuccaggaggugccccacgugaucgaggaggugaugaacaucgugcugaucgcccugagccugcuggccauccugaagggcguguacaacguggccaccugcggcaucaucggccuggugaccuuccuguuccugugcggcagaagcugcagccugaucuacaagggcagcuacgagcugcagacccuggagcugaacauggagacccugaacaugugcaugccccugagcugcaccaagaacagcagccaccacuacaucagagugggcaacgagaccggccuggagcugacccugaccaacaccagcaucaucaaccacaaguucugcaaccugagcgacgcccacaagagaaaccuguacgaccacgcccugaugagcauccugagcaccuuccaccugagcauccccaacuucaaccaguacgaggccaugagcugcgacuucaacggcggcaagaucagcgugcaguacaaccugagccacgccuacgccguggacgccgccgagcacugcggcaccguggccaacggcgugcugcagaccuucaugagaauggccuggggcggcagcuacaucgcccuggacagcggcagaggcaacugggacugcaucaugaccagcuaccaguaccugaucauccagaacaccaccugggaggaccacugccaguucagcagacccagccccaucggcuaccugggccugcugagccagagaaccagagacaucuacaucagcagaagaagaagaggcaccuucaccuggacccugagcgacagcgagggcaacgagacccccggcggcuacugccugaccagauggaugcugaucgaggccgagcugaagugcuucggcaacaccgccguggccaagugcaacgagaagcacgacgaggaguucugcgacaugcugagacuguucgacuucugcaagcaggccauccagagacugaagagccccgcccagaugagcauccagcugaucaacaaggccgugaacgcccugaucaacgaccagcugaucaugaagaaccaccugagagacaugaugggcauccccuacugcaacuacagcaaguacugguaccugaaccacaccagcagcggcagaaccagccugcccaagugcuggcuggugagcaacggcagcuaccugaacgagacccacuucagcgacgacaucgagcagcaggccgacaacaugaucaccgagaugcugcagaaggaguacaucgacagacagggcaagaccccccugggccugguggaccuguucguguucagcaccagcuucuaccugaucagcaucuuccugcaccugaucaagauccccacccacagacacaucgugggcaagcccugccccaagccccacagacugaaccacaugggcaucugcagcugcggccuguacaagcagcccggcgugcccaccagauggaagagauga

SEQ ID NO: 23051 - RNA, 1473 nt, Artificial Sequence
  derived and/or modified CDS sequence (opt4) from LASV(KAK-428;Clade n.d. (VII))__ANH09740__GPCmut2
augggccagaucgugaccuucuuccaggaggugccccacgugaucgaggaggugaugaacaucgugcugaucgcccugagccugcuggccauccugaagggccuguacaacuucgccaccugcggcgugaucggccugaucaccuuccugcugcugugcggcagaagcugcagcgccaccuacaagggccaguacgagcugcagacccuggagcugaacauggagagccugaacaugugcaugccccugagcugcaccaagaacaacagccaccacuacaucagagccggcaacaacaccggccuggagcugacccugaccaacaccagcaucaucagccacaaguucugcaaccugagcgacgcccacaagaagaaccuguacgaccacacccugaugagcaucaucaccaccuuccaccugagcauccccaacuucaaccaguacgaggccaugagcugcgacuucaacggcggcaagaucagcauccaguacaaccugagccacagcuacgccggcgacgccgcccagcacugcggcaccguggccaacggcgugcugcagaccuucaugagaauggccuggggcggcagcuaccuggcccuggacagcggcagaagaggcugggacugcaucaucagcagcuaccaguaccugaucauccagaacaccaccugggacgaccacugccaguucagcagacccagccccaucggcuaccugggcuucgugagccagaagaccagagacaucuacaucagcagaagaagaagaggcaccuucaccuggacccugagcgacagcgagggccacgacaugcccggcggcuacugccugaccagauggaugcugaucgaggccgaccugaagugcuucggcaacaccgccguggccaagugcaacgagaagcacgacgaggaguucugcgacauguggagacuguucgacuucugcaagcaggccauccagagacugaaggcccccgcccagaugaacauccagcugaucaacaaggccgugaacgcccugaucaacgaccagcugaugaugaagaaccaccugagagacaucaugggcauccccuacugcaacuacagcaaguucugguaccugaacaacaccaccaccggcagaaccagccugcccagaugcuggcugaucagcaacggcagcuaccugaacgagacccacuucagcgacgacaucgagcagcaggccgacaacaugaucaccgagaugcugcagaaggaguacauggacagacagggcaagaccccccugggccugguggaccuguucguguucagcaccagcuucuaccugaucaccaucuuccugcaccuggugaagauccccacccacagacacaucgugggcaagcccugccccaagccccacagacugaaccacaugggcaucugcagcugcggccuguacaagcagcccggcgugcccgugagauggaagagauga

SEQ ID NO: 23052 - RNA, 1473 nt, Artificial Sequence; identical to SEQ ID NO: 23046
  derived and/or modified CDS sequence (opt4) from LASV(Pinneo-NIG-1969;Clade I)__AIT17836__GPCmut2

SEQ ID NO: 23053 - RNA, 1473 nt, Artificial Sequence
  derived and/or modified CDS sequence (opt4) from LASV(ISTH0009-NIG-2011;Clade II)__AIT17404__GPCmut2
augggccagaucaucaccuucuuccaggaggugccccacgugaucgaggaggugaugaacaucgugcugaucgcccugagccugcuggccauccugaagggcaucuacaacguggccaccugcggccuguucggccuggugagcuuccugcugcugugcggcagaagcugcagcaccaccuacaagggcguguacgagcugcagacccuggagcuggacauggccagccugaacaugugcaugccccugagcugcaccaagaacaacagccaccacuacaucauggugggcaacgagaccggccuggagcugacccugaccaacaccagcaucaucaaccacaaguucugcaaccugagcgacgcccacaagaagaaccuguacgaccacgcccugaugagcaucaucagcaccuuccaccugagcauccccaacuucaaccaguacgaggccaugagcugcgacuucaacggcggcaagaucagcgugcaguacaaccugagccacgccuacgccguggacgccgccaaccacugcggcaccaucgccaacggcgugcugcagaccuucaugagaauggccuggggcggcagcuacaucgcccuggacagcggcaagggcagcugggacugcaucaugaccagcuaccaguaccugaucauccagaacaccaccugggaggaccacugccaguucagcagacccagccccaucggcuaccugggccugcugagccagagaaccagagacaucuacaucagcagaagaagaagaggcaccuucaccuggacccugagcgacagcgagggcaacgagacccccggcggcuacugccugaccagauggaugcugaucgaggccgagcugaagugcuucggcaacaccgccguggccaagugcaacgagaagcacgacgaggaguucugcgacaugcugagacuguucgacuucugcaagcaggccaucagaagacugaagacccccgcccagaugagcauccagcugaucaacaaggccgugaacgcccugaucaacgaccagcugaucaugaagaaccaccugagagacaucaugggcauccccuacugcaacuacagcaaguacugguaccugaaccacaccgugaccggcaagaccagccugcccagaugcuggcuggugagcaacggcagcuaccugaacgagacccacuucagcgacgacaucgagcagcaggccgacaacaugaucaccgagcugcugcagaaggaguacauggacagacagggcaagaccccccugggccugguggaccuguucguguucagcaccagcuucuaccugaucagcaucuuccugcaccugaucaagauccccacccacagacacaucaccggcaagcccugccccaagccccacagacugaaccacaugggcaucugcagcugcggccuguacaagcaccccggcgugcccgugaaguggaagagauga

SEQ ID NO: 23054 - RNA, 1473 nt, Artificial Sequence
  derived and/or modified CDS sequence (opt4) from LASV(ISTH2010-NIG-2012;Clade II)__AIT17482__GPCmut2
augggccagaucaucaccuucuuccaggaggugccccacgugaucgaggaggugaugaacaucgugcugaucgcccugagccugcuggccauccugaagggcaucuacaacguggccaccugcggccuguucggccuggugagcuuccugcugcugugcggcagaagcugcagcaccaccuacaagggcguguacgagcugcagacccuggagcuggacauggccagccugaacaugugcaugccccugagcugcaccaagaacaacagccaccacuacaucauggugggcaacgagaccggccuggagcugacccugaccaacaccagcaucaucaaccacaaguucugcaaccugagcgacgcccacaagaagaaccuguacgaccacgcccugaugagcaucaucagcaccuuccaccugagcauccccaacuucaaccaguacgaggccaugagcugcgacuucaacggcggcaagaucagcgugcaguacaaccugagccacgccuacgccguggacgccgccaaccacugcggcaccaucgccaacggcgugcugcagaccuucaugagaauggccuggggcggcagcuacaucgcccuggacagcggcaagggcagcugggacugcaucaugaccagcuaccaguaccugaucauccagaacaucaccugggaggaccacugccaguucagcagacccagccccaucggcuaccugggccugcugagccagagaaccagagacaucuacaucagcagaagaagaagaggcaccuucaccuggacccugagcgacagcgagggcaacgagacccccggcggcuacugccugaccagauggaugcugaucgaggccgagcugaagugcuucggcaacaccgccguggccaagugcaacgagaagcacgacgaggaguucugcgacaugcugagacuguucgacuucugcaagcaggccaucagaagacugaagacccccgcccagaugagcauccagcugaucaacaaggccgugaacgcccugaucaacgaccagcugaucaugaagaaccaccugagagacaucaugggcauccccuacugcaacuacagcaaguacugguaccugaaccacaccgugaccggcaagaccagccugcccagaugcuggcuggugagcaacggcagcuaccugaacgagacccacuucagcgacgacaucgagcagcaggccgacaacaugaucaccgagcugcugcagaaggaguacaucgacagacagggcaagaccccccugggccugguggaccuguucguguucagcaccagcuucuaccugaucagcaucuuccugcaccuggugaagauccccacccacagacacguggugggcaagcccugccccaagccccacagacugaaccacaugggcaucugcagcugcggccuguacaagcaccccggcgugcccgugaaguggaagagauga

SEQ ID NO: 23055 - RNA, 1473 nt, Artificial Sequence
  derived and/or modified CDS sequence (opt4) from LASV(Lassa virus/H.sapiens-wt/NGA/2015/ISTH_0543;Clade II)__AVO03639__GPCmut2
augggccagaucaucaccuucuuccaggaggugccccacgugaucgaggaggugaugaacaucgugcugaucgcccugagccugcuggccauccugaagggcaucuacaacguggccaccugcggccuguucggccuggugagcuuccugcugcugugcggcagaagcugcagcaccaccuacaagggcguguacgagcugcagacccuggagcuggacauggccaaccugaacaugugcaugccccugagcugcaccaagaacaacagccaccacuacaucauggugggcaacgagaccggccuggagcugacccugaccaacaccagcaucaucaaccacaaguucugcaaccugagcgacgcccacaagaagaaccuguacgaccacgcccugaugagcaucaucagcaccuuccaccugagcauccccaacuucaaccaguacgaggccaugagcugcgacuucaacggcggcaagaucagcgugcaguacaaccugagccacaccuacgccguggacgccgccaaccacugcggcaccaucgccaacggcgugcugcagaccuucaugagaauggccuggggcggcagcuacaucgcccuggacagcggcaagggcagcugggacugcaucaugaccagcuaccaguaccuggugauccagaacaccaccugggaggaccacugccaguucagcagacccagccccaucggcuaccugggccugcugagccagagaaccagagacaucuacaucagcagaagaagaagaggcaccuucaccuggacccugagcgacagcgagggcaacgagacccccggcggcuacugccugaccagauggaugcugaucgaggccgagcugaagugcuucggcaacaccgccguggccaagugcaacgagaagcacgacgaggaguucugcgacaugcugagacuguucgacuucugcaagcaggccaucagaagacugaagacccccgcccagaugagcauccagcugaucaacaaggccgugaacgcccugaucaacgaccagcugaucaugaagaaccaccugagagacaucaugggcauccccuacugcaacuacagcaaguacugguaccugaaccacaccgugaccggcaagaccagccugcccagaugcuggcuggugagcaacggcagcuaccugaacgagacccacuucagcgacgacaucgagcagcaggccgacaacaugaucaccgagcugcugcagaaggaguacaucgacagacagggcaagaccccccugggccugguggaccuguucguguucagcaccagcuucuaccugaucagcaucuuccugcaccuggugaagauccccacccacagacacaucaccggcaagcccugccccaagccccacagacugaaccacaugggcaucugcagcugcggccuguacaagcaccccggcgugcccgugaaguggaagagauga

SEQ ID NO: 23056 - RNA, 1473 nt, Artificial Sequence
  derived and/or modified CDS sequence (opt4) from LASV(Lassa virus/H.sapiens-wt/NGA/2016/ISTH_0009;Clade II)__AVO03571__GPCmut2
augggccagaucaucaccuucuuccaggaggugccccacgugaucgaggaggugaugaacaucgugcugaucgcccugagccugcuggccauccugaagggcaucuacaacguggccaccugcggccugcugggccuggugagcuuccugcugcugugcggcagaagcugcagcaccaccuacaagggcguguacgagcugcagacccuggagcuggacauggccagccugaacaugugcaugccccugagcugcaccaagaacaacagccaccacuacaucauggugggcaacgagaccggccuggagcugacccugaccaacaccagcaucaucaaccacaaguucugcaaccugagcgacgcccacaagaagaaccuguacgaccacgcccugaugagcaucaucagcaccuuccaccugagcauccccaacuucaaccaguacgaggccaugagcugcgacuucaacggcggcagaaucagcgugcaguacaaccugagccacagcuacgccguggacgccgccaaccacugcggcaccaucgccaacggcgugcugcagaccuucaugagaauggccuggggcggcagcuacaucgcccuggacagcggcaagggcagcugggacugcaucaugaccagcuaccaguaccugaucauccagaacaccaccugggaggaccacugccaguucagcagacccagccccaucggcuaccugggccugcugagccagagaaccagagacaucuacaucagcagaagaagaagaggcaccuucaccuggacccugagcgacagcgagggcaacgagacccccggcggcuacugccugaccagauggaugcugaucgaggccgagcugaagugcuucggcaacaccgccguggccaagugcaacgagaagcacgacgaggaguucugcgacaugcugagacuguucgacuucugcaagcaggccaucagaagacugaagacccccgcccagaugagcauccagcugaucaacaaggccgugaacgcccugaucaacgaccagcugaucaugaagaaccaccugagagacaucaugggcauccccuacugcaacuacagcaaguacugguaccugaaccacaccgugaccggcaagaccagccugcccagaugcuggcuggugagcaacggcagcuaccugaacgagacccacuucagcgacgacaucgagcagcaggccgacaacaugaucaccgagcugcugcagaaggaguacaucgacagacagggcaagaccccccugggccugguggaccuguucguguucagcaccagcuucuaccugaucagcaucuuccugcaccuggugaagauccccacccacagacacaucaccggcaagcccugccccaagccccacagacugaaccacaugggcaucugcagcugcggccuguacaaccaccccggcgugcccgugaaguggaagagauga

SEQ ID NO: 23057 - RNA, 1473 nt, Artificial Sequence
  derived and/or modified CDS sequence (opt4) from LASV(Lassa virus/H.sapiens-wt/NGA/2016/ISTH_0017;Clade II)__AVO03567__GPCmut2
augggccagaucaucaccuucuuccaggaggugccccacgugaucgaggaggugaugaacaucgugcugaucgcccugagccugcuggccauccugaagggcaucuacaacguggccaccugcggccuguucggccuggugagcuuccugcugcugugcggcagaagcugcagcaccaccuacaagggcguguacgagcugcagacccuggagcuggacauggccagccugaacaugugcaugccccugagcugcaccaagaacaacagccaccacuacaucauggugggcaacgagaccggccuggagcugacccugaccaacaccagcaucaucaaccacaaguucugcaaccugagcgacgcccacaagaagaaccuguacgaccacgcccugaugagcaucaucagcaccuuccaccugagcauccccaacuucaaccaguacgaggccaugagcugcgacuucaacggcggcaagaucagcgugcaguacaaccugagccacaccuacgccaucgacgccgccaaccacugcggcaccaucgccaacggcgugcugcagaccuucaugagaauggccuggggcggcagcuacaucgcccuggacagcggcaagggcagcugggacugcaucaugaccagcuaccaguaccugaucauccagaacaccaccugggaggaccacugccaguucagcagacccagccccaucggcuaccugggccugcugagccagagaaccagagacaucuacaucagcagaagaagaagaggcaccuucaccuggacccugagcgacagcgagggcaacgagacccccggcggcuacugccugaccagauggaugcugaucgaggccgagcugaagugcuucggcaacaccgccguggccaagugcaacgagaagcacgacgaggaguucugcgacaugcugagacuguucgacuucugcaagcaggccaucagaagacugaagacccccgcccagaugagcauccagcugaucaacaaggccgugaacgcccugaucaacgaccagcugaucaugaagaaccaccugagagacaucaugggcauccccuacugcaacuacagcaaguacugguaccugaaccacaccgugaccggcaagaccagccugcccagaugcuggcuggugagcaacggcagcuaccugaacgagacccacuucagcgacgacaucgagcagcaggccgacaacaugaucaccgagcugcugcagaaggaguacauggacagacagggcaagaccccccugggccugguggaccuguucguguucagcaccagcuucuaccugaucagcaucuuccugcaccuggugagaauccccacccacagacacgugaucggcaagcccugccccaagccccacagacugaaccacaugggcaucugcagcugcggccuguacaagcaccccggcgugcccgugaaguggaagagauga

SEQ ID NO: 23058 - RNA, 1473 nt, Artificial Sequence
  derived and/or modified CDS sequence (opt4) from LASV(Lassa virus/H.sapiens-wt/NGA/2018/ISTH_0959;Clade II)__AVV65099__GPCmut2
augggccagaucaucaccuucuuccaggaggugccccacgugaucgaggaggugaugaacaucgugcugaucgcccugagccugcuggccauccugaagggcaucuacaacguggugaccugcggccuguucggccuggugagcuuccugcugcugugcggcagaagcugcagcaccaccuacaagggcguguacgagcugcagacccuggagcuggacauggccagccugaacaugugcaugccccugagcugcaccaagaacaacagccaccacuacaucauggugggcaacgagaccggccuggagcugacccugaccaacaccagcaucaucaaccacaaguucugcaaccugagcgacgcccacaagaagaaccuguacgaccacgcccugaugagcaucaucagcaccuuccaccugagcauccccaacuucaaccaguacgaggccaugagcugcgacuucaacggcggcaagaucagcgugcaguacaaccugagccacgccuacgccaucgacgccgccaaccacugcggcaccaucgccaacggcgugcugcagaccuucaugagaauggccuggggcggcagcuacaucgcccuggacagcggcaagggcagcugggacugcaucaugaccagcuaccaguaccugaucauccagaacaccaccugggaggaccacugccaguucagcagacccagccccaucggcuaccugggccugcugagccagagaaccagagacaucuacaucagcagaagaagaagaggcaccuucaccuggacccugagcgacagcgagggcaacgagacccccggcggcuacugccugaccagauggaugcugaucgaggccgagcugaagugcuucggcaacaccgccguggccaagugcaacgagaagcacgacgaggaguucugcgacaugcugagacuguucgacuucugcaagcaggccaucagaagacugaagacccccgcccagaugagcauccagcugaucaacaaggccgugaacgcccugaucaacgaccagcugaucaugaagaaccaccugagagacaucaugggcauccccuacugcaacuacagcaaguacugguaccugaaccacaccgugaccggcaagaccagccugcccagaugcuggcuggugagcaacggcagcuaccugaacgagacccacuucagcgacgacaucgagcagcaggccgacaacaugaucaccgagcugcugcagaaggaguacaucgacagacagggcaagaccccccugggccugguggaccuguucguguucagcaccagcuucuaccugaucagcaucuuccugcaccuggugaagauccccacccacagacacgugaucggcaagcccugccccaagccccacagacugaaccacaugggcaucugcagcugcggccuguacaagcaccccggcgugcccgugaaguggaagagauga

SEQ ID NO: 23059 - RNA, 1473 nt, Artificial Sequence
  derived and/or modified CDS sequence (opt4) from LASV(LASV003-NIG-2008;Clade II)__AIT17580__GPCmut2
augggccagaucaucaccuucuuccaggaggugccccacgugaucgaggaggugaugaacaucgugcugaucgcccugagccugcuggccauccugaagggcaucuacaacguggccaccugcggccuguucggccuggugagcuuccugcugcugugcggcagaagcugcagcaccaccuacaagggcguguacgagcugcagacccuggagcuggacauggccagccugaacaugugcaugccccugagcugcaccaagaacaacagccaccacuacaucauggugggcaacgagaccggccuggagcugacccugaccaacaccagcaucaucaaccacaaguucugcaaccugagcgacgcccacaagaagaaccuguacgaccacgcccugaugagcaucaucagcaccuuccaccugagcauccccaacuucaaccaguacgaggccaugagcugcgacuucaacggcggcaagaucagcgugcaguacaaccugagccacaccuacgccguggacgccgccaaccacugcggcaccaucgccaacggcgugcugcagaccuucaugagaauggccuggggcggcagcuacaucgcccuggacagcggcaagggcagcugggacugcaucaugaccagcuaccaguaccugaucauccagaacaccaccugggaggaccacugccaguucagcagacccagccccaucggcuaccugggccugcugagccagagaaccagagacaucuacaucagcagaagaagaagaggcaccuucaccuggacccugagcgacagcgagagcaacgagacccccggcggcuacugccugaccagauggaugcugaucgaggccgagcugaagugcuucggcaacaccgccguggccaagugcaacgagaagcacgacgaggaguucugcgacaugcugagacuguucgacuucugcaagcaggccaucagaagacugaaggcccccgcccagaugagcauccagcugaucaacaaggccgugaacgcccugaucaacgaccagcugaucaugaagaaccaccugagagacaucaugggcauccccuacugcaacuacagcaaguacugguaccugaaccacaccgugaccggcagaaccagccugcccagaugcuggcuggugagcaacggcagcuaccugaacgagacccacuucagcgacgacaucgagcagcaggccgacaacaugaucaccgagcugcugcagaaggaguacauggacagacagggcaagaccccccugggccugguggaccuguucguguucagcaccagcuucuaccugaucagcaucuuccugcaccuggugaagauccccacccacagacacgugaucggcaagcccugccccaagccccacagacugaaccacaugggcaucugcagcugcggccuguacaagcaccccggcgugcccgugaaguggaagagauga

SEQ ID NO: 23060 - RNA, 1473 nt, Artificial Sequence
  derived and/or modified CDS sequence (opt4) from LASV(LASV035-NIG-2009;Clade II)__AIT17588__GPCmut2
augggccagaucaucaccuucuuccaggaggugccccacgugaucgaggaggugaugaacaucgugcugaucgcccugagccugcuggccauccugaagggcaucuacaacguggccaccugcggccuguucggccuggugagcuuccugcugcugugcggcagaagcugcagcaccaccuacaagggcguguacgagcugcagacccuggagcuggacauggccagccugaacaugugcaugccccugagcugcaccaagaacaacagccaccacuacaucauggugggcaacgagaccggccuggagcugacccugaccaacaccagcaucaucaaccacaaguucugcaaccugagcgacgcccacaagaagaaccuguacgaccacgcccugaugagcaucaucagcaccuuccaccugagcauccccaacuucaaccaguacgaggccaugagcugcgacuucaacggcggcaagaucagcgugcaguacaaccugagccacgccuacgccguggacgccgccaaccacugcggcaccaucgccaacggcgugcugcagaccuucaugagaauggccuggggcggcagcuacaucgcccuggacagcggcaagggcagcugggacugcaucaugaccagcuaccaguaccugaucauccagaacaccaccugggaggaccacugccaguucagcagacccagccccaucggcuaccugggccugcugagccagagaaccagagacaucuacaucagcagaagaagaagaggcaccuucaccuggacccugagcgacagcgagggcaacgagacccccggcggcuacugccugaccagauggaugcugaucgaggccgagcugaagugcuucggcaacaccgccguggccaagugcaacgagaagcacgacgaggaguucugcgacaugcugagacuguucgacuucugcaagcaggccaucagaagacugaaggcccccgcccagaugagcauccagcugaucaacaaggccgugaacgcccugaucaacgaccagcugaucaugaagaaccaccugagagacaucaugggcauccccuacugcaacuacagcaaguacugguaccugaaccacaccgugaccggcaagaccagccugcccagaugcuggcuggugagcaacggcagcuaccugaacgagacccacuucagcgacgacaucgagcagcaggccgacaacaugaucaccgagcugcugcagaaggaguacaucgacagacagggcaagaccccccugggccugguggaccuguucguguucagcaccagcuucuaccugaucagcaucuuccugcaccuggugaagauccccacccacagacacgugaucggcaagcccugccccaagccccacagacugaaccacaugggcaucugcagcugcggccuguacaagcaccccggcgugcccgugaaguggaagagauga

SEQ ID NO: 23061 - RNA, 1473 nt, Artificial Sequence
  derived and/or modified CDS sequence (opt4) from LASV(LASV1000-NIG-2009;Clade II)__AIT17782__GPCmut2
augggccagaucaucaccuucuuccaggaggugccccacgugaucgaggaggugaugaacaucgugcugaucgcccugagccugcuggccauccugaagggcaucuacaacguggccaccugcggccuguucggccuggugagcuuccugcugcugugcggcagaagcugcagcaccaccuacaagggcguguacgagcugcagacccuggagcuggacauggccagccugaacaugugcaugccccugagcugcaccaagaacaacagccaccacuacaucauggugggcaacgagaccggccuggagcugacccugaccaacaccagcaucaucaaccacaaguucugcaaccugagcgacgcccacaagaagaaccuguacgaccacgcccugaugagcaucaucagcaccuuccaccugagcauccccaacuucaaccaguacgaggccaugagcugcgacuucaacggcggcaagaucagcgugcaguacaaccugagccacaccuacgccguggacgccgccaaccacugcggcaccaucgccaacggcgugcugcagaccuucaugagaauggccuggggcggcagcuacaucgcccuggacagcggcaagggcagcugggacugcaucaugaccagcuaccaguaccugaucauccagaacaccaccugggaggaccacugccaguucagcagacccagccccaucggcuaccugggccugcugagccagagaaccagagacaucuacaucagcagaagaagaagaggcaccuucaccuggacccugagcgacagcgagggcaacgagacccccggcggcuacugccugaccagauggaugcugaucgaggccgagcugaagugcuucggcaacaccgccguggccaagugcaacgagaagcacgacgaggaguucugcgacaugcugagacuguucgacuucugcaagcaggccaucaagagacugaagacccccgcccagaugagcauccagcugaucaacaaggccgugaacgcccugaucaacgaccagcugaucaugaagaaccaccugagagacaucaugggcauccccuacugcaacuacagcaaguacugguaccugaaccacaccgugaccggcaagaccagccugcccagaugcuggcuggugagcaacggcagcuaccugaacgagacccacuucagcgacgacaucgagcagcaggccgacaacaugaucaccgagcugcugcagaaggaguacaucgacagacagggcaagaccccccugggccugguggaccuguucguguucagcaccagcuucuaccugaucagcaucuuccugcaccuggugaagauccccacccacagacacguggugggcaagcccugccccaagccccacagacugaaccacaugggcaucugcagcugcggccuguacaagcaccccggcgugcccgugaaguggaagagauga

SEQ ID NO: 23062 - RNA, 1473 nt, Artificial Sequence
  derived and/or modified CDS sequence (opt4) from LASV(LASV221-NIG-2010;Clade II)__AIT17624__GPCmut2
augggccagaucaucaccuucuuccaggaggugccccacgugaucgaggaggugaugaacaucgugcugaucgcccugagccugcuggccauccugaagggcaucuacaacguggccaccugcggccuguucggccuggugagcuuccugcugcugugcggcagaagcugcagcaccaccuacaagggcguguacgagcugcagacccuggagcuggacauggccagccugaacaugugcaugccccugagcugcaccaagaacaacagccaccacuacaucauggugggcaacgagaccggccuggagcugacccugaccaacaccagcaucaucaaccacaaguucugcaaccugagcgacgcccacaagaagaaccuguacgaccacgcccugaugagcaucaucagcaccuuccaccugagcauccccaacuucaaccaguacgaggccaugagcugcgacuucaacggcggcaagaucagcgugcaguacaaccugagccacaccuacgccaucgacgccgccaaccacugcggcaccaucgccaacggcgugcugcagaccuucaugagaauggccuggggcggcagcuacaucgcccuggacagcggcaagggcagcugggacugcaucaugaccagcuaccaguaccugaucauccagaacaccaccugggaggaccacugccaguucagcagacccagccccaucggcuaccugggccugcugagccagagaaccagagacaucuacaucagcagaagaagaagaggcaccuucaccuggacccugagcgacagcgagggcaacgagacccccggcggcuacugccugaccagauggaugcugaucgaggccgagcugaagugcuucggcaacaccgccguggccaagugcaacgagaagcacgacgaggaguucugcgacaugcugagacuguucgacuucugcaagcaggccaucagaagacugaagacccccgcccagaugagcauccagcugaucaacaaggccgugaacgcccugaucaacgaccagcugaucaugaagaaccaccugagagacaucaugggcauccccuacugcaacuacagcaaguacugguaccugaaccacaccgugaccggcaagaccagccugcccagaugcuggcuggugagcaacggcagcuaccugaacgagacccacuucagcgacgacaucgagcagcaggccgacaacaugaucaccgagaugcugcagaaggaguacauggacagacagggcaagaccccccugggccugguggaccuguucguguucagcaccagcuucuaccugaucagcaucuuccugcaccuggugaagauccccacccacagacacgugaucggcaagcccugccccaagccccacagacugaaccacaugggcaucugcagcugcggccuguacaagcaccccggcgugcccgugaaguggaagagauga

SEQ ID NO: 23063 - RNA, 1473 nt, Artificial Sequence
  derived and/or modified CDS sequence (opt4) from LASV(LASV237-NIG-2010;Clade II)__AIT17638__GPCmut2
augggccagaucaucaccuucuuccaggaggugccccacgugaucgaggaggugaugaacaucgugcugaucgcccugagccugcuggccauccugaagggcaucuacaacguggccaccugcggccuguucggccuggugagcuuccugcugcugugcggcagaagcugcagcaccaccuacaagggcguguacgagcugcagacccuggagcuggacauggccagccugaacaugugcaugccccugagcugcaccaagaacaacagccaccacuacaucauggugggcaacgagaccggccuggagcugacccugaccaacaccagcaucaucaaccacaaguucugcaaccugagcgacgcccacaagaaggaccuguacgaccacgcccugaugagcaucaucagcaccuuccaccugagcauccccaacuucaaccaguacgaggccaugagcugcgacuucaacggcggcaagaucagcgugcaguacaaccugagccacaccuacgccguggacgccgccaaccacugcggcaccaucgccaacggcgugcugcagaccuucaugagaauggccuggggcggcagcuacaucgcccuggacagcggcaagggcagcugggacugcaucaugaccagcuaccaguaccugaucauccagaacaccaccugggaggaccacugccaguucagcagacccagccccaucggcuaccugggccugcugagccagagaaccagagacaucuacaucagcagaagaagaagaggcaccuucaccuggacccugagcgacagcgagggcaacgagacccccggcggcuacugccugaccagauggaugcugaucgaggccgagcugaagugcuucggcaacaccgccguggccaagugcaacgagaagcacgacgaggaguucugcgacaugcugagacuguucgacuucugcaagcaggccaucagaagacugaagacccccgcccagaugagcauccagcugaucaacaaggccgugaacgcccugaucaacgaccagcugaucaugaagaaccaccugagagacaucaugggcauccccuacugcaacuacagcaaguacugguaccugaaccacaccgugaccggcaagaccagccugcccagaugcuggcuggugagcaacggcagcuaccugaacgagacccacuucagcgacgacaucgagcagcaggccgacaacaugaucaccgagcugcugcagaaggaguacauggacagacagggcaagaccccccugggccugguggaccuguucguguucagcaccagcuucuaccugaucagcaucuuccugcaccugaucaagauccccacccacagacacaucaccggcaagcccugccccaagccccacagacugaaccacaugggcaucugcagcugcggccuguacaagcaccccggcgugcccgugaaguggaagagauga

SEQ ID NO: 23064 - RNA, 1473 nt, Artificial Sequence
  derived and/or modified CDS sequence (opt4) from LASV(LASV253-NIG-2011;Clade II)__AIT17670__GPCmut2
augggccagaucaucaccuucuuccaggaggugccccacgugaucgaggaggugaugaacaucgugcugaucgcccugagccugcuggccauccugaagggcaucuacaacguggccaccugcggccuguucggccuggugagcuuccugcugcugugcggcagaagcugcagcaccaccuacaagggcguguacgagcugcagacccuggagcuggacauggccagccugaacaugugcaugccccugagcugcaccaagaacaacagccaccacuacaucauggugggcaacgagaccggccuggagcugacccugaccaacaccagcaucaucaaccacaaguucugcaaccugagcgacgcccacaagaagaaccuguacgaccacgcccugaugagcaucaucagcaccuuccaccugagcauccccaacuucaaccaguacgaggccaugagcugcgacuucaacggcggcaagaucagcgugcaguacaaccugagccacaccuacgccguggacgccgccaaccacugcggcaccaucgccaacggcgugcugcagaccuucaugagaauggccuggggcggcagcuacaucgcccuggacagcggcaagggcagcugggacugcaucaugaccagcuaccaguaccugaucauccagaacaccaccugggaggaccacugccaguucagcagacccagccccaucggcuaccugggccugcugagccagagaaccagagacaucuacaucagcagaagaagaagaggcaccuucaccuggacccugagcgacagcgagggcaacgagacccccggcggcuacugccugaccagauggaugcugaucgaggccgagcugaagugcuucggcaacaccgccguggccaagugcaacgagaagcacgacgaggaguucugcgacaugcugagacuguucgacuucugcaagcaggccaucagaagacugaaggcccccgcccagaugagcauccagcugaucaacaaggccgugaacgcccugaucaacgaccagcugaucaugaagaaccaccugagagacaucaugggcauccccuacugcaacuacagcaaguacugguaccugaaccacaccgugaccggcagaaccagccugcccagaugcuggcuggugagcaacggcagcuaccugaacgagacccacuucagcgacgacaucgagcagcaggccgacaacaugaucaccgagcugcugcagaaggaguacaucgacagacagggcaagaccccccugggccugguggaccuguucguguucagcaccagcuucuaccugaucagcaucuuccugcaccuggugaagauccccacccacagacacaucaucggcaagcccugccccaagccccacagacugaaccacaugggcaucugcagcugcggccuguacaagcaccccggcgugcccgugaaguggaagagauga

SEQ ID NO: 23065 - RNA, 1473 nt, Artificial Sequence
  derived and/or modified CDS sequence (opt4) from LASV(LASV254-NIG-2011;Clade II)__AIT17674__GPCmut2
augggccagaucaucaccuucuuccaggaggugccccacgugaucgaggaggugaugaacaucgugcugaucgcccugagccugcuggccauccugaagggcaucuacaacguggccaccugcggccuguucggccuggugagcuuccugcugcugugcggcagaagcugcagcaccaccuacaagggcguguacgagcugcagacccuggagcuggacaugaccaaccugaacaugugcaugccccugagcugcaccaagaacaacagccaccacuacaucauggugggcaacgagaccggccuggagcugacccugaccaacaccagcaucaucaaccacaaguucugcaaccugagcgacgcccacaagaagaaccuguacaaccacgcccugaugagcaucaucagcaccuuccaccugagcauccccaacuucaaccaguacgaggccaugagcugcgacuucaacggcggcaagaucagcgugcaguacaaccugagccacagcuacgccguggacgccgccaaccacugcggcaccaucgccaacggcgugcugcagaccuucaugagaauggccuggggcggcagcuacaucgcccuggacagcggcaagggcaacugggacugcaucaugaccagcuaccaguaccugaucauccagaacaccaccugggaggaccacugccaguucagcagacccagccccaucggcuaccugggccugcugagccagagaaccagagacaucuacaucagcagaagaagaagaggcaccuucaccuggacccugagcgacagcgagggcaacgagacccccggcggcuacugccugaccagauggaugcugaucgaggccgagcugaagugcuucggcaacaccgccguggccaagugcaacgagaagcacgacgaggaguucugcgacaugcugagacuguucgacuucugcaagcaggccaucagaagacugaagacccccgcccaggccaacauccagcugaucaacaaggccgugaacgcccugaucaacgaccagcugaucaugaagaaccaccugagagacaucaugggcauccccuacugcaacuacagcaaguacugguaccugaaccacaccgugaccggcaagaccagccugcccagaugcuggcuggugagcaacggcagcuaccugaacgagacccacuucagcgacgacaucgagcagcaggccgacaacaugaucaccgagcugcugcagaaggaguacauggacagacagggcaagaccccccugggccugguggaccuguucguguucagcaccagcuucuaccugaucagcaucuuccugcaccuggugaagauccccacccacagacacgugaucggcaagcccugccccaagccccacagacugaaccacaugggcaucugcagcugcggccuguacaagcaccccggcgugcccgugaaguggaagagauga

SEQ ID NO: 23066 - RNA, 1473 nt, Artificial Sequence
  derived and/or modified CDS sequence (opt4) from LASV(Nig08-A19;Clade III)__ADU56618__GPCmut2
augggccagaucgugaccuucuuccaggaggugccccacgugaucgaggaggugaugaacaucgugcugaucgcccugagcauccuggccauccugaagggccuguacaacaucgccaccugcggccugaucggccuggugaccuuccugcugcugagcggcagaagcugcagcaugaccuacaagggcguguacgagcugcagacccuggagcugaacaugaacacccugaacaugugcaugccccugagcugcaccaagaacaacagccaccacuacaucauggugggcaacgagaccggccuggagcugacccugaccaacaccagccugcugcaccacaaguucugcaaccugagcgacgcccacaagaagaaccuguacgaccacacccugaugagcaucaucagcaccuuccaccugagcauccccaacuucaaccaguacgaggccaugagcugcgacuucaacggcggcaagaucaccgugcaguacaaccugagccacagcuacgccaucgacgccgccaaccacugcggcaccguggccaacggcgugcugcagaccuucaugagaauggccuggggcggcagcuacaucgcccuggacagcggcagaggcaagugggacugcaucaugaccagcuaccaguaccugaucauccagaacaccaccugggaggaccacugccaguucagcagacccagccccaucggcuaccugggccugcugagccagagaaccagagacaucuacaucagcagaagaagaagaggcaccuucaccuggacccugagcgacagcgagggcaacgagacccccggcggcuacugccugaccagauggaugcugaucgaggccgagcugaagugcuucggcaacaccgccguggccaagugcaacgagaagcacgacgaggaguucugcgacaugcugagacuguucgacuucugcaagcaggccaucagaagacugaaggcccccgcccagaugagcauccagcugaucaacaaggccgugaacgcccugaucaacgaccagcugaucaugaagaaccaccugagagacaucaugggcauccccuacugcaacuacagcaaguacugguaccugaaccacaccagcaccggcagaaccagccugcccagaugcuggcuggugagcaacggcagcuaccugaacgagacccacuucagcgacgacaucgagcagcaggccgacaacaugaucaccgagaugcugcagaaggaguaccuggacagacagggcaagaccccccugggccugguggaccuguucguguucagcaccagcuucuaccugaucagcaucuuccugcaccuggugaagauccccacccacagacacaucgugggcaagcccugccccaagccccacagacugaaccacaugggcaucugcagcugcggccuguacaagcagcccggcgugcccgugagauggaagagauga

SEQ ID NO: 23067 - RNA, 1476 nt, Artificial Sequence
  derived and/or modified CDS sequence (opt4) from LASV(G1180-SLE-2010;Clade IV)__AIT17168__GPCmut2
augggccagaucgugaccuucuuccaggaggugccccacgugaucgaggaggugaugaacaucgugcugaucgcccugagcauccuggccgugcugaagggccuguacaacuucgccaccugcggccuggugggccugcugaccuuccugcugcugugcggcagaagcugcaccgccagcagauacaagggcguguacgagcugcagacccuggagcugaacauggagacccugaacaugugcaugccccugagcugcaccaagaacaacagccaccacuacaucauggugggcaacgagaccggccuggagcugacccugaccaacaccagcaucaucaaccacaaguucugcaaccugagcgacgcccacaagaagaaccuguacgaccacgcccugaugagcaucaucagcaccuuccaccugagcauccccaacuucaaccaguacgaggccaugagcugcgacuucaacggcggcaagaucagcgugcaguacaaccugagccacagcuacgccggcgacgccgccaaccacugcggcaccguggccaacggcgugcugcagaccuucaugagaauggccuggggcggcagcuacaucgcccuggacagcggccacggcagcugggacugcaucaugaccagcuaccaguaccugaucauccagaacaccaccugggaggaccacugccaguucagcagacccagccccaucggcuaccugggccugcugagccagagaaccagagacaucuacaucagcagaagaagaagaggcaccuucaccuggacccugagcgacagcgagggcaaggacacccccggcggcuacugccugaccagauggaugcugaucgaggccgagcugaagugcuucggcaacaccgccguggccaagugcaacgagaagcacgacgaggaguucugcgacaugcugagacuguucgacuucugcaagcaggccauccagagacugaaggcccccgcccagaugagcauccagcugaucaacaaggccgugaacgcccugaucaacgaccagcugaucaugaagaaccaccugagagacaucaugggcauccccuacugcaacuacagcaaguacugguaccugaaccacaccaccaccggcaagaccagccugcccaagugcuggcuggugagcaacggcagcuaccugaacgagacccacuucagcgacgacaucgagcagcaggccgacaacaugaucaccgagaugcugcagaaggaguacauggagagacagggcaagaccccccugggccugguggaccuguucguguucagcaccagcuucuaccugaucagcaucuuccugcaccuggugaagauccccacccacagacacaucgugggcaagagcugccccaagccccacagacugaaccacaugggcaucugcagcugcggccuguacaagcagcccggcgugcccgugaaguggaagagauga

SEQ ID NO: 23068 - RNA, 1476 nt, Artificial Sequence
  derived and/or modified CDS sequence (opt4) from LASV(G1442-SLE-2011;Clade IV)__AIT17180__GPCmut2
augggccagaucgugaccuucuuccaggaggugccccacgugaucgaggaggugaugaacaucgugcugaucgcccugagcauccuggccgugcugaagggccuguacaacguggccaccugcggccugaucggccuggugaccuuccugcugcugugcggcagaagcugcaccaccacccuguacaagggcguguacgagcugcagacccuggagcugaacauggagacccugaacaugugcaugccccugagcugcaccaagaacaacagccaccacuacaucagagugggcaacgagaccggccuggagcugacccugaccaacaccagcaucaucaaccacaaguucugcaaccugagcgacgcccacaagaagaaccuguacgaccacgcccugaugagcaucaucagcaccuuccaccugagcauccccaacuucaaccaguacgaggccaugagcugcgacuucaacggcggcaagaucagcgugcaguacaaccugagccacagcuacgccggcgacgccgccaaccacugcggcaccguggccaacggcgugcugcagaccuucaugagaauggccuggggcggcagcuacaucgcccuggacagcggcagaggcaacugggacugcaucaugaccagcuaccaguaccugaucauccagaacaccaccugggacgaccacugccaguucagcagacccagccccaucggcuaccugggccugcugagccagagaaccagagacguguacaucagcagaagaagaagaggcaccuucaccuggacccugagcgacagcgagggcaaggacacccccggcggcuacugccugaccagauggaugcugaucgaggccgagcugaagugcuucggcaacaccgccguggccaagugcaacgagaagcacgacgaggaguucugcgacaugcugagacuguucgacuucugcaagcaggccauccagagacugaaggcccccgcccagaugagcauccagcugaucaacaaggccgugaacgcccugaucaacgaccagcugaucaugaagaaccaccugagagacaucaugggcauccccuacugcaacuacagcaaguacugguaccugaacaacaccgccaccggcaagaccagccugcccaagugcuggcugaucagcaacggcagcuaccugaacgagacccacuucagcgacgacaucgagcaggaggccgacaacaugaucaccgagaugcugcagaaggaguacauggagagacagggcaagaccccccugggccugguggaccuguucguguucagcaccagcuucuaccugaucagcaucuuccugcaccuggugaagauccccacccacagacacaucgugggcaagagcugccccaagccccacagacugaaccacaugggcaucugcagcugcggccuguacaagcagcccggcgugcccgugagauggaagagauga

SEQ ID NO: 23069 - RNA, 1476 nt, Artificial Sequence
  derived and/or modified CDS sequence (opt4) from LASV(G3010-SLE-2013;Clade IV)__AIT17344__GPCmut2
augggccagaucgugaccuucuuccaggaggugccccacgugaucgaggaggugaugaacaucgugcugaucgcccugagcauccuggccgugcugaagggccuguacaacuucgccaccugcggccuggugggccuggugaccuuccugcugcugugcggcagaagcugcaccaccagccuguacaagggcguguacgagcugcagacccuggagcugaacauggagacccugaacaugugcaugccccugagcugcaccaagaacaacagccaccacuacaucauggugggcaacgagaccggccuggagcugacccugaccaacaccagcaucaucaaccacaaguucugcaaccugagcgacgcccacaagaagaaccuguacaaccacgcccugaugagcaucaucagcaccuuccaccugagcauccccaacuucaaccaguacgaggccaugagcugcgacuucaacggcggcaagaucagcgugcaguacaaccugagccacagcuacgccggcgacgccgccagccacugcggcaccguggccaacggcgugcugcagaccuucaugagaauggccuggggcggcagcuacaucgcccuggacagcggcuacggcaagugggacugcaucaugaccagcuaccaguaccugaucauccagaacaccaccugggaggaccacugccaguucagcagacccagccccaucggcuaccugggccugcugagccagagaaccagagacaucuacaucagcagaagaagaagaggcaccuucaccuggacccugagcgacagcgagggcaaggacacccccggcggcuacugccugaccagauggaugcugaucgaggccgagcugaagugcuucggcaacaccgccguggccaagugcaacgagaagcacgacgaggaguucugcgacaugcugagacuguucgacuucugcaagcaggccauccagagacugaagacccccgcccagaugagcauccagcugaucaacaaggccgugaacgcccugaucaacgaccagcugaucaugaagaaccaccugagagacaucaugggcauccccuacugcaacuacagcaaguacugguaccugaaccacaccaccaccggcaagaccagccugcccaagugcuggcuggugagcaacggcagcuaccugaacgagacccacuucagcgacgacaucgagcagcaggccgacaacaugaucaccgagaugcugcagaaggaguacauggagagacagggcaagaccccccugggccugguggaccuguucguguucagcaccagcuucuaccugaucagcaucuuccugcaccuggugaagauccccacccacagacacaucgugggcaagagcugccccaagccccacagacugaaccacaugggcaucugcagcugcggccuguacaagcagcccggcgugcccgugagauggaagagauga

SEQ ID NO: 23070 - RNA, 1476 nt, Artificial Sequence
  derived and/or modified CDS sequence (opt4) from LASV(G502-SLE-2009;Clade IV)__AIT17126__GPCmut2
augggccagaucgugaccuucuuccaggaggugccccacgugaucgaggaggugaugaacaucgugcugaucgcccugagcauccuggccgugcugaagggccuguacaacuucgccaccugcggccuggugggccugcugaccuuccugcugcugugcggcagaagcugcaccaccggccuguacaagggcguguacgagcugcagacccuggagcugaacauggagacccugaacaugugcaugccccugagcugcaccaagaacaacagccaccacuacaucauggugggcaacgagaccggccuggagcugacccugaccaacaccagcaucaucaaccacaaguucugcaaccugagcgacgcccacaagaagaaccuguacgaccacgcccugaugagcaucaucagcaccuuccaccugagcauccccaacuucaaccaguacgaggccaugagcugcgacuucaacggcggcaagaucagcgugcaguacaaccugagccacagcuacgccggcgacgccgccgaccacugcggcaccguggccaacggcgugcugcagaccuucaugagaauggccuggggcggcagcuacaucgcccuggacagcggcagaggcagaugggacugcaucaugaccagcuaccaguaccugaucauccagaacaccaccugggaggaccacugccaguucagcagacccagccccaucggcuaccugggccugcugagccagagaaccagagacaucuacaucagcagaagaagaagaggcaccuucaccuggacccugagcgacagcgagggcaaggacacccccggcggcuacugccugaccagauggaugcugaucgaggccgagcugaagugcuucggcaacaccgccguggccaagugcaacgagaagcacgacgaggaguucugcgacaugcugagacuguucgacuucugcaagcaggccauccagagacugaaggcccccgcccagaugagcauccagcugaucaacaaggccgugaacgcccugaucaacgaccagcuggugaugaagaaccaccugagagacaucaugggcauccccuacugcaacuacagcagauacugguaccugaaccacaccaccaccggcagaaccagccugcccaagugcuggcuggugagcaacggcagcuaccugaacgagacccacuucagcgacgacaucgagcagcaggccgacaacaugaucaccgagaugcugcagaaggaguacauggagagacagggcaagaccccccugggccugguggaccuguucguguucagcaccagcuucuaccugaucagcaucuuccugcaccuggugaagauccccacccacagacacaucgugggcaagagcugccccaagccccacagacugaaccacaugggcaucugcagcugcggccuguacaagcagcccggcgugcccgugaaguggaagagauga

SEQ ID NO: 23071 - RNA, 1476 nt, Artificial Sequence
  derived and/or modified CDS sequence (opt4) from LASV(G733-SLE-2010;Clade IV)__AIT17154__GPCmut2
augggccagaucgugaccuucuuccaggaggugccccacgugaucgaggaggugaugaacaucgugcugaucgcccugagcauccuggccgugcugaagggccuguacaacuucgccaccugcggcaucgugggccuggugagcuuccugcugcugugcggcagaagcugcaccaccagccuguacaagggcguguacgagcugcagacccuggagcugaacauggagacccugaacaugugcaugccccugagcugcaccaagaacaacagccaccacuacaucauggugggcaacgagaccggccuggagcugacccugaccaacaccagcaucaucaaccacaaguucugcaaccugagcgacgcccacaagaagaaccuguacgaccacgcccugaugagcaucaucagcaccuuccaccugagcauccccaacuucaaccaguacgaggccaugagcugcgacuucaacggcggcaagaucagcgugcaguacaaccugagccacagcuacgccggcgacgccgccaaccacugcggcaccaucgccaacggcgugcugcagaccuucaugagaauggccuggggcggcagcuacaucgcccuggacagcggcagagacagaugggacugcaucaugaccagcuaccaguaccugaucauccagaacaccaccugggaggaccacugccaguucagcagacccagccccaucggcuaccugggccugcugagccagagaaccagagacaucuacaucagcagaagaagaagaggcaccuucaccuggacccugagcgacagcgagggcaaggacacccccggcggcuacugccugaccagauggaugcugaucgaggccgagcugaagugcuucggcaacaccgccguggccaagugcaacgagaagcacgacgaggaguucugcgacaugcugagacuguucgacuucugcaagcaggccauccagagacugaaggcccccgcccagaugagcauccagcugaucaacaaggccgugaacgcccugaucaacgaccagcugaucaugaagaaccaccugagagacaucaugggcauccccuacugcaacuacagcaaguacugguaccugaaccacaccaccaccggcaagaccagccugcccaagugcuggcuggugagcaacggcagcuaccugaacgagacccacuucagcgacgacaucgagcagcaggccgacaacaugaucaccgagaugcugcagaaggaguacauggagagacagggcaagaccccccugggccugguggaccuguucguguucagcaccagcuucuaccugaucagcaucuuccugcaccuggugaagauccccacccacagacacguggugggcaagagcugccccaagccccacagacugaaccacaugggcaucugcagcugcggccuguacggccagcccggcgugcccgugaaguggaagagauga

SEQ ID NO: 23072 - RNA, 1476 nt, Artificial Sequence
  derived and/or modified CDS sequence (opt4) from MOPV/LASV reassortant(IGS-1;Clade IV)__AFY05576__GPCmut2
augggccagaucgugaccuucuuccaggaggugccccacgugaucgaggaggugaugaacaucgugcugaucgcccugagcgugcuggccgugcugaagggccuguacaacuucgccaccugcggccuggugggccuggugaccuuccugcugcugugcggcagaagcugcaccaccagccuguacaagggcguguacgagcugcagacccuggagcugaacauggagacccugaacaugugcaugccccugagcugcaccaagaacaacagccaccacuacaucauggugggcaacgagaccggccuggagcugacccugaccaacaccagcaucaucaaccacaaguucugcaaccugagcgacgcccacaagaagaaccuguacgaccacgcccugaugagcaucaucagcaccuuccaccugagcauccccaacuucaaccaguacgaggccaugagcugcgacuucaacggcggcaagaucagcgugcaguacaaccugagccacagcuacgccggcgacgccgccaaccacugcggcaccguggccaacggcgugcugcagaccuucaugagaauggccuggggcggcagcuacaucgcccuggacagcggcagaggcaacugggacugcaucaugaccagcuaccaguaccugaucauccagaacaccaccugggaggaccacugccaguucagcagacccagccccaucggcuaccugggccugcugagccagagaaccagagacaucuacaucagcagaagaagaagaggcaccuucaccuggacccugagcgacagcgagggcgaggacacccccggcggcuacugccugaccagauggaugcugaucgaggccgagcugaagugcuucggcaacaccgccguggccaagugcaacgagaagcacgacgaggaguucugcgacaugcugagacuguucgacuucugcaagcaggccauccagagacugaaggcccccgcccagaugagcauccagcugaucaacaaggccgugaacgcccugaucaacgaccagcugaucaugaagaaccaccugagagacaucaugggcauccccuacugcaacuacagcaaguacugguaccugaaccacaccaccaccggcagaaccagccugcccaagugcuggcuggugagcaacggcagcuaccugaacgagacccacuucagcgacgacaucgagcagcaggccgacaacaugaucaccgagaugcugcagaaggaguacauggagagacagggcaagaccccccugggccugguggaccuguucguguucagcaccagcuucuaccugaucagcaucuuccugcaccuggugaagauccccacccacagacacaucgugggcaagagcugccccaagccccacagacugaaccacaugggcaucugcagcugcggccuguacaagcagcccggcgugcccgugaaguggaagagauga

SEQ ID NO: 23073 - RNA, 1476 nt, Artificial Sequence
  derived and/or modified CDS sequence (opt4) from LASV(LM765-SLE-2012;Clade IV)__AIT17814__GPCmut2
augggccagaucgugaccuucuuccaggaggugccccacgugaucgaggaggugaugaacaucgugcugaucgcccugagcauccuggccgugcugaagggccuguacaacuucgccaccugcggccuggugggccuggugaccuuccugcugcugugcggcagaagcugcaccaccagccuguacaagggcguguacgagcugcagacccuggagcugaacauggagacccugaacaugugcaugccccugagcugcaccaagaacaacagccaccacuacaucauggugggcaacgagaccggccuggagcugacccugaccaacaccagcaucaucgaccacaaguucugcaaccugagcgacgcccacagaaagaaccuguacgaccacgcccugaugagcaucaucagcaccuuccaccugagcauccccaacuucaaccaguacgaggccaugagcugcgacuucaacggcggcaagaucagcgugcaguacaaccugagccacagcuacgccaaggacgccgccgaccacugcggcaccguggccaacggcgugcugcagaccuucaugagaauggccuggggcggcagcuacaucgcccuggacagcggcagaggcagaugggacugcaucaugaccagcuaccaguaccugaucauccagaacaccaccugggaggaccacugccaguucagcagacccagccccaucggcuaccugggccugcugagccagagaaccagagacaucuacaucagcagaagaagaagaggcaccuucaccuggacccugagcgacagcgagggcaaggacacccccggcggcuacugccugaccagauggaugcugaucgaggccgagcugaagugcuucggcaacaccgccguggccaagugcaacgagaagcacgacgaggaguucugcgacaugcugagacuguucgacuucugcaagcaggccauccagagacugaaggcccccgcccagaugagcauccagcugaucaacaaggccgugaacgcccugaucaacgaccagcugaucaugaagaaccaccugagagacaucaugggcauccccuacugcaacuacagcaaguacugguaccugaaccacaccaccaccggcaagaccagccugcccaagugcuggcuggugagcaacggcagcuaccugaacgagacccacuucagcgacgacaucgagcagcaggccgacaacaugaucaccgagaugcugcagaaggaguacauggagagacagggcaagaccccccugggccugguggaccuguucguguucagcaccagcuucuaccugaucagcaucuuccugcaccuggugaagauccccacccacagacacaucgugggcaagcccugccccaagccccacagacugaaccacaugggcaucugcagcugcggccuguacaagcagcccggcgugcccgugaaguggaagagauga

SEQ ID NO: 23074 - RNA, 1476 nt, Artificial Sequence
  derived and/or modified CDS sequence (opt4) from LASV(LM776-SLE-2012;Clade IV)__AIT17824__GPCmut2
augggccagaucgugaccuucuuccaggaggugccccacgugaucgaggaggugaugaacaucgugcugaucgcccugagcauccuggccgugcugaagggccuguacaacuucgccaccugcggccuggugggccuggugaccuuccugcugcugugcggcagaagcugcaccaccagcguguacaagggcguguacgagcugcagacccuggagcugaacauggagacccugaacaugugcaugccccugagcugcaccaagaacaacagccaccacuacaucauggugggcaacgagaccggccuggagcugacccugaccaacaccagcaucaucaaccacaaguucugcaaccugagcgacgcccacaagaagaaccuguacgaccacgcccugaugagcaucaucagcaccuuccaccugagcauccccaacuucaaccaguacgaggccaugagcugcgacuucaacggcggcaagaucagcgugcaguacaaccugagccacagcuacgccggcgacgccgccaaccacugcggcaccguggccaacggcgugcugcagaccuucaugagaauggccuggggcggcagcuacaucgcccuggacagcggccacggcaagugggacugcaucaugaccagcuaccaguaccugaucauccagaacaccaccugggaggaccacugccaguucagcagacccagccccaucggcuaccugggccugcugagccagagaaccagagacaucuacaucagcagaagaagaagaggcaccuucaccuggacccugagcgacagcgagggcaaggacacccccggcggcuacugccugaccagauggaugcugaucgaggccgagcugaagugcuucggcaacaccgccguggccaagugcaacgagaagcacgacgaggaguucugcgacaugcugagacuguucgacuucugcaagcaggccauccagagacugaaggcccccgcccagaugagcauccagcugaucaacaaggccgugaacgcccugaucaacgaccagcugaucaugaagaaccaccugagagacaucaugggcauccccuacugcaacuacagcaaguacugguaccugaaccacaccaccaccggcaagaccagccugcccaagugcuggcuggugagcaacggcagcuaccugaacgagacccacuucagcgacgacaucgagcagcaggccgacaacaugaucaccgagaugcugcagaaggaguacauggagagacagggcaagaccccccugggccugguggaccuguucguguucagcaccagcuucuaccugaucagcaucuuccugcaccuggugaagauccccacccacagacacaucgugggcaagagcugccccaagccccacagacugaaccacaugggcaucugcagcugcggccuguacaagcagcccggcgugcccgugagauggaagagauga

SEQ ID NO: 23075 - RNA, 1476 nt, Artificial Sequence
  derived and/or modified CDS sequence (opt4) from LASV(Mad39;Clade IV)__ANH09722__GPCmut2
augggccagaucgugaccuucuuccaggaggugccccacgugaucgaggaggugaugaacaucgugcugaucgcccugagcauccuggccgugcugaagggccuguacaacguggccaccugcggccugaucggccuggugaccuuccugcugcugugcggcagaagcugcaccaccacccuguacaagggcguguacgagcugcaggcccuggagcugaacauggagacccugaacaugugcaugccccugagcugcaccaagaacaacagccaccacuacaucagagugggcaacgagaccggccuggagcugacccugaccaacaccagccugaucaaccacaaguucugcaaccugagcgacgcccacaagaagaaccuguacgaccacgcccugaugagcaucaucagcaccuuccaccugagcauccccaacuucaaccaguacgaggccaugagcugcgacuucaacgacggcaagaucagcgugcaguacaaccugagccacaccuacgccggcgacaccgccaaccacugcggcaccguggccaacggcgugcugcagaccuucaugagaauggccuggggcggcagcuacaucgcccuggacagcggcagaggcggcugggacugcaucaugaccagcuaccaguaccugaucauccagaacaccaccugggaggaccacugccaguucagcagacccagccccaucggcuaccugggccugcugagccagagaaccagagacaucuacaucagcagaagaagaagaggcaccuucaccuggacccugagcgacagcgagggcaaggacacccccggcggcuacugccugaccagauggaugcugaucgaggccgagcugaagugcuucggcaacaccgccguggccaagugcaacgagaagcacgacgaggaguucugcgacaugcugagacuguucgacuucugcaagcaggccauccagagacugaaggcccccgcccagaugagcauccagcugaucaacaaggccgugaacgcccugaucaacgaccagcugaucaugaagaaccaccugagagacaucaugggcauccccuacugcaacuacagcaaguacugguaccugaaccacaccgugaccggcaagaccagccugcccaagugcuggcuggugagcaacggcagcuaccugaacgagacccacuucagcgacgacaucgagcagcaggccgacaacaugaucaccgagaugcugcagaaggaguacauggagagacagggcaagaccccccugggccugguggaccuguucguguucagcaccagcuucuaccugaucagcaucuuccugcaccuggugaagauccccacccacagacacguggugggcaagcccugccccaagccccacagacugaaccacaugggcaucugcagcugcggcuucuacaagcagcccggcgugcccgugagauggaagagauga

SEQ ID NO: 23076 - RNA, 1476 nt, Artificial Sequence
  derived and/or modified CDS sequence (opt4) from LASV(Z0947-SLE-2011;Clade IV)__AIT17840__GPCmut2
augggccagaucgugaccuucuuccaggaggugccccacgugaucgaggaggugaugaacaucgugcugaucgcccugagcauccuggccgugcugaagggccuguacaacuucgccaccugcggccuggugggccuggugaccuuccugcugcugugcggcagaagcugcaccaucagccuguacaagggcguguacgagcugcagacccuggagcugaacauggagacccugaacaugugcaugccccugagcugcaccaagaacaacagccaccacuacaucauggugggcaacgagaccggccuggagcugacccugaccaacaccagcaucaucaaccacaaguucugcaaccugagcgacgcccacaagaagaaccuguacgaccacgcccugaugagcaucaucagcaccuuccaccugagcauccccaacuucaaccaguacgaggccaugagcugcgacuucaacggcggcaagaucagcgugcaguacaaccugagccacagcuacgccggcgacgccgccaaccacugcggcaccguggccaacggcgugcugcagaccuucaugagaauggccuggggcggcagcuacaucgcccuggacagcggcagagacagaugggacugcaucaugaccagcuaccaguaccugaucauccagaacaccaccugggaggaccacugccaguucagcagacccagccccaucggcuaccugggccugcugagccagagaaccagagacaucuacaucagcagaagaagaagaggcaccuucaccuggacccugagcgacagcgagggcaaggacacccccggcggcuacugccugaccagauggaugcugaucgaggccgagcugaagugcuucggcaacaccgccguggccaagugcaacgagaagcacgacgaggaguucugcgacaugcugagacuguucgacuucugcaagcaggccauccagagacugaaggcccccgcccagaugagcauccagcugaucaacaaggccgugaacgcccugaucaacgaccagcugaucaugaagaaccaccugagagacaucaugggcauccccuacugcaacuacagcaaguacugguaccugaaccacaccaccaccggcaagaccagccugcccaagugcuggcuggugagcaacggcagcuaccugaacgagacccacuucagcgacgacaucgagcagcaggccgacaacaugaucaccgagaugcugcagaaggaguacauggagagacagggcaagaccccccugggccugguggaccuguucguguucagcaccagcuucuaccugaucagcaucuuccugcaccuggugaagauccccacccacagacacaucgugggcaagcccugccccaagccccacagacugaaccacaugggcaucugcagcugcggccuguacaagcagcccggcgugcccgugaaguggaagagauga

SEQ ID NO: 23077 - RNA, 1476 nt, Artificial Sequence
  derived and/or modified CDS sequence (opt5) from LASV(Josiah;Clade IV)__NP_694870__GPCmut2
augggccagaucgugaccuucuuucaagaggucccccacguuauugaagaggugaugaacaucgugcugauugcccucagcguccuggcugugcuuaaggggcuguacaauuucgccacaugcggacucguuggccuggugacguuucuucugcucugugggagauccugcaccacaucucuguauaaaggagucuacgaacugcagacccucgagcugaacauggaaacacuuaauauguguaugccucugagcugcaccaagaacaauucccaucacuauaucauggugggcaacgagacagggcucgagcugacccuuacgaauaccucuauuaucaaccauaaauucuguaaucugagcgacgcgcacaagaaaaaccucuacgaucaugcucugauguccaucauuucuacauuucaccugagcaucccgaauuucaaccaguaugaagccauguccugcgacuuuaauggaggcaagauuagcguucaguacaaccucucucacuccuaugccggcgaugcugccaaucauugugggaccguggcuaacggaguccugcaaacauucaugcggauggccuggggcgggagcuacaucgcgcuugacucuggacgcggcaacugggauugcauuaugaccuccuaccaguaucugaucauucagaauacgacaugggaggaccacugucaguuuagcagacccucuccuaucggguaccucggacugcuuucccaacggacccgcgauaucuauauuagcagacggcgcagaggcacauucaccuggacccuguccgacucugaaggcaaggauacacccgggggauacugccucacgcgguggaugcugaucgaggccgagcugaaauguuuuggcaacaccgcuguggccaagugcaaugaaaaacaugacgaggaguucugcgauaugcuccgccuguuugacuucuguaagcaggcuauucagagacuuaaagccccugcgcagaugagcauccaacugauuaacaaggccgugaaugcucucaucaacgaucagcugaucaugaagaaucaccuucgggacauuauggggauccccuauugcaacuacuccaaauauugguaccugaaucacacaaccacaggacgcaccagccucccuaaguguuggcuggucucuaacggcuccuaccugaaugaaacgcauuucagcgacgauauugaacagcaagccgacaacaugaucacagagaugcuccagaaagaguauauggaaagacaggggaagaccccgcugggacuuguugaucuguuuguguucucuaccagcuuuuaccucauuuccaucuuccugcaccuggugaaaauccccacacaucggcacauugucggcaagucuugcccuaaaccccaucgccuuaaucacaugggcaucuguagcugcgggcucuauaagcagccuggagugcccguuaaguggaaaagauga

SEQ ID NO: 23078 - RNA, 1473 nt, Artificial Sequence
  derived and/or modified CDS sequence (opt5) from LASV(LP;Clade I)__AAF86701__GPCmut2
augggccagaucauuaccuucuuucaagaggugccccacgucaucgaagagguuaugaacauugugcugaucgcccucagccugcuugcuauucugaaggggcucuacaauaucgccacaugcggaaucauuggccugguggcguuccuuuuucugugugggaaauccugcucucucacgcugaagggaggcuaugaacugcagacccucgagcugaacauggaaacacuuaauauguguaugccucugagcugcaccaaaaacuccucucaucacuacaucagagucgggaaugagacaggacucgagcugacccuuacaaacaccagcauuaucaaucauaaguucuguaaccuguccgacgcucacaaaaagaaucucuaugaucaugcccugaugucuauuaucagcacguuucaccuguccauuccgaacuucaaucaguacgaagccaugagcugcgacuuuaacggcggcaagaucucugugcaguauaaucucucccacagcuacgcuggggaugccgcugagcauuguggaaccguugccaacggcgugcugcaaacauucaugcggauggcguggggagggcgcuauaucgcccuugacucuggcaaagggaauugggauugcauuaugaccuccuaccaguaccugaucauucagaacacaaccugggaagaccacugucaguuuagcagacccucuccuaucggauaucucggccugcuuucccaacggacgcgcgauauuuacaucagcagacggcgcagaggcacauucaccuggacacuguccgacucugaggggaacgagacccccggaggcuauugccucacccgguggaugcugaucgaagcugagcugaaguguuuugggaauacagccgucgcuaaaugcaacgaaaagcaugaugaggaguucugcgacaugcuccgccuguuugauuucuguaaacaggccauuagacggcuuaaggcgccugcccagaugagcauccagcugauuaauaaggcugugaacgcccucaucaaugaccaacugauuaugaaaaaccaccuucgcgauaucaugggaauccccuacugcaauuauuccaaguacugguaucugaaccacacgagcucuggcagaaccucccucccuaaauguuggcugauuagcaaugggucuuaccugaacgaaacacaguucagcgacgacaucgagcagcaagcugauaauaugauuaccgaaaugcuccagaaggaguacaucgaacggcagggaaaaacaccgcugggccuuguugacauuuuuaucuucuccaccucuuuuuaucugauuagcaucuuccuccaucugaucaagauucccacgcaccgccauaucgugggcaaaccuugccccaagccucacagacugaaccauaugggggucuguuccugcggacuuuacaagcaccccggcgugccgacaaaauggaagcgguga

SEQ ID NO: 23079 - RNA, 1473 nt, Artificial Sequence
  derived and/or modified CDS sequence (opt5) from LASV(803213;Clade II)__AAF86703__GPCmut2
augggccagaucauuaccuucuuucaagaggugccccacgucaucgaagagguuaugaacauugugcugaucgcccucagccugcuugcuauucugaaggggaucuacaauguggccacaugcggacucuucggccugaucuccuuucuucugcucugugggagaucuugcagcgucacguauaaaggaguguacgaacugcagacccuggagcucaacauggcgaaucugaacauguguaugccucuuuccugcacaaagaauaacucucaucacuauauuaugguuggcaaugaaaccgggcuggagcucacacugaccaacacaagcaucauuaaucauaaauucuguaaccuuuccgacgcucacaagaaaaaucuguacgaucaugcccucaugucuaucauuagcaccuuucaccuguccaucccgaacuucaaucaguaugaggccaugagcugcgacuuuaacggaggcaagauuucugugcaguacaaucugucccacagcuucgcugucgaugccgcuaaccauuguggcacgaucgccaacggggugcuccaaaccuuuaugcggauggcguggggaggcucuuauaucgcccuggacuccgggaagggaaauugggauugcauuaugacaagcuaccaguaccuuaucauucagaacaccacaugggaagaccacugucaguucucucgccccuccccuaucggcuaucuggggcuccugagccaaagaacccgggauauuuacaucucccgcagacggcgcggaacguuuacauggacccuuucugacagcgagggcaaugaagcucccggcggguauugccugacaagauggaugcucaucgaggccgagcugaaauguuucggaaacaccgcuguugccaagugcaaugaaaaacaugaugaggaauuuugcgacaugcugcgccucuucgauuucuguaagcaggcgauuaaacggcugaagaccccugcccagauguccauccagcuuauuaacaaggcugugaaugcccugaucaacgaccaacucauuaugaaaaaucaccugagagauaucaugggcauccccuacugcaacuauagccgguacugguaucuuaaucacacagucacggggaagaccucucugccucgcuguuggcucguguccaacggaagcuaccugaaugagacacauuuuucugacgacauugaacagcaggcugauaacaugaucaccgagaugcugcaaaaagaguacauggacagacagggcaagacaccgcucgggcugguggaucuuuucgucuuuagcaccuccuucuaucugauuucuaucuuucuccaccugguuaaaauucccacgcaucggcacaucgugggaaagccuugccccaaaccucaucgccugaaucacaugggcauuuguagcugcggccuuuacaagcaccccggggugccggucaaguggaaaagauga

SEQ ID NO: 23080 - RNA, 1473 nt, Artificial Sequence
  derived and/or modified CDS sequence (opt5) from LASV(GA391;Clade III)__CAA36645__GPCmut2
augggccagaucgugaccuucuuucaagaggucccccacguuauugaagaggugaugaacaucgugcugauugcccucagcauccuggcuauucuuaaggggcuguacaaugucgccacaugcggacucaucggccuggugacguuccuucugcucuccgggagaucuuguagccugaucuauaaaggaaccuacgaacugcagacacucgagcugaacauggaaacccuuaauaugugcaugccucuguccuguacaaagaacaauucucaucacuauauucggguuggcaacgagaccgggcucgagcugacacuuaccaauacgagcauccugaaccauaaauuuugcaaucucuccgacgcgcacaagcgcaaccuguacgaucauucucugaugagcauuaucuccaccuuccaccucagcauuccgaauuuuaaccaguaugaagcuaugucuugugacuucaauggaggcaaaaucacagugcaguacaaccugucccacagcuuugccgucgaugccgcuggccauugcgggacccuugccaauggagugcugcaaacauucaugagaauggcuuggggcgggucuuauauugcccucgacuccggacggggcaacugggauuguaucaugaccagcuaccaguaccugaucauucagaacacgacaugggacgaucacugccaguuuucucgccccuccccuaucggguaucuuggacugcucagccaaagaacccgggacauuuacaucucccgcagacggcgcggcacauucaccuggacccugucugauagcgagggcaaugaaacacccgggggauauugucugacgagauggaugcucauugaggcggagcugaagugcuuuggcaacaccgccguugcuaaguguaaugaaaaacaugacgaggaguucugcgauaugcuucggcuguuugacuucugcaagcaggccauccgcagacucaaaaccccugcucagauguccauccagcugauuaacaaggccgugaaugcgcuuaucaacgaucaacugauuaugaaaaaucaccuccgggacaucauggggauucccuacuguaacuauagccgcuacugguaucugaaucacacaucuacaggaaagaccucccugccuagaugcuggcucaucagcaacggcucuuaccugaaugaaacgaaguucagcgacgauaucgaacagcaggccgacaacaugauuacagagaugcuucaaaaagaguacaucgaucggcaggggaagaccccgcugggacucgucgaccuguuuguguucuccaccucuuuuuaucugauuagcaucuuccuucaucucgugaaaauucccacacacagacauaucgucggcaagccuugucccaaaccucaccgccugaaucauaugggcauuugcuccugugggcuguacaagcagcccggaguuccggugcgguggaaaagauga

SEQ ID NO: 23081 - RNA, 1476 nt, Artificial Sequence
  derived and/or modified CDS sequence (opt5) from LASV(AV;Clade V)__CCA30314__GPCmut2
augggccagaucgugaccuucuuucaagaggucccccacguuauugaagaggugaugaacaucgugcugauugcccucagcauccuggcuguccuuaaggggcuguacaauauugccacaugcggacucaucggccugaucacguuccuucugcucugugggagauccugcucuagcaaccuguauaaaggaguguacgaacugcagucccucgaccugaauauggagacccuuaacauguguaugccucugucuugcacaaagaauaacagccaucacuauauucggguuggcaaugauaccgggcucgaacugacacuuaccaacacauccauccugaaucauaaauuuuguaaccucucugacgcgcacaagaaagaucuguacgaccaugcucugaugagcauuaucuccaccuuccaccucagcauuccgaauuuuaaccaguaugaggccaugucuugcgauuucaauggaggcaagaucuccgugcaguacaaccugagccacucuuaugccauugacgcugccaaucauuguggcacggucgcuaacgggauccuucaaaccuuuaugcgcauggccuggggaggcuccuacaucgcgcuggauagcgggagaggaaacugggacugcauuaugacaucuuaccaguaucucaucauucagaauaccacaugggagaaccacugucaguucucccggcccagcccuaucggcuaccuggggcuucugucccaacgcaccagagauauuuauaucucucggcgcagacggggaacguuuacauggacccucagcgacuccgaaggcaaugccacacccggcggguacugccugacccgcuggaugcugaucgaggcugaacucaaguguuucggaaacaccgccguggcuaaaugcaaugagaagcaugaugaggaauuuugcgacaugcugagacuuuucgauuuuuguaaacaggccauuagccggcugaagucuccugcgcagauguccauccagcucauuaacaaagccguuaaugcucugaucaacgaccaacuuauuaugaagaaucaucugcgcgacaucaugggcauccccuauugcaacuacagcaaguauugguaccucaaucacacaauuacggggaaaaccucucugccuaaguguuggcuggugagcaacggauccuaccucaaugagacacacuucucugaugacaucgaacagcaggccgauaacaugauuaccgagaugcugcaaaaagaauauauggagagacagggcaagacaccgcuugggcuggucgaccucuucguguuuagcaccuccuucuaccugaucagcauuuuucugcggcuugugaaaauccccacgcaccgccauauugucggaaagccuugccccaaaccucacagacucaaucauaugggcaucuguucuugcggccuguauaagcagcccgggguuccggugcgguggaagagauga

SEQ ID NO: 23082 - RNA, 1473 nt, Artificial Sequence
  derived and/or modified CDS sequence (opt5) from LASV(Togo/2016/7082;Clade VI)__AMR44577__GPCmut2
augggccagaucauuaccuucuuucaagaggugccccacgucaucgaagagguuaugaacauugugcugaucgcccucagccugcuugcuauucugaaggggguguacaaugucgccacaugcggaaucaucggccucgugacguuccuguuucuuugugggagauccugcucucugauuuauaaaggaagcuacgaacuccagacccuggagcugaacauggaaacacucaauauguguaugccucuguccugcaccaagaacucuagccaucacuauauccggguuggcaaugagacagggcuugagcugacccucacaaacaccuccauuaucaaucauaaauucuguaaccugucugacgcgcacaagcgcaaucuuuacgaucaugcucugaugagcauucucuccacguuucaccugagcaucccgaacuucaaucaguaugaagccaugucuugcgacuuuaacggaggcaaaauuuccgugcaguacaaucugagccacgccuaugcugucgaugccgcugagcauuguggcaccguggccaacgggguucuccaaacauucaugagaauggcguggggaggcucuuacaucgcccuggacuccgggcggggaaauugggauugcaucaugaccagcuaccaguaucuuauuauccagaacacaaccugggaagaccacugucaguuuucucgccccuccccuauuggcuaccuggggcuccugagccaaagaacgcgggauaucuauauuucccgcagacggcgcggaacauucaccuggacacuuucugacagcgagggcaacgagacccccggcggguacugccugaccagauggaugcucaucgaagcugagcugaaguguuuuggaaauacagccguggcuaagugcaacgaaaaacaugaugaggaguucugcgacaugcugcggcucuuugauuucuguaagcaggccauccagcgccugaaauccccugcgcagaugagcauucaacuuaucaauaaggccgucaacgcucugauuaaugaccagcucaucaugaaaaaccaccugagagauaugaugggcauucccuauugcaauuacucuaaguauugguaccuuaaccacacguccagcgggcggaccucucugccuaaguguuggcucgugagcaauggauccuaccugaacgaaacacauuucucugacgacaucgagcagcaagccgauaauaugaucaccgaaaugcugcagaaagaguauauugaccgccagggcaagacaccgcucgggcugguggaucuuuuugucuucagcaccuccuuuuaccugaucagcauuuuccuccaccugaucaaaauucccacgcauagacacaucguuggaaagccuugccccaaaccucaucggcugaaccacaugggcauuuguucuugcggccuuuauaagcagcccggggugccgacaagauggaaacgcuga

SEQ ID NO: 23083 - RNA, 1473 nt, Artificial Sequence
  derived and/or modified CDS sequence (opt5) from LASV(KAK-428;Clade n.d. (VII))__ANH09740__GPCmut2
augggccagaucgugaccuucuuucaagaggucccccacguuauugaagaggugaugaacaucgugcugauugcccucagccugcuugcuauccugaaggggcucuacaauuucgccacaugcggagucauuggccugaucacguuucuucugcucugugggagauccugcucugcgaccuauaaaggacaguacgaacugcagacacuggagcucaacauggaaagccugaauauguguaugccucuuuccugcaccaagaacaauucucaucacuauauccgggcuggcaacaauacagggcuggagcucacccugacaaacaccagcauuaucucccauaaauucuguaaucuuucugacgcccacaagaaaaaccuguacgaucauacgcucaugagcauuaucaccacauuucaccuguccauuccgaauuucaaccaguaugaggccaugagcugcgacuuuaauggaggcaagaucucuauucaauacaaccugucccacagcuaugcuggcgaugccgcucagcauugugggaccguggccaauggaguucuccagacauucaugcgcauggcguggggcgggucuuaccuggcccuugacuccggaagacggggcugggauugcaucaucagcucuuaccaguaucugauuauccaaaacaccacgugggacgaucacugucaguuuucccgccccagcccuauuggguaccucggauucgugucccagaagacaagagacaucuauauuucucggcgcagacggggcaccuuuacauggacccugagcgauuccgaaggccaugacaugcccgggggauacugccuuacccgcuggaugcugaucgaggcugaucucaaauguuucggcaacacagccgucgcuaagugcaaugaaaaacacgacgaggaguuuugcgauauguggagacuguucgacuucuguaagcaggccauccaacggcugaaagcgccugcccagaugaacauucagcucaucaauaaggcugugaacgcccugauuaaugaccaacuuaugaugaagaaccaucugcgcgauaucauggggauucccuauugcaauuacagcaaauuuugguaucucaacaauacgaccacaggaagaaccucucugccucgguguuggcuuaucuccaacggcagcuaccugaaugaaacacacuucucugacgauaucgagcagcaggcugacaacaugauuaccgaaaugcuccagaaggaguacauggaucgccaagggaaaacgccgcugggacugguugaccucuuuguguucagcacauccuuuuaucugaucaccauuuuccuucaccuggucaagauccccacccauagacacauugugggcaaaccuugccccaagccucaucggcucaaucacaugggcaucuguucuugcgggcuguacaaacagcccggagugccggucagauggaagcgcuga

SEQ ID NO: 23084 - RNA, 1473 nt, Artificial Sequence; identical to SEQ ID NO: 23078
  derived and/or modified CDS sequence (opt5) from LASV(Pinneo-NIG-1969;Clade I)__AIT17836__GPCmut2

SEQ ID NO: 23085 - RNA, 1473 nt, Artificial Sequence
  derived and/or modified CDS sequence (opt5) from LASV(ISTH0009-NIG-2011;Clade II)__AIT17404__GPCmut2
augggccagaucauuaccuucuuucaagaggugccccacgucaucgaagagguuaugaacauugugcugaucgcccucagccugcuugcuauucugaaggggaucuacaauguggccacaugcggacucuucggccuggucuccuuucuucugcucugugggagaucuugcagcacgaccuauaaaggaguguacgaacugcagacacuggagcucgacauggcgucccugaacauguguaugccucuuucuugcaccaagaauaacagccaucacuauaucaugguuggcaaugaaacagggcuggagcucacccugacaaacaccuccauuaucaaucauaaauucuguaaccuuucugaugcucacaagaaaaaucuguacgaccaugcccucaugagcauuaucuccacguuucaccugagcauuccgaacuucaaucaguaugaggccaugucuugcgauuuuaacggaggcaagaucuccgugcaguacaaucugagccacgcuuaugccgucgacgcugccaaccauuguggcaccauugcgaauggggugcuccaaacauucaugcggauggccuggggaggcucuuacaucgcucuggauuccgggaagggaagcugggacugcaucaugaccucuuaccaguaucuuauuauccagaacacaaccugggaagaucacugucaguuuucccgccccagcccuauuggcuaccuggggcuccugucccaaagaacgcgggacaucuauauuucucgcagacggcgcggaacauucaccuggacacuuagcgauuccgagggcaacgaaacccccggcggguacugccugaccagauggaugcucaucgaggccgagcugaaauguuuuggaaauacagcuguugccaagugcaacgaaaaacaugacgaggaguucugcgauaugcugcggcucuuugacuucuguaagcaggcgauccgcagacugaaaacgccugcccagaugagcauucagcuuaucaauaaggcugugaacgcccugauuaaugaucaacucaucaugaagaaccaucugcgggacauuaugggcauccccuauugcaauuacucuaaauauugguaccuuaaccacaccgucacagggaagaccucccugccucgcuguuggcucgugagcaauggaucuuaccugaacgaaacacacuucagcgacgauaucgaacagcaggcugacaauaugauuaccgagcugcuccaaaaagaguauauggauagacagggcaagacgccgcuggggcuuguggaccuguuugucuucuccacaucuuuuuaccucaucagcauuuuccugcaccugaucaaaauucccacccaucggcacaucaccggaaagccuugccccaaaccucaucgccuuaaccacaugggcauuuguuccugcggccucuauaagcaccccgggguuccggugaaguggaaaagauga

SEQ ID NO: 23086 - RNA, 1473 nt, Artificial Sequence
  derived and/or modified CDS sequence (opt5) from LASV(ISTH2010-NIG-2012;Clade II)__AIT17482__GPCmut2
augggccagaucauuaccuucuuucaagaggugccccacgucaucgaagagguuaugaacauugugcugaucgcccucagccugcuugcuauucugaaggggaucuacaauguggccacaugcggacucuucggccuggucuccuuucuucugcucugugggagaucuugcagcacgaccuauaaaggaguguacgaacugcagacacuggagcucgacauggcgucccugaacauguguaugccucuuucuugcaccaagaauaacagccaucacuauaucaugguuggcaaugaaacagggcuggagcucacccugacaaacaccuccauuaucaaucauaaauucuguaaccuuucugaugcucacaagaaaaaucuguacgaccaugcccucaugagcauuaucuccacguuucaccugagcauuccgaacuucaaucaguaugaggccaugucuugcgauuuuaacggaggcaagaucuccgugcaguacaaucugagccacgcuuaugccgucgacgcugccaaccauuguggcaccauugcgaauggggugcuccaaacauucaugcggauggccuggggaggcucuuacaucgcucuggauuccgggaagggaagcugggacugcaucaugaccucuuaccaguaucuuauuauccagaacauuacaugggaagaucacugucaguuuucccgccccagcccuaucggcuaccuggggcuccugucccaaagaacccgggacauuuauaucucucgcagacggcgcggaacguucacauggacccuuagcgauuccgagggcaacgaaacacccggcggguacugccugaccagauggaugcucaucgaggccgagcugaaauguuuuggaaauaccgcuguugccaagugcaacgaaaaacaugacgaggaguucugcgauaugcugcggcucuuugacuucuguaagcaggcgauucgcagacugaaaacgccugcccagaugagcauccagcuuauuaauaaggcugugaacgcccugaucaaugaucaacucauuaugaagaaccaucugcgggacaucaugggcauccccuauugcaauuacucuaaauauugguaccuuaaccacacagucaccgggaagacaucccugccucgcuguuggcucgugagcaauggaucuuaccugaacgaaacccacuucagcgacgauauugaacagcaggcugacaauaugaucacagagcugcuccaaaaagaguauauugauagacagggcaagaccccgcuggggcuuguggaccuguuugucuucuccacgucuuuuuaccucaucagcauuuuccugcaccugguuaaaauccccacacaucggcacguggugggaaagccuugccccaaaccucaucgccuuaaccacaugggcauuuguuccugcggccucuauaagcaccccggggucccggugaaguggaaaagauga

SEQ ID NO: 23087 - RNA, 1473 nt, Artificial Sequence
  derived and/or modified CDS sequence (opt5) from LASV(Lassa virus/H.sapiens-wt/NGA/2015/ISTH_0543;Clade II)__AVO03639__GPCmut2
augggccagaucauuaccuucuuucaagaggugccccacgucaucgaagagguuaugaacauugugcugaucgcccucagccugcuugcuauucugaaggggaucuacaauguggccacaugcggacucuucggccuggucuccuuucuucugcucugugggagaucuugcagcacgaccuauaaaggaguguacgaacugcagacacuggagcucgacauggcgaaccugaauauguguaugccucuuuccugcaccaagaacaauucucaucacuauaucaugguuggcaacgaaacagggcuggagcucacccugacaaauaccagcauuaucaaccauaaauucuguaaucuuuccgaugcucacaagaaaaaccuguacgaccaugcccucaugucuauuaucagcacguuucaccuguccauuccgaauuucaaccaguaugaggccaugagcugcgauuuuaauggaggcaagaucucugugcaguacaaccugucccacaccuaugcugucgacgccgcuaaucauuguggcacaauugccaacggggugcuccaaaccuucaugcggauggcguggggaggcagcuacaucgcccuggauucugggaagggauccugggacugcaucaugacaagcuaccaguaucuuguuauucagaacaccacgugggaagaucacugucaguuuucucgccccuccccuaucggcuaccuggggcuccugagccaaagaacacgggacauuuauaucucccgcagacggcgcggaaccuucacauggacccuuucugauagcgagggcaaugaaacccccggcggguacugccugacaagauggaugcucauugaggcugagcugaaauguuuuggaaacacggccguggcuaagugcaaugaaaaacaugacgaggaguucugcgauaugcugcggcucuuugacuucuguaagcaggccauccgcagacugaaaaccccugcgcagauguccauccagcuuauuaacaaggccgucaaugcucugaucaacgaucaacucauuaugaagaaucaucugcgggacaucaugggcauucccuauugcaacuacagcaaauauugguaccuuaaucacacagugaccgggaagacaucucugccucgcuguuggcucguguccaacggaagcuaccugaaugaaacccacuucucugacgauaucgaacagcaggccgacaacaugaucacggagcugcuccaaaaagaguauauugauagacagggcaagacaccgcuggggcuugucgaccuguuuguuuucagcaccuccuuuuaccucaucucuauuuuccugcaccuggugaaaauccccacccaucggcacauuacaggaaagccuugccccaaaccucaucgccuuaaucacaugggcaucuguagcugcggccucuauaagcaccccggggugccggucaaguggaaaagauga

SEQ ID NO: 23088 - RNA, 1473 nt, Artificial Sequence
  derived and/or modified CDS sequence (opt5) from LASV(Lassa virus/H.sapiens-wt/NGA/2016/ISTH_0009;Clade II)__AVO03571__GPCmut2
augggccagaucauuaccuucuuucaagaggugccccacgucaucgaagagguuaugaacauugugcugaucgcccucagccugcuugcuauucugaaggggaucuacaauguggccacaugcggacuccugggccuugucuccuuccugcuccugugugggagaucuugcagcacgaccuauaaaggaguguacgaacugcagacacucgagcuggacauggcgucccuuaacauguguaugccucugucuugcaccaagaauaacagccaucacuauaucaugguuggcaaugaaacagggcucgagcugacccuuacaaacaccuccauuaucaaucauaaauuuuguaaccugucugaugcucacaagaaaaaucucuacgaccaugcccugaugagcauuaucuccacguuccaccugagcauuccgaacuuuaaucaguaugaggccaugucuugcgauuucaacggaggccggaucuccgugcaguacaaucucagccacucuuaugcugucgacgccgcuaaccauuguggcaccauugccaauggggugcugcaaacauuuaugcgcauggcguggggaggcuccuacaucgcccuugauagcgggaagggaucuugggacugcaucaugaccuccuaccaguaucugauuauccagaacacaaccugggaagaucacugucaguucagcagacccuccccuauuggcuaccucgggcugcuuucucaacggacgcgcgacaucuauauuagcagacggcgcagaggaacauuuaccuggacacuguccgauagcgagggcaacgaaacccccggcggguacugccucacccgguggaugcugaucgaggcugagcugaaguguuucggaaauacagccguugcuaaaugcaacgaaaagcaugacgaggaauuuugcgauaugcuccgccuguucgacuuuuguaaacaggccaucagacggcuuaagacgccugcgcagaugucuauucagcugaucaauaaagccgugaacgcucucauuaaugaucaacugaucaugaagaaccaccuucgcgacauuaugggcauccccuauugcaauuacuccaaguauugguaccugaaccacaccgucacagggaaaaccagccucccuagauguuggcuggugucuaauggaagcuaccugaacgagacacauuucuccgacgauaucgaacagcaggccgacaauaugauuaccgagcuccugcaaaaggaguauaucgaucggcagggcaaaacgccgcuugggcugguggaccucuucgucuuuucuaccagcuucuaccugauuuccaucuuucugcaccuuguuaagauucccacacaucgccacaucaccggaaaaccuugccccaagccucauagacucaaccacaugggcauuuguagcugcggccuguauaaucaccccggggugccggugaaauggaagcgguga

SEQ ID NO: 23089 - RNA, 1473 nt, Artificial Sequence
  derived and/or modified CDS sequence (opt5) from LASV(Lassa virus/H.sapiens-wt/NGA/2016/ISTH_0017;Clade II)__AVO03567__GPCmut2
augggccagaucauuaccuucuuucaagaggugccccacgucaucgaagagguuaugaacauugugcugaucgcccucagccugcuugcuauucugaaggggaucuacaauguggccacaugcggacucuucggccuggucuccuuucuucugcucugugggagaucuugcagcacgaccuauaaaggaguguacgaacugcagacacuggagcucgacauggcgucccugaacauguguaugccucuuucuugcaccaagaauaacagccaucacuauaucaugguuggcaaugaaacagggcuggagcucacccugacaaacaccuccauuaucaaucauaaauucuguaaccuuucugaugcucacaagaaaaaucuguacgaccaugcccucaugagcauuaucuccacguuucaccugagcauuccgaacuucaaucaguaugaggccaugucuugcgauuuuaacggaggcaagaucuccgugcaguacaaucugagccacaccuaugcuauugacgccgcuaaccauuguggcacaaucgccaaugggguccuccaaaccuucaugcggauggcguggggaggcucuuacaucgcccuggauuccgggaagggaagcugggacugcauuaugacaucuuaccaguaucuuaucauucagaacaccacgugggaagaucacugucaguuuucccgccccagcccuaucggcuaccuggggcuccugucccaaagaacacgggacauuuauaucucucgcagacggcgcggaaccuucacauggacccuuagcgauuccgagggcaacgaaacccccggcggguacugccugacaagauggaugcucaucgaggcugagcugaaauguuuuggaaauacggccguggcuaagugcaacgaaaaacaugacgaggaguucugcgauaugcugcggcucuuugacuucuguaagcaggccauucgcagacugaaaaccccugcgcagaugagcauccagcuuauuaauaaggccguuaacgcucugaucaaugaucaacucauuaugaagaaccaucugcgggacaucaugggcauccccuauugcaauuacucuaaauauugguaccuuaaccacacagugaccgggaagacaucccugccucgcuguuggcucgucagcaauggaucuuaccugaacgaaacccacuucagcgacgauauugaacagcaggccgacaauaugaucacggagcugcuccaaaaagaguauauggauagacagggcaagacaccgcuggggcuuguggaccuguuuguguucuccaccucuuuuuaccucauuagcaucuuccugcaccugguccggauucccacccaucgccacguuaucggaaaaccuugccccaagccucauagacuuaaccacaugggcauuuguuccugcggccucuauaaacaccccggggugccggugaaguggaagcgguga

SEQ ID NO: 23090 - RNA, 1473 nt, Artificial Sequence
  derived and/or modified CDS sequence (opt5) from LASV(Lassa virus/H.sapiens-wt/NGA/2018/ISTH_0959;Clade II)__AVV65099__GPCmut2
augggccagaucauuaccuucuuucaagaggugccccacgucaucgaagagguuaugaacauugugcugaucgcccucagccugcuugcuauucugaaggggaucuacaauguggucacaugcggacucuucggccugguguccuuucuucugcucugugggagaucuugcagcacgaccuauaaaggaguuuacgaacugcagacacuggagcucgacauggccucccugaacauguguaugccucuuucuugcaccaagaauaacagccaucacuauaucauggugggcaaugaaacagggcuggagcucacccugacaaacaccuccauuaucaaucauaaauucuguaaccuuucugaugcgcacaagaaaaaucuguacgaccaugcucucaugagcauuaucuccacguuucaccugagcauuccgaacuucaaucaguaugaggccaugucuugcgauuuuaacggaggcaagaucuccguccaguacaaucugagccacgccuaugcuauugacgccgcuaaccauuguggcaccaucgccaauggggugcuccaaacauucaugcggauggcguggggaggcucuuacaucgcccuggauuccgggaagggaagcugggacugcauuaugaccucuuaccaguaucuuaucauucagaacacaaccugggaagaucacugucaguuuucccgccccagcccuaucggcuaccuggggcuccugucccaaagaacgcgggacauuuauaucucucgcagacggcgcggaacauucaccuggacacuuagcgauuccgagggcaacgaaacccccggcggguacugccugaccagauggaugcucaucgaggcugagcugaaauguuuuggaaauacagccguugcuaagugcaacgaaaaacaugacgaggaguucugcgauaugcugcggcucuuugacuucuguaagcaggccauucgcagacugaaaacgccugcgcagaugagcauccagcuuauuaauaaggccgugaacgcucugaucaaugaucaacucauuaugaagaaccaucugcgggacaucaugggcauccccuauugcaauuacucuaaauauugguaccuuaaccacaccgucacagggaagaccucccugccucgcuguuggcucgugagcaauggaucuuaccugaacgaaacacacuucagcgacgauauugaacagcaggccgacaauaugaucaccgagcugcuccaaaaagaguauauugauagacagggcaagacgccgcuggggcuuguggaccuguuugucuucuccacaucuuuuuaccucaucagcauuuuccugcaccugguuaaaauccccacccaucggcacgugauuggaaagccuugccccaaaccucaucgccuuaaccacaugggcaucuguuccugcggccucuauaagcaccccggggugccggucaaguggaaaagauga

SEQ ID NO: 23091 - RNA, 1473 nt, Artificial Sequence
  derived and/or modified CDS sequence (opt5) from LASV(LASV003-NIG-2008;Clade II)__AIT17580__GPCmut2
augggccagaucauuaccuucuuucaagaggugccccacgucaucgaagagguuaugaacauugugcugaucgcccucagccugcuugcuauucugaaggggaucuacaauguggccacaugcggacucuucggccuggucuccuuucuucugcucugugggagaucuugcagcacgaccuauaaaggaguguacgaacugcagacacuggagcucgacauggcgucccugaacauguguaugccucuuucuugcaccaagaauaacagccaucacuauaucaugguuggcaaugaaacagggcuggagcucacccugacaaacaccuccauuaucaaucauaaauucuguaaccuuucugaugcucacaagaaaaaucuguacgaccaugcccucaugagcauuaucuccacguuucaccugagcauuccgaacuucaaucaguaugaggccaugucuugcgauuuuaacggaggcaagaucuccgugcaguacaaucugagccacaccuaugcugucgacgccgcuaaccauuguggcacaauugccaauggggugcuccaaaccuucaugcggauggcguggggaggcucuuacaucgcccuggauuccgggaagggaagcugggacugcaucaugacaucuuaccaguaucuuauuauccagaacaccacgugggaagaucacugucaguuuucccgccccagcccuauuggcuaccuggggcuccugucccaaagaacacgggacaucuauauuucucgcagacggcgcggaaccuucacauggacccuuagcgauuccgagagcaacgaaacccccggcggcuacugccugacaagauggaugcucaucgaggcugagcugaaauguuuugggaauacggccguugcuaagugcaacgaaaaacaugacgaggaguucugcgauaugcugcggcucuuugacuucuguaagcaggccauccgcagacugaaagcgccugcccagaugucuauucagcuuaucaauaaggcugugaacgcccugauuaaugaucaacucaucaugaagaaccaucugcgggacauuaugggaauccccuauugcaauuacuccaaauauugguaccuuaaccacaccgucacaggccgcaccagccugccuagauguuggcucgugucuaaugggagcuaccugaacgaaacacacuucuccgacgauaucgaacagcaggcugacaauaugauuaccgagcugcuccaaaaggaguauauggaucggcagggaaaaacgccgcugggccuuguggaccuguuugucuucucuaccagcuuuuaccucaucuccauuuuccugcaccugguuaagauccccacacaucgccacgugauugggaaaccuugccccaagccucauagacuuaaccacaugggaaucuguagcugcggccucuauaaacaccccggcgugccggucaaguggaagcgguga

SEQ ID NO: 23092 - RNA, 1473 nt, Artificial Sequence
  derived and/or modified CDS sequence (opt5) from LASV(LASV035-NIG-2009;Clade II)__AIT17588__GPCmut2
augggccagaucauuaccuucuuucaagaggugccccacgucaucgaagagguuaugaacauugugcugaucgcccucagccugcuugcuauucugaaggggaucuacaauguggccacaugcggacucuucggccuggucuccuuucuucugcucugugggagaucuugcagcacgaccuauaaaggaguguacgaacugcagacacuggagcucgacauggcgucccugaacauguguaugccucuuucuugcaccaagaauaacagccaucacuauaucaugguuggcaaugaaacagggcuggagcucacccugacaaacaccuccauuaucaaucauaaauucuguaaccuuucugaugcucacaagaaaaaucuguacgaccaugcccucaugagcauuaucuccacguuucaccugagcauuccgaacuucaaucaguaugaggccaugucuugcgauuuuaacggaggcaagaucuccgugcaguacaaucugagccacgcuuaugccgucgacgcugccaaccauuguggcaccauugcgaauggggugcuccaaacauucaugcggauggccuggggaggcucuuacaucgcucuggauuccgggaagggaagcugggacugcaucaugaccucuuaccaguaucuuauuauccagaacacaaccugggaagaucacugucaguuuucccgccccagcccuauuggcuaccuggggcuccugucccaaagaacgcgggacaucuauauuucucgcagacggcgcggaacauucaccuggacacuuagcgauuccgagggcaacgaaacccccggcggguacugccugaccagauggaugcucaucgaggccgagcugaaauguuuuggaaauacagcuguugccaagugcaacgaaaaacaugacgaggaguucugcgauaugcugcggcucuuugacuucuguaagcaggcgauccgcagacugaaagccccugcucagaugagcauucagcuuaucaauaaggccgugaacgcucugauuaaugaucaacucaucaugaagaaccaucugcgggacauuaugggcauccccuauugcaauuacucuaaauauugguaccuuaaccacacggucaccgggaagacaucccugccucgcuguuggcucgugagcaauggaucuuaccugaacgaaacccacuucagcgacgauaucgaacagcaggccgacaauaugauuacagagcugcuccaaaaagaguauaucgauagacagggcaagaccccgcuggggcuuguggaccuguuugucuucuccacgucuuuuuaccucauuagcaucuuccugcaccugguuaaaauucccacacaucggcacgugaucggaaagccuugccccaaaccucaucgccuuaaccacaugggcauuuguuccugcggccucuauaagcaccccggggugccggucaaguggaaaagauga

SEQ ID NO: 23093 - RNA, 1473 nt, Artificial Sequence
  derived and/or modified CDS sequence (opt5) from LASV(LASV1000-NIG-2009;Clade II)__AIT17782__GPCmut2
augggccagaucauuaccuucuuucaagaggugccccacgucaucgaagagguuaugaacauugugcugaucgcccucagccugcuugcuauucugaaggggaucuacaauguggccacaugcggacucuucggccuggucuccuuucuucugcucugugggagaucuugcagcacgaccuauaaaggaguguacgaacugcagacacuggagcucgacauggcgucccugaacauguguaugccucuuucuugcaccaagaauaacagccaucacuauaucaugguuggcaaugaaacagggcuggagcucacccugacaaacaccuccauuaucaaucauaaauucuguaaccuuucugaugcucacaagaaaaaucuguacgaccaugcccucaugagcauuaucuccacguuucaccugagcauuccgaacuucaaucaguaugaggccaugucuugcgauuuuaacggaggcaagaucuccgugcaguacaaucugagccacaccuaugcugucgacgccgcuaaccauuguggcacaauugccaauggggugcuccaaaccuucaugcggauggcguggggaggcucuuacaucgcccuggauuccgggaagggaagcugggacugcaucaugacaucuuaccaguaucuuauuauccagaacaccacgugggaagaucacugucaguuuucccgccccagcccuauuggcuaccuggggcuccugucccaaagaacacgggacaucuauauuucucgcagacggcgcggaaccuucacauggacccuuagcgauuccgagggcaacgaaacccccggcggguacugccugacaagauggaugcucaucgaggcugagcugaaauguuuuggaaauacggccguugcuaagugcaacgaaaaacaugacgaggaguucugcgauaugcugcggcucuuugacuucuguaagcaggccaucaaacgccugaagaccccugcgcagaugagcauucagcuuaucaauaaggccgugaacgcucugauuaaugaucaacucaucaugaaaaaccaccugagagacauuaugggcauccccuauugcaauuacucuaaguauugguaccuuaaccacacagucaccgggaaaacaucccugccucgguguuggcucgugagcaauggaucuuaccugaacgaaacccauuucagcgacgauaucgaacagcaggccgacaauaugauuacggagcugcuccaaaaggaguauaucgaucgccagggcaaaacaccgcuggggcuuguggaccuguuugucuucuccaccucuuuuuaccucauuagcaucuuccugcaccugguuaagauucccacccauagacacguggugggaaaaccuugccccaagccucaucggcuuaaccacaugggcaucuguuccugcggccucuauaagcaccccggggucccggugaaauggaagcgcuga

SEQ ID NO: 23094 - RNA, 1473 nt, Artificial Sequence
  derived and/or modified CDS sequence (opt5) from LASV(LASV221-NIG-2010;Clade II)__AIT17624__GPCmut2
augggccagaucauuaccuucuuucaagaggugccccacgucaucgaagagguuaugaacauugugcugaucgcccucagccugcuugcuauucugaaggggaucuacaauguggccacaugcggacucuucggccuggucuccuuucuucugcucugugggagaucuugcagcacgaccuauaaaggaguguacgaacugcagacacuggagcucgacauggcgucccugaacauguguaugccucuuucuugcaccaagaauaacagccaucacuauaucaugguuggcaaugaaacagggcuggagcucacccugacaaacaccuccauuaucaaucauaaauucuguaaccuuucugaugcucacaagaaaaaucuguacgaccaugcccucaugagcauuaucuccacguuucaccugagcauuccgaacuucaaucaguaugaggccaugucuugcgauuuuaacggaggcaagaucuccgugcaguacaaucugagccacaccuaugcuauugacgccgcuaaccauuguggcacaaucgccaaugggguccuccaaaccuucaugcggauggcguggggaggcucuuacaucgcccuggauuccgggaagggaagcugggacugcauuaugacaucuuaccaguaucuuaucauucagaacaccacgugggaagaucacugucaguuuucccgccccagcccuaucggcuaccuggggcuccugucccaaagaacacgggacauuuauaucucucgcagacggcgcggaaccuucacauggacccuuagcgauuccgagggcaacgaaacccccggcggguacugccugacaagauggaugcucaucgaggcugagcugaaauguuuuggaaauacggccguggcuaagugcaacgaaaaacaugacgaggaguucugcgauaugcugcggcucuuugacuucuguaagcaggccauucgcagacugaaaaccccugcgcagaugagcauccagcuuauuaauaaggccguuaacgcucugaucaaugaucaacucauuaugaagaaccaucugcgggacaucaugggcauccccuauugcaauuacucuaaauauugguaccuuaaccacacagugaccgggaagacaucccugccucgcuguuggcucgucagcaauggaucuuaccugaacgaaacccacuucagcgacgauauugaacagcaggccgacaauaugaucacggagaugcugcaaaaagaguauauggauagacagggcaagacaccgcucgggcugguggaccuuuuuguguucuccaccucuuuuuaccugauuagcaucuuccuccaccuggucaaaauucccacccaucggcacguuaucggaaagccuugccccaaaccucaucgccugaaccacaugggcauuuguuccugcggccuuuauaagcaccccggggugccggugaaguggaaaagauga

SEQ ID NO: 23095 - RNA, 1473 nt, Artificial Sequence
  derived and/or modified CDS sequence (opt5) from LASV(LASV237-NIG-2010;Clade II)__AIT17638__GPCmut2
augggccagaucauuaccuucuuucaagaggugccccacgucaucgaagagguuaugaacauugugcugaucgcccucagccugcuugcuauucugaaggggaucuacaauguggccacaugcggacucuucggccuggucuccuuucuucugcucugugggagaucuugcagcacgaccuauaaaggaguguacgaacugcagacacuggagcucgacauggcgucccugaacauguguaugccucuuucuugcaccaagaauaacagccaucacuauaucaugguuggcaaugaaacagggcuggagcucacccugacaaacaccuccauuaucaaucauaaauucuguaaccuuucugaugcucacaagaaagaccuguacgaucaugcccucaugagcauuaucuccacguuucaccugagcauuccgaauuucaaccaguaugaggccaugucuugcgacuuuaauggaggcaagaucuccgugcaguacaaccugagccacaccuaugcugucgaugccgcuaaucauuguggcacaauugccaacggggugcuccaaaccuucaugcggauggcguggggaggcucuuacaucgcccuggacuccgggaagggaagcugggauugcaucaugacaucuuaccaguaucuuauuauccagaauaccacgugggaagaccacugucaguuuucccgccccagcccuauuggcuaccuggggcuccugucccaaagaacacgggauaucuauauuucucgcagacggcgcggaaccuucacauggacccuuagcgacuccgagggcaacgaaacccccggcggguacugccugacaagauggaugcucaucgaggcugagcugaaauguuuuggaaacacggccguugcuaagugcaaugaaaaacaugaugaggaguucugcgacaugcugcggcucuuugauuucuguaagcaggccauccgcagacugaaaaccccugcgcagaugagcauucagcuuaucaacaaggccgugaaugcucugauuaacgaccaacucaucaugaagaaucaucugcgggacauuaugggcauccccuauugcaacuacucuaaauauugguaccuuaaucacacagucaccgggaagacaucccugccucgcuguuggcucgugagcaacggaucuuaccugaaugaaacccacuucagcgaugacaucgaacagcaggccgauaacaugauuacggagcugcuccaaaaagaguauauggacagacagggcaagacaccgcuggggcuuguggaucuguuugucuucuccaccucuuuuuaccucaucagcauuuuccugcaccugaucaaaauucccacccaucggcacaucacaggaaagccuugccccaaaccucaucgccuuaaucacaugggcauuuguuccugcggccucuauaagcaccccgggguuccggugaaguggaaaagauga

SEQ ID NO: 23096 - RNA, 1473 nt, Artificial Sequence
  derived and/or modified CDS sequence (opt5) from LASV(LASV253-NIG-2011;Clade II)__AIT17670__GPCmut2
augggccagaucauuaccuucuuucaagaggugccccacgucaucgaagagguuaugaacauugugcugaucgcccucagccugcuugcuauucugaaggggaucuacaauguggccacaugcggacucuucggccuggucuccuuucuucugcucugugggagaucuugcagcacgaccuauaaaggaguguacgaacugcagacacuggagcucgacauggcgucccugaacauguguaugccucuuucuugcaccaagaauaacagccaucacuauaucaugguuggcaaugaaacagggcuggagcucacccugacaaacaccuccauuaucaaucauaaauucuguaaccuuucugaugcucacaagaaaaaucuguacgaccaugcccucaugagcauuaucuccacguuucaccugagcauuccgaacuucaaucaguaugaggccaugucuugcgauuuuaacggaggcaagaucuccgugcaguacaaucugagccacaccuaugcugucgacgccgcuaaccauuguggcacaauugccaauggggugcuccaaaccuucaugcggauggcguggggaggcucuuacaucgcccuggauuccgggaagggaagcugggacugcaucaugacaucuuaccaguaucuuauuauccagaacaccacgugggaagaucacugucaguuuucccgccccagcccuauuggcuaccuggggcuccugucccaaagaacacgggacaucuauauuucucgcagacggcgcggaaccuucacauggacccuuagcgauuccgagggcaacgaaacccccggcggguacugccugacaagauggaugcucaucgaggcugagcugaaauguuuuggaaauacggccguugcuaagugcaacgaaaaacaugacgaggaguucugcgauaugcugcggcucuuugacuucuguaagcaggccauccgcagacugaaagcgccugcccagaugagcauucagcuuaucaauaaggcugugaacgcccugauuaaugaucaacucaucaugaagaaccaucugcgggacauuaugggcauccccuauugcaauuacucuaaauauugguaccuuaaccacaccgucacagggcgcaccucccugccuagauguuggcucgugagcaauggaucuuaccugaacgaaacacacuucagcgacgauaucgaacagcaggcugacaauaugauuaccgagcugcuccaaaaggaguauaucgaucggcagggcaaaacgccgcuggggcuuguggaccuguuugucuucuccacaucuuuuuaccucauuagcaucuuccugcaccugguuaagauucccacccaucgccacaucauuggaaaaccuugccccaagccucauagacuuaaccacaugggcaucuguuccugcggccucuauaaacaccccggggugccggugaaguggaagcgguga

SEQ ID NO: 23097 - RNA, 1473 nt, Artificial Sequence
  derived and/or modified CDS sequence (opt5) from LASV(LASV254-NIG-2011;Clade II)__AIT17674__GPCmut2
augggccagaucauuaccuucuuucaagaggugccccacgucaucgaagagguuaugaacauugugcugaucgcccucagccugcuugcuauucugaaggggaucuacaauguggccacaugcggacucuucggccuggucuccuuucuucugcucugugggagaucuugcagcacgaccuauaaaggaguguacgaacugcagacacuggagcucgacaugaccaaccugaauauguguaugccucuuuccugcacaaagaacaauucucaucacuauaucaugguuggcaacgaaaccgggcuggagcucacacugaccaauacgagcauuaucaaccauaaauucuguaaucuuuccgaugcgcacaagaaaaaccuguacaaucaugcucucaugucuauuaucagcaccuuucaccuguccauuccgaacuucaaucaguaugaggccaugagcugcgacuuuaacggaggcaagaucucugugcaguacaaucugucccacagcuaugccgucgaugcugccaaccauuguggcacaauugcuaacggggugcuccaaaccuucaugcggauggccuggggaggcucuuacaucgcgcuggacuccgggaagggaaauugggauugcaucaugacaagcuaccaguaucuuauuauccagaacaccacgugggaagaccacugucaguuuucucgccccuccccuauuggcuaccuggggcuccugagccaaagaacacgggauaucuauauuucccgcagacggcgcggaaccuucacauggacccuuucugacagcgagggcaaugaaacccccggcggguacugccugacaagauggaugcucaucgaggccgagcugaaauguuuuggaaacacggcuguugccaagugcaaugaaaaacaugaugaggaguucugcgacaugcugcggcucuuugauuucuguaagcaggcuauccgcagacugaaaaccccugcccaggcgaacauucagcuuaucaauaaggccgugaacgcucugauuaaugaccaacucaucaugaagaaccaucugcgggauauuaugggcauccccuauugcaauuacuccaaauauugguaccuuaaccacacagucaccgggaagacaagccugccucgcuguuggcucgugucuaauggauccuaccugaacgaaacccacuucagcgacgacaucgaacagcaggccgauaauaugauuacggagcugcuccaaaaagaguauauggacagacagggcaagacaccgcuggggcuuguggaucuguuugucuucucuaccagcuuuuaccucaucuccauuuuccugcaccugguuaaaauccccacccaucggcacgugauuggaaagccuugccccaaaccucaucgccuuaaccacaugggcaucuguucuugcggccucuauaagcaccccggggugccggucaaguggaaaagauga

SEQ ID NO: 23098 - RNA, 1473 nt, Artificial Sequence
  derived and/or modified CDS sequence (opt5) from LASV(Nig08-A19;Clade III)__ADU56618__GPCmut2
augggccagaucgugaccuucuuucaagaggucccccacguuauugaagaggugaugaacaucgugcugauugcccucagcauccuggcuauucuuaaggggcuguacaauaucgccacaugcggacucaucggccuggucacguuccuucugcucuccgggagaucuuguagcaugaccuauaaaggaguguacgaacugcagacacuggagcucaacaugaauacccugaacaugugcaugccucuuuccuguacaaagaauaacucucaucacuauauuaugguuggcaaugaaaccgggcuggagcucacacugaccaacacgagccuucugcaucacaaauuuugcaaucucuccgacgcgcauaagaaaaaccuguacgaucacacccugaugucuaucauuagcacauuccaccucuccaucccgaauuuuaaccaguaugaggcuaugagcugugacuucaauggaggcaagauuaccgugcaguacaaccugucucauuccuaugccaucgaugccgcuaaucacugcggcacagucgccaacggggugcuucaaaccuuuaugcggauggcuuggggaggcagcuacauugcccuggacucugggcgcggaaagugggauuguaucaugacguccuaccaguaucucaucauucagaacacaaccugggaagaccauugccaguucagcagacccucuccuaucggcuaccuggggcuucugucccaacggacacgcgauauuuauaucagcagacggcgcagaggaaccuuuaccuggacacucuccgacucugagggcaaugaaacgcccggcggguacugucugacccgguggaugcugauugaggcggagcucaaaugcuucggaaacacagccguugcuaaguguaaugaaaaacacgaugaggaauuuugcgacaugcugcgccuuuucgauuuuugcaagcaggccaucagacggcugaaagcuccugcccagaugagcauccagcucauuaacaaggcggugaaugcccugaucaacgaccaacuuauuaugaagaaucaucugcgcgauaucaugggcauucccuauuguaacuacuccaaauauugguaccucaaucacaccagcacagggagaaccucucugccucggugcuggcuggucuccaacggaagcuaccucaaugagacgcacuucucugacgacaucgaacagcaggcugauaacaugaucacagagaugcugcaaaaggaguaucuugaccgccagggcaaaaccccgcuggggcucguggaucuguucguguuuagcaccuccuucuaccugauuucuaucuuucuucaucucgucaagauucccacacacagacauaucguuggaaaaccuugucccaagccucaccggcugaaucacaugggcauuugcagcuguggccuguauaaacagcccggggugccggugagauggaagcgcuga

SEQ ID NO: 23099 - RNA, 1476 nt, Artificial Sequence
  derived and/or modified CDS sequence (opt5) from LASV(G1180-SLE-2010;Clade IV)__AIT17168__GPCmut2
augggccagaucgugaccuucuuucaagaggucccccacguuauugaagaggugaugaacaucgugcugauugcccucagcauccuggcuguccuuaaggggcuguacaauuucgccacaugcggacucgugggccugcuuacguuucugcuccugugugggagauccugcaccgcgucucgguauaaaggaguuuacgaacugcagacacucgagcugaacauggaaacccuuaauauguguaugccucugagcugcacaaagaacaauucccaucacuauauuauggugggcaacgagaccgggcucgagcugacacuuaccaauacgucuaucaucaaccauaaauucuguaaucugagcgacgcucacaagaaaaaccucuacgaucaugcccugauguccauuaucucuaccuuucaccugagcauuccgaauuucaaccaguaugaagccauguccugcgacuuuaauggaggcaagaucagcguccaguacaaccucucucacuccuaugcuggcgaugccgcuaaucauugugggacaguggccaacggaguucugcaaaccuucaugcgcauggcguggggcgggagcuacauugcccuugacucuggacacggcuccugggauugcaucaugacaagcuaccaguaucugauuauccagaacaccacgugggaggaccauugucaguuuucuagacccuccccuaucggguaccucggacugcuuagccaacggacacgcgauauuuauaucuccagacggcgcagaggcaccuucacauggacccugucugacagcgaaggcaaggauacccccgggggauacugccucacacgguggaugcugauugaggcugagcugaaauguuuuggcaauacggccguggcuaagugcaacgaaaaacacgacgaggaguucugcgauaugcuccgccuguuugacuucuguaagcaggccauccagagacuuaaagcgccugcccagauguccauucaacugaucaauaaggcugucaacgcccucaucaaugaucagcugauuaugaagaaccaccuucgggacaucauggggauucccuauugcaauuacagcaaauauugguaccugaaccauaccacaaccggaaagacaucucucccuaaauguuggcugguguccaauggcagcuaccugaacgaaacccacuucucugacgauaucgaacagcaagcugacaauaugauuacggagaugcuccagaaggaguauauggaacgccaggggaaaacaccgcugggacuuguggaucuguuugucuucagcaccuccuuuuaccucaucucuaucuuccugcaucugguuaagauucccacccacagacauaucgugggcaaaagcugcccuaagccccaccggcuuaaccacaugggcauuuguuccugcgggcucuauaagcagccuggagugcccgucaaauggaagcgcuga

SEQ ID NO: 23100 - RNA, 1476 nt, Artificial Sequence
  derived and/or modified CDS sequence (opt5) from LASV(G1442-SLE-2011;Clade IV)__AIT17180__GPCmut2
augggccagaucgugaccuucuuucaagaggucccccacguuauugaagaggugaugaacaucgugcugauugcccucagcauccuggcuguccuuaaggggcuguacaauguggccacaugcggacucauuggccugguuacguuccuucugcucugugggagauccugcaccacaacccuguauaaaggaguguacgaacugcagacacucgagcugaacauggaaacccuuaauauguguaugccucugucuugcacaaagaacaauagccaucacuauauccgggucggcaacgagaccgggcucgagcugacgcuuaccaauacauccaucauuaaccauaaauuuuguaaucugucugacgcgcacaagaaaaaccucuacgaucaugcucugaugagcaucauuuccaccuuccaccugucuaucccgaauuuuaaccaguaugaagccaugagcugcgacuucaauggaggcaagauuuccgugcaguacaaccucagccacucuuaugccggcgaugcugccaaucauugugggacaguugcuaacggagugcugcaaaccuuuaugcgcauggccuggggcggguccuacaucgcgcuugacagcggaagaggcaacugggauugcauuaugacgucuuaccaguaucugaucauccagaauacaaccugggacgaucacugucaguucucccggcccagcccuauuggguaccucggacugcuuucucaacgcacaagagacgucuauaucucccggcgcagacggggcaccuuuaccuggacacugagcgauuccgagggcaaggacacgcccgggggauacugccucacccgcuggaugcugauugaagccgagcugaaauguuucggcaacacagcuguggccaagugcaaugagaaacaugaugaagaguuuugcgacaugcucagacuguucgauuuuuguaagcaggcuauccagcggcuuaaagccccugcgcagaugucuauucaacugaucaacaaggccgugaaugcucucaucaacgaccagcugauuaugaagaaucaccuucgcgacaucauggggauucccuauugcaacuacagcaaauauugguaccugaauaacaccgccacaggaaagaccucccucccuaaauguuggcugaucagcaauggcucuuaccugaacgaaacgcacuucuccgaugacauugagcaggaagcugauaauaugaucacagagaugcuccaaaaggaguauauggaaagacaggggaaaaccccgcugggacuugucgaccuguucguuuuuagcaccucuuucuaccucaucagcauuuuucugcaucuggugaagauccccacacaccggcauauugugggcaaauccugcccuaagccccaccgccuuaaccauaugggcaucuguucuugcgggcucuauaagcagccuggaguccccgugagauggaaacgguga

SEQ ID NO: 23101 - RNA, 1476 nt, Artificial Sequence
  derived and/or modified CDS sequence (opt5) from LASV(G3010-SLE-2013;Clade IV)__AIT17344__GPCmut2
augggccagaucgugaccuucuuucaagaggucccccacguuauugaagaggugaugaacaucgugcugauugcccucagcauccuggcuguccuuaaggggcuguacaauuucgccacaugcggacucgugggccugguuacguuucuucugcucugugggagauccugcaccacaucucuguauaaaggaguguacgaacugcagacccucgagcugaacauggaaacacuuaauauguguaugccucugagcugcaccaagaacaauucccaucacuauauuauggucggcaacgagacagggcucgagcugacccuuacgaauaccucuaucaucaaccauaaauucuguaaucugagcgacgcgcacaagaaaaaccucuacaaucaugcucugauguccauuaucucuacauuucaccugagcauuccgaacuucaaucaguaugaagccauguccugcgauuuuaacggaggcaagaucagcgugcaguacaaucucucucacuccuaugccggcgacgcugccagccauugugggaccguugcuaacggagugcugcaaacauucaugcggauggccuggggcgggucuuacauugcgcuugauuccggauacggcaagugggacugcaucaugaccagcuaucaguaccugauuauccagaacacgacaugggaggaucacugucaguuuucucgccccuccccuaucggguaucucggacugcuuagccaaagaacccgggacauuuacaucucccgcagacggcgcggcacauucaccuggacccugucugauagcgaaggcaaagacacacccgggggauauugccucacgagauggaugcugauugaggccgagcugaaguguuuuggcaauaccgcugucgccaaaugcaacgaaaagcaugaugaggaguucugcgacaugcuccggcuguuugauuucuguaaacaggcuauccagcgccuuaagaccccugcccagauguccauucaacugaucaauaaggcggugaacgcccucaucaaugaccagcugauuaugaaaaaccaccuuagagauaucauggggauucccuacugcaauuauagcaaguacugguaccugaaccacacaacaaccggaaaaacgucucucccuaaguguuggcugguguccaauggcagcuaucugaacgaaacacauuucucugacgacaucgaacagcaagcugauaauaugauuaccgagaugcuccagaaagaguacauggaacggcaggggaagaccccgcugggacuugucgaccuguuuguuuucagcacauccuuuuaucucaucucuaucuuccugcaccuggugaaaauucccacccaucgccacaucgugggcaagagcugcccuaagccccauagacuuaaccacaugggcauuuguuccugcgggcucuacaaacagccuggaguccccgugcgguggaagcgcuga

SEQ ID NO: 23102 - RNA, 1476 nt, Artificial Sequence
  derived and/or modified CDS sequence (opt5) from LASV(G502-SLE-2009;Clade IV)__AIT17126__GPCmut2
augggccagaucgugaccuucuuucaagaggucccccacguuauugaagaggugaugaacaucgugcugauugcccucagcauccuggcuguccuuaaggggcuguacaauuucgccacaugcggacucgugggccugcuuacguuucugcuccugugugggagauccugcaccacaggacuguauaaaggcguuuacgaacuccagacccuggagcuuaacauggaaacacugaauauguguaugccucucucuugcaccaagaacaauagccaucacuauauuaugguggggaacgagacaggacuggagcuuacccugacgaauaccuccaucaucaaccauaaauucuguaaucucucugacgcgcacaagaaaaaccuguacgaucaugcucugaugagcauuaucuccacauuucaccucucuauuccgaauuucaaccaguaugaagccaugagcugcgacuuuaauggcggcaagaucuccguccaguacaaccugagccacucuuaugccggggaugcugccgaccauuguggaaccguggcuaauggcguucuucaaacauucaugcggauggccuggggaggguccuacauugcgcuggauagcggccgcgggagaugggacugcaucaugaccucuuaccaguaucucauuauccagaacacgacaugggaggaucacugucaguuuucccggcccagcccuaucggauaccugggccuucugucucaacgcaccagagacauuuauaucucccggcgcagacggggcacauucaccuggacccucagcgauuccgaagggaaggacacacccggaggcuacugccugacgcgcuggaugcugauugaggccgagcucaaauguuuugggaacaccgcuguggccaagugcaaugaaaaacaugaugaggaguucugcgacaugcugagacuuuuugauuucuguaagcaggcuauccagcggcugaaagccccugcgcagaugucuauucaacucaucaacaaggccgucaaugcucugaucaacgaccagcuugugaugaagaaucaucugcgcgacauuaugggaauccccuauugcaacuacagcagauauugguaccucaaucacacaaccacaggccggaccucccugccuaaauguuggcuggugagcaacgggucuuaccucaaugaaacgcacuucuccgaugacauugaacagcaagccgauaacaugaucacagagaugcugcagaaggaguauauggaacgccagggaaaaaccccgcuuggccuggucgaccucuuuguuuucagcaccucuuuuuaccugauuagcaucuuccugcaccuugugaagauccccacacauagacacauugugggcaaauccugcccuaagccccaucggcucaaucacauggggaucuguucuugcggacuguauaaacagccuggcguccccgugaaguggaagagauga

SEQ ID NO: 23103 - RNA, 1476 nt, Artificial Sequence
  derived and/or modified CDS sequence (opt5) from LASV(G733-SLE-2010;Clade IV)__AIT17154__GPCmut2
augggccagaucgugaccuucuuucaagaggucccccacguuauugaagaggugaugaacaucgugcugauugcccucagcauccuggcuguccuuaaggggcuguacaauuucgccacaugcggaauugugggccucguuuccuuucugcuucugugugggagaucuugcacgaccagccucuauaaaggaguguacgaacugcagacacuggagcucaacauggaaacccugaauauguguaugccucuuuccugcacaaagaacaauucucaucacuauaucauggucggcaacgagaccgggcuggagcucacacugaccaauacgagcaucauuaaccauaaauucuguaaucuuuccgacgcgcacaagaaaaaccuguacgaucaugcucucaugucuaucauuagcaccuuucaccuguccaucccgaauuucaaccaguaugaagccaugagcugcgacuuuaauggaggcaagauuucugugcaguacaaccugucccacagcuaugccggcgaugcugccaaucauugugggacaaucgcuaacggaguucuccaaaccuucaugcggauggccuggggcgggucuuacauugcgcuggacuccggacgcgauagaugggacugcaucaugacaagcuaccaguaucuuaucauucagaacaccacgugggaggaucacugucaguuuucucggcccuccccuaucggcuaccuggggcuccugagccaacgcacaagagacauuuauaucucccggcgcagacggggaaccuucacauggacccuuucugauagcgaaggcaaggacacccccggcggguacugccugacacgcuggaugcucauugaggccgagcugaaauguuuuggaaauacggcuguggccaagugcaacgaaaaacaugaugaggaguucugcgacaugcugagacucuuugauuucuguaagcaggcuauccagcggcugaaagccccugcgcagauguccauccaacuuauuaauaaggccgucaacgcucugaucaaugaccagcucauuaugaagaaccaucugcgcgacaucaugggcauucccuauugcaauuacagcaaauauugguaccuuaaccacaccacaaccgggaagacaucucugccuaaauguuggcucguguccaauggaagcuaccugaacgaaacccacuucucugaugacaucgaacagcaagccgauaauaugaucacggagaugcugcagaaggaguauauggaaagacagggcaaaacaccgcucgggcugguggaccuuuuugucuucagcaccuccuuuuaccugauuucuaucuuccuccaccugguuaagauucccacccaucggcacguggugggaaaaagcugcccuaagccccaucgccugaaccacaugggcaucuguuccugcggccuuuaugggcagccuggaguccccgugaaguggaaaagauga

SEQ ID NO: 23104 - RNA, 1476 nt, Artificial Sequence
  derived and/or modified CDS sequence (opt5) from MOPV/LASV reassortant(IGS-1;Clade IV)__AFY05576__GPCmut2
augggccagaucgugaccuucuuucaagaggucccccacguuauugaagaggugaugaacaucgugcugauugcccucagcguccuggcugugcuuaaggggcuguacaauuucgccacaugcggacucguuggccuggugacguuucuucugcucugugggagauccugcaccacaucucuguauaaaggagucuacgaacugcagacccucgagcugaacauggaaacacuuaauauguguaugccucugagcugcaccaagaacaauucccaucacuauaucauggugggcaacgagacagggcucgagcugacccuuacgaauaccucuauuaucaaccauaaauucuguaaucugagcgacgcgcacaagaaaaaccucuacgaucaugcucugauguccaucauuucuacauuucaccugagcaucccgaauuucaaccaguaugaagccauguccugcgacuuuaauggaggcaagauuagcguucaguacaaccucucucacuccuaugccggcgaugcugccaaucauugugggaccguggcuaacggaguccugcaaacauucaugcggauggccuggggcgggagcuacaucgcgcuugacucuggacgcggcaacugggauugcauuaugaccuccuaccaguaucugaucauucagaauacgacaugggaggaccacugucaguuuagcagacccucuccuaucggguaccucggacugcuuucccaacggacccgcgauaucuauauuagcagacggcgcagaggcacauucaccuggacccuguccgacucugaaggcgaggauacacccgggggauacugccucacgcgguggaugcugaucgaggccgaacugaaguguuuuggcaacaccgcuguggccaaaugcaaugagaagcaugacgaagaguucugcgauaugcuccgccuguuugacuucuguaaacaggcuauucagagacuuaaggccccugcgcagaugagcauccaacugauuaacaaagccgugaaugcucucaucaacgaucagcugaucaugaagaaucaccuucgggacauuauggggauccccuauugcaacuacuccaaguauugguaccugaaucacacaaccacaggacgcaccagccucccuaaauguuggcuggucucuaacggcuccuaccugaaugaaacgcauuucagcgacgauauugagcagcaagccgacaacaugaucacagagaugcuccagaaggaauauauggagagacaggggaaaaccccgcugggacuuguugaucuguuuguguucucuaccagcuuuuaccucauuuccaucuuccugcaccuggugaagauccccacacaucggcacauugucggcaaaucuugcccuaagccccaucgccuuaaucacaugggcaucuguagcugcgggcucuauaaacagccuggagugcccguuaaguggaagagauga

SEQ ID NO: 23105 - RNA, 1476 nt, Artificial Sequence
  derived and/or modified CDS sequence (opt5) from LASV(LM765-SLE-2012;Clade IV)__AIT17814__GPCmut2
augggccagaucgugaccuucuuucaagaggucccccacguuauugaagaggugaugaacaucgugcugauugcccucagcauccuggcuguccuuaaggggcuguacaauuucgccacaugcggacucgugggccugguuacguuucuucugcucugugggagauccugcaccacaucucuguauaaaggaguguacgaacugcagacccucgagcugaacauggaaacacuuaauauguguaugccucugagcugcaccaagaacaauucccaucacuauauuauggucggcaacgagacagggcucgagcugacccuuacgaauaccucuaucaucgaccauaaauucuguaaccugagcgaugcgcaccggaagaaucucuacgaccaugcucugauguccauuaucucuacauuucaccugagcauuccgaacuucaaucaguaugaagccauguccugcgauuuuaacggaggcaaaaucagcgugcaguacaaucucucucacuccuaugccaaggacgcugccgaucauuguggcaccguugcuaacggggugcugcaaacauucaugcgcauggccuggggaggcagcuacauugcgcuugacucugggagaggacggugggauugcaucaugaccuccuaccaguaucugauuauccagaauacgacaugggaggaccacugucaguuuagccgccccucuccuaucggcuaccucgggcugcuuucccaaagaacccgggauauuuauaucagccgcagacggcgcggaacauucaccuggacccuguccgacucugaaggcaaggauacacccggcggguacugccucacgagauggaugcugauugaggccgagcugaaauguuuuggaaacaccgcugucgccaagugcaacgaaaaacaugacgaggaguucugcgauaugcuccggcuguuugacuucuguaagcaggcuauccagcgccuuaaagccccugcgcagaugagcauucaacugaucaauaaggccgugaacgcucucaucaaugaccagcugauuaugaagaaccaccuuagagauaucaugggcauucccuauugcaauuacuccaaauauugguaccugaaccacacaaccacagggaagaccagccucccuaaauguuggcuggugucuaauggauccuaccugaacgaaacgcauuucagcgacgauaucgaacagcaagccgacaauaugauuacagagaugcuccagaaggaguauauggaacggcagggcaaaaccccgcuggggcuugucgaucuguuuguuuucucuaccagcuuuuaccucaucuccaucuuccugcaccuggugaagauucccacacaucgccacaucgugggaaaaccuugccccaagccucauagacuuaaccacaugggcauuuguucuugcggccucuauaagcagcccggggucccggugaaauggaagcgguga

SEQ ID NO: 23106 - RNA, 1476 nt, Artificial Sequence
  derived and/or modified CDS sequence (opt5) from LASV(LM776-SLE-2012;Clade IV)__AIT17824__GPCmut2
augggccagaucgugaccuucuuucaagaggucccccacguuauugaagaggugaugaacaucgugcugauugcccucagcauccuggcuguccuuaaggggcuguacaauuucgccacaugcggacucgugggccugguuacguuucuucugcucugugggagauccugcaccacaucuguguauaaaggagucuacgaacugcagacccuggagcucaacauggaaacacugaauauguguaugccucuuagcugcaccaagaacaauucccaucacuauauuauggugggcaacgagacagggcuggagcucacccugacgaauaccucuaucaucaaccauaaauucuguaaucuuagcgacgcgcacaagaaaaaccuguacgaucaugcucucauguccauuaucucuacauuucaccugagcauuccgaauuucaaccaguaugaagccauguccugcgacuuuaauggaggcaagaucagcguucaguacaaccugucucacuccuaugccggcgaugcugccaaucauugugggaccguggcuaacggaguccuccaaacauucaugcggauggccuggggcgggagcuacauugcgcuggacucuggacacggcaagugggauugcaucaugaccuccuaccaguaucuuauuauccagaacacgacaugggaggaccauugucaguuuagccgccccucuccuaucggguaccugggacuccugucccaaagaacccgggauauuuauaucagccgcagacggcgcggcacauucaccuggacccuuuccgacucugaaggcaaagauacacccgggggauacugccugacgagauggaugcucauugaggccgagcugaaguguuuuggcaauaccgcuguggccaaaugcaacgaaaagcacgacgaggaguucugcgauaugcugcggcucuuugacuucuguaaacaggcuauccagcgccugaaggccccugcgcagaugagcauucaacuuaucaauaaggccgugaacgcucugaucaaugaucagcucauuaugaaaaaccaccugagagacaucauggggauucccuauugcaauuacuccaaguauugguaccuuaaccauacaaccacaggaaaaaccagccugccuaaguguuggcucgucucuaauggcuccuaccugaacgaaacgcacuucagcgacgauaucgaacagcaagccgacaauaugauuacagagaugcugcagaaagaguauauggaacggcaggggaagaccccgcucggacugguugaucuuuuuguguucucuaccagcuuuuaccugaucuccaucuuccuccaucuggugaaaauucccacacaccgccauaucgucggcaagucuugcccuaagccccacagacugaaccacaugggcauuuguagcugcgggcuuuauaaacagccuggagugcccguucgguggaagcgcuga

SEQ ID NO: 23107 - RNA, 1476 nt, Artificial Sequence
  derived and/or modified CDS sequence (opt5) from LASV(Mad39;Clade IV)__ANH09722__GPCmut2
augggccagaucgugaccuucuuucaagaggucccccacguuauugaagaggugaugaacaucgugcugauugcccucagcauccuggcuguccuuaaggggcuguacaauguggccacaugcggacucauuggccugguuacguuccuucugcucugugggagauccugcaccacaacccuguauaaaggaguguacgaacugcaggcgcucgagcugaacauggaaacacuuaauauguguaugccucugucuugcaccaagaacaauagccaucacuauauccgggucggcaacgagacagggcucgagcugacccuuacgaauaccucccugaucaaccauaaauuuuguaaucucucugacgcucacaagaaaaaccuguacgaucaugcccugaugagcauuaucuccacauuccaccucucuauuccgaauuuuaaccaguaugaagccaugagcugcgacuucaaugauggaaagaucuccgugcaguacaaccugagccacaccuaugcuggcgacacagccaaucauuguggcaccguugcuaacggggugcuucaaacguuuaugcgcauggccuggggaggcucuuacauugcgcuggauuccgggagaggaggcugggacugcaucaugacaagcuaccaguaucucauuauccagaacaccacaugggaggaucacugucaguucucucggcccuccccuaucggguaccugggacuucugagccaacgcaccagagacauuuauaucucucggcgcagacggggcaccuuuacauggacgcucuccgauagcgaaggcaaggacacccccgggggauacugccugacacgcuggaugcugauugaggccgagcucaaauguuucggcaauaccgcugucgccaagugcaacgaaaaacaugaugaggaauuuugcgacaugcugagacuuuucgauuuuuguaagcaggcuauccagcggcugaaagccccugcgcagauguccauucaacucaucaauaaggccgugaacgcucugaucaaugaccagcuuauuaugaagaaccaucugcgcgacaucauggggauucccuauugcaauuacucuaaauauugguaccucaaccacacagugaccggaaagacgagccugccuaaauguuggcuggucuccaauggcagcuaccucaacgagacacacuucucugaugacaucgaacagcaagccgauaauaugauuaccgagaugcugcagaaggaguauauggaaagacaggggaaaaccccgcuuggacugguugaccucuucguguuuuccaccagcuucuaccugaucucuaucuuucugcaccuugugaagauucccacacaucggcacgucgugggcaaaccuugccccaagccucaucgccucaaccacaugggcaucuguagcugcggguucuauaagcagcccggaguuccggugagauggaaacgguga

SEQ ID NO: 23108 - RNA, 1476 nt, Artificial Sequence
  derived and/or modified CDS sequence (opt5) from LASV(Z0947-SLE-2011;Clade IV)__AIT17840__GPCmut2
augggccagaucgugaccuucuuucaagaggucccccacguuauugaagaggugaugaacaucgugcugauugcccucagcauccuggcuguccuuaaggggcuguacaauuucgccacaugcggacucgugggccugguuacguuucuucugcucugugggagauccugcaccauuucucuguauaaaggaguguacgaacugcagacacucgagcugaacauggaaacccuuaauauguguaugccucugagcugcacaaagaacaauucccaucacuauaucauggucggcaacgagaccgggcucgagcugacacuuaccaauacgucuaucauuaaccauaaauucuguaaucugagcgacgcgcacaagaaaaaccucuacgaucaugcucugauguccaucauuucuaccuuucaccugagcaucccgaauuucaaccaguaugaagccauguccugcgacuuuaauggaggcaagauuagcgugcaguacaaccucucucacuccuaugccggcgaugcugccaaucauugugggacaguugcuaacggagugcugcaaaccuucaugcggauggccuggggcgggagcuacaucgcgcuugacucuggacgcgauagaugggacugcauuaugacauccuaccaguaucugaucauccagaacaccacgugggaggaucacugucaguuuagccggcccucuccuauuggcuaccucgggcugcuuucccaacgcacaagagacaucuauauuagccggcgcagacggggaaccuucacauggacccuguccgauucugaaggcaaggacacccccggcggguacugccucacacgcuggaugcugaucgaggccgagcugaaauguuuuggaaauacggcugucgccaagugcaacgaaaaacaugaugaggaguucugcgacaugcucagacuguuugauuucuguaagcaggcuauucagcggcuuaaagccccugcgcagaugagcauccaacugaucaauaaggccgugaacgcucucauuaaugaccagcugaucaugaagaaccaccuucgcgacauuaugggcauccccuauugcaauuacuccaaauauugguaccugaaccacaccacaaccgggaagacaagccucccuaaauguuggcuggugucuaauggauccuaccugaacgaaacccauuucagcgaugacauugaacagcaagccgauaauaugaucacggagaugcuccagaaggaguauauggaaagacagggcaaaacaccgcuggggcuugucgaccuguuuguuuucucuaccagcuuuuaccucaucuccauuuuccugcaccuggugaagauccccacccaucggcacauugugggaaaaccuugccccaagccucaucgccuuaaccacaugggcaucuguucuugcggccucuauaagcagcccggggucccggugaaauggaagagauga

SEQ ID NO: 23109 - RNA, 1717 nt, Artificial Sequence
  mRNA product Design a-1 (hSL-A64-N5) comprising derived and/or modified sequence from LASV(Josiah;Clade IV)__NP_694870__GPCmut2 (opt1)
aggagagucccgcagucggcguccagcggcucugcuuguucgugugugugucguugcaggccuuauucaagcuuaccaugggccagaucgugaccuucuuccaggaggucccccacgugaucgaggaggugaugaacaucguccugaucgcccucagcgugcuggccgugcugaaggggcucuacaacuucgcgaccugcggccuggucgggcuggugacguuccuccugcugugcggccgcuccugcaccaccagccucuacaaggggguguacgagcugcagacccuggagcucaacauggagacgcugaacaugugcaugccgcuguccugcaccaagaacaacagccaccacuacaucauggucggcaacgagaccggccucgagcugacgcugaccaacaccuccaucaucaaccacaaguucugcaaccucagcgacgcccacaagaagaaccuguacgaccacgcccugauguccaucaucagcaccuuccaccucuccauccccaacuucaaccaguacgaggccaugagcugcgacuucaacgggggcaagaucuccgugcaguacaaccugagccacuccuacgccggggacgcggccaaccacugcggcacgguggccaacgggguccugcagaccuucaugcggauggccuggggcggcagcuacaucgcgcucgacuccgggcgcggcaacugggacugcaucaugaccagcuaccaguaccugaucauccagaacaccacgugggaggaccacugccaguucucccggcccagccccaucggguaccugggccuccugucccagcgcacccgggacaucuacaucagccgccggcgccggggcaccuucaccuggacgcugagcgacuccgaggggaaggacaccccgggcggguacugccugacccgcuggaugcucaucgaggccgagcugaagugcuucggcaacaccgccguggccaagugcaacgagaagcacgacgaggaguucugcgacaugcugcggcuguucgacuucugcaagcaggccauccagcgccugaaggcgcccgcccagaugagcauccagcugaucaacaaggccgugaacgcccucaucaacgaccagcugaucaugaagaaccaccuccgggacaucauggggauccccuacugcaacuacuccaaguacugguaccucaaccacacgaccaccggccgcaccagccugcccaagugcuggcuggucuccaacggcagcuaccucaacgagacgcacuucuccgacgacaucgagcagcaggccgacaacaugaucaccgagaugcugcagaaggaguacauggagcggcaggggaagacgccccugggccucguggaccuguucguguucagcaccuccuucuaccugaucagcaucuuccugcaccucgucaagaucccgacccaccgccacaucguggggaaguccugccccaagccccaccggcugaaccacaugggcaucugcagcugcgggcuguacaagcagcccggcgugccggucaaguggaagcgcugaggacuagucccuguucccagagcccacuuuuuuuucuuuuuuugaaauaaaauagccugucuuucagaucucaaaggcucuuuucagagccaccaaaaaaaaaaaaaaaaaaaaaaaaaaaaaaaaaaaaaaaaaaaaaaaaaaaaaaaaaaaaaaaaagaauu

SEQ ID NO: 23110 - RNA, 1714 nt, Artificial Sequence
  mRNA product Design a-1 (hSL-A64-N5) comprising derived and/or modified sequence from LASV(LP;Clade I)__AAF86701__GPCmut2 (opt1)
aggagagucccgcagucggcguccagcggcucugcuuguucgugugugugucguugcaggccuuauucaagcuuaccaugggccagaucaucaccuucuuccaggaggugccccacgucaucgaggaggugaugaacaucgugcugaucgcccucagccugcuggccauccucaaggggcuguacaacaucgcgaccugcggcaucaucgggcuggucgccuuccucuuccugugcggcaaguccugcagccugacgcucaagggcggguacgagcugcagacccuggagcucaacauggagacccugaacaugugcaugccgcuguccugcacgaagaacagcucccaccacuacauccgcgugggcaacgagaccgggcucgagcugacccugaccaacacgagcaucaucaaccacaaguucugcaaccucuccgacgcccacaagaagaaccuguacgaccacgcccugaugagcaucaucuccaccuuccaccucagcauccccaacuucaaccaguacgaggccauguccugcgacuucaacggcgggaagaucagcgugcaguacaaccugucccacagcuacgcgggcgacgccgccgagcacugcgggaccgucgccaacggcgugcugcagaccuucaugcggauggcguggggcgggcgcuacaucgcccucgacuccggcaaggggaacugggacugcaucaugacgagcuaccaguaccugaucauccagaacaccaccugggaggaccacugccaguucucccggcccagccccaucggcuaccugggccuccugucccagcgcacccgggacaucuacaucagccgccggcgccgggggacguucaccuggacccugagcgacuccgagggcaacgagacccccgggggcuacugccugacgcgcuggaugcucaucgaggccgagcugaagugcuucgggaacaccgccguggccaagugcaacgagaagcacgacgaggaguucugcgacaugcugcggcuguucgacuucugcaagcaggcgauccgccggcugaaggcccccgcccagaugagcauccagcugaucaacaaggccgucaacgcccucaucaacgaccagcugaucaugaagaaccaccuccgcgacaucaugggcauccccuacugcaacuacuccaaguacugguaccucaaccacaccagcuccggccggaccagccugcccaagugcuggcugaucuccaacgggagcuaccucaacgagacgcaguucuccgacgacaucgagcagcaggcggacaacaugaucaccgagaugcugcagaaggaguacaucgagcgccagggcaagaccccgcuggggcucguggacaucuucaucuucagcaccuccuucuaccugaucagcaucuuccugcaccugaucaagaucccgacgcaccggcacaucgugggcaagcccugccccaagccccaccgccucaaccacaugggggucugcuccugcggccuguacaagcacccgggcgugcccaccaaguggaagcggugaggacuagucccuguucccagagcccacuuuuuuuucuuuuuuugaaauaaaauagccugucuuucagaucucaaaggcucuuuucagagccaccaaaaaaaaaaaaaaaaaaaaaaaaaaaaaaaaaaaaaaaaaaaaaaaaaaaaaaaaaaaaaaaaagaauu

SEQ ID NO: 23111 - RNA, 1714 nt, Artificial Sequence
  mRNA product Design a-1 (hSL-A64-N5) comprising derived and/or modified sequence from LASV(803213;Clade II)__AAF86703__GPCmut2 (opt1)
aggagagucccgcagucggcguccagcggcucugcuuguucgugugugugucguugcaggccuuauucaagcuuaccaugggccagaucaucaccuucuuccaggaggugccccacgucaucgaggaggugaugaacaucgugcugaucgcccucagccugcuggccauccucaaggggaucuacaacgucgcgaccugcggccuguucgggcugaucuccuuccuccugcugugcggccgcagcugcuccgugacguacaaggggguguacgagcuccagacccuggagcugaacauggccaaccucaacaugugcaugccgcugagcugcaccaagaacaacucccaccacuacaucauggucggcaacgagacgggccuggagcucacccugaccaacaccagcaucaucaaccacaaguucugcaaccuguccgacgcccacaagaagaaccucuacgaccacgcccugaugagcaucaucuccacguuccaccugagcauccccaacuucaaccaguacgaggccauguccugcgacuucaacgggggcaagaucagcgugcaguacaaccucucccacagcuucgcgguggacgccgccaaccacugcgggaccaucgccaacggcguccugcagaccuucaugcggauggcguggggcggguccuacaucgcccuggacagcggcaaggggaacugggacugcaucaugaccuccuaccaguaccucaucauccagaacacgaccugggaggaccacugccaguucagccgccccucccccaucggcuaccuggggcugcucagccagcggacccgcgacaucuacaucagccggcgccgccggggcaccuucacguggacccucuccgacagcgagggcaacgaggcccccgggggcuacugccugacccgguggaugcugaucgaggccgagcucaagugcuucgggaacaccgccguggcgaagugcaacgagaagcacgacgaggaguucugcgacaugcugcgccuguucgacuucugcaagcaggccaucaagcggcucaagacgcccgcccagauguccauccagcugaucaacaaggccgugaacgcccugaucaacgaccagcucaucaugaagaaccaccuccgcgacaucaugggcauccccuacugcaacuacagccgguacugguaccugaaccacaccgucaccgggaagaccucccugccccgcugcuggcuggugagcaacggcuccuaccugaacgagacgcacuucagcgacgacaucgagcagcaggcggacaacaugaucaccgagaugcuccagaaggaguacauggaccggcagggcaagaccccgcuggggcugguggaccucuucgucuucuccaccagcuucuaccugaucuccaucuuccugcaccuggugaagaucccgacgcaccgccacaucgugggcaagcccugccccaagccccaccggcucaaccacauggggaucugcagcugcggccuguacaagcacccggggguccccgugaaguggaagcgcugaggacuagucccuguucccagagcccacuuuuuuuucuuuuuuugaaauaaaauagccugucuuucagaucucaaaggcucuuuucagagccaccaaaaaaaaaaaaaaaaaaaaaaaaaaaaaaaaaaaaaaaaaaaaaaaaaaaaaaaaaaaaaaaaagaauu

SEQ ID NO: 23112 - RNA, 1714 nt, Artificial Sequence
  mRNA product Design a-1 (hSL-A64-N5) comprising derived and/or modified sequence from LASV(GA391;Clade III)__CAA36645__GPCmut2 (opt1)
aggagagucccgcagucggcguccagcggcucugcuuguucgugugugugucguugcaggccuuauucaagcuuaccaugggccagaucgugaccuucuuccaggaggucccccacgugaucgaggaggugaugaacaucguccugaucgcccucagcauccuggccauccugaaggggcucuacaacguggcgaccugcggccugaucgggcuggugacguuccuccugcuguccggccgcagcugcucccucaucuacaaggggaccuacgagcugcagacccuggagcucaacauggagacccugaacaugugcaugccgcugagcugcaccaagaacaacucccaccacuacauccgggucggcaacgagaccggccucgagcugacccugacgaacaccagcauccucaaccacaaguucugcaaccuguccgacgcccacaagcgcaaccuguacgaccacagccucauguccaucaucagcaccuuccaccuguccauccccaacuucaaccaguacgaggccaugagcugcgacuucaacgggggcaagaucaccgugcaguacaaccugucccacagcuucgccguggacgccgcggggcacugcggcacgcucgccaacgggguccugcagaccuucaugcggauggccuggggcggcuccuacaucgcccuggacagcgggcgcggcaacugggacugcaucaugaccuccuaccaguaccucaucauccagaacaccacgugggacgaccacugccaguucagccggcccucccccaucggguaccugggccugcucagccagcgcacccgggacaucuacaucagccgccggcgccggggcaccuucaccuggacgcucuccgacagcgaggggaacgagaccccgggcggguacugccugacccgcuggaugcugaucgaggcggagcucaagugcuucggcaacaccgccguggccaagugcaacgagaagcacgacgaggaguucugcgacaugcugcggcuguucgacuucugcaagcaggccauccgccggcucaagacgcccgcccagauguccauccagcugaucaacaaggcggugaacgcccugaucaacgaccagcucaucaugaagaaccaccuccgcgacaucauggggauccccuacugcaacuacagccgguacugguaccugaaccacaccuccaccggcaagaccagccugccccgcugcuggcugaucuccaacggcagcuaccugaacgagacgaaguucuccgacgacaucgagcagcaggccgacaacaugaucaccgagaugcuccagaaggaguacaucgaccggcaggggaagacgccccugggccuggucgaccuguucguguucagcaccuccuucuaccucaucagcaucuuccugcaccuggugaagaucccgacccaccgccacaucgucgggaagcccugccccaagccccaccggcucaaccacaugggcaucugcuccugcgggcuguacaagcagccgggcgugcccgugcgcuggaagcggugaggacuagucccuguucccagagcccacuuuuuuuucuuuuuuugaaauaaaauagccugucuuucagaucucaaaggcucuuuucagagccaccaaaaaaaaaaaaaaaaaaaaaaaaaaaaaaaaaaaaaaaaaaaaaaaaaaaaaaaaaaaaaaaaagaauu

SEQ ID NO: 23113 - RNA, 1717 nt, Artificial Sequence
  mRNA product Design a-1 (hSL-A64-N5) comprising derived and/or modified sequence from LASV(AV;Clade V)__CCA30314__GPCmut2 (opt1)
aggagagucccgcagucggcguccagcggcucugcuuguucgugugugugucguugcaggccuuauucaagcuuaccaugggccagaucgugaccuucuuccaggaggucccccacgugaucgaggaggugaugaacaucguccugaucgcccucagcauccuggccgugcugaaggggcucuacaacaucgcgaccugcggccugaucgggcugaucacguuccuccugcugugcggccgcuccugcagcuccaaccucuacaaggggguguacgagcugcagagccuggaccucaacauggagacccugaacaugugcaugccgcuguccugcaccaagaacaacagccaccacuacauccgggucggcaacgacacgggccucgagcugacccugaccaacaccuccauccucaaccacaaguucugcaaccugagcgacgcccacaagaaggaccuguacgaccacgcccucauguccaucaucagcacguuccaccuguccauccccaacuucaaccaguacgaggccaugagcugcgacuucaacgggggcaagaucuccgugcaguacaaccugagccacuccuacgccaucgacgcggccaaccacugcgggaccguggccaacggcauccuccagaccuucaugcgcauggccuggggcgggagcuacaucgcgcuggacuccggccgggggaacugggacugcaucaugaccagcuaccaguaccugaucauccagaacacgaccugggagaaccacugccaguucucccgccccagccccaucggcuaccucgggcugcugagccagcggacccgcgacaucuacaucucccggcgccgccggggcaccuucacguggacccugagcgacuccgagggcaacgccacccccgggggcuacugccucacccgguggaugcugaucgaggccgagcugaagugcuucgggaacacggccgucgccaagugcaacgagaagcacgacgaggaguucugcgacaugcuccgccuguucgacuucugcaagcaggcgaucagccggcugaagucccccgcccagaugagcauccagcucaucaacaaggccgugaacgcccugaucaacgaccagcugaucaugaagaaccaccuccgcgacaucaugggcauccccuacugcaacuacuccaaguacugguaccugaaccacaccaucaccgggaagaccagccugcccaagugcuggcucguguccaacggcagcuaccugaacgagacgcacuucuccgacgacaucgagcagcaggccgacaacaugaucaccgagaugcugcagaaggaguacauggagcggcagggcaagaccccgcucgggcuggucgaccuguucguguucagcaccuccuucuaccugaucagcaucuuccuccgccuggugaagaucccgacgcaccggcacaucgucggcaagcccugccccaagccccaccgccugaaccacauggggaucugcuccugcggccucuacaagcagccgggggugcccgugcgguggaagcgcugaggacuagucccuguucccagagcccacuuuuuuuucuuuuuuugaaauaaaauagccugucuuucagaucucaaaggcucuuuucagagccaccaaaaaaaaaaaaaaaaaaaaaaaaaaaaaaaaaaaaaaaaaaaaaaaaaaaaaaaaaaaaaaaaagaauu

SEQ ID NO: 23114 - RNA, 1714 nt, Artificial Sequence
  mRNA product Design a-1 (hSL-A64-N5) comprising derived and/or modified sequence from LASV(Togo/2016/7082;Clade VI)__AMR44577__GPCmut2 (opt1)
aggagagucccgcagucggcguccagcggcucugcuuguucgugugugugucguugcaggccuuauucaagcuuaccaugggccagaucaucaccuucuuccaggaggugccccacgucaucgaggaggugaugaacaucgugcugaucgcccucagccugcuggccauccucaagggggucuacaacguggcgaccugcggcaucaucgggcuggugacguuccuguuccucugcggccgcuccugcagccugaucuacaagggguccuacgagcugcagacccucgagcugaacauggagacccugaacaugugcaugccgcucagcugcacgaagaacuccagccaccacuacauccgggucggcaacgagaccggccuggagcugacccucaccaacacguccaucaucaaccacaaguucugcaaccugagcgacgcccacaagcgcaaccuguacgaccacgcccucauguccauccugagcaccuuccaccuguccauccccaacuucaaccaguacgaggccaugagcugcgacuucaacgggggcaagaucuccgugcaguacaaccucagccacgccuacgcgguggacgccgccgagcacugcgggaccgucgccaacggcgugcugcagaccuucaugcggauggcguggggcggguccuacaucgcccuggacagcggccgcgggaacugggacugcaucaugacguccuaccaguaccucaucauccagaacaccaccugggaggaccacugccaguucagccggcccucccccaucggcuaccuggggcugcucagccagcgcacccgggacaucuacaucagccgccggcgccggggcacguucaccuggacccucuccgacagcgagggcaacgagacccccgggggcuacugccugacgcgcuggaugcugaucgaggccgagcucaagugcuucgggaacaccgccguggccaagugcaacgagaagcacgacgaggaguucugcgacaugcugcggcuguucgacuucugcaagcaggcgauccagcgccucaagucccccgcccagaugagcauccagcugaucaacaaggccgucaacgcccugaucaacgaccagcucaucaugaagaaccaccuccgggacaugaugggcauccccuacugcaacuacuccaaguacugguaccugaaccacaccagcuccgggcgcaccagccugcccaagugcuggcugguguccaacggcagcuaccugaacgagacgcacuucuccgacgacaucgagcagcaggccgacaacaugaucaccgagaugcuccagaaggaguacaucgaccggcagggcaagaccccgcuggggcugguggaccucuucgucuucagcaccuccuucuaccugaucagcaucuuccugcaccugaucaagaucccgacgcaccgccacaucgugggcaagcccugccccaagccccaccggcucaaccacauggggaucugcuccugcggccuguacaagcagccgggggugcccacccgcuggaagcggugaggacuagucccuguucccagagcccacuuuuuuuucuuuuuuugaaauaaaauagccugucuuucagaucucaaaggcucuuuucagagccaccaaaaaaaaaaaaaaaaaaaaaaaaaaaaaaaaaaaaaaaaaaaaaaaaaaaaaaaaaaaaaaaaagaauu

SEQ ID NO: 23115 - RNA, 1714 nt, Artificial Sequence
  mRNA product Design a-1 (hSL-A64-N5) comprising derived and/or modified sequence from LASV(KAK-428;Clade n.d. (VII))__ANH09740__GPCmut2 (opt1)
aggagagucccgcagucggcguccagcggcucugcuuguucgugugugugucguugcaggccuuauucaagcuuaccaugggccagaucgugaccuucuuccaggaggucccccacgugaucgaggaggugaugaacaucguccugaucgcccucagccugcuggccauccucaaggggcuguacaacuucgcgaccugcggcgugaucgggcugaucacguuccuccugcugugcggccgcuccugcagcgccaccuacaaggggcaguacgagcuccagacccuggagcugaacauggagucccucaacaugugcaugccgcugagcugcacgaagaacaacucccaccacuacauccgggccggcaacaacaccggccuggagcucacccugaccaacacgagcaucaucucccacaaguucugcaaccugagcgacgcccacaagaagaaccucuacgaccacacccugauguccaucaucaccaccuuccaccugagcauccccaacuucaaccaguacgaggccauguccugcgacuucaacgggggcaagaucagcauccaguacaaccucucccacagcuacgcgggggacgccgcccagcacugcggcacgguggccaacgggguccugcagaccuucaugcgcauggcguggggcggcuccuaccuggcccucgacagcgggcggcgcggcugggacugcaucaucuccagcuaccaguaccugaucauccagaacaccaccugggacgaccacugccaguucucccggcccagccccaucggguaccugggcuucgugagccagaagacgcgcgacaucuacaucucccggcgccgccggggcaccuucaccuggacccugagcgacuccgaggggcacgacaugccgggcggguacugccucacgcgguggaugcugaucgaggccgaccugaagugcuucggcaacaccgccguggccaagugcaacgagaagcacgacgaggaguucugcgacauguggcgccucuucgacuucugcaagcaggcgauccagcggcugaaggcccccgcccagaugaacauccagcugaucaacaaggccgucaacgcccucaucaacgaccagcugaugaugaagaaccaccuccgcgacaucauggggauccccuacugcaacuacagcaaguucugguaccugaacaacaccaccacgggccggaccucccugccccgcugcuggcugaucagcaacggcuccuaccucaacgagacccacuucagcgacgacaucgagcagcaggcggacaacaugaucaccgagaugcugcagaaggaguacauggaccggcaggggaagacgccccugggccucguggaccuguucguguucuccaccagcuucuaccugaucaccaucuuccuccaccuggucaagaucccgacccaccgccacaucguggggaagcccugccccaagccccaccggcugaaccacaugggcaucugcuccugcgggcuguacaagcagccgggcgugcccguccgcuggaagcggugaggacuagucccuguucccagagcccacuuuuuuuucuuuuuuugaaauaaaauagccugucuuucagaucucaaaggcucuuuucagagccaccaaaaaaaaaaaaaaaaaaaaaaaaaaaaaaaaaaaaaaaaaaaaaaaaaaaaaaaaaaaaaaaaagaauu

SEQ ID NO: 23116 - RNA, 1714 nt, Artificial Sequence; identical to SEQ ID NO: 23110
  mRNA product Design a-1 (hSL-A64-N5) comprising derived and/or modified sequence from LASV(Pinneo-NIG-1969;Clade I)__AIT17836__GPCmut2 (opt1)

SEQ ID NO: 23117 - RNA, 1714 nt, Artificial Sequence
  mRNA product Design a-1 (hSL-A64-N5) comprising derived and/or modified sequence from LASV(ISTH0009-NIG-2011;Clade II)__AIT17404__GPCmut2 (opt1)
aggagagucccgcagucggcguccagcggcucugcuuguucgugugugugucguugcaggccuuauucaagcuuaccaugggccagaucaucaccuucuuccaggaggugccccacgucaucgaggaggugaugaacaucgugcugaucgcccucagccugcuggccauccucaaggggaucuacaacgucgcgaccugcggccuguucgggcugguguccuuccuccugcugugcggccgcagcugcuccacgaccuacaaggggguguacgagcuccagacccuggagcuggacauggccagccucaacaugugcaugccgcuguccugcacgaagaacaacagccaccacuacaucauggucggcaacgagaccggccuggagcucacccugaccaacacguccaucaucaaccacaaguucugcaaccugagcgacgcccacaagaagaaccucuacgaccacgcccugauguccaucaucagcaccuuccaccuguccauccccaacuucaaccaguacgaggccaugagcugcgacuucaacgggggcaagaucuccgugcaguacaaccucagccacgcguacgccguggacgccgccaaccacugcgggaccaucgcgaacggcguccugcagaccuucaugcggauggccuggggcggguccuacaucgcccuggacagcggcaagggguccugggacugcaucaugacgagcuaccaguaccucaucauccagaacaccaccugggaggaccacugccaguucucccgccccagccccaucggcuaccuggggcugcucagccagcggacccgcgacaucuacaucucccggcgccgccggggcacguucaccuggacccucagcgacuccgagggcaacgagacccccgggggcuacugccugacgcgguggaugcugaucgaggccgagcucaagugcuucgggaacaccgccguggcgaagugcaacgagaagcacgacgaggaguucugcgacaugcugcgccuguucgacuucugcaagcaggccauccggcgccucaagacccccgcccagaugagcauccagcugaucaacaaggccgugaacgcccugaucaacgaccagcucaucaugaagaaccaccuccgggacaucaugggcaucccguacugcaacuacuccaaguacugguaccugaaccacaccgucacggggaagaccagccugccccgcugcuggcugguguccaacggcagcuaccugaacgagacccacuucuccgacgacaucgagcagcaggcggacaacaugaucaccgagcuccugcagaaggaguacauggaccggcagggcaagacgccccuggggcucguggaccuguucgucuucagcaccuccuucuaccugaucagcaucuuccugcaccucaucaagaucccgacccaccgccacaucaccggcaagcccugccccaagccccaccggcugaaccacauggggaucugcuccugcggccuguacaagcacccgggggugcccgugaaguggaagcgcugaggacuagucccuguucccagagcccacuuuuuuuucuuuuuuugaaauaaaauagccugucuuucagaucucaaaggcucuuuucagagccaccaaaaaaaaaaaaaaaaaaaaaaaaaaaaaaaaaaaaaaaaaaaaaaaaaaaaaaaaaaaaaaaaagaauu

SEQ ID NO: 23118 - RNA, 1714 nt, Artificial Sequence
  mRNA product Design a-1 (hSL-A64-N5) comprising derived and/or modified sequence from LASV(ISTH2010-NIG-2012;Clade II)__AIT17482__GPCmut2 (opt1)
aggagagucccgcagucggcguccagcggcucugcuuguucgugugugugucguugcaggccuuauucaagcuuaccaugggccagaucaucaccuucuuccaggaggugccccacgucaucgaggaggugaugaacaucgugcugaucgcccucagccugcuggccauccucaaggggaucuacaacgucgcgaccugcggccuguucgggcugguguccuuccuccugcugugcggccgcagcugcuccacgaccuacaaggggguguacgagcuccagacccuggagcuggacauggccagccucaacaugugcaugccgcuguccugcacgaagaacaacagccaccacuacaucauggucggcaacgagaccggccuggagcucacccugaccaacacguccaucaucaaccacaaguucugcaaccugagcgacgcccacaagaagaaccucuacgaccacgcccugauguccaucaucagcaccuuccaccuguccauccccaacuucaaccaguacgaggccaugagcugcgacuucaacgggggcaagaucuccgugcaguacaaccucagccacgcguacgccguggacgccgccaaccacugcgggaccaucgcgaacggcguccugcagaccuucaugcggauggccuggggcggguccuacaucgcccuggacagcggcaagggguccugggacugcaucaugacgagcuaccaguaccucaucauccagaacaucaccugggaggaccacugccaguucucccgccccagccccaucggcuaccuggggcugcucagccagcggacccgcgacaucuacaucucccggcgccgccggggcaccuucacguggacccucagcgacuccgagggcaacgagacccccgggggcuacugccugacccgguggaugcugaucgaggccgagcucaagugcuucgggaacacggccguggcgaagugcaacgagaagcacgacgaggaguucugcgacaugcugcgccuguucgacuucugcaagcaggccauccggcgccucaagacccccgcccagaugagcauccagcugaucaacaaggccgugaacgcccugaucaacgaccagcucaucaugaagaaccaccuccgggacaucaugggcauccccuacugcaacuacuccaaguacugguaccugaaccacaccgucaccgggaagacgagccugccccgcugcuggcugguguccaacggcagcuaccugaacgagacccacuucuccgacgacaucgagcagcaggcggacaacaugaucaccgagcuccugcagaaggaguacaucgaccggcagggcaagaccccgcuggggcucguggaccuguucgucuucagcacguccuucuaccugaucagcaucuuccugcaccucgugaagaucccgacccaccgccacguggucggcaagcccugccccaagccccaccggcugaaccacauggggaucugcuccugcggccuguacaagcacccgggggugcccgugaaguggaagcgcugaggacuagucccuguucccagagcccacuuuuuuuucuuuuuuugaaauaaaauagccugucuuucagaucucaaaggcucuuuucagagccaccaaaaaaaaaaaaaaaaaaaaaaaaaaaaaaaaaaaaaaaaaaaaaaaaaaaaaaaaaaaaaaaaagaauu

SEQ ID NO: 23119 - RNA, 1714 nt, Artificial Sequence
  mRNA product Design a-1 (hSL-A64-N5) comprising derived and/or modified sequence from LASV(Lassa virus/H.sapiens-wt/NGA/2015/ISTH_0543;Clade II)__AVO03639__GPCmut2 (opt1)
aggagagucccgcagucggcguccagcggcucugcuuguucgugugugugucguugcaggccuuauucaagcuuaccaugggccagaucaucaccuucuuccaggaggugccccacgucaucgaggaggugaugaacaucgugcugaucgcccucagccugcuggccauccucaaggggaucuacaacgucgcgaccugcggccuguucgggcugguguccuuccuccugcugugcggccgcagcugcuccacgaccuacaaggggguguacgagcuccagacccuggagcuggacauggccaaccucaacaugugcaugccgcugagcugcacgaagaacaacucccaccacuacaucauggucggcaacgagaccggccuggagcucacccugaccaacacgagcaucaucaaccacaaguucugcaaccuguccgacgcccacaagaagaaccucuacgaccacgcccugaugagcaucaucuccaccuuccaccugagcauccccaacuucaaccaguacgaggccauguccugcgacuucaacgggggcaagaucagcgugcaguacaaccucucccacaccuacgcgguggacgccgccaaccacugcgggaccaucgccaacggcguccugcagacguucaugcggauggcguggggcgggagcuacaucgcccuggacuccggcaaggggagcugggacugcaucaugaccuccuaccaguaccucgugauccagaacaccaccugggaggaccacugccaguucagccgccccucccccaucggcuaccuggggcugcucagccagcggacgcgcgacaucuacaucagccggcgccgccggggcaccuucaccuggacccucuccgacagcgagggcaacgagacgcccgggggcuacugccugacccgguggaugcugaucgaggccgagcucaagugcuucgggaacaccgccguggccaagugcaacgagaagcacgacgaggaguucugcgacaugcugcgccuguucgacuucugcaagcaggcgauccggcgccucaagacccccgcccagauguccauccagcugaucaacaaggccgucaacgcccugaucaacgaccagcucaucaugaagaaccaccuccgggacaucaugggcauccccuacugcaacuacagcaaguacugguaccugaaccacacggugaccgggaagaccucccugccccgcugcuggcuggugagcaacggcuccuaccugaacgagacccacuucagcgacgacaucgagcagcaggccgacaacaugaucacggagcuccugcagaaggaguacaucgaccggcagggcaagaccccgcuggggcucgucgaccuguucguguucuccaccagcuucuaccugaucuccaucuuccugcaccucgugaagaucccgacccaccgccacaucacgggcaagcccugccccaagccccaccggcugaaccacauggggaucugcagcugcggccuguacaagcacccggggguccccgugaaguggaagcgcugaggacuagucccuguucccagagcccacuuuuuuuucuuuuuuugaaauaaaauagccugucuuucagaucucaaaggcucuuuucagagccaccaaaaaaaaaaaaaaaaaaaaaaaaaaaaaaaaaaaaaaaaaaaaaaaaaaaaaaaaaaaaaaaaagaauu

SEQ ID NO: 23120 - RNA, 1714 nt, Artificial Sequence
  mRNA product Design a-1 (hSL-A64-N5) comprising derived and/or modified sequence from LASV(Lassa virus/H.sapiens-wt/NGA/2016/ISTH_0009;Clade II)__AVO03571__GPCmut2 (opt1)
aggagagucccgcagucggcguccagcggcucugcuuguucgugugugugucguugcaggccuuauucaagcuuaccaugggccagaucaucaccuucuuccaggaggugccccacgucaucgaggaggugaugaacaucgugcugaucgcccucagccugcuggccauccucaaggggaucuacaacgucgcgaccugcggccugcuggggcucguguccuuccugcugcucugcggccgcagcugcuccacgaccuacaaggggguguacgagcugcagacccuggagcucgacauggccagccugaacaugugcaugccgcuguccugcacgaagaacaacagccaccacuacaucauggucggcaacgagaccggccucgagcugacccugaccaacacguccaucaucaaccacaaguucugcaaccucagcgacgcccacaagaagaaccuguacgaccacgcccugauguccaucaucagcaccuuccaccucuccauccccaacuucaaccaguacgaggccaugagcugcgacuucaacgggggccggaucuccgugcaguacaaccugagccacuccuacgcgguggacgccgccaaccacugcgggaccaucgccaacggcguccugcagaccuucaugcgcauggcguggggcgggagcuacaucgcccucgacuccggcaaggggagcugggacugcaucaugacguccuaccaguaccugaucauccagaacaccaccugggaggaccacugccaguucagccggcccagccccaucggcuaccuggggcuccugucccagcgcacccgggacaucuacaucagccgccggcgccggggcacguucaccuggacccuguccgacagcgagggcaacgagacccccgggggcuacugccugacgcgcuggaugcucaucgaggccgagcugaagugcuucgggaacaccgccguggccaagugcaacgagaagcacgacgaggaguucugcgacaugcugcggcuguucgacuucugcaagcaggcgauccgccggcugaagacccccgcccagauguccauccagcugaucaacaaggccgugaacgcccucaucaacgaccagcugaucaugaagaaccaccuccgcgacaucaugggcaucccguacugcaacuacagcaaguacugguaccucaaccacaccgucacggggaagaccucccugccccggugcuggcuggugagcaacggcuccuaccucaacgagacccacuucagcgacgacaucgagcagcaggccgacaacaugaucaccgagcugcugcagaaggaguacaucgaccgccagggcaagacgccccucgggcugguggaccuguucgucuucuccaccagcuucuaccugaucuccaucuuccuccaccuggugaagaucccgacccaccggcacaucaccggcaagcccugccccaagccccaccgccugaaccacauggggaucugcagcugcggccucuacaaccacccgggggugcccgucaaguggaagcggugaggacuagucccuguucccagagcccacuuuuuuuucuuuuuuugaaauaaaauagccugucuuucagaucucaaaggcucuuuucagagccaccaaaaaaaaaaaaaaaaaaaaaaaaaaaaaaaaaaaaaaaaaaaaaaaaaaaaaaaaaaaaaaaaagaauu

SEQ ID NO: 23121 - RNA, 1714 nt, Artificial Sequence
  mRNA product Design a-1 (hSL-A64-N5) comprising derived and/or modified sequence from LASV(Lassa virus/H.sapiens-wt/NGA/2016/ISTH_0017;Clade II)__AVO03567__GPCmut2 (opt1)
aggagagucccgcagucggcguccagcggcucugcuuguucgugugugugucguugcaggccuuauucaagcuuaccaugggccagaucaucaccuucuuccaggaggugccccacgucaucgaggaggugaugaacaucgugcugaucgcccucagccugcuggccauccucaaggggaucuacaacgucgcgaccugcggccuguucgggcugguguccuuccuccugcugugcggccgcagcugcuccacgaccuacaaggggguguacgagcuccagacccuggagcuggacauggccagccucaacaugugcaugccgcuguccugcacgaagaacaacagccaccacuacaucauggucggcaacgagaccggccuggagcucacccugaccaacacguccaucaucaaccacaaguucugcaaccugagcgacgcccacaagaagaaccucuacgaccacgcccugauguccaucaucagcaccuuccaccuguccauccccaacuucaaccaguacgaggccaugagcugcgacuucaacgggggcaagaucuccgugcaguacaaccucagccacaccuacgcgaucgacgccgccaaccacugcgggaccaucgccaacggcgugcugcagacguucaugcggauggcguggggcggguccuacaucgcccuggacagcggcaagggguccugggacugcaucaugaccagcuaccaguaccucaucauccagaacaccaccugggaggaccacugccaguucucccgccccagccccaucggcuaccuggggcugcucagccagcggacgcgcgacaucuacaucucccggcgccgccggggcaccuucaccuggacccucagcgacuccgagggcaacgagacgcccgggggcuacugccugacccgguggaugcugaucgaggccgagcucaagugcuucgggaacaccgccgucgccaagugcaacgagaagcacgacgaggaguucugcgacaugcugcgccuguucgacuucugcaagcaggcgauccggcgccucaagacccccgcccagaugagcauccagcugaucaacaaggccgugaacgcccugaucaacgaccagcucaucaugaagaaccaccuccgggacaucaugggcauccccuacugcaacuacuccaaguacugguaccugaaccacacggugaccgggaagaccagccugccccgcugcuggcuggucuccaacggcagcuaccugaacgagacccacuucuccgacgacaucgagcagcaggccgacaacaugaucacggagcuccugcagaaggaguacauggaccggcagggcaagaccccgcuggggcucguggaccuguucguguucagcaccuccuucuaccugaucagcaucuuccugcaccucguccgcaucccgacccaccggcacgugaucggcaagcccugccccaagccccaccgccugaaccacauggggaucugcuccugcggccuguacaagcacccgggggugcccgucaaguggaagcggugaggacuagucccuguucccagagcccacuuuuuuuucuuuuuuugaaauaaaauagccugucuuucagaucucaaaggcucuuuucagagccaccaaaaaaaaaaaaaaaaaaaaaaaaaaaaaaaaaaaaaaaaaaaaaaaaaaaaaaaaaaaaaaaaagaauu

SEQ ID NO: 23122 - RNA, 1714 nt, Artificial Sequence
  mRNA product Design a-1 (hSL-A64-N5) comprising derived and/or modified sequence from LASV(Lassa virus/H.sapiens-wt/NGA/2018/ISTH_0959;Clade II)__AVV65099__GPCmut2 (opt1)
aggagagucccgcagucggcguccagcggcucugcuuguucgugugugugucguugcaggccuuauucaagcuuaccaugggccagaucaucaccuucuuccaggaggugccccacgucaucgaggaggugaugaacaucgugcugaucgcccucagccugcuggccauccucaaggggaucuacaacgucgugaccugcggccuguucgggcugguguccuuccuccugcugugcggccgcagcugcuccacgaccuacaagggggucuacgagcuccagacccuggagcuggacauggcgagccucaacaugugcaugccgcuguccugcacgaagaacaacagccaccacuacaucauggugggcaacgagaccggccuggagcucacccugaccaacacguccaucaucaaccacaaguucugcaaccugagcgacgcccacaagaagaaccucuacgaccacgcccugauguccaucaucagcaccuuccaccuguccauccccaacuucaaccaguacgaggccaugagcugcgacuucaacgggggcaagaucuccgugcaguacaaccucagccacgccuacgcgaucgacgccgccaaccacugcgggaccaucgccaacggcguccugcagaccuucaugcggauggcguggggcggguccuacaucgcccuggacagcggcaagggguccugggacugcaucaugacgagcuaccaguaccucaucauccagaacaccaccugggaggaccacugccaguucucccgccccagccccaucggcuaccuggggcugcucagccagcggacccgcgacaucuacaucucccggcgccgccggggcacguucaccuggacccucagcgacuccgagggcaacgagacccccgggggcuacugccugacgcgguggaugcugaucgaggccgagcucaagugcuucgggaacaccgccguggccaagugcaacgagaagcacgacgaggaguucugcgacaugcugcgccuguucgacuucugcaagcaggcgauccggcgccucaagacccccgcccagaugagcauccagcugaucaacaaggccgugaacgcccugaucaacgaccagcucaucaugaagaaccaccuccgggacaucaugggcaucccguacugcaacuacuccaaguacugguaccugaaccacaccgucacggggaagaccagccugccccgcugcuggcugguguccaacggcagcuaccugaacgagacccacuucuccgacgacaucgagcagcaggccgacaacaugaucaccgagcuccugcagaaggaguacaucgaccggcagggcaagacgccccuggggcucguggaccuguucgucuucagcaccuccuucuaccugaucagcaucuuccugcaccucgugaagaucccgacccaccgccacgugaucggcaagcccugccccaagccccaccggcugaaccacauggggaucugcuccugcggccuguacaagcacccggggguccccgugaaguggaagcgcugaggacuagucccuguucccagagcccacuuuuuuuucuuuuuuugaaauaaaauagccugucuuucagaucucaaaggcucuuuucagagccaccaaaaaaaaaaaaaaaaaaaaaaaaaaaaaaaaaaaaaaaaaaaaaaaaaaaaaaaaaaaaaaaaagaauu

SEQ ID NO: 23123 - RNA, 1714 nt, Artificial Sequence
  mRNA product Design a-1 (hSL-A64-N5) comprising derived and/or modified sequence from LASV(LASV003-NIG-2008;Clade II)__AIT17580__GPCmut2 (opt1)
aggagagucccgcagucggcguccagcggcucugcuuguucgugugugugucguugcaggccuuauucaagcuuaccaugggccagaucaucaccuucuuccaggaggugccccacgucaucgaggaggugaugaacaucgugcugaucgcccucagccugcuggccauccucaaggggaucuacaacgucgcgaccugcggccuguucgggcugguguccuuccuccugcugugcggccgcagcugcuccacgaccuacaaggggguguacgagcuccagacccuggagcuggacauggccagccucaacaugugcaugccgcuguccugcacgaagaacaacagccaccacuacaucauggucggcaacgagaccggccuggagcucacccugaccaacacguccaucaucaaccacaaguucugcaaccugagcgacgcccacaagaagaaccucuacgaccacgcccugauguccaucaucagcaccuuccaccuguccauccccaacuucaaccaguacgaggccaugagcugcgacuucaacgggggcaagaucuccgugcaguacaaccucagccacaccuacgcgguggacgccgccaaccacugcgggaccaucgccaacggcguccugcagacguucaugcggauggcguggggcggguccuacaucgcccuggacagcggcaagggguccugggacugcaucaugaccagcuaccaguaccucaucauccagaacaccaccugggaggaccacugccaguucucccgccccagccccaucggcuaccuggggcugcucagccagcggacgcgcgacaucuacaucucccggcgccgccggggcaccuucaccuggacccucagcgacuccgagagcaacgagacgccgggcggguacugccugacccgguggaugcugaucgaggccgagcucaagugcuucggcaacaccgccguggccaagugcaacgagaagcacgacgaggaguucugcgacaugcugcgccuguucgacuucugcaagcaggcgauccggcgccucaaggcccccgcccagauguccauccagcugaucaacaaggccgugaacgcccugaucaacgaccagcucaucaugaagaaccaccuccgggacaucauggggauccccuacugcaacuacagcaaguacugguaccugaaccacaccgucacgggccgcaccucccugccccggugcuggcuggugagcaacggguccuaccugaacgagacccacuucagcgacgacaucgagcagcaggcggacaacaugaucaccgagcuccugcagaaggaguacauggaccgccagggcaagacgccccugggccucguggaccuguucgucuucuccaccagcuucuaccugaucuccaucuuccugcaccucgugaagaucccgacccaccggcacgugaucgggaagcccugccccaagccccaccgccugaaccacaugggcaucugcagcugcgggcuguacaagcacccgggcguccccgugaaguggaagcggugaggacuagucccuguucccagagcccacuuuuuuuucuuuuuuugaaauaaaauagccugucuuucagaucucaaaggcucuuuucagagccaccaaaaaaaaaaaaaaaaaaaaaaaaaaaaaaaaaaaaaaaaaaaaaaaaaaaaaaaaaaaaaaaaagaauu

SEQ ID NO: 23124 - RNA, 1714 nt, Artificial Sequence
  mRNA product Design a-1 (hSL-A64-N5) comprising derived and/or modified sequence from LASV(LASV035-NIG-2009;Clade II)__AIT17588__GPCmut2 (opt1)
aggagagucccgcagucggcguccagcggcucugcuuguucgugugugugucguugcaggccuuauucaagcuuaccaugggccagaucaucaccuucuuccaggaggugccccacgucaucgaggaggugaugaacaucgugcugaucgcccucagccugcuggccauccucaaggggaucuacaacgucgcgaccugcggccuguucgggcugguguccuuccuccugcugugcggccgcagcugcuccacgaccuacaaggggguguacgagcuccagacccuggagcuggacauggccagccucaacaugugcaugccgcuguccugcacgaagaacaacagccaccacuacaucauggucggcaacgagaccggccuggagcucacccugaccaacacguccaucaucaaccacaaguucugcaaccugagcgacgcccacaagaagaaccucuacgaccacgcccugauguccaucaucagcaccuuccaccuguccauccccaacuucaaccaguacgaggccaugagcugcgacuucaacgggggcaagaucuccgugcaguacaaccucagccacgcguacgccguggacgccgccaaccacugcgggaccaucgcgaacggcguccugcagaccuucaugcggauggccuggggcggguccuacaucgcccuggacagcggcaagggguccugggacugcaucaugacgagcuaccaguaccucaucauccagaacaccaccugggaggaccacugccaguucucccgccccagccccaucggcuaccuggggcugcucagccagcggacccgcgacaucuacaucucccggcgccgccggggcacguucaccuggacccucagcgacuccgagggcaacgagacccccgggggcuacugccugacgcgguggaugcugaucgaggccgagcucaagugcuucgggaacaccgccguggcgaagugcaacgagaagcacgacgaggaguucugcgacaugcugcgccuguucgacuucugcaagcaggccauccggcgccucaaggcccccgcccagaugagcauccagcugaucaacaaggccgugaacgcgcugaucaacgaccagcucaucaugaagaaccaccuccgggacaucaugggcauccccuacugcaacuacuccaaguacugguaccugaaccacaccgucaccgggaagacgagccugccccgcugcuggcugguguccaacggcagcuaccugaacgagacccacuucuccgacgacaucgagcagcaggccgacaacaugaucaccgagcuccugcagaaggaguacaucgaccggcagggcaagaccccgcuggggcucguggaccuguucgucuucagcacguccuucuaccugaucagcaucuuccugcaccucgugaagaucccgacccaccgccacgugaucggcaagcccugccccaagccccaccggcugaaccacauggggaucugcuccugcggccuguacaagcacccggggguccccgugaaguggaagcgcugaggacuagucccuguucccagagcccacuuuuuuuucuuuuuuugaaauaaaauagccugucuuucagaucucaaaggcucuuuucagagccaccaaaaaaaaaaaaaaaaaaaaaaaaaaaaaaaaaaaaaaaaaaaaaaaaaaaaaaaaaaaaaaaaagaauu

SEQ ID NO: 23125 - RNA, 1714 nt, Artificial Sequence
  mRNA product Design a-1 (hSL-A64-N5) comprising derived and/or modified sequence from LASV(LASV1000-NIG-2009;Clade II)__AIT17782__GPCmut2 (opt1)
aggagagucccgcagucggcguccagcggcucugcuuguucgugugugugucguugcaggccuuauucaagcuuaccaugggccagaucaucaccuucuuccaggaggugccccacgucaucgaggaggugaugaacaucgugcugaucgcccucagccugcuggccauccucaaggggaucuacaacgucgcgaccugcggccuguucgggcugguguccuuccuccugcugugcggccgcagcugcuccacgaccuacaaggggguguacgagcuccagacccuggagcuggacauggccagccucaacaugugcaugccgcuguccugcacgaagaacaacagccaccacuacaucauggucggcaacgagaccggccuggagcucacccugaccaacacguccaucaucaaccacaaguucugcaaccugagcgacgcccacaagaagaaccucuacgaccacgcccugauguccaucaucagcaccuuccaccuguccauccccaacuucaaccaguacgaggccaugagcugcgacuucaacgggggcaagaucuccgugcaguacaaccucagccacaccuacgcgguggacgccgccaaccacugcgggaccaucgccaacggcguccugcagacguucaugcggauggcguggggcggguccuacaucgcccuggacagcggcaagggguccugggacugcaucaugaccagcuaccaguaccucaucauccagaacaccaccugggaggaccacugccaguucucccgccccagccccaucggcuaccuggggcugcucagccagcggacgcgcgacaucuacaucucccggcgccgccggggcaccuucaccuggacccucagcgacuccgagggcaacgagacgcccgggggcuacugccugacccgguggaugcugaucgaggccgagcucaagugcuucgggaacaccgccguggccaagugcaacgagaagcacgacgaggaguucugcgacaugcugcgccuguucgacuucugcaagcaggcgaucaagcggcucaagacccccgcccagaugagcauccagcugaucaacaaggccgugaacgcccugaucaacgaccagcucaucaugaagaaccaccuccgcgacaucaugggcauccccuacugcaacuacuccaaguacugguaccugaaccacacggucaccgggaagaccagccugccccggugcuggcugguguccaacggcagcuaccugaacgagacccacuucuccgacgacaucgagcagcaggccgacaacaugaucacggagcuccugcagaaggaguacaucgaccgccagggcaagaccccgcuggggcucguggaccuguucgucuucagcaccuccuucuaccugaucagcaucuuccugcaccucgugaagaucccgacccaccggcacguggucggcaagcccugccccaagccccaccgccugaaccacauggggaucugcuccugcggccuguacaagcacccgggggugcccgugaaguggaagcggugaggacuagucccuguucccagagcccacuuuuuuuucuuuuuuugaaauaaaauagccugucuuucagaucucaaaggcucuuuucagagccaccaaaaaaaaaaaaaaaaaaaaaaaaaaaaaaaaaaaaaaaaaaaaaaaaaaaaaaaaaaaaaaaaagaauu

SEQ ID NO: 23126 - RNA, 1714 nt, Artificial Sequence
  mRNA product Design a-1 (hSL-A64-N5) comprising derived and/or modified sequence from LASV(LASV221-NIG-2010;Clade II)__AIT17624__GPCmut2 (opt1)
aggagagucccgcagucggcguccagcggcucugcuuguucgugugugugucguugcaggccuuauucaagcuuaccaugggccagaucaucaccuucuuccaggaggugccccacgucaucgaggaggugaugaacaucgugcugaucgcccucagccugcuggccauccucaaggggaucuacaacgucgcgaccugcggccuguucgggcugguguccuuccuccugcugugcggccgcagcugcuccacgaccuacaaggggguguacgagcuccagacccuggagcuggacauggccagccucaacaugugcaugccgcuguccugcacgaagaacaacagccaccacuacaucauggucggcaacgagaccggccuggagcucacccugaccaacacguccaucaucaaccacaaguucugcaaccugagcgacgcccacaagaagaaccucuacgaccacgcccugauguccaucaucagcaccuuccaccuguccauccccaacuucaaccaguacgaggccaugagcugcgacuucaacgggggcaagaucuccgugcaguacaaccucagccacaccuacgcgaucgacgccgccaaccacugcgggaccaucgccaacggcgugcugcagacguucaugcggauggcguggggcggguccuacaucgcccuggacagcggcaagggguccugggacugcaucaugaccagcuaccaguaccucaucauccagaacaccaccugggaggaccacugccaguucucccgccccagccccaucggcuaccuggggcugcucagccagcggacgcgcgacaucuacaucucccggcgccgccggggcaccuucaccuggacccucagcgacuccgagggcaacgagacgcccgggggcuacugccugacccgguggaugcugaucgaggccgagcucaagugcuucgggaacaccgccgucgccaagugcaacgagaagcacgacgaggaguucugcgacaugcugcgccuguucgacuucugcaagcaggcgauccggcgccucaagacccccgcccagaugagcauccagcugaucaacaaggccgugaacgcccugaucaacgaccagcucaucaugaagaaccaccuccgggacaucaugggcauccccuacugcaacuacuccaaguacugguaccugaaccacacggugaccgggaagaccagccugccccgcugcuggcuggucuccaacggcagcuaccugaacgagacccacuucuccgacgacaucgagcagcaggccgacaacaugaucacggagaugcuccagaaggaguacauggaccggcagggcaagaccccgcuggggcugguggaccucuucguguucagcaccuccuucuaccugaucagcaucuuccugcaccuggucaagaucccgacccaccgccacgugaucggcaagcccugccccaagccccaccggcucaaccacauggggaucugcuccugcggccuguacaagcacccgggggugcccgucaaguggaagcgcugaggacuagucccuguucccagagcccacuuuuuuuucuuuuuuugaaauaaaauagccugucuuucagaucucaaaggcucuuuucagagccaccaaaaaaaaaaaaaaaaaaaaaaaaaaaaaaaaaaaaaaaaaaaaaaaaaaaaaaaaaaaaaaaaagaauu

SEQ ID NO: 23127 - RNA, 1714 nt, Artificial Sequence
  mRNA product Design a-1 (hSL-A64-N5) comprising derived and/or modified sequence from LASV(LASV237-NIG-2010;Clade II)__AIT17638__GPCmut2 (opt1)
aggagagucccgcagucggcguccagcggcucugcuuguucgugugugugucguugcaggccuuauucaagcuuaccaugggccagaucaucaccuucuuccaggaggugccccacgucaucgaggaggugaugaacaucgugcugaucgcccucagccugcuggccauccucaaggggaucuacaacgucgcgaccugcggccuguucgggcugguguccuuccuccugcugugcggccgcagcugcuccacgaccuacaaggggguguacgagcuccagacccuggagcuggacauggccagccucaacaugugcaugccgcuguccugcacgaagaacaacagccaccacuacaucauggucggcaacgagaccggccuggagcucacccugaccaacacguccaucaucaaccacaaguucugcaaccugagcgacgcccacaagaaggaccucuacgaccacgcccugauguccaucaucagcaccuuccaccuguccauccccaacuucaaccaguacgaggccaugagcugcgacuucaacgggggcaagaucuccgugcaguacaaccucagccacaccuacgcgguggacgccgccaaccacugcgggaccaucgccaacggcguccugcagacguucaugcggauggcguggggcggguccuacaucgcccuggacagcggcaagggguccugggacugcaucaugaccagcuaccaguaccucaucauccagaacaccaccugggaggaccacugccaguucucccgccccagccccaucggcuaccuggggcugcucagccagcggacgcgcgacaucuacaucucccggcgccgccggggcaccuucaccuggacccucagcgacuccgagggcaacgagacgcccgggggcuacugccugacccgguggaugcugaucgaggccgagcucaagugcuucgggaacaccgccguggccaagugcaacgagaagcacgacgaggaguucugcgacaugcugcgccuguucgacuucugcaagcaggcgauccggcgccucaagacccccgcccagaugagcauccagcugaucaacaaggccgugaacgcccugaucaacgaccagcucaucaugaagaaccaccuccgggacaucaugggcauccccuacugcaacuacuccaaguacugguaccugaaccacacggucaccgggaagaccagccugccccgcugcuggcugguguccaacggcagcuaccugaacgagacccacuucuccgacgacaucgagcagcaggccgacaacaugaucacggagcuccugcagaaggaguacauggaccggcagggcaagaccccgcuggggcucguggaccuguucgucuucagcaccuccuucuaccugaucagcaucuuccugcaccucaucaagaucccgacccaccgccacaucacgggcaagcccugccccaagccccaccggcugaaccacauggggaucugcuccugcggccuguacaagcacccgggggugcccgugaaguggaagcgcugaggacuagucccuguucccagagcccacuuuuuuuucuuuuuuugaaauaaaauagccugucuuucagaucucaaaggcucuuuucagagccaccaaaaaaaaaaaaaaaaaaaaaaaaaaaaaaaaaaaaaaaaaaaaaaaaaaaaaaaaaaaaaaaaagaauu

SEQ ID NO: 23128 - RNA, 1714 nt, Artificial Sequence
  mRNA product Design a-1 (hSL-A64-N5) comprising derived and/or modified sequence from LASV(LASV253-NIG-2011;Clade II)__AIT17670__GPCmut2 (opt1)
aggagagucccgcagucggcguccagcggcucugcuuguucgugugugugucguugcaggccuuauucaagcuuaccaugggccagaucaucaccuucuuccaggaggugccccacgucaucgaggaggugaugaacaucgugcugaucgcccucagccugcuggccauccucaaggggaucuacaacgucgcgaccugcggccuguucgggcugguguccuuccuccugcugugcggccgcagcugcuccacgaccuacaaggggguguacgagcuccagacccuggagcuggacauggccagccucaacaugugcaugccgcuguccugcacgaagaacaacagccaccacuacaucauggucggcaacgagaccggccuggagcucacccugaccaacacguccaucaucaaccacaaguucugcaaccugagcgacgcccacaagaagaaccucuacgaccacgcccugauguccaucaucagcaccuuccaccuguccauccccaacuucaaccaguacgaggccaugagcugcgacuucaacgggggcaagaucuccgugcaguacaaccucagccacaccuacgcgguggacgccgccaaccacugcgggaccaucgccaacggcguccugcagacguucaugcggauggcguggggcggguccuacaucgcccuggacagcggcaagggguccugggacugcaucaugaccagcuaccaguaccucaucauccagaacaccaccugggaggaccacugccaguucucccgccccagccccaucggcuaccuggggcugcucagccagcggacgcgcgacaucuacaucucccggcgccgccggggcaccuucaccuggacccucagcgacuccgagggcaacgagacgcccgggggcuacugccugacccgguggaugcugaucgaggccgagcucaagugcuucgggaacaccgccguggccaagugcaacgagaagcacgacgaggaguucugcgacaugcugcgccuguucgacuucugcaagcaggcgauccggcgccucaaggcccccgcccagaugagcauccagcugaucaacaaggccgugaacgcccugaucaacgaccagcucaucaugaagaaccaccuccgggacaucaugggcaucccguacugcaacuacuccaaguacugguaccugaaccacaccgucacggggcgcaccagccugccccggugcuggcugguguccaacggcagcuaccugaacgagacccacuucuccgacgacaucgagcagcaggcggacaacaugaucaccgagcuccugcagaaggaguacaucgaccgccagggcaagacgccccuggggcucguggaccuguucgucuucagcaccuccuucuaccugaucagcaucuuccugcaccucgugaagaucccgacccaccggcacaucaucggcaagcccugccccaagccccaccgccugaaccacauggggaucugcuccugcggccuguacaagcacccgggggugcccgucaaguggaagcggugaggacuagucccuguucccagagcccacuuuuuuuucuuuuuuugaaauaaaauagccugucuuucagaucucaaaggcucuuuucagagccaccaaaaaaaaaaaaaaaaaaaaaaaaaaaaaaaaaaaaaaaaaaaaaaaaaaaaaaaaaaaaaaaaagaauu

SEQ ID NO: 23129 - RNA, 1714 nt, Artificial Sequence
  mRNA product Design a-1 (hSL-A64-N5) comprising derived and/or modified sequence from LASV(LASV254-NIG-2011;Clade II)__AIT17674__GPCmut2 (opt1)
aggagagucccgcagucggcguccagcggcucugcuuguucgugugugugucguugcaggccuuauucaagcuuaccaugggccagaucaucaccuucuuccaggaggugccccacgucaucgaggaggugaugaacaucgugcugaucgcccucagccugcuggccauccucaaggggaucuacaacgucgcgaccugcggccuguucgggcugguguccuuccuccugcugugcggccgcagcugcuccacgaccuacaaggggguguacgagcuccagacccuggagcuggacaugaccaaccucaacaugugcaugccgcugagcugcaccaagaacaacucccaccacuacaucauggucggcaacgagaccggccuggagcucacccugacgaacaccagcaucaucaaccacaaguucugcaaccuguccgacgcccacaagaagaaccucuacaaccacgcccugaugagcaucaucuccaccuuccaccugagcauccccaacuucaaccaguacgaggccauguccugcgacuucaacgggggcaagaucagcgugcaguacaaccucucccacagcuacgccguggacgcggccaaccacugcgggaccaucgccaacggcguccugcagacguucaugcggauggccuggggcggguccuacaucgcgcuggacagcggcaaggggaacugggacugcaucaugaccuccuaccaguaccucaucauccagaacaccaccugggaggaccacugccaguucagccgccccucccccaucggcuaccuggggcugcucagccagcggacgcgcgacaucuacaucagccggcgccgccggggcaccuucaccuggacccucuccgacagcgagggcaacgagacgcccgggggcuacugccugacccgguggaugcugaucgaggccgagcucaagugcuucgggaacaccgccguggccaagugcaacgagaagcacgacgaggaguucugcgacaugcugcgccuguucgacuucugcaagcaggccauccggcgccucaagacccccgcgcaggccaacauccagcugaucaacaaggccgugaacgcccugaucaacgaccagcucaucaugaagaaccaccuccgggacaucaugggcauccccuacugcaacuacuccaaguacugguaccugaaccacacggucaccgggaagaccagccugccccgcugcuggcugguguccaacggcagcuaccugaacgagacccacuucuccgacgacaucgagcagcaggccgacaacaugaucacggagcuccugcagaaggaguacauggaccggcagggcaagaccccgcuggggcucguggaccuguucgucuucagcaccuccuucuaccugaucagcaucuuccugcaccucgugaagaucccgacccaccgccacgugaucggcaagcccugccccaagccccaccggcugaaccacauggggaucugcuccugcggccuguacaagcacccggggguccccgugaaguggaagcgcugaggacuagucccuguucccagagcccacuuuuuuuucuuuuuuugaaauaaaauagccugucuuucagaucucaaaggcucuuuucagagccaccaaaaaaaaaaaaaaaaaaaaaaaaaaaaaaaaaaaaaaaaaaaaaaaaaaaaaaaaaaaaaaaaagaauu

SEQ ID NO: 23130 - RNA, 1714 nt, Artificial Sequence
  mRNA product Design a-1 (hSL-A64-N5) comprising derived and/or modified sequence from LASV(Nig08-A19;Clade III)__ADU56618__GPCmut2 (opt1)
aggagagucccgcagucggcguccagcggcucugcuuguucgugugugugucguugcaggccuuauucaagcuuaccaugggccagaucgugaccuucuuccaggaggucccccacgugaucgaggaggugaugaacaucguccugaucgcccucagcauccuggccauccugaaggggcucuacaacaucgcgaccugcggccugaucgggcuggugacguuccuccugcuguccggccgcagcugcuccaugaccuacaaggggguguacgagcuccagacccuggagcugaacaugaacacccucaacaugugcaugccgcugagcugcaccaagaacaacucccaccacuacaucauggucggcaacgagaccggccuggagcucacccugacgaacaccagccugcuccaccacaaguucugcaaccuguccgacgcccacaagaagaaccuguacgaccacacccucaugagcaucaucuccaccuuccaccugagcauccccaacuucaaccaguacgaggccauguccugcgacuucaacgggggcaagaucacggugcaguacaaccugagccacuccuacgccaucgacgccgcgaaccacugcgggaccguggccaacggcguccuccagaccuucaugcggauggccuggggcgggagcuacaucgcccuggacuccggccgcgggaagugggacugcaucaugaccagcuaccaguaccugaucauccagaacacgaccugggaggaccacugccaguucucccggcccagccccaucggcuaccucgggcugcugucccagcgcacccgggacaucuacaucagccgccggcgccggggcaccuucacguggacccugagcgacuccgagggcaacgagacccccgggggcuacugccucacccgcuggaugcugaucgaggcggagcugaagugcuucgggaacacggccguggccaagugcaacgagaagcacgacgaggaguucugcgacaugcuccggcuguucgacuucugcaagcaggccauccgccggcugaaggcccccgcgcagaugagcauccagcucaucaacaaggccgugaacgcccugaucaacgaccagcugaucaugaagaaccaccuccgcgacaucaugggcauccccuacugcaacuacuccaaguacugguaccugaaccacaccagcaccgggcggaccucccugccccgcugcuggcucgucagcaacggcuccuaccugaacgagacgcacuucagcgacgacaucgagcagcaggccgacaacaugaucaccgagaugcugcagaaggaguaccucgaccggcagggcaagaccccgcuggggcugguggaccuguucguguucuccaccagcuucuaccucaucuccaucuuccugcaccuggucaagaucccgacgcaccgccacaucgugggcaagcccugccccaagccccaccggcucaaccacauggggaucugcagcugcggccuguacaagcagccgggggugcccguccgcuggaagcggugaggacuagucccuguucccagagcccacuuuuuuuucuuuuuuugaaauaaaauagccugucuuucagaucucaaaggcucuuuucagagccaccaaaaaaaaaaaaaaaaaaaaaaaaaaaaaaaaaaaaaaaaaaaaaaaaaaaaaaaaaaaaaaaaagaauu

SEQ ID NO: 23131 - RNA, 1717 nt, Artificial Sequence
  mRNA product Design a-1 (hSL-A64-N5) comprising derived and/or modified sequence from LASV(G1180-SLE-2010;Clade IV)__AIT17168__GPCmut2 (opt1)
aggagagucccgcagucggcguccagcggcucugcuuguucgugugugugucguugcaggccuuauucaagcuuaccaugggccagaucgugaccuucuuccaggaggucccccacgugaucgaggaggugaugaacaucguccugaucgcccucagcauccuggccgugcugaaggggcucuacaacuucgcgaccugcggccugguggggcugcucaccuuccugcugcucugcggccgcuccugcaccgccagccgguacaagggggucuacgagcugcagacccuggagcucaacauggagacccugaacaugugcaugccgcuguccugcaccaagaacaacagccaccacuacaucauggugggcaacgagaccggccucgagcugacccugacgaacaccuccaucaucaaccacaaguucugcaaccucagcgacgcccacaagaagaaccuguacgaccacgcccugauguccaucaucagcaccuuccaccucuccauccccaacuucaaccaguacgaggccaugagcugcgacuucaacgggggcaagaucuccgugcaguacaaccugagccacuccuacgcgggggacgccgccaaccacugcggcaccgucgccaacggggugcugcagacguucaugcgcauggcguggggcggcagcuacaucgcccucgacuccgggcacggcagcugggacugcaucaugaccuccuaccaguaccugaucauccagaacaccaccugggaggaccacugccaguucagccggcccucccccaucggguaccugggccuccugagccagcgcacgcgggacaucuacaucagccgccggcgccggggcaccuucaccuggacccuguccgacagcgaggggaaggacacgccgggcggguacugccugacccgcuggaugcucaucgaggccgagcugaagugcuucggcaacaccgccguggccaagugcaacgagaagcacgacgaggaguucugcgacaugcugcggcuguucgacuucugcaagcaggcgauccagcgccugaaggcccccgcccagauguccauccagcugaucaacaaggccgucaacgcccucaucaacgaccagcugaucaugaagaaccaccuccgggacaucauggggauccccuacugcaacuacagcaaguacugguaccucaaccacaccacgaccggcaagaccucccugcccaagugcuggcuggugagcaacggcuccuaccucaacgagacccacuucagcgacgacaucgagcagcaggcggacaacaugaucacggagaugcugcagaaggaguacauggagcgccaggggaagacgccccugggccucguggaccuguucgucuucuccaccagcuucuaccugaucuccaucuuccugcaccucgugaagaucccgacccaccggcacaucgugggcaagagcugccccaagccccaccgccugaaccacauggggaucugcuccugcgggcuguacaagcagcccggcgucccggugaaguggaagcggugaggacuagucccuguucccagagcccacuuuuuuuucuuuuuuugaaauaaaauagccugucuuucagaucucaaaggcucuuuucagagccaccaaaaaaaaaaaaaaaaaaaaaaaaaaaaaaaaaaaaaaaaaaaaaaaaaaaaaaaaaaaaaaaaagaauu

SEQ ID NO: 23132 - RNA, 1717 nt, Artificial Sequence
  mRNA product Design a-1 (hSL-A64-N5) comprising derived and/or modified sequence from LASV(G1442-SLE-2011;Clade IV)__AIT17180__GPCmut2 (opt1)
aggagagucccgcagucggcguccagcggcucugcuuguucgugugugugucguugcaggccuuauucaagcuuaccaugggccagaucgugaccuucuuccaggaggucccccacgugaucgaggaggugaugaacaucguccugaucgcccucagcauccuggccgugcugaaggggcucuacaacguggcgaccugcggccugaucgggcuggucacguuccuccugcugugcggccgcuccugcaccaccacccucuacaaggggguguacgagcugcagacgcuggagcucaacauggagacccugaacaugugcaugccgcugagcugcaccaagaacaacucccaccacuacauccgggugggcaacgagacgggccucgagcugacccugaccaacaccagcaucaucaaccacaaguucugcaaccucuccgacgcccacaagaagaaccuguacgaccacgcccugaugagcaucaucuccacguuccaccucagcauccccaacuucaaccaguacgaggccauguccugcgacuucaacgggggcaagaucagcguccaguacaaccugucccacagcuacgccggggacgcggccaaccacugcggcaccguggccaacggggugcugcagaccuucaugcgcauggccuggggcggcuccuacaucgcgcucgacagcgggcggggcaacugggacugcaucaugaccuccuaccaguaccugaucauccagaacacgaccugggacgaccacugccaguucagccgccccucccccaucggguaccugggccuccugagccagcggacccgcgacgucuacaucucccggcgccgccggggcaccuucacguggacccugagcgacagcgaggggaaggacaccccgggcggguacugccugacccgguggaugcucaucgaggccgagcugaagugcuucggcaacacggccguggccaagugcaacgagaagcacgacgaggaguucugcgacaugcugcgccucuucgacuucugcaagcaggccauccagcggcugaaggcgcccgcccagauguccauccagcugaucaacaaggccgugaacgcccucaucaacgaccagcugaucaugaagaaccaccuccgcgacaucauggggauccccuacugcaacuacagcaaguacugguaccugaacaacaccgccaccggcaagaccucccugcccaagugcuggcugaucagcaacggcuccuaccucaacgagacgcacuucagcgacgacaucgagcaggaggcggacaacaugaucaccgagaugcugcagaaggaguacauggagcggcaggggaagacgccccugggccucgucgaccuguucguguucuccaccagcuucuaccugaucuccaucuuccugcaccucgugaagaucccgacccaccgccacaucgucggcaagagcugccccaagccccaccggcugaaccacauggggaucugcuccugcgggcuguacaagcagcccggcgugccggugcgcuggaagcggugaggacuagucccuguucccagagcccacuuuuuuuucuuuuuuugaaauaaaauagccugucuuucagaucucaaaggcucuuuucagagccaccaaaaaaaaaaaaaaaaaaaaaaaaaaaaaaaaaaaaaaaaaaaaaaaaaaaaaaaaaaaaaaaaagaauu

SEQ ID NO: 23133 - RNA, 1717 nt, Artificial Sequence
  mRNA product Design a-1 (hSL-A64-N5) comprising derived and/or modified sequence from LASV(G3010-SLE-2013;Clade IV)__AIT17344__GPCmut2 (opt1)
aggagagucccgcagucggcguccagcggcucugcuuguucgugugugugucguugcaggccuuauucaagcuuaccaugggccagaucgugaccuucuuccaggaggucccccacgugaucgaggaggugaugaacaucguccugaucgcccucagcauccuggccgugcugaaggggcucuacaacuucgcgaccugcggccugguggggcuggucacguuccuccugcugugcggccgcuccugcaccaccagccucuacaaggggguguacgagcugcagacccuggagcucaacauggagacgcugaacaugugcaugccgcuguccugcaccaagaacaacagccaccacuacaucauggugggcaacgagaccggccucgagcugacgcugaccaacaccuccaucaucaaccacaaguucugcaaccucagcgacgcccacaagaagaaccuguacaaccacgcccugauguccaucaucagcaccuuccaccucuccauccccaacuucaaccaguacgaggccaugagcugcgacuucaacgggggcaagaucuccguccaguacaaccugagccacuccuacgccggggacgcggccagccacugcggcacgguggccaacggggugcugcagaccuucaugcggauggccuggggcggcuccuacaucgcgcucgacagcggguacggcaagugggacugcaucaugaccuccuaccaguaccugaucauccagaacaccacgugggaggaccacugccaguucagccgccccucccccaucggguaccugggccuccugagccagcggacccgcgacaucuacaucagccggcgccgccggggcaccuucaccuggacgcuguccgacagcgaggggaaggacaccccgggcggguacugccugacccgguggaugcucaucgaggccgagcugaagugcuucggcaacaccgccgucgccaagugcaacgagaagcacgacgaggaguucugcgacaugcugcgccucuucgacuucugcaagcaggccauccagcggcugaagacgcccgcgcagauguccauccagcugaucaacaaggccgugaacgcccucaucaacgaccagcugaucaugaagaaccaccuccgcgacaucauggggauccccuacugcaacuacagcaaguacugguaccugaaccacaccaccaccggcaagacgucccugcccaagugcuggcuggugagcaacggcuccuaccucaacgagacccacuucagcgacgacaucgagcagcaggccgacaacaugaucaccgagaugcugcagaaggaguacauggagcggcaggggaagacgccccugggccucgucgaccuguucguguucuccaccagcuucuaccugaucuccaucuuccugcaccucgugaagaucccgacccaccgccacaucgucggcaagagcugccccaagccccaccggcugaaccacauggggaucugcuccugcgggcuguacaagcagcccggcgugccggugcgcuggaagcggugaggacuagucccuguucccagagcccacuuuuuuuucuuuuuuugaaauaaaauagccugucuuucagaucucaaaggcucuuuucagagccaccaaaaaaaaaaaaaaaaaaaaaaaaaaaaaaaaaaaaaaaaaaaaaaaaaaaaaaaaaaaaaaaaagaauu

SEQ ID NO: 23134 - RNA, 1717 nt, Artificial Sequence
  mRNA product Design a-1 (hSL-A64-N5) comprising derived and/or modified sequence from LASV(G502-SLE-2009;Clade IV)__AIT17126__GPCmut2 (opt1)
aggagagucccgcagucggcguccagcggcucugcuuguucgugugugugucguugcaggccuuauucaagcuuaccaugggccagaucgugaccuucuuccaggaggucccccacgugaucgaggaggugaugaacaucguccugaucgcccucagcauccuggccgugcugaaggggcucuacaacuucgcgaccugcggccugguggggcugcucacguuccugcugcucugcggccgcuccugcaccaccgggcuguacaagggcgucuacgagcugcagacccucgagcugaacauggagacgcugaacaugugcaugccgcucagcugcaccaagaacaacucccaccacuacaucauggugggcaacgagaccgggcuggagcugacgcucaccaacaccagcaucaucaaccacaaguucugcaaccuguccgacgcccacaagaagaaccuguacgaccacgcccucaugagcaucaucuccaccuuccaccugagcauccccaacuucaaccaguacgaggccauguccugcgacuucaacggcgggaagaucagcgugcaguacaaccugucccacagcuacgccggcgacgcggccgaccacugcgggacggucgccaacggcgugcuccagaccuucaugcggauggccuggggcggguccuacaucgcgcuggacagcggccgcgggcggugggacugcaucaugaccuccuaccaguaccugaucauccagaacaccacgugggaggaccacugccaguucagccgccccucccccaucggcuaccucggccugcugagccagcggacccgcgacaucuacaucucccggcgccgccgggggaccuucaccuggacgcugagcgacagcgagggcaaggacacccccgggggcuacugccucacccgguggaugcugaucgaggccgagcugaagugcuucgggaacaccgccguggccaagugcaacgagaagcacgacgaggaguucugcgacaugcuccgccuguucgacuucugcaagcaggccauccagcggcugaaggcgcccgcccagauguccauccagcucaucaacaaggccgucaacgcccugaucaacgaccagcuggugaugaagaaccaccuccgcgacaucaugggcauccccuacugcaacuacagccgguacugguaccugaaccacacgaccaccggccgcaccucccugcccaagugcuggcucgugagcaacggguccuaccugaacgagacgcacuucagcgacgacaucgagcagcaggccgacaacaugaucaccgagaugcugcagaaggaguacauggagcggcagggcaagaccccgcucgggcuggucgaccuguucguguucuccaccagcuucuaccugaucuccaucuuccuccaccuggugaagaucccgacgcaccgccacaucgucggcaagagcugccccaagccccaccggcugaaccacauggggaucugcuccugcggccucuacaagcagcccggcgugccggugaaguggaagcgcugaggacuagucccuguucccagagcccacuuuuuuuucuuuuuuugaaauaaaauagccugucuuucagaucucaaaggcucuuuucagagccaccaaaaaaaaaaaaaaaaaaaaaaaaaaaaaaaaaaaaaaaaaaaaaaaaaaaaaaaaaaaaaaaaagaauu

SEQ ID NO: 23135 - RNA, 1717 nt, Artificial Sequence
  mRNA product Design a-1 (hSL-A64-N5) comprising derived and/or modified sequence from LASV(G733-SLE-2010;Clade IV)__AIT17154__GPCmut2 (opt1)
aggagagucccgcagucggcguccagcggcucugcuuguucgugugugugucguugcaggccuuauucaagcuuaccaugggccagaucgugaccuucuuccaggaggucccccacgugaucgaggaggugaugaacaucguccugaucgcccucagcauccuggccgugcugaaggggcucuacaacuucgcgaccugcggcaucguggggcuggucuccuuccugcuccugugcggccgcagcugcacgaccucccuguacaaggggguguacgagcuccagacccuggagcugaacauggagacccucaacaugugcaugccgcugagcugcaccaagaacaacucccaccacuacaucauggugggcaacgagaccggccuggagcucacccugacgaacaccagcaucaucaaccacaaguucugcaaccuguccgacgcccacaagaagaaccucuacgaccacgcccugaugagcaucaucuccaccuuccaccugagcauccccaacuucaaccaguacgaggccauguccugcgacuucaacgggggcaagaucagcguccaguacaaccucucccacagcuacgccggggacgcggccaaccacugcggcaccaucgccaacggggugcugcagacguucaugcggauggccuggggcggcuccuacaucgcgcuggacagcgggcgcgaccggugggacugcaucaugaccuccuaccaguaccucaucauccagaacaccaccugggaggaccacugccaguucagccgccccucccccaucggcuaccuggggcugcucagccagcggacgcgcgacaucuacaucagccggcgccgccggggcaccuucaccuggacccucuccgacagcgagggcaaggacacgcccgggggcuacugccugacccgguggaugcugaucgaggccgagcucaagugcuucgggaacaccgccguggccaagugcaacgagaagcacgacgaggaguucugcgacaugcugcgccuguucgacuucugcaagcaggccauccagcggcucaaggcgcccgcccagauguccauccagcugaucaacaaggccgucaacgcccugaucaacgaccagcucaucaugaagaaccaccuccgcgacaucaugggcauccccuacugcaacuacagcaaguacugguaccugaaccacaccacgaccgggaagaccucccugcccaagugcuggcuggugagcaacggcuccuaccugaacgagacccacuucagcgacgacaucgagcagcaggccgacaacaugaucacggagaugcuccagaaggaguacauggagcggcagggcaagaccccgcuggggcugguggaccucuucgucuucuccaccagcuucuaccugaucuccaucuuccugcaccuggugaagaucccgacccaccgccacguggucggcaagagcugccccaagccccaccggcucaaccacauggggaucugcuccugcggccuguacgggcagcccggcgugccggugaaguggaagcgcugaggacuagucccuguucccagagcccacuuuuuuuucuuuuuuugaaauaaaauagccugucuuucagaucucaaaggcucuuuucagagccaccaaaaaaaaaaaaaaaaaaaaaaaaaaaaaaaaaaaaaaaaaaaaaaaaaaaaaaaaaaaaaaaaagaauu

SEQ ID NO: 23136 - RNA, 1717 nt, Artificial Sequence
  mRNA product Design a-1 (hSL-A64-N5) comprising derived and/or modified sequence from MOPV/LASV reassortant(IGS-1;Clade IV)__AFY05576__GPCmut2 (opt1)
aggagagucccgcagucggcguccagcggcucugcuuguucgugugugugucguugcaggccuuauucaagcuuaccaugggccagaucgugaccuucuuccaggaggucccccacgugaucgaggaggugaugaacaucguccugaucgcccucagcgugcuggccgugcugaaggggcucuacaacuucgcgaccugcggccuggucgggcuggugacguuccuccugcugugcggccgcuccugcaccaccagccucuacaaggggguguacgagcugcagacccuggagcucaacauggagacgcugaacaugugcaugccgcuguccugcaccaagaacaacagccaccacuacaucauggucggcaacgagaccggccucgagcugacgcugaccaacaccuccaucaucaaccacaaguucugcaaccucagcgacgcccacaagaagaaccuguacgaccacgcccugauguccaucaucagcaccuuccaccucuccauccccaacuucaaccaguacgaggccaugagcugcgacuucaacgggggcaagaucuccgugcaguacaaccugagccacuccuacgccggggacgcggccaaccacugcggcacgguggccaacgggguccugcagaccuucaugcggauggccuggggcggcagcuacaucgcgcucgacuccgggcgcggcaacugggacugcaucaugaccagcuaccaguaccugaucauccagaacaccacgugggaggaccacugccaguucucccggcccagccccaucggguaccugggccuccugucccagcgcacccgggacaucuacaucagccgccggcgccggggcaccuucaccuggacgcugagcgacuccgagggggaggacaccccgggcggguacugccugacccgcuggaugcucaucgaggccgagcugaagugcuucggcaacaccgccguggccaagugcaacgagaagcacgacgaggaguucugcgacaugcugcggcuguucgacuucugcaagcaggccauccagcgccugaaggcgcccgcccagaugagcauccagcugaucaacaaggccgugaacgcccucaucaacgaccagcugaucaugaagaaccaccuccgggacaucauggggauccccuacugcaacuacuccaaguacugguaccucaaccacacgaccaccggccgcaccagccugcccaagugcuggcuggucuccaacggcagcuaccucaacgagacgcacuucuccgacgacaucgagcagcaggccgacaacaugaucaccgagaugcugcagaaggaguacauggagcggcaggggaagacgccccugggccucguggaccuguucguguucagcaccuccuucuaccugaucagcaucuuccugcaccucgucaagaucccgacccaccgccacaucguggggaaguccugccccaagccccaccggcugaaccacaugggcaucugcagcugcgggcuguacaagcagcccggcgugccggucaaguggaagcgcugaggacuagucccuguucccagagcccacuuuuuuuucuuuuuuugaaauaaaauagccugucuuucagaucucaaaggcucuuuucagagccaccaaaaaaaaaaaaaaaaaaaaaaaaaaaaaaaaaaaaaaaaaaaaaaaaaaaaaaaaaaaaaaaaagaauu

SEQ ID NO: 23137 - RNA, 1717 nt, Artificial Sequence
  mRNA product Design a-1 (hSL-A64-N5) comprising derived and/or modified sequence from LASV(LM765-SLE-2012;Clade IV)__AIT17814__GPCmut2 (opt1)
aggagagucccgcagucggcguccagcggcucugcuuguucgugugugugucguugcaggccuuauucaagcuuaccaugggccagaucgugaccuucuuccaggaggucccccacgugaucgaggaggugaugaacaucguccugaucgcccucagcauccuggccgugcugaaggggcucuacaacuucgcgaccugcggccugguggggcuggucacguuccuccugcugugcggccgcuccugcaccaccagccucuacaaggggguguacgagcugcagacccuggagcucaacauggagacgcugaacaugugcaugccgcuguccugcaccaagaacaacagccaccacuacaucauggugggcaacgagaccggccucgagcugacgcugaccaacaccuccaucaucgaccacaaguucugcaaccucagcgacgcccaccggaagaaccuguacgaccacgcccugauguccaucaucagcaccuuccaccucuccauccccaacuucaaccaguacgaggccaugagcugcgacuucaacgggggcaagaucuccguccaguacaaccugagccacuccuacgccaaggacgcggccgaccacugcgggacgguggccaacggcgugcugcagaccuucaugcgcauggccuggggcgggagcuacaucgcgcucgacuccggccgggggcgcugggacugcaucaugaccagcuaccaguaccugaucauccagaacaccacgugggaggaccacugccaguucucccggcccagccccaucggcuaccuggggcuccugucccagcgcacccgggacaucuacaucagccgccggcgccggggcaccuucaccuggacgcugagcgacuccgagggcaaggacacccccgggggcuacugccugacccgcuggaugcucaucgaggccgagcugaagugcuucgggaacaccgccgucgccaagugcaacgagaagcacgacgaggaguucugcgacaugcugcggcuguucgacuucugcaagcaggccauccagcgccugaaggcgcccgcccagaugagcauccagcugaucaacaaggccgugaacgcccucaucaacgaccagcugaucaugaagaaccaccuccgggacaucaugggcauccccuacugcaacuacuccaaguacugguaccucaaccacacgaccaccgggaagaccagccugcccaagugcuggcugguguccaacggcagcuaccucaacgagacgcacuucuccgacgacaucgagcagcaggccgacaacaugaucaccgagaugcugcagaaggaguacauggagcgccagggcaagaccccgcuggggcucgucgaccuguucguguucagcaccuccuucuaccugaucagcaucuuccugcaccucgugaagaucccgacgcaccggcacaucgucggcaagcccugccccaagccccaccgccugaaccacauggggaucugcuccugcggccuguacaagcagccgggggugcccgugaaguggaagcggugaggacuagucccuguucccagagcccacuuuuuuuucuuuuuuugaaauaaaauagccugucuuucagaucucaaaggcucuuuucagagccaccaaaaaaaaaaaaaaaaaaaaaaaaaaaaaaaaaaaaaaaaaaaaaaaaaaaaaaaaaaaaaaaaagaauu

SEQ ID NO: 23138 - RNA, 1717 nt, Artificial Sequence
  mRNA product Design a-1 (hSL-A64-N5) comprising derived and/or modified sequence from LASV(LM776-SLE-2012;Clade IV)__AIT17824__GPCmut2 (opt1)
aggagagucccgcagucggcguccagcggcucugcuuguucgugugugugucguugcaggccuuauucaagcuuaccaugggccagaucgugaccuucuuccaggaggucccccacgugaucgaggaggugaugaacaucguccugaucgcccucagcauccuggccgugcugaaggggcucuacaacuucgcgaccugcggccugguggggcuggucacguuccuccugcugugcggccgcuccugcaccaccagcguguacaaggggguguacgagcuccagacccuggagcugaacauggagacgcucaacaugugcaugccgcuguccugcaccaagaacaacagccaccacuacaucauggucggcaacgagaccggccuggagcucacgcugaccaacaccuccaucaucaaccacaaguucugcaaccugagcgacgcccacaagaagaaccucuacgaccacgcccugauguccaucaucagcaccuuccaccuguccauccccaacuucaaccaguacgaggccaugagcugcgacuucaacgggggcaagaucuccgugcaguacaaccucagccacuccuacgccggggacgcggccaaccacugcggcacgguggccaacgggguccugcagaccuucaugcggauggccuggggcggcagcuacaucgcgcuggacuccgggcacggcaagugggacugcaucaugaccagcuaccaguaccucaucauccagaacaccacgugggaggaccacugccaguucucccgccccagccccaucggguaccugggccugcucucccagcggacccgcgacaucuacaucagccggcgccgccggggcaccuucaccuggacgcucagcgacuccgaggggaaggacaccccgggcggguacugccugacccgguggaugcugaucgaggccgagcucaagugcuucggcaacaccgccguggccaagugcaacgagaagcacgacgaggaguucugcgacaugcugcgccuguucgacuucugcaagcaggccauccagcggcucaaggcgcccgcccagaugagcauccagcugaucaacaaggccgugaacgcccugaucaacgaccagcucaucaugaagaaccaccuccgcgacaucauggggauccccuacugcaacuacuccaaguacugguaccugaaccacacgaccaccggcaagaccagccugcccaagugcuggcuggucuccaacggcagcuaccugaacgagacgcacuucuccgacgacaucgagcagcaggccgacaacaugaucaccgagaugcuccagaaggaguacauggagcggcaggggaagacgccccugggccugguggaccucuucguguucagcaccuccuucuaccugaucagcaucuuccugcaccuggucaagaucccgacccaccgccacaucguggggaaguccugccccaagccccaccggcucaaccacaugggcaucugcagcugcgggcuguacaagcagcccggcgugccgguccgcuggaagcggugaggacuagucccuguucccagagcccacuuuuuuuucuuuuuuugaaauaaaauagccugucuuucagaucucaaaggcucuuuucagagccaccaaaaaaaaaaaaaaaaaaaaaaaaaaaaaaaaaaaaaaaaaaaaaaaaaaaaaaaaaaaaaaaaagaauu

SEQ ID NO: 23139 - RNA, 1717 nt, Artificial Sequence
  mRNA product Design a-1 (hSL-A64-N5) comprising derived and/or modified sequence from LASV(Mad39;Clade IV)__ANH09722__GPCmut2 (opt1)
aggagagucccgcagucggcguccagcggcucugcuuguucgugugugugucguugcaggccuuauucaagcuuaccaugggccagaucgugaccuucuuccaggaggucccccacgugaucgaggaggugaugaacaucguccugaucgcccucagcauccuggccgugcugaaggggcucuacaacguggcgaccugcggccugaucgggcuggucacguuccuccugcugugcggccgcuccugcaccaccacccucuacaaggggguguacgagcugcaggcccuggagcucaacauggagacgcugaacaugugcaugccgcugagcugcaccaagaacaacucccaccacuacauccgggugggcaacgagaccggccucgagcugacgcugaccaacaccagccucaucaaccacaaguucugcaaccuguccgacgcccacaagaagaaccuguacgaccacgcccucaugagcaucaucuccaccuuccaccugagcauccccaacuucaaccaguacgaggccauguccugcgacuucaacgacgggaagaucagcguccaguacaaccugucccacacguacgcgggcgacaccgccaaccacugcgggaccguggccaacggcgugcuccagaccuucaugcgcauggccuggggcgggagcuacaucgcgcuggacuccggccgcgggggcugggacugcaucaugacgagcuaccaguaccugaucauccagaacaccaccugggaggaccacugccaguucucccggcccagccccaucggguaccucggccugcugucccagcggacccgcgacaucuacaucagccggcgccgccggggcacguucaccuggacccuguccgacagcgaggggaaggacaccccgggcggguacugccucacgcgguggaugcugaucgaggccgagcugaagugcuucggcaacaccgccgucgccaagugcaacgagaagcacgacgaggaguucugcgacaugcuccgccuguucgacuucugcaagcaggccauccagcggcugaaggcgcccgcccagaugagcauccagcucaucaacaaggccgugaacgcccugaucaacgaccagcugaucaugaagaaccaccuccgcgacaucauggggauccccuacugcaacuacuccaaguacugguaccugaaccacaccgugaccggcaagacgagccugcccaagugcuggcucgucuccaacggcagcuaccugaacgagacccacuucuccgacgacaucgagcagcaggccgacaacaugaucaccgagaugcugcagaaggaguacauggagcggcaggggaagacgccccucggccugguggaccuguucguguucagcaccuccuucuaccugaucagcaucuuccuccaccuggucaagaucccgacccaccgccacgugguggggaagcccugccccaagccccaccggcugaaccacaugggcaucugcuccugcggguucuacaagcagccgggcguccccgugcgcuggaagcggugaggacuagucccuguucccagagcccacuuuuuuuucuuuuuuugaaauaaaauagccugucuuucagaucucaaaggcucuuuucagagccaccaaaaaaaaaaaaaaaaaaaaaaaaaaaaaaaaaaaaaaaaaaaaaaaaaaaaaaaaaaaaaaaaagaauu

SEQ ID NO: 23140 - RNA, 1717 nt, Artificial Sequence
  mRNA product Design a-1 (hSL-A64-N5) comprising derived and/or modified sequence from LASV(Z0947-SLE-2011;Clade IV)__AIT17840__GPCmut2 (opt1)
aggagagucccgcagucggcguccagcggcucugcuuguucgugugugugucguugcaggccuuauucaagcuuaccaugggccagaucgugaccuucuuccaggaggucccccacgugaucgaggaggugaugaacaucguccugaucgcccucagcauccuggccgugcugaaggggcucuacaacuucgcgaccugcggccugguggggcuggucacguuccuccugcugugcggccgcuccugcaccaucagccucuacaaggggguguacgagcugcagacccuggagcucaacauggagacccugaacaugugcaugccgcuguccugcaccaagaacaacagccaccacuacaucauggugggcaacgagaccggccucgagcugacccugacgaacaccuccaucaucaaccacaaguucugcaaccucagcgacgcccacaagaagaaccuguacgaccacgcccugauguccaucaucagcaccuuccaccucuccauccccaacuucaaccaguacgaggccaugagcugcgacuucaacgggggcaagaucuccguccaguacaaccugagccacuccuacgccggggacgcggccaaccacugcggcaccguggccaacggggugcugcagacguucaugcggauggccuggggcggcagcuacaucgcgcucgacuccgggcgcgaccggugggacugcaucaugaccagcuaccaguaccugaucauccagaacaccaccugggaggaccacugccaguucucccgccccagccccaucggcuaccuggggcuccugucccagcggacgcgcgacaucuacaucagccggcgccgccggggcaccuucaccuggacccugagcgacuccgagggcaaggacacgcccgggggcuacugccugacccgguggaugcucaucgaggccgagcugaagugcuucgggaacaccgccgucgccaagugcaacgagaagcacgacgaggaguucugcgacaugcugcgccucuucgacuucugcaagcaggccauccagcggcugaaggcgcccgcccagaugagcauccagcugaucaacaaggccgugaacgcccucaucaacgaccagcugaucaugaagaaccaccuccgcgacaucaugggcauccccuacugcaacuacuccaaguacugguaccugaaccacaccacgaccgggaagaccagccugcccaagugcuggcugguguccaacggcagcuaccucaacgagacccacuucuccgacgacaucgagcagcaggccgacaacaugaucacggagaugcugcagaaggaguacauggagcggcagggcaagaccccgcuggggcucgucgaccuguucguguucagcaccuccuucuaccugaucagcaucuuccugcaccucgugaagaucccgacccaccgccacaucgucggcaagcccugccccaagccccaccggcugaaccacauggggaucugcuccugcggccuguacaagcagccgggggugcccgugaaguggaagcgcugaggacuagucccuguucccagagcccacuuuuuuuucuuuuuuugaaauaaaauagccugucuuucagaucucaaaggcucuuuucagagccaccaaaaaaaaaaaaaaaaaaaaaaaaaaaaaaaaaaaaaaaaaaaaaaaaaaaaaaaaaaaaaaaaagaauu

SEQ ID NO: 23141 - RNA, 1717 nt, Artificial Sequence
  mRNA product Design a-1 (hSL-A64-N5) comprising derived and/or modified sequence from LASV(Josiah;Clade IV)__NP_694870__GPCmut2 (opt1)
aggagagucccgcagucggcguccagcggcucugcuuguucgugugugugucguugcaggccuuauucaagcuuaccaugggccagaucgugaccuucuuccaggaggucccccacgugaucgaggaggugaugaacaucguccugaucgcccucagcgugcuggccgugcugaaggggcucuacaacuucgcgaccugcggccuggucgggcuggugacguuccuccugcugugcggccgcuccugcaccaccagccucuacaaggggguguacgagcugcagacccuggagcucaacauggagacgcugaacaugugcaugccgcuguccugcaccaagaacaacagccaccacuacaucauggucggcaacgagaccggccucgagcugacccugacgaacaccuccaucaucaaccacaaguucugcaaccucagcgacgcccacaagaagaaccuguacgaccacgcccugauguccaucaucagcaccuuccaccucuccauccccaacuucaaccaguacgaggccaugagcugcgacuucaacgggggcaagaucuccgugcaguacaaccugagccacuccuacgccggggacgcggccaaccacugcggcaccguggccaacgggguccugcagacguucaugcggauggccuggggcggcagcuacaucgcgcucgacuccgggcgcggcaacugggacugcaucaugaccagcuaccaguaccugaucauccagaacaccaccugggaggaccacugccaguucucccggcccagccccaucggguaccugggccuccugucccagcgcacgcgggacaucuacaucagccgccggcgccggggcaccuucaccuggacccugagcgacuccgaggggaaggacacgccgggcggguacugccucacccgcuggaugcugaucgaggccgagcugaagugcuucggcaacaccgccguggccaagugcaacgagaagcacgacgaggaguucugcgacaugcuccggcuguucgacuucugcaagcaggccauccagcgccugaaggcgcccgcccagaugagcauccagcucaucaacaaggccgugaacgcccugaucaacgaccagcugaucaugaagaaccaccuccgggacaucauggggauccccuacugcaacuacuccaaguacugguaccugaaccacaccacgaccggccgcaccagccugcccaagugcuggcucgucuccaacggcagcuaccugaacgagacccacuucuccgacgacaucgagcagcaggccgacaacaugaucacggagaugcugcagaaggaguacauggagcggcaggggaagaccccgcucggccugguggaccuguucguguucagcaccuccuucuaccugaucagcaucuuccuccaccuggucaagauccccacccaccgccacaucguggggaaguccugccccaagccccaccggcugaaccacaugggcaucugcagcugcgggcucuacaagcagccgggcgugcccgucaaguggaagcgcugaggacuagucccuguucccagagcccacuuuuuuuucuuuuuuugaaauaaaauagccugucuuucagaucucaaaggcucuuuucagagccaccaaaaaaaaaaaaaaaaaaaaaaaaaaaaaaaaaaaaaaaaaaaaaaaaaaaaaaaaaaaaaaaaagaauu

SEQ ID NO: 23142 - RNA, 1714 nt, Artificial Sequence
  mRNA product Design a-1 (hSL-A64-N5) comprising derived and/or modified sequence from LASV(LP;Clade I)__AAF86701__GPCmut2 (opt1)
aggagagucccgcagucggcguccagcggcucugcuuguucgugugugugucguugcaggccuuauucaagcuuaccaugggccagaucaucaccuucuuccaggaggugccccacgucaucgaggaggugaugaacaucgugcugaucgcccucagccugcuggccauccucaaggggcuguacaacaucgcgaccugcggcaucaucgggcuggucgccuuccucuuccugugcggcaaguccugcagccugacgcucaagggcggguacgagcugcagacccuggagcucaacauggagacccugaacaugugcaugccgcuguccugcaccaagaacagcucccaccacuacauccgcgugggcaacgagacggggcucgagcugacccugaccaacaccagcaucaucaaccacaaguucugcaaccucuccgacgcccacaagaagaaccuguacgaccacgcccugaugagcaucaucuccacguuccaccucagcauccccaacuucaaccaguacgaggccauguccugcgacuucaacggcgggaagaucagcgugcaguacaaccugucccacagcuacgcgggcgacgccgccgagcacugcgggaccgucgccaacggcgugcugcagaccuucaugcggauggcguggggcgggcgcuacaucgcccucgacuccggcaaggggaacugggacugcaucaugaccagcuaccaguaccugaucauccagaacacgaccugggaggaccacugccaguucucccggcccagccccaucggcuaccugggccuccugucccagcgcacccgggacaucuacaucagccgccggcgccgggggaccuucacguggacccugagcgacuccgagggcaacgagacccccgggggcuacugccucacccgcuggaugcugaucgaggccgagcugaagugcuucgggaacacggccguggccaagugcaacgagaagcacgacgaggaguucugcgacaugcuccggcuguucgacuucugcaagcaggcgauccgccggcugaaggccccggcccagaugagcauccagcucaucaacaaggccgucaacgcccugaucaacgaccagcugaucaugaagaaccaccuccgcgacaucaugggcauccccuacugcaacuacuccaaguacugguaccugaaccacaccagcuccggccggaccagccugcccaagugcuggcucaucuccaacgggagcuaccugaacgagacccaguucuccgacgacaucgagcagcaggcggacaacaugaucacggagaugcugcagaaggaguacaucgagcgccagggcaagaccccgcucgggcugguggacaucuucaucuucagcaccuccuucuaccugaucagcaucuuccugcaccucaucaagauccccacccaccggcacaucgugggcaagcccugccccaagccgcaccgccugaaccacaugggggucugcuccugcggccuguacaagcaccccggcgugcccacgaaguggaagcggugaggacuagucccuguucccagagcccacuuuuuuuucuuuuuuugaaauaaaauagccugucuuucagaucucaaaggcucuuuucagagccaccaaaaaaaaaaaaaaaaaaaaaaaaaaaaaaaaaaaaaaaaaaaaaaaaaaaaaaaaaaaaaaaaagaauu

SEQ ID NO: 23143 - RNA, 1714 nt, Artificial Sequence
  mRNA product Design a-1 (hSL-A64-N5) comprising derived and/or modified sequence from LASV(803213;Clade II)__AAF86703__GPCmut2 (opt1)
aggagagucccgcagucggcguccagcggcucugcuuguucgugugugugucguugcaggccuuauucaagcuuaccaugggccagaucaucaccuucuuccaggaggugccccacgucaucgaggaggugaugaacaucgugcugaucgcccucagccugcuggccauccucaaggggaucuacaacgucgcgaccugcggccuguucgggcugaucuccuuccuccugcugugcggccgcagcugcuccgugacguacaaggggguguacgagcuccagacccuggagcugaacauggccaaccucaacaugugcaugccgcugagcugcaccaagaacaacucccaccacuacaucauggucggcaacgagaccggccuggagcucacgcugaccaacaccagcaucaucaaccacaaguucugcaaccuguccgacgcccacaagaagaaccucuacgaccacgcccugaugagcaucaucuccaccuuccaccugagcauccccaacuucaaccaguacgaggccauguccugcgacuucaacgggggcaagaucagcgugcaguacaaccucucccacagcuucgcgguggacgccgccaaccacugcgggacgaucgccaacggcguccugcagaccuucaugcggauggcguggggcggguccuacaucgcccuggacagcggcaaggggaacugggacugcaucaugaccuccuaccaguaccucaucauccagaacaccacgugggaggaccacugccaguucagccgccccucccccaucggcuaccuggggcugcucagccagcggacccgcgacaucuacaucagccggcgccggcgcggcaccuucaccuggacgcuguccgacagcgagggcaacgaggcccccgggggcuacugccugacccgguggaugcucaucgaggccgagcugaagugcuucgggaacaccgccguggcgaagugcaacgagaagcacgacgaggaguucugcgacaugcugcgccucuucgacuucugcaagcaggccaucaagcggcugaagaccccggcccagauguccauccagcugaucaacaaggccgugaacgcccucaucaacgaccagcugaucaugaagaaccaccuccgcgacaucaugggcauccccuacugcaacuacagccgguacugguaccugaaccacacggucaccgggaagaccucccugccccgcugcuggcuggugagcaacggcuccuaccucaacgagacccacuucagcgacgacaucgagcagcaggcggacaacaugaucacggagaugcugcagaaggaguacauggaccggcagggcaagaccccgcuggggcucguggaccuguucgucuucuccaccagcuucuaccugaucuccaucuuccugcaccucgugaagauccccacccaccgccacaucgugggcaagcccugccccaagccgcaccggcugaaccacauggggaucugcagcugcggccuguacaagcaccccgggguccccgugaaguggaagcgcugaggacuagucccuguucccagagcccacuuuuuuuucuuuuuuugaaauaaaauagccugucuuucagaucucaaaggcucuuuucagagccaccaaaaaaaaaaaaaaaaaaaaaaaaaaaaaaaaaaaaaaaaaaaaaaaaaaaaaaaaaaaaaaaaagaauu

SEQ ID NO: 23144 - RNA, 1714 nt, Artificial Sequence
  mRNA product Design a-1 (hSL-A64-N5) comprising derived and/or modified sequence from LASV(GA391;Clade III)__CAA36645__GPCmut2 (opt1)
aggagagucccgcagucggcguccagcggcucugcuuguucgugugugugucguugcaggccuuauucaagcuuaccaugggccagaucgugaccuucuuccaggaggucccccacgugaucgaggaggugaugaacaucguccugaucgcccucagcauccuggccauccugaaggggcucuacaacguggcgaccugcggccugaucgggcuggugacguuccuccugcuguccggccgcagcugcucccucaucuacaaggggaccuacgagcugcagacccuggagcucaacauggagacccugaacaugugcaugccgcugagcugcacgaagaacaacucccaccacuacauccgggucggcaacgagaccggccucgagcugacccugaccaacacgagcauccucaaccacaaguucugcaaccuguccgacgcccacaagcgcaaccuguacgaccacagccucauguccaucaucagcaccuuccaccuguccauccccaacuucaaccaguacgaggccaugagcugcgacuucaacgggggcaagaucaccgugcaguacaaccugucccacagcuucgccguggacgccgcggggcacugcggcacccucgccaacgggguccugcagacguucaugcggauggccuggggcggcuccuacaucgcccuggacagcgggcgcggcaacugggacugcaucaugaccuccuaccaguaccucaucauccagaacaccaccugggacgaccacugccaguucagccggcccucccccaucggguaccugggccugcucagccagcgcacgcgggacaucuacaucagccgccggcgccggggcaccuucaccuggacccuguccgacagcgaggggaacgagacgccgggcggguacugccugacccgcuggaugcucaucgaggcggagcugaagugcuucggcaacaccgccguggccaagugcaacgagaagcacgacgaggaguucugcgacaugcugcggcuguucgacuucugcaagcaggccauccgccggcugaagacccccgcccagauguccauccagcugaucaacaaggcggugaacgcccucaucaacgaccagcugaucaugaagaaccaccuccgcgacaucauggggauccccuacugcaacuacagccgguacugguaccucaaccacacguccaccggcaagaccagccugccccgcugcuggcugaucuccaacggcagcuaccucaacgagaccaaguucuccgacgacaucgagcagcaggccgacaacaugaucacggagaugcugcagaaggaguacaucgaccggcaggggaagaccccgcugggccuggucgaccucuucguguucagcaccuccuucuaccugaucagcaucuuccugcaccucgugaagauccccacccaccgccacaucgucgggaagcccugccccaagccgcaccggcugaaccacaugggcaucugcuccugcgggcuguacaagcagcccggcgugcccgugcgcuggaagcgcugaggacuagucccuguucccagagcccacuuuuuuuucuuuuuuugaaauaaaauagccugucuuucagaucucaaaggcucuuuucagagccaccaaaaaaaaaaaaaaaaaaaaaaaaaaaaaaaaaaaaaaaaaaaaaaaaaaaaaaaaaaaaaaaaagaauu

SEQ ID NO: 23145 - RNA, 1717 nt, Artificial Sequence
  mRNA product Design a-1 (hSL-A64-N5) comprising derived and/or modified sequence from LASV(AV;Clade V)__CCA30314__GPCmut2 (opt1)
aggagagucccgcagucggcguccagcggcucugcuuguucgugugugugucguugcaggccuuauucaagcuuaccaugggccagaucgugaccuucuuccaggaggucccccacgugaucgaggaggugaugaacaucguccugaucgcccucagcauccuggccgugcugaaggggcucuacaacaucgcgaccugcggccugaucgggcugaucacguuccuccugcugugcggccgcuccugcagcuccaaccucuacaaggggguguacgagcugcagagccuggaccucaacauggagacccugaacaugugcaugccgcuguccugcaccaagaacaacagccaccacuacauccgggucggcaacgacaccggccucgagcugacgcugaccaacaccuccauccucaaccacaaguucugcaaccugagcgacgcccacaagaaggaccuguacgaccacgcccucauguccaucaucagcaccuuccaccuguccauccccaacuucaaccaguacgaggccaugagcugcgacuucaacgggggcaagaucuccgugcaguacaaccugagccacuccuacgccaucgacgcggccaaccacugcgggacgguggccaacggcauccuccagaccuucaugcgcauggccuggggcgggagcuacaucgcgcuggacuccggccgggggaacugggacugcaucaugaccagcuaccaguaccugaucauccagaacaccacgugggagaaccacugccaguucucccgccccagccccaucggcuaccucgggcugcugagccagcggacccgcgacaucuacaucucccggcgccggcgcggcaccuucaccuggacgcucagcgacuccgagggcaacgccacccccgggggcuacugccugacccgguggaugcugaucgaggccgagcucaagugcuucgggaacaccgccgucgccaagugcaacgagaagcacgacgaggaguucugcgacaugcugcgccuguucgacuucugcaagcaggcgaucagccggcucaaguccccggcccagaugagcauccagcugaucaacaaggccgugaacgcccugaucaacgaccagcucaucaugaagaaccaccuccgcgacaucaugggcauccccuacugcaacuacuccaaguacugguaccugaaccacacgaucaccgggaagaccagccugcccaagugcuggcugguguccaacggcagcuaccugaacgagacccacuucuccgacgacaucgagcagcaggccgacaacaugaucacggagaugcuccagaaggaguacauggagcggcagggcaagaccccgcuggggcuggucgaccuguucguguucagcaccuccuucuaccucaucagcaucuuccugcgccuggugaagauccccacccaccggcacaucgucggcaagcccugccccaagccgcaccgccucaaccacauggggaucugcuccugcggccuguacaagcagcccggggugcccgugcgguggaagcgcugaggacuagucccuguucccagagcccacuuuuuuuucuuuuuuugaaauaaaauagccugucuuucagaucucaaaggcucuuuucagagccaccaaaaaaaaaaaaaaaaaaaaaaaaaaaaaaaaaaaaaaaaaaaaaaaaaaaaaaaaaaaaaaaaagaauu

SEQ ID NO: 23146 - RNA, 1714 nt, Artificial Sequence
  mRNA product Design a-1 (hSL-A64-N5) comprising derived and/or modified sequence from LASV(Togo/2016/7082;Clade VI)__AMR44577__GPCmut2 (opt1)
aggagagucccgcagucggcguccagcggcucugcuuguucgugugugugucguugcaggccuuauucaagcuuaccaugggccagaucaucaccuucuuccaggaggugccccacgucaucgaggaggugaugaacaucgugcugaucgcccucagccugcuggccauccucaagggggucuacaacguggcgaccugcggcaucaucgggcuggugacguuccuguuccucugcggccgcuccugcagccugaucuacaagggguccuacgagcugcagacccucgagcugaacauggagacccugaacaugugcaugccgcucagcugcaccaagaacuccagccaccacuacauccgggucggcaacgagacgggccuggagcugacccucaccaacaccuccaucaucaaccacaaguucugcaaccugagcgacgcccacaagcgcaaccuguacgaccacgcccucauguccauccugagcacguuccaccuguccauccccaacuucaaccaguacgaggccaugagcugcgacuucaacgggggcaagaucuccgugcaguacaaccucagccacgccuacgcgguggacgccgccgagcacugcgggaccgucgccaacggcgugcugcagaccuucaugcggauggcguggggcggguccuacaucgcccuggacagcggccgcgggaacugggacugcaucaugaccuccuaccaguaccucaucauccagaacacgaccugggaggaccacugccaguucagccggcccucccccaucggcuaccuggggcugcucagccagcgcacccgggacaucuacaucagccgccggcgccggggcaccuucacguggacccuguccgacagcgagggcaacgagacccccgggggcuacugccugacccgcuggaugcucaucgaggccgagcugaagugcuucgggaacacggccguggccaagugcaacgagaagcacgacgaggaguucugcgacaugcugcggcuguucgacuucugcaagcaggcgauccagcgccugaaguccccggcccagaugagcauccagcugaucaacaaggccgucaacgcccucaucaacgaccagcugaucaugaagaaccaccuccgggacaugaugggcauccccuacugcaacuacuccaaguacugguaccucaaccacaccagcuccgggcgcaccagccugcccaagugcuggcugguguccaacggcagcuaccucaacgagacccacuucuccgacgacaucgagcagcaggccgacaacaugaucacggagaugcugcagaaggaguacaucgaccggcagggcaagaccccgcuggggcucguggaccuguucgucuucagcaccuccuucuaccugaucagcaucuuccugcaccucaucaagauccccacccaccgccacaucgugggcaagcccugccccaagccgcaccggcugaaccacauggggaucugcuccugcggccuguacaagcagcccggggugcccacgcgcuggaagcggugaggacuagucccuguucccagagcccacuuuuuuuucuuuuuuugaaauaaaauagccugucuuucagaucucaaaggcucuuuucagagccaccaaaaaaaaaaaaaaaaaaaaaaaaaaaaaaaaaaaaaaaaaaaaaaaaaaaaaaaaaaaaaaaaagaauu

SEQ ID NO: 23147 - RNA, 1714 nt, Artificial Sequence
  mRNA product Design a-1 (hSL-A64-N5) comprising derived and/or modified sequence from LASV(KAK-428;Clade n.d. (VII))__ANH09740__GPCmut2 (opt1)
aggagagucccgcagucggcguccagcggcucugcuuguucgugugugugucguugcaggccuuauucaagcuuaccaugggccagaucgugaccuucuuccaggaggucccccacgugaucgaggaggugaugaacaucguccugaucgcccucagccugcuggccauccucaaggggcuguacaacuucgcgaccugcggcgugaucgggcugaucacguuccuccugcugugcggccgcuccugcagcgccaccuacaaggggcaguacgagcuccagacccuggagcugaacauggagucccucaacaugugcaugccgcugagcugcaccaagaacaacucccaccacuacauccgggccggcaacaacacgggccuggagcucacccugaccaacaccagcaucaucucccacaaguucugcaaccugagcgacgcccacaagaagaaccucuacgaccacacgcugauguccaucaucaccaccuuccaccugagcauccccaacuucaaccaguacgaggccauguccugcgacuucaacgggggcaagaucagcauccaguacaaccucucccacagcuacgcgggggacgccgcccagcacugcggcaccguggccaacgggguccugcagacguucaugcgcauggcguggggcggcuccuaccuggcccucgacagcgggcggcgcggcugggacugcaucaucuccagcuaccaguaccugaucauccagaacaccaccugggacgaccacugccaguucucccggcccagccccaucggguaccugggcuucgugagccagaagacccgcgacaucuacaucucccggcgccggcgcggcacguucaccuggacccucagcgacuccgaggggcacgacaugccgggcggguacugccugacccgguggaugcugaucgaggccgaccucaagugcuucggcaacacggccguggccaagugcaacgagaagcacgacgaggaguucugcgacauguggcgccuguucgacuucugcaagcaggcgauccagcggcugaaggcccccgcccagaugaacauccagcucaucaacaaggccgucaacgcccugaucaacgaccagcugaugaugaagaaccaccuccgcgacaucauggggauccccuacugcaacuacagcaaguucugguaccugaacaacaccaccaccggccggacgucccugccccgcugcuggcucaucagcaacggcuccuaccugaacgagacccacuucagcgacgacaucgagcagcaggcggacaacaugaucaccgagaugcugcagaaggaguacauggaccggcaggggaagaccccgcucggccugguggaccuguucguguucuccacgagcuucuaccucaucaccaucuuccugcaccuggucaagauccccacccaccgccacaucguggggaagcccugccccaagccgcaccggcugaaccacaugggcaucugcuccugcgggcucuacaagcagcccggcgugcccguccgcuggaagcggugaggacuagucccuguucccagagcccacuuuuuuuucuuuuuuugaaauaaaauagccugucuuucagaucucaaaggcucuuuucagagccaccaaaaaaaaaaaaaaaaaaaaaaaaaaaaaaaaaaaaaaaaaaaaaaaaaaaaaaaaaaaaaaaaagaauu

SEQ ID NO: 23148 - RNA, 1714 nt, Artificial Sequence; identical to SEQ ID NO: 23142
  mRNA product Design a-1 (hSL-A64-N5) comprising derived and/or modified sequence from LASV(Pinneo-NIG-1969;Clade I)__AIT17836__GPCmut2 (opt1)

SEQ ID NO: 23149 - RNA, 1714 nt, Artificial Sequence
  mRNA product Design a-1 (hSL-A64-N5) comprising derived and/or modified sequence from LASV(ISTH0009-NIG-2011;Clade II)__AIT17404__GPCmut2 (opt1)
aggagagucccgcagucggcguccagcggcucugcuuguucgugugugugucguugcaggccuuauucaagcuuaccaugggccagaucaucaccuucuuccaggaggugccccacgucaucgaggaggugaugaacaucgugcugaucgcccucagccugcuggccauccucaaggggaucuacaacgucgcgaccugcggccuguucgggcugguguccuuccuccugcugugcggccgcagcugcuccacgaccuacaaggggguguacgagcuccagacccuggagcuggacauggccagccucaacaugugcaugccgcuguccugcaccaagaacaacagccaccacuacaucauggucggcaacgagacgggccuggagcucacccugaccaacaccuccaucaucaaccacaaguucugcaaccugagcgacgcccacaagaagaaccucuacgaccacgcccugauguccaucaucagcacguuccaccuguccauccccaacuucaaccaguacgaggccaugagcugcgacuucaacgggggcaagaucuccgugcaguacaaccucagccacgcguacgccguggacgccgccaaccacugcgggaccaucgcgaacggcguccugcagaccuucaugcggauggccuggggcggguccuacaucgcccuggacagcggcaagggguccugggacugcaucaugaccagcuaccaguaccucaucauccagaacacgaccugggaggaccacugccaguucucccgccccagccccaucggcuaccuggggcugcucagccagcggacccgcgacaucuacaucucccggcgccggcgcggcaccuucacguggacccugagcgacuccgagggcaacgagacccccgggggcuacugccugacccgguggaugcucaucgaggccgagcugaagugcuucgggaacacggccguggcgaagugcaacgagaagcacgacgaggaguucugcgacaugcugcgccucuucgacuucugcaagcaggccauccggcgccugaagaccccggcccagaugagcauccagcugaucaacaaggccgugaacgcccucaucaacgaccagcugaucaugaagaaccaccuccgggacaucaugggcauccccuacugcaacuacuccaaguacugguaccugaaccacaccgucaccgggaagacgagccugccccgcugcuggcugguguccaacggcagcuaccucaacgagacccacuucuccgacgacaucgagcagcaggcggacaacaugaucaccgagcugcugcagaaggaguacauggaccggcagggcaagaccccgcucgggcugguggaccuguucgucuucagcacguccuucuaccugaucagcaucuuccuccaccugaucaagauccccacccaccgccacaucaccggcaagcccugccccaagccgcaccggcugaaccacauggggaucugcuccugcggccucuacaagcaccccggggugcccgugaaguggaagcgcugaggacuagucccuguucccagagcccacuuuuuuuucuuuuuuugaaauaaaauagccugucuuucagaucucaaaggcucuuuucagagccaccaaaaaaaaaaaaaaaaaaaaaaaaaaaaaaaaaaaaaaaaaaaaaaaaaaaaaaaaaaaaaaaaagaauu

SEQ ID NO: 23150 - RNA, 1714 nt, Artificial Sequence
  mRNA product Design a-1 (hSL-A64-N5) comprising derived and/or modified sequence from LASV(ISTH2010-NIG-2012;Clade II)__AIT17482__GPCmut2 (opt1)
aggagagucccgcagucggcguccagcggcucugcuuguucgugugugugucguugcaggccuuauucaagcuuaccaugggccagaucaucaccuucuuccaggaggugccccacgucaucgaggaggugaugaacaucgugcugaucgcccucagccugcuggccauccucaaggggaucuacaacgucgcgaccugcggccuguucgggcugguguccuuccuccugcugugcggccgcagcugcuccacgaccuacaaggggguguacgagcuccagacccuggagcuggacauggccagccucaacaugugcaugccgcuguccugcaccaagaacaacagccaccacuacaucauggucggcaacgagacgggccuggagcucacccugaccaacaccuccaucaucaaccacaaguucugcaaccugagcgacgcccacaagaagaaccucuacgaccacgcccugauguccaucaucagcacguuccaccuguccauccccaacuucaaccaguacgaggccaugagcugcgacuucaacgggggcaagaucuccgugcaguacaaccucagccacgcguacgccguggacgccgccaaccacugcgggaccaucgcgaacggcguccugcagaccuucaugcggauggccuggggcggguccuacaucgcccuggacagcggcaagggguccugggacugcaucaugaccagcuaccaguaccucaucauccagaacaucacgugggaggaccacugccaguucucccgccccagccccaucggcuaccuggggcugcucagccagcggacccgcgacaucuacaucucccggcgccggcgcggcaccuucaccuggacgcugagcgacuccgagggcaacgagacccccgggggcuacugccugacccgguggaugcucaucgaggccgagcugaagugcuucgggaacaccgccguggcgaagugcaacgagaagcacgacgaggaguucugcgacaugcugcgccucuucgacuucugcaagcaggccauccggcgccugaagacgccggcccagaugagcauccagcugaucaacaaggccgugaacgcccucaucaacgaccagcugaucaugaagaaccaccuccgggacaucaugggcauccccuacugcaacuacuccaaguacugguaccugaaccacaccgucaccgggaagaccagccugccccgcugcuggcugguguccaacggcagcuaccucaacgagacgcacuucuccgacgacaucgagcagcaggcggacaacaugaucaccgagcugcugcagaaggaguacaucgaccggcagggcaagaccccgcucgggcugguggaccuguucgucuucagcaccuccuucuaccugaucagcaucuuccuccaccuggugaagauccccacgcaccgccacguggucggcaagcccugccccaagccgcaccggcugaaccacauggggaucugcuccugcggccucuacaagcaccccggggugcccgugaaguggaagcgcugaggacuagucccuguucccagagcccacuuuuuuuucuuuuuuugaaauaaaauagccugucuuucagaucucaaaggcucuuuucagagccaccaaaaaaaaaaaaaaaaaaaaaaaaaaaaaaaaaaaaaaaaaaaaaaaaaaaaaaaaaaaaaaaaagaauu

SEQ ID NO: 23151 - RNA, 1714 nt, Artificial Sequence
  mRNA product Design a-1 (hSL-A64-N5) comprising derived and/or modified sequence from LASV(Lassa virus/H.sapiens-wt/NGA/2015/ISTH_0543;Clade II)__AVO03639__GPCmut2 (opt1)
aggagagucccgcagucggcguccagcggcucugcuuguucgugugugugucguugcaggccuuauucaagcuuaccaugggccagaucaucaccuucuuccaggaggugccccacgucaucgaggaggugaugaacaucgugcugaucgcccucagccugcuggccauccucaaggggaucuacaacgucgcgaccugcggccuguucgggcugguguccuuccuccugcugugcggccgcagcugcuccacgaccuacaaggggguguacgagcuccagacccuggagcuggacauggccaaccucaacaugugcaugccgcugagcugcaccaagaacaacucccaccacuacaucauggucggcaacgagacgggccuggagcucacccugaccaacaccagcaucaucaaccacaaguucugcaaccuguccgacgcccacaagaagaaccucuacgaccacgcccugaugagcaucaucuccacguuccaccugagcauccccaacuucaaccaguacgaggccauguccugcgacuucaacgggggcaagaucagcgugcaguacaaccucucccacaccuacgcgguggacgccgccaaccacugcgggaccaucgccaacggcguccugcagaccuucaugcggauggcguggggcgggagcuacaucgcccuggacuccggcaaggggagcugggacugcaucaugacguccuaccaguaccucgugauccagaacaccaccugggaggaccacugccaguucagccgccccucccccaucggcuaccuggggcugcucagccagcggacccgcgacaucuacaucagccggcgccggcgcggcacguucaccuggacccuguccgacagcgagggcaacgagacccccgggggcuacugccugacgcgguggaugcucaucgaggccgagcugaagugcuucgggaacaccgccguggccaagugcaacgagaagcacgacgaggaguucugcgacaugcugcgccucuucgacuucugcaagcaggcgauccggcgccugaagaccccggcccagauguccauccagcugaucaacaaggccgucaacgcccucaucaacgaccagcugaucaugaagaaccaccuccgggacaucaugggcauccccuacugcaacuacagcaaguacugguaccugaaccacaccgugacggggaagaccucccugccccgcugcuggcuggugagcaacggcuccuaccucaacgagacccacuucagcgacgacaucgagcagcaggccgacaacaugaucaccgagcugcugcagaaggaguacaucgaccggcagggcaagacgccgcucgggcuggucgaccuguucguguucuccaccagcuucuaccugaucuccaucuuccuccaccuggugaagauccccacccaccgccacaucaccggcaagcccugccccaagccgcaccggcugaaccacauggggaucugcagcugcggccucuacaagcaccccgggguccccgugaaguggaagcgcugaggacuagucccuguucccagagcccacuuuuuuuucuuuuuuugaaauaaaauagccugucuuucagaucucaaaggcucuuuucagagccaccaaaaaaaaaaaaaaaaaaaaaaaaaaaaaaaaaaaaaaaaaaaaaaaaaaaaaaaaaaaaaaaaagaauu

SEQ ID NO: 23152 - RNA, 1714 nt, Artificial Sequence
  mRNA product Design a-1 (hSL-A64-N5) comprising derived and/or modified sequence from LASV(Lassa virus/H.sapiens-wt/NGA/2016/ISTH_0009;Clade II)__AVO03571__GPCmut2 (opt1)
aggagagucccgcagucggcguccagcggcucugcuuguucgugugugugucguugcaggccuuauucaagcuuaccaugggccagaucaucaccuucuuccaggaggugccccacgucaucgaggaggugaugaacaucgugcugaucgcccucagccugcuggccauccucaaggggaucuacaacgucgcgaccugcggccugcuggggcucguguccuuccugcugcucugcggccgcagcugcuccacgaccuacaaggggguguacgagcugcagacccuggagcucgacauggccagccugaacaugugcaugccgcuguccugcaccaagaacaacagccaccacuacaucauggucggcaacgagacgggccucgagcugacccugaccaacaccuccaucaucaaccacaaguucugcaaccucagcgacgcccacaagaagaaccuguacgaccacgcccugauguccaucaucagcacguuccaccucuccauccccaacuucaaccaguacgaggccaugagcugcgacuucaacgggggccggaucuccgugcaguacaaccugagccacuccuacgcgguggacgccgccaaccacugcgggaccaucgccaacggcguccugcagaccuucaugcgcauggcguggggcgggagcuacaucgcccucgacuccggcaaggggagcugggacugcaucaugaccuccuaccaguaccugaucauccagaacacgaccugggaggaccacugccaguucagccggcccagccccaucggcuaccuggggcuccugucccagcgcacccgggacaucuacaucagccgccggcgccggggcaccuucacguggacccuguccgacagcgagggcaacgagacccccgggggcuacugccucacccgcuggaugcugaucgaggccgagcugaagugcuucgggaacacggccguggccaagugcaacgagaagcacgacgaggaguucugcgacaugcuccggcuguucgacuucugcaagcaggcgauccgccggcugaagaccccggcccagauguccauccagcucaucaacaaggccgugaacgcccugaucaacgaccagcugaucaugaagaaccaccuccgcgacaucaugggcauccccuacugcaacuacagcaaguacugguaccugaaccacaccgucaccgggaagacgucccugccccggugcuggcucgugagcaacggcuccuaccugaacgagacccacuucagcgacgacaucgagcagcaggccgacaacaugaucaccgagcugcuccagaaggaguacaucgaccgccagggcaagaccccgcuggggcugguggaccuguucgucuucuccacgagcuucuaccucaucuccaucuuccugcaccuggugaagauccccacccaccggcacaucaccggcaagcccugccccaagccgcaccgccucaaccacauggggaucugcagcugcggccuguacaaccaccccggggugcccgucaaguggaagcggugaggacuagucccuguucccagagcccacuuuuuuuucuuuuuuugaaauaaaauagccugucuuucagaucucaaaggcucuuuucagagccaccaaaaaaaaaaaaaaaaaaaaaaaaaaaaaaaaaaaaaaaaaaaaaaaaaaaaaaaaaaaaaaaaagaauu

SEQ ID NO: 23153 - RNA, 1714 nt, Artificial Sequence
  mRNA product Design a-1 (hSL-A64-N5) comprising derived and/or modified sequence from LASV(Lassa virus/H.sapiens-wt/NGA/2016/ISTH_0017;Clade II)__AVO03567__GPCmut2 (opt1)
aggagagucccgcagucggcguccagcggcucugcuuguucgugugugugucguugcaggccuuauucaagcuuaccaugggccagaucaucaccuucuuccaggaggugccccacgucaucgaggaggugaugaacaucgugcugaucgcccucagccugcuggccauccucaaggggaucuacaacgucgcgaccugcggccuguucgggcugguguccuuccuccugcugugcggccgcagcugcuccacgaccuacaaggggguguacgagcuccagacccuggagcuggacauggccagccucaacaugugcaugccgcuguccugcaccaagaacaacagccaccacuacaucauggucggcaacgagacgggccuggagcucacccugaccaacaccuccaucaucaaccacaaguucugcaaccugagcgacgcccacaagaagaaccucuacgaccacgcccugauguccaucaucagcacguuccaccuguccauccccaacuucaaccaguacgaggccaugagcugcgacuucaacgggggcaagaucuccgugcaguacaaccucagccacaccuacgcgaucgacgccgccaaccacugcgggaccaucgccaacggcgugcugcagaccuucaugcggauggcguggggcggguccuacaucgcccuggacagcggcaagggguccugggacugcaucaugacgagcuaccaguaccucaucauccagaacaccaccugggaggaccacugccaguucucccgccccagccccaucggcuaccuggggcugcucagccagcggacccgcgacaucuacaucucccggcgccggcgcggcacguucaccuggacccugagcgacuccgagggcaacgagacccccgggggcuacugccugacgcgguggaugcucaucgaggccgagcugaagugcuucgggaacaccgccgucgccaagugcaacgagaagcacgacgaggaguucugcgacaugcugcgccucuucgacuucugcaagcaggcgauccggcgccugaagaccccggcccagaugagcauccagcugaucaacaaggccgugaacgcccucaucaacgaccagcugaucaugaagaaccaccuccgggacaucaugggcauccccuacugcaacuacuccaaguacugguaccugaaccacaccgugacggggaagaccagccugccccgcugcuggcuggucuccaacggcagcuaccucaacgagacccacuucuccgacgacaucgagcagcaggccgacaacaugaucaccgagcugcugcagaaggaguacauggaccggcagggcaagacgccgcucgggcugguggaccuguucguguucagcaccuccuucuaccugaucagcaucuuccuccaccugguccgcauccccacccaccggcacgugaucggcaagcccugccccaagccgcaccgccugaaccacauggggaucugcuccugcggccucuacaagcaccccggggugcccgucaaguggaagcggugaggacuagucccuguucccagagcccacuuuuuuuucuuuuuuugaaauaaaauagccugucuuucagaucucaaaggcucuuuucagagccaccaaaaaaaaaaaaaaaaaaaaaaaaaaaaaaaaaaaaaaaaaaaaaaaaaaaaaaaaaaaaaaaaagaauu

SEQ ID NO: 23154 - RNA, 1714 nt, Artificial Sequence
  mRNA product Design a-1 (hSL-A64-N5) comprising derived and/or modified sequence from LASV(Lassa virus/H.sapiens-wt/NGA/2018/ISTH_0959;Clade II)__AVV65099__GPCmut2 (opt1)
aggagagucccgcagucggcguccagcggcucugcuuguucgugugugugucguugcaggccuuauucaagcuuaccaugggccagaucaucaccuucuuccaggaggugccccacgucaucgaggaggugaugaacaucgugcugaucgcccucagccugcuggccauccucaaggggaucuacaacgucgugaccugcggccuguucgggcugguguccuuccuccugcugugcggccgcagcugcuccacgaccuacaagggggucuacgagcuccagacccuggagcuggacauggcgagccucaacaugugcaugccgcuguccugcaccaagaacaacagccaccacuacaucauggugggcaacgagacgggccuggagcucacccugaccaacaccuccaucaucaaccacaaguucugcaaccugagcgacgcccacaagaagaaccucuacgaccacgcccugauguccaucaucagcacguuccaccuguccauccccaacuucaaccaguacgaggccaugagcugcgacuucaacgggggcaagaucuccgugcaguacaaccucagccacgccuacgcgaucgacgccgccaaccacugcgggaccaucgccaacggcguccugcagaccuucaugcggauggcguggggcggguccuacaucgcccuggacagcggcaagggguccugggacugcaucaugaccagcuaccaguaccucaucauccagaacacgaccugggaggaccacugccaguucucccgccccagccccaucggcuaccuggggcugcucagccagcggacccgcgacaucuacaucucccggcgccggcgcggcaccuucacguggacccugagcgacuccgagggcaacgagacccccgggggcuacugccugacccgguggaugcucaucgaggccgagcugaagugcuucgggaacacggccguggccaagugcaacgagaagcacgacgaggaguucugcgacaugcugcgccucuucgacuucugcaagcaggcgauccggcgccugaagaccccggcccagaugagcauccagcugaucaacaaggccgugaacgcccucaucaacgaccagcugaucaugaagaaccaccuccgggacaucaugggcauccccuacugcaacuacuccaaguacugguaccugaaccacaccgucaccgggaagacgagccugccccgcugcuggcugguguccaacggcagcuaccucaacgagacccacuucuccgacgacaucgagcagcaggccgacaacaugaucaccgagcugcugcagaaggaguacaucgaccggcagggcaagaccccgcucgggcugguggaccuguucgucuucagcacguccuucuaccugaucagcaucuuccuccaccuggugaagauccccacccaccgccacgugaucggcaagcccugccccaagccgcaccggcugaaccacauggggaucugcuccugcggccucuacaagcaccccgggguccccgugaaguggaagcgcugaggacuagucccuguucccagagcccacuuuuuuuucuuuuuuugaaauaaaauagccugucuuucagaucucaaaggcucuuuucagagccaccaaaaaaaaaaaaaaaaaaaaaaaaaaaaaaaaaaaaaaaaaaaaaaaaaaaaaaaaaaaaaaaaagaauu

SEQ ID NO: 23155 - RNA, 1714 nt, Artificial Sequence
  mRNA product Design a-1 (hSL-A64-N5) comprising derived and/or modified sequence from LASV(LASV003-NIG-2008;Clade II)__AIT17580__GPCmut2 (opt1)
aggagagucccgcagucggcguccagcggcucugcuuguucgugugugugucguugcaggccuuauucaagcuuaccaugggccagaucaucaccuucuuccaggaggugccccacgucaucgaggaggugaugaacaucgugcugaucgcccucagccugcuggccauccucaaggggaucuacaacgucgcgaccugcggccuguucgggcugguguccuuccuccugcugugcggccgcagcugcuccacgaccuacaaggggguguacgagcuccagacccuggagcuggacauggccagccucaacaugugcaugccgcuguccugcaccaagaacaacagccaccacuacaucauggucggcaacgagacgggccuggagcucacccugaccaacaccuccaucaucaaccacaaguucugcaaccugagcgacgcccacaagaagaaccucuacgaccacgcccugauguccaucaucagcacguuccaccuguccauccccaacuucaaccaguacgaggccaugagcugcgacuucaacgggggcaagaucuccgugcaguacaaccucagccacaccuacgcgguggacgccgccaaccacugcgggaccaucgccaacggcguccugcagaccuucaugcggauggcguggggcggguccuacaucgcccuggacagcggcaagggguccugggacugcaucaugacgagcuaccaguaccucaucauccagaacaccaccugggaggaccacugccaguucucccgccccagccccaucggcuaccuggggcugcucagccagcggacccgcgacaucuacaucucccggcgccggcgcggcacguucaccuggacccugagcgacuccgagagcaacgagaccccgggcggguacugccugacgcgguggaugcucaucgaggccgagcugaagugcuucggcaacaccgccguggccaagugcaacgagaagcacgacgaggaguucugcgacaugcugcgccucuucgacuucugcaagcaggcgauccggcgccugaaggcccccgcccagauguccauccagcugaucaacaaggccgugaacgcccucaucaacgaccagcugaucaugaagaaccaccuccgggacaucauggggauccccuacugcaacuacagcaaguacugguaccugaaccacaccgucaccggccgcacgucccugccccggugcuggcuggugagcaacggguccuaccucaacgagacccacuucagcgacgacaucgagcagcaggcggacaacaugaucaccgagcugcugcagaaggaguacauggaccgccagggcaagaccccgcucggccugguggaccuguucgucuucuccacgagcuucuaccugaucuccaucuuccuccaccuggugaagauccccacccaccggcacgugaucgggaagcccugccccaagccgcaccgccugaaccacaugggcaucugcagcugcgggcucuacaagcaccccggcguccccgugaaguggaagcggugaggacuagucccuguucccagagcccacuuuuuuuucuuuuuuugaaauaaaauagccugucuuucagaucucaaaggcucuuuucagagccaccaaaaaaaaaaaaaaaaaaaaaaaaaaaaaaaaaaaaaaaaaaaaaaaaaaaaaaaaaaaaaaaaagaauu

SEQ ID NO: 23156 - RNA, 1714 nt, Artificial Sequence
  mRNA product Design a-1 (hSL-A64-N5) comprising derived and/or modified sequence from LASV(LASV035-NIG-2009;Clade II)__AIT17588__GPCmut2 (opt1)
aggagagucccgcagucggcguccagcggcucugcuuguucgugugugugucguugcaggccuuauucaagcuuaccaugggccagaucaucaccuucuuccaggaggugccccacgucaucgaggaggugaugaacaucgugcugaucgcccucagccugcuggccauccucaaggggaucuacaacgucgcgaccugcggccuguucgggcugguguccuuccuccugcugugcggccgcagcugcuccacgaccuacaaggggguguacgagcuccagacccuggagcuggacauggccagccucaacaugugcaugccgcuguccugcaccaagaacaacagccaccacuacaucauggucggcaacgagacgggccuggagcucacccugaccaacaccuccaucaucaaccacaaguucugcaaccugagcgacgcccacaagaagaaccucuacgaccacgcccugauguccaucaucagcacguuccaccuguccauccccaacuucaaccaguacgaggccaugagcugcgacuucaacgggggcaagaucuccgugcaguacaaccucagccacgcguacgccguggacgccgccaaccacugcgggaccaucgcgaacggcguccugcagaccuucaugcggauggccuggggcggguccuacaucgcccuggacagcggcaagggguccugggacugcaucaugaccagcuaccaguaccucaucauccagaacacgaccugggaggaccacugccaguucucccgccccagccccaucggcuaccuggggcugcucagccagcggacccgcgacaucuacaucucccggcgccggcgcggcaccuucacguggacccugagcgacuccgagggcaacgagacccccgggggcuacugccugacccgguggaugcucaucgaggccgagcugaagugcuucgggaacacggccguggcgaagugcaacgagaagcacgacgaggaguucugcgacaugcugcgccucuucgacuucugcaagcaggccauccggcgccugaaggccccggcccagaugagcauccagcugaucaacaaggccgugaacgcgcucaucaacgaccagcugaucaugaagaaccaccuccgggacaucaugggcauccccuacugcaacuacuccaaguacugguaccugaaccacaccgucaccgggaagaccagccugccccgcugcuggcugguguccaacggcagcuaccucaacgagacgcacuucuccgacgacaucgagcagcaggccgacaacaugaucaccgagcugcugcagaaggaguacaucgaccggcagggcaagaccccgcucgggcugguggaccuguucgucuucagcaccuccuucuaccugaucagcaucuuccuccaccuggugaagauccccacgcaccgccacgugaucggcaagcccugccccaagccgcaccggcugaaccacauggggaucugcuccugcggccucuacaagcaccccgggguccccgugaaguggaagcgcugaggacuagucccuguucccagagcccacuuuuuuuucuuuuuuugaaauaaaauagccugucuuucagaucucaaaggcucuuuucagagccaccaaaaaaaaaaaaaaaaaaaaaaaaaaaaaaaaaaaaaaaaaaaaaaaaaaaaaaaaaaaaaaaaagaauu

SEQ ID NO: 23157 - RNA, 1714 nt, Artificial Sequence
  mRNA product Design a-1 (hSL-A64-N5) comprising derived and/or modified sequence from LASV(LASV1000-NIG-2009;Clade II)__AIT17782__GPCmut2 (opt1)
aggagagucccgcagucggcguccagcggcucugcuuguucgugugugugucguugcaggccuuauucaagcuuaccaugggccagaucaucaccuucuuccaggaggugccccacgucaucgaggaggugaugaacaucgugcugaucgcccucagccugcuggccauccucaaggggaucuacaacgucgcgaccugcggccuguucgggcugguguccuuccuccugcugugcggccgcagcugcuccacgaccuacaaggggguguacgagcuccagacccuggagcuggacauggccagccucaacaugugcaugccgcuguccugcaccaagaacaacagccaccacuacaucauggucggcaacgagacgggccuggagcucacccugaccaacaccuccaucaucaaccacaaguucugcaaccugagcgacgcccacaagaagaaccucuacgaccacgcccugauguccaucaucagcacguuccaccuguccauccccaacuucaaccaguacgaggccaugagcugcgacuucaacgggggcaagaucuccgugcaguacaaccucagccacaccuacgcgguggacgccgccaaccacugcgggaccaucgccaacggcguccugcagaccuucaugcggauggcguggggcggguccuacaucgcccuggacagcggcaagggguccugggacugcaucaugacgagcuaccaguaccucaucauccagaacaccaccugggaggaccacugccaguucucccgccccagccccaucggcuaccuggggcugcucagccagcggacccgcgacaucuacaucucccggcgccggcgcggcacguucaccuggacccugagcgacuccgagggcaacgagacccccgggggcuacugccugacgcgguggaugcucaucgaggccgagcugaagugcuucgggaacaccgccguggccaagugcaacgagaagcacgacgaggaguucugcgacaugcugcgccucuucgacuucugcaagcaggcgaucaagcggcugaagaccccggcccagaugagcauccagcugaucaacaaggccgugaacgcccucaucaacgaccagcugaucaugaagaaccaccuccgcgacaucaugggcauccccuacugcaacuacuccaaguacugguaccugaaccacaccgucacggggaagaccagccugccccggugcuggcugguguccaacggcagcuaccucaacgagacccacuucuccgacgacaucgagcagcaggccgacaacaugaucaccgagcugcugcagaaggaguacaucgaccgccagggcaagacgccgcucgggcugguggaccuguucgucuucagcaccuccuucuaccugaucagcaucuuccuccaccuggugaagauccccacccaccggcacguggucggcaagcccugccccaagccgcaccgccugaaccacauggggaucugcuccugcggccucuacaagcaccccggggugcccgugaaguggaagcggugaggacuagucccuguucccagagcccacuuuuuuuucuuuuuuugaaauaaaauagccugucuuucagaucucaaaggcucuuuucagagccaccaaaaaaaaaaaaaaaaaaaaaaaaaaaaaaaaaaaaaaaaaaaaaaaaaaaaaaaaaaaaaaaaagaauu

SEQ ID NO: 23158 - RNA, 1714 nt, Artificial Sequence
  mRNA product Design a-1 (hSL-A64-N5) comprising derived and/or modified sequence from LASV(LASV221-NIG-2010;Clade II)__AIT17624__GPCmut2 (opt1)
aggagagucccgcagucggcguccagcggcucugcuuguucgugugugugucguugcaggccuuauucaagcuuaccaugggccagaucaucaccuucuuccaggaggugccccacgucaucgaggaggugaugaacaucgugcugaucgcccucagccugcuggccauccucaaggggaucuacaacgucgcgaccugcggccuguucgggcugguguccuuccuccugcugugcggccgcagcugcuccacgaccuacaaggggguguacgagcuccagacccuggagcuggacauggccagccucaacaugugcaugccgcuguccugcaccaagaacaacagccaccacuacaucauggucggcaacgagacgggccuggagcucacccugaccaacaccuccaucaucaaccacaaguucugcaaccugagcgacgcccacaagaagaaccucuacgaccacgcccugauguccaucaucagcacguuccaccuguccauccccaacuucaaccaguacgaggccaugagcugcgacuucaacgggggcaagaucuccgugcaguacaaccucagccacaccuacgcgaucgacgccgccaaccacugcgggaccaucgccaacggcgugcugcagaccuucaugcggauggcguggggcggguccuacaucgcccuggacagcggcaagggguccugggacugcaucaugacgagcuaccaguaccucaucauccagaacaccaccugggaggaccacugccaguucucccgccccagccccaucggcuaccuggggcugcucagccagcggacccgcgacaucuacaucucccggcgccggcgcggcacguucaccuggacccugagcgacuccgagggcaacgagacccccgggggcuacugccugacgcgguggaugcucaucgaggccgagcugaagugcuucgggaacaccgccgucgccaagugcaacgagaagcacgacgaggaguucugcgacaugcugcgccucuucgacuucugcaagcaggcgauccggcgccugaagaccccggcccagaugagcauccagcugaucaacaaggccgugaacgcccucaucaacgaccagcugaucaugaagaaccaccuccgggacaucaugggcauccccuacugcaacuacuccaaguacugguaccugaaccacaccgugacggggaagaccagccugccccgcugcuggcuggucuccaacggcagcuaccucaacgagacccacuucuccgacgacaucgagcagcaggccgacaacaugaucaccgagaugcugcagaaggaguacauggaccggcagggcaagacgccgcuggggcucguggaccuguucguguucagcaccuccuucuaccugaucagcaucuuccugcaccucgucaagauccccacccaccgccacgugaucggcaagcccugccccaagccgcaccggcugaaccacauggggaucugcuccugcggccuguacaagcaccccggggugcccgucaaguggaagcgcugaggacuagucccuguucccagagcccacuuuuuuuucuuuuuuugaaauaaaauagccugucuuucagaucucaaaggcucuuuucagagccaccaaaaaaaaaaaaaaaaaaaaaaaaaaaaaaaaaaaaaaaaaaaaaaaaaaaaaaaaaaaaaaaaagaauu

SEQ ID NO: 23159 - RNA, 1714 nt, Artificial Sequence
  mRNA product Design a-1 (hSL-A64-N5) comprising derived and/or modified sequence from LASV(LASV237-NIG-2010;Clade II)__AIT17638__GPCmut2 (opt1)
aggagagucccgcagucggcguccagcggcucugcuuguucgugugugugucguugcaggccuuauucaagcuuaccaugggccagaucaucaccuucuuccaggaggugccccacgucaucgaggaggugaugaacaucgugcugaucgcccucagccugcuggccauccucaaggggaucuacaacgucgcgaccugcggccuguucgggcugguguccuuccuccugcugugcggccgcagcugcuccacgaccuacaaggggguguacgagcuccagacccuggagcuggacauggccagccucaacaugugcaugccgcuguccugcaccaagaacaacagccaccacuacaucauggucggcaacgagacgggccuggagcucacccugaccaacaccuccaucaucaaccacaaguucugcaaccugagcgacgcccacaagaaggaccucuacgaccacgcccugauguccaucaucagcacguuccaccuguccauccccaacuucaaccaguacgaggccaugagcugcgacuucaacgggggcaagaucuccgugcaguacaaccucagccacaccuacgcgguggacgccgccaaccacugcgggaccaucgccaacggcguccugcagaccuucaugcggauggcguggggcggguccuacaucgcccuggacagcggcaagggguccugggacugcaucaugacgagcuaccaguaccucaucauccagaacaccaccugggaggaccacugccaguucucccgccccagccccaucggcuaccuggggcugcucagccagcggacccgcgacaucuacaucucccggcgccggcgcggcacguucaccuggacccugagcgacuccgagggcaacgagacccccgggggcuacugccugacgcgguggaugcucaucgaggccgagcugaagugcuucgggaacaccgccguggccaagugcaacgagaagcacgacgaggaguucugcgacaugcugcgccucuucgacuucugcaagcaggcgauccggcgccugaagaccccggcccagaugagcauccagcugaucaacaaggccgugaacgcccucaucaacgaccagcugaucaugaagaaccaccuccgggacaucaugggcauccccuacugcaacuacuccaaguacugguaccugaaccacaccgucacggggaagaccagccugccccgcugcuggcugguguccaacggcagcuaccucaacgagacccacuucuccgacgacaucgagcagcaggccgacaacaugaucaccgagcugcugcagaaggaguacauggaccggcagggcaagacgccgcucgggcugguggaccuguucgucuucagcaccuccuucuaccugaucagcaucuuccuccaccugaucaagauccccacccaccgccacaucaccggcaagcccugccccaagccgcaccggcugaaccacauggggaucugcuccugcggccucuacaagcaccccggggugcccgugaaguggaagcgcugaggacuagucccuguucccagagcccacuuuuuuuucuuuuuuugaaauaaaauagccugucuuucagaucucaaaggcucuuuucagagccaccaaaaaaaaaaaaaaaaaaaaaaaaaaaaaaaaaaaaaaaaaaaaaaaaaaaaaaaaaaaaaaaaagaauu

SEQ ID NO: 23160 - RNA, 1714 nt, Artificial Sequence
  mRNA product Design a-1 (hSL-A64-N5) comprising derived and/or modified sequence from LASV(LASV253-NIG-2011;Clade II)__AIT17670__GPCmut2 (opt1)
aggagagucccgcagucggcguccagcggcucugcuuguucgugugugugucguugcaggccuuauucaagcuuaccaugggccagaucaucaccuucuuccaggaggugccccacgucaucgaggaggugaugaacaucgugcugaucgcccucagccugcuggccauccucaaggggaucuacaacgucgcgaccugcggccuguucgggcugguguccuuccuccugcugugcggccgcagcugcuccacgaccuacaaggggguguacgagcuccagacccuggagcuggacauggccagccucaacaugugcaugccgcuguccugcaccaagaacaacagccaccacuacaucauggucggcaacgagacgggccuggagcucacccugaccaacaccuccaucaucaaccacaaguucugcaaccugagcgacgcccacaagaagaaccucuacgaccacgcccugauguccaucaucagcacguuccaccuguccauccccaacuucaaccaguacgaggccaugagcugcgacuucaacgggggcaagaucuccgugcaguacaaccucagccacaccuacgcgguggacgccgccaaccacugcgggaccaucgccaacggcguccugcagaccuucaugcggauggcguggggcggguccuacaucgcccuggacagcggcaagggguccugggacugcaucaugacgagcuaccaguaccucaucauccagaacaccaccugggaggaccacugccaguucucccgccccagccccaucggcuaccuggggcugcucagccagcggacccgcgacaucuacaucucccggcgccggcgcggcacguucaccuggacccugagcgacuccgagggcaacgagacccccgggggcuacugccugacgcgguggaugcucaucgaggccgagcugaagugcuucgggaacaccgccguggccaagugcaacgagaagcacgacgaggaguucugcgacaugcugcgccucuucgacuucugcaagcaggcgauccggcgccugaaggccccggcccagaugagcauccagcugaucaacaaggccgugaacgcccucaucaacgaccagcugaucaugaagaaccaccuccgggacaucaugggcauccccuacugcaacuacuccaaguacugguaccugaaccacaccgucaccgggcgcacgagccugccccggugcuggcugguguccaacggcagcuaccucaacgagacccacuucuccgacgacaucgagcagcaggcggacaacaugaucaccgagcugcugcagaaggaguacaucgaccgccagggcaagaccccgcucgggcugguggaccuguucgucuucagcacguccuucuaccugaucagcaucuuccuccaccuggugaagauccccacccaccggcacaucaucggcaagcccugccccaagccgcaccgccugaaccacauggggaucugcuccugcggccucuacaagcaccccggggugcccgucaaguggaagcggugaggacuagucccuguucccagagcccacuuuuuuuucuuuuuuugaaauaaaauagccugucuuucagaucucaaaggcucuuuucagagccaccaaaaaaaaaaaaaaaaaaaaaaaaaaaaaaaaaaaaaaaaaaaaaaaaaaaaaaaaaaaaaaaaagaauu

SEQ ID NO: 23161 - RNA, 1714 nt, Artificial Sequence
  mRNA product Design a-1 (hSL-A64-N5) comprising derived and/or modified sequence from LASV(LASV254-NIG-2011;Clade II)__AIT17674__GPCmut2 (opt1)
aggagagucccgcagucggcguccagcggcucugcuuguucgugugugugucguugcaggccuuauucaagcuuaccaugggccagaucaucaccuucuuccaggaggugccccacgucaucgaggaggugaugaacaucgugcugaucgcccucagccugcuggccauccucaaggggaucuacaacgucgcgaccugcggccuguucgggcugguguccuuccuccugcugugcggccgcagcugcuccacgaccuacaaggggguguacgagcuccagacccuggagcuggacaugaccaaccucaacaugugcaugccgcugagcugcacgaagaacaacucccaccacuacaucauggucggcaacgagaccggccuggagcucacccugaccaacacgagcaucaucaaccacaaguucugcaaccuguccgacgcccacaagaagaaccucuacaaccacgcccugaugagcaucaucuccaccuuccaccugagcauccccaacuucaaccaguacgaggccauguccugcgacuucaacgggggcaagaucagcgugcaguacaaccucucccacagcuacgccguggacgcggccaaccacugcgggaccaucgccaacggcguccugcagaccuucaugcggauggccuggggcggguccuacaucgcgcuggacagcggcaaggggaacugggacugcaucaugacguccuaccaguaccucaucauccagaacaccaccugggaggaccacugccaguucagccgccccucccccaucggcuaccuggggcugcucagccagcggacccgcgacaucuacaucagccggcgccggcgcggcacguucaccuggacccuguccgacagcgagggcaacgagacccccgggggcuacugccugacgcgguggaugcucaucgaggccgagcugaagugcuucgggaacaccgccguggccaagugcaacgagaagcacgacgaggaguucugcgacaugcugcgccucuucgacuucugcaagcaggccauccggcgccugaagaccccggcgcaggccaacauccagcugaucaacaaggccgugaacgcccucaucaacgaccagcugaucaugaagaaccaccuccgggacaucaugggcauccccuacugcaacuacuccaaguacugguaccugaaccacaccgucacggggaagaccagccugccccgcugcuggcugguguccaacggcagcuaccucaacgagacccacuucuccgacgacaucgagcagcaggccgacaacaugaucaccgagcugcugcagaaggaguacauggaccggcagggcaagacgccgcucgggcugguggaccuguucgucuucagcaccuccuucuaccugaucagcaucuuccuccaccuggugaagauccccacccaccgccacgugaucggcaagcccugccccaagccgcaccggcugaaccacauggggaucugcuccugcggccucuacaagcaccccgggguccccgugaaguggaagcgcugaggacuagucccuguucccagagcccacuuuuuuuucuuuuuuugaaauaaaauagccugucuuucagaucucaaaggcucuuuucagagccaccaaaaaaaaaaaaaaaaaaaaaaaaaaaaaaaaaaaaaaaaaaaaaaaaaaaaaaaaaaaaaaaaagaauu

SEQ ID NO: 23162 - RNA, 1714 nt, Artificial Sequence
  mRNA product Design a-1 (hSL-A64-N5) comprising derived and/or modified sequence from LASV(Nig08-A19;Clade III)__ADU56618__GPCmut2 (opt1)
aggagagucccgcagucggcguccagcggcucugcuuguucgugugugugucguugcaggccuuauucaagcuuaccaugggccagaucgugaccuucuuccaggaggucccccacgugaucgaggaggugaugaacaucguccugaucgcccucagcauccuggccauccugaaggggcucuacaacaucgcgaccugcggccugaucgggcuggugacguuccuccugcuguccggccgcagcugcuccaugaccuacaaggggguguacgagcuccagacccuggagcugaacaugaacacccucaacaugugcaugccgcugagcugcacgaagaacaacucccaccacuacaucauggucggcaacgagaccggccuggagcucacccugaccaacacgagccugcuccaccacaaguucugcaaccuguccgacgcccacaagaagaaccuguacgaccacacccucaugagcaucaucuccaccuuccaccugagcauccccaacuucaaccaguacgaggccauguccugcgacuucaacgggggcaagaucaccgugcaguacaaccugagccacuccuacgccaucgacgccgcgaaccacugcgggacgguggccaacggcguccuccagaccuucaugcggauggccuggggcgggagcuacaucgcccuggacuccggccgcgggaagugggacugcaucaugaccagcuaccaguaccugaucauccagaacaccacgugggaggaccacugccaguucucccggcccagccccaucggcuaccucgggcugcugucccagcgcacccgggacaucuacaucagccgccggcgccggggcaccuucaccuggacgcucagcgacuccgagggcaacgagacccccgggggcuacugccugacccgcuggaugcugaucgaggcggagcucaagugcuucgggaacaccgccguggccaagugcaacgagaagcacgacgaggaguucugcgacaugcugcggcuguucgacuucugcaagcaggccauccgccggcucaaggccccggcgcagaugagcauccagcugaucaacaaggccgugaacgcccugaucaacgaccagcucaucaugaagaaccaccuccgcgacaucaugggcauccccuacugcaacuacuccaaguacugguaccugaaccacacgagcaccgggcggaccucccugccccgcugcuggcuggucagcaacggcuccuaccugaacgagacccacuucagcgacgacaucgagcagcaggccgacaacaugaucacggagaugcuccagaaggaguaccuggaccggcagggcaagaccccgcuggggcugguggaccucuucguguucuccaccagcuucuaccugaucuccaucuuccugcaccucgucaagauccccacccaccgccacaucgugggcaagcccugccccaagccgcaccggcugaaccacauggggaucugcagcugcggccuguacaagcagcccggggugcccguccgcuggaagcggugaggacuagucccuguucccagagcccacuuuuuuuucuuuuuuugaaauaaaauagccugucuuucagaucucaaaggcucuuuucagagccaccaaaaaaaaaaaaaaaaaaaaaaaaaaaaaaaaaaaaaaaaaaaaaaaaaaaaaaaaaaaaaaaaagaauu

SEQ ID NO: 23163 - RNA, 1717 nt, Artificial Sequence
  mRNA product Design a-1 (hSL-A64-N5) comprising derived and/or modified sequence from LASV(G1180-SLE-2010;Clade IV)__AIT17168__GPCmut2 (opt1)
aggagagucccgcagucggcguccagcggcucugcuuguucgugugugugucguugcaggccuuauucaagcuuaccaugggccagaucgugaccuucuuccaggaggucccccacgugaucgaggaggugaugaacaucguccugaucgcccucagcauccuggccgugcugaaggggcucuacaacuucgcgaccugcggccugguggggcugcucacguuccugcugcucugcggccgcuccugcaccgccagccgguacaagggggucuacgagcugcagacccuggagcucaacauggagacccugaacaugugcaugccgcuguccugcacgaagaacaacagccaccacuacaucauggugggcaacgagaccggccucgagcugacccugaccaacacguccaucaucaaccacaaguucugcaaccucagcgacgcccacaagaagaaccuguacgaccacgcccugauguccaucaucagcaccuuccaccucuccauccccaacuucaaccaguacgaggccaugagcugcgacuucaacgggggcaagaucuccgugcaguacaaccugagccacuccuacgcgggggacgccgccaaccacugcggcaccgucgccaacggggugcugcagaccuucaugcgcauggcguggggcggcagcuacaucgcccucgacuccgggcacggcagcugggacugcaucaugacguccuaccaguaccugaucauccagaacaccaccugggaggaccacugccaguucagccggcccucccccaucggguaccugggccuccugagccagcgcacccgggacaucuacaucagccgccggcgccggggcacguucaccuggacccuguccgacagcgaggggaaggacaccccgggcggguacugccucacgcgcuggaugcugaucgaggccgagcugaagugcuucggcaacaccgccguggccaagugcaacgagaagcacgacgaggaguucugcgacaugcuccggcuguucgacuucugcaagcaggcgauccagcgccugaaggcccccgcccagauguccauccagcucaucaacaaggccgucaacgcccugaucaacgaccagcugaucaugaagaaccaccuccgggacaucauggggauccccuacugcaacuacagcaaguacugguaccugaaccacaccaccacgggcaagaccucccugcccaagugcuggcucgugagcaacggcuccuaccugaacgagacccacuucagcgacgacaucgagcagcaggcggacaacaugaucaccgagaugcugcagaaggaguacauggagcgccaggggaagacgccgcucggccugguggaccuguucgucuucuccaccagcuucuaccugaucuccaucuuccuccaccuggugaagauccccacccaccggcacaucgugggcaagagcugccccaagccccaccgccugaaccacauggggaucugcuccugcgggcucuacaagcagccgggcguccccgugaaguggaagcggugaggacuagucccuguucccagagcccacuuuuuuuucuuuuuuugaaauaaaauagccugucuuucagaucucaaaggcucuuuucagagccaccaaaaaaaaaaaaaaaaaaaaaaaaaaaaaaaaaaaaaaaaaaaaaaaaaaaaaaaaaaaaaaaaagaauu

SEQ ID NO: 23164 - RNA, 1717 nt, Artificial Sequence
  mRNA product Design a-1 (hSL-A64-N5) comprising derived and/or modified sequence from LASV(G1442-SLE-2011;Clade IV)__AIT17180__GPCmut2 (opt1)
aggagagucccgcagucggcguccagcggcucugcuuguucgugugugugucguugcaggccuuauucaagcuuaccaugggccagaucgugaccuucuuccaggaggucccccacgugaucgaggaggugaugaacaucguccugaucgcccucagcauccuggccgugcugaaggggcucuacaacguggcgaccugcggccugaucgggcuggucacguuccuccugcugugcggccgcuccugcaccaccacccucuacaaggggguguacgagcugcagacgcuggagcucaacauggagacccugaacaugugcaugccgcugagcugcaccaagaacaacucccaccacuacauccgggugggcaacgagaccggccucgagcugacgcugaccaacaccagcaucaucaaccacaaguucugcaaccucuccgacgcccacaagaagaaccuguacgaccacgcccugaugagcaucaucuccaccuuccaccucagcauccccaacuucaaccaguacgaggccauguccugcgacuucaacgggggcaagaucagcguccaguacaaccugucccacagcuacgccggggacgcggccaaccacugcggcacgguggccaacggggugcugcagaccuucaugcgcauggccuggggcggcuccuacaucgcgcucgacagcgggcggggcaacugggacugcaucaugaccuccuaccaguaccugaucauccagaacaccacgugggacgaccacugccaguucagccgccccucccccaucggguaccugggccuccugagccagcggacccgcgacgucuacaucucccggcgccggcgcggcaccuucaccuggacgcugagcgacagcgaggggaaggacaccccgggcggguacugccucacccgguggaugcugaucgaggccgagcugaagugcuucggcaacaccgccguggccaagugcaacgagaagcacgacgaggaguucugcgacaugcuccgccuguucgacuucugcaagcaggccauccagcggcugaaggcgcccgcccagauguccauccagcucaucaacaaggccgugaacgcccugaucaacgaccagcugaucaugaagaaccaccuccgcgacaucauggggauccccuacugcaacuacagcaaguacugguaccugaacaacacggccaccggcaagaccucccugcccaagugcuggcucaucagcaacggcuccuaccugaacgagacccacuucagcgacgacaucgagcaggaggcggacaacaugaucacggagaugcugcagaaggaguacauggagcggcaggggaagaccccgcucggccuggucgaccuguucguguucuccaccagcuucuaccugaucuccaucuuccuccaccuggugaagauccccacccaccgccacaucgucggcaagagcugccccaagccccaccggcugaaccacauggggaucugcuccugcgggcucuacaagcagccgggcgugcccgugcgcuggaagcggugaggacuagucccuguucccagagcccacuuuuuuuucuuuuuuugaaauaaaauagccugucuuucagaucucaaaggcucuuuucagagccaccaaaaaaaaaaaaaaaaaaaaaaaaaaaaaaaaaaaaaaaaaaaaaaaaaaaaaaaaaaaaaaaaagaauu

SEQ ID NO: 23165 - RNA, 1717 nt, Artificial Sequence
  mRNA product Design a-1 (hSL-A64-N5) comprising derived and/or modified sequence from LASV(G3010-SLE-2013;Clade IV)__AIT17344__GPCmut2 (opt1)
aggagagucccgcagucggcguccagcggcucugcuuguucgugugugugucguugcaggccuuauucaagcuuaccaugggccagaucgugaccuucuuccaggaggucccccacgugaucgaggaggugaugaacaucguccugaucgcccucagcauccuggccgugcugaaggggcucuacaacuucgcgaccugcggccugguggggcuggucacguuccuccugcugugcggccgcuccugcaccaccagccucuacaaggggguguacgagcugcagacccuggagcucaacauggagacgcugaacaugugcaugccgcuguccugcaccaagaacaacagccaccacuacaucauggugggcaacgagaccggccucgagcugacccugacgaacaccuccaucaucaaccacaaguucugcaaccucagcgacgcccacaagaagaaccuguacaaccacgcccugauguccaucaucagcaccuuccaccucuccauccccaacuucaaccaguacgaggccaugagcugcgacuucaacgggggcaagaucuccguccaguacaaccugagccacuccuacgccggggacgcggccagccacugcggcaccguggccaacggggugcugcagacguucaugcggauggccuggggcggcuccuacaucgcgcucgacagcggguacggcaagugggacugcaucaugaccuccuaccaguaccugaucauccagaacaccaccugggaggaccacugccaguucagccgccccucccccaucggguaccugggccuccugagccagcggacgcgcgacaucuacaucagccggcgccggcgcggcaccuucaccuggacccuguccgacagcgaggggaaggacacgccgggcggguacugccucacccgguggaugcugaucgaggccgagcugaagugcuucggcaacaccgccgucgccaagugcaacgagaagcacgacgaggaguucugcgacaugcuccgccuguucgacuucugcaagcaggccauccagcggcugaagacccccgcgcagauguccauccagcucaucaacaaggccgugaacgcccugaucaacgaccagcugaucaugaagaaccaccuccgcgacaucauggggauccccuacugcaacuacagcaaguacugguaccugaaccacacgaccaccggcaagaccucccugcccaagugcuggcucgugagcaacggcuccuaccugaacgagacgcacuucagcgacgacaucgagcagcaggccgacaacaugaucaccgagaugcugcagaaggaguacauggagcggcaggggaagaccccgcucggccuggucgaccuguucguguucuccaccagcuucuaccugaucuccaucuuccuccaccuggugaagauccccacgcaccgccacaucgucggcaagagcugccccaagccccaccggcugaaccacauggggaucugcuccugcgggcucuacaagcagccgggcgugcccgugcgcuggaagcggugaggacuagucccuguucccagagcccacuuuuuuuucuuuuuuugaaauaaaauagccugucuuucagaucucaaaggcucuuuucagagccaccaaaaaaaaaaaaaaaaaaaaaaaaaaaaaaaaaaaaaaaaaaaaaaaaaaaaaaaaaaaaaaaaagaauu

SEQ ID NO: 23166 - RNA, 1717 nt, Artificial Sequence
  mRNA product Design a-1 (hSL-A64-N5) comprising derived and/or modified sequence from LASV(G502-SLE-2009;Clade IV)__AIT17126__GPCmut2 (opt1)
aggagagucccgcagucggcguccagcggcucugcuuguucgugugugugucguugcaggccuuauucaagcuuaccaugggccagaucgugaccuucuuccaggaggucccccacgugaucgaggaggugaugaacaucguccugaucgcccucagcauccuggccgugcugaaggggcucuacaacuucgcgaccugcggccugguggggcugcucacguuccugcugcucugcggccgcuccugcaccaccgggcuguacaagggcgucuacgagcugcagacccucgagcugaacauggagacgcugaacaugugcaugccgcucagcugcaccaagaacaacucccaccacuacaucauggugggcaacgagaccgggcuggagcugacccucacgaacaccagcaucaucaaccacaaguucugcaaccuguccgacgcccacaagaagaaccuguacgaccacgcccucaugagcaucaucuccaccuuccaccugagcauccccaacuucaaccaguacgaggccauguccugcgacuucaacggcgggaagaucagcgugcaguacaaccugucccacagcuacgccggcgacgcggccgaccacugcgggaccgucgccaacggcgugcuccagacguucaugcggauggccuggggcggguccuacaucgcgcuggacagcggccgcgggcggugggacugcaucaugaccuccuaccaguaccugaucauccagaacaccaccugggaggaccacugccaguucagccgccccucccccaucggcuaccucggccugcugagccagcggacgcgcgacaucuacaucucccggcgccggcgcgggaccuucaccuggacccucagcgacagcgagggcaaggacacgcccgggggcuacugccugacccgguggaugcugaucgaggccgagcucaagugcuucgggaacaccgccguggccaagugcaacgagaagcacgacgaggaguucugcgacaugcugcgccuguucgacuucugcaagcaggccauccagcggcucaaggcgccggcccagauguccauccagcugaucaacaaggccgucaacgcccugaucaacgaccagcucgugaugaagaaccaccuccgcgacaucaugggcauccccuacugcaacuacagccgguacugguaccugaaccacaccacgaccggccgcaccucccugcccaagugcuggcuggugagcaacggguccuaccugaacgagacccacuucagcgacgacaucgagcagcaggccgacaacaugaucacggagaugcuccagaaggaguacauggagcggcagggcaagaccccgcuggggcuggucgaccuguucguguucuccaccagcuucuaccucaucuccaucuuccugcaccuggugaagauccccacccaccgccacaucgucggcaagagcugccccaagccccaccggcucaaccacauggggaucugcuccugcggccuguacaagcagccgggcgugcccgugaaguggaagcgcugaggacuagucccuguucccagagcccacuuuuuuuucuuuuuuugaaauaaaauagccugucuuucagaucucaaaggcucuuuucagagccaccaaaaaaaaaaaaaaaaaaaaaaaaaaaaaaaaaaaaaaaaaaaaaaaaaaaaaaaaaaaaaaaaagaauu

SEQ ID NO: 23167 - RNA, 1717 nt, Artificial Sequence
  mRNA product Design a-1 (hSL-A64-N5) comprising derived and/or modified sequence from LASV(G733-SLE-2010;Clade IV)__AIT17154__GPCmut2 (opt1)
aggagagucccgcagucggcguccagcggcucugcuuguucgugugugugucguugcaggccuuauucaagcuuaccaugggccagaucgugaccuucuuccaggaggucccccacgugaucgaggaggugaugaacaucguccugaucgcccucagcauccuggccgugcugaaggggcucuacaacuucgcgaccugcggcaucguggggcuggucuccuuccugcuccugugcggccgcagcugcacgaccucccuguacaaggggguguacgagcuccagacccuggagcugaacauggagacccucaacaugugcaugccgcugagcugcacgaagaacaacucccaccacuacaucauggugggcaacgagaccggccuggagcucacccugaccaacacgagcaucaucaaccacaaguucugcaaccuguccgacgcccacaagaagaaccucuacgaccacgcccugaugagcaucaucuccaccuuccaccugagcauccccaacuucaaccaguacgaggccauguccugcgacuucaacgggggcaagaucagcguccaguacaaccucucccacagcuacgccggggacgcggccaaccacugcggcaccaucgccaacggggugcugcagaccuucaugcggauggccuggggcggcuccuacaucgcgcuggacagcgggcgcgaccggugggacugcaucaugacguccuaccaguaccucaucauccagaacaccaccugggaggaccacugccaguucagccgccccucccccaucggcuaccuggggcugcucagccagcggacccgcgacaucuacaucagccggcgccggcgcggcacguucaccuggacccuguccgacagcgagggcaaggacacccccgggggcuacugccugacgcgguggaugcucaucgaggccgagcugaagugcuucgggaacaccgccguggccaagugcaacgagaagcacgacgaggaguucugcgacaugcugcgccucuucgacuucugcaagcaggccauccagcggcugaaggcgccggcccagauguccauccagcugaucaacaaggccgucaacgcccucaucaacgaccagcugaucaugaagaaccaccuccgcgacaucaugggcauccccuacugcaacuacagcaaguacugguaccugaaccacaccaccacggggaagaccucccugcccaagugcuggcuggugagcaacggcuccuaccucaacgagacccacuucagcgacgacaucgagcagcaggccgacaacaugaucaccgagaugcugcagaaggaguacauggagcggcagggcaagacgccgcuggggcucguggaccuguucgucuucuccaccagcuucuaccugaucuccaucuuccugcaccucgugaagauccccacccaccgccacguggucggcaagagcugccccaagccccaccggcugaaccacauggggaucugcuccugcggccuguacgggcagccgggcgugcccgugaaguggaagcgcugaggacuagucccuguucccagagcccacuuuuuuuucuuuuuuugaaauaaaauagccugucuuucagaucucaaaggcucuuuucagagccaccaaaaaaaaaaaaaaaaaaaaaaaaaaaaaaaaaaaaaaaaaaaaaaaaaaaaaaaaaaaaaaaaagaauu

SEQ ID NO: 23168 - RNA, 1717 nt, Artificial Sequence
  mRNA product Design a-1 (hSL-A64-N5) comprising derived and/or modified sequence from MOPV/LASV reassortant(IGS-1;Clade IV)__AFY05576__GPCmut2 (opt1)
aggagagucccgcagucggcguccagcggcucugcuuguucgugugugugucguugcaggccuuauucaagcuuaccaugggccagaucgugaccuucuuccaggaggucccccacgugaucgaggaggugaugaacaucguccugaucgcccucagcgugcuggccgugcugaaggggcucuacaacuucgcgaccugcggccuggucgggcuggugacguuccuccugcugugcggccgcuccugcaccaccagccucuacaaggggguguacgagcugcagacccuggagcucaacauggagacgcugaacaugugcaugccgcuguccugcaccaagaacaacagccaccacuacaucauggucggcaacgagaccggccucgagcugacccugacgaacaccuccaucaucaaccacaaguucugcaaccucagcgacgcccacaagaagaaccuguacgaccacgcccugauguccaucaucagcaccuuccaccucuccauccccaacuucaaccaguacgaggccaugagcugcgacuucaacgggggcaagaucuccgugcaguacaaccugagccacuccuacgccggggacgcggccaaccacugcggcaccguggccaacgggguccugcagacguucaugcggauggccuggggcggcagcuacaucgcgcucgacuccgggcgcggcaacugggacugcaucaugaccagcuaccaguaccugaucauccagaacaccaccugggaggaccacugccaguucucccggcccagccccaucggguaccugggccuccugucccagcgcacgcgggacaucuacaucagccgccggcgccggggcaccuucaccuggacccugagcgacuccgagggggaggacacgccgggcggguacugccucacccgcuggaugcugaucgaggccgagcugaagugcuucggcaacaccgccguggccaagugcaacgagaagcacgacgaggaguucugcgacaugcuccggcuguucgacuucugcaagcaggccauccagcgccugaaggcgcccgcccagaugagcauccagcucaucaacaaggccgugaacgcccugaucaacgaccagcugaucaugaagaaccaccuccgggacaucauggggauccccuacugcaacuacuccaaguacugguaccugaaccacaccacgaccggccgcaccagccugcccaagugcuggcucgucuccaacggcagcuaccugaacgagacccacuucuccgacgacaucgagcagcaggccgacaacaugaucacggagaugcugcagaaggaguacauggagcggcaggggaagaccccgcucggccugguggaccuguucguguucagcaccuccuucuaccugaucagcaucuuccuccaccuggucaagauccccacccaccgccacaucguggggaaguccugccccaagccccaccggcugaaccacaugggcaucugcagcugcgggcucuacaagcagccgggcgugcccgucaaguggaagcgcugaggacuagucccuguucccagagcccacuuuuuuuucuuuuuuugaaauaaaauagccugucuuucagaucucaaaggcucuuuucagagccaccaaaaaaaaaaaaaaaaaaaaaaaaaaaaaaaaaaaaaaaaaaaaaaaaaaaaaaaaaaaaaaaaagaauu

SEQ ID NO: 23169 - RNA, 1717 nt, Artificial Sequence
  mRNA product Design a-1 (hSL-A64-N5) comprising derived and/or modified sequence from LASV(LM765-SLE-2012;Clade IV)__AIT17814__GPCmut2 (opt1)
aggagagucccgcagucggcguccagcggcucugcuuguucgugugugugucguugcaggccuuauucaagcuuaccaugggccagaucgugaccuucuuccaggaggucccccacgugaucgaggaggugaugaacaucguccugaucgcccucagcauccuggccgugcugaaggggcucuacaacuucgcgaccugcggccugguggggcuggucacguuccuccugcugugcggccgcuccugcaccaccagccucuacaaggggguguacgagcugcagacccuggagcucaacauggagacgcugaacaugugcaugccgcuguccugcaccaagaacaacagccaccacuacaucauggugggcaacgagaccggccucgagcugacccugacgaacaccuccaucaucgaccacaaguucugcaaccucagcgacgcccaccggaagaaccuguacgaccacgcccugauguccaucaucagcaccuuccaccucuccauccccaacuucaaccaguacgaggccaugagcugcgacuucaacgggggcaagaucuccguccaguacaaccugagccacuccuacgccaaggacgcggccgaccacugcgggaccguggccaacggcgugcugcagacguucaugcgcauggccuggggcgggagcuacaucgcgcucgacuccggccgggggcgcugggacugcaucaugaccagcuaccaguaccugaucauccagaacaccaccugggaggaccacugccaguucucccggcccagccccaucggcuaccuggggcuccugucccagcgcacgcgggacaucuacaucagccgccggcgccggggcaccuucaccuggacccugagcgacuccgagggcaaggacacgcccgggggcuacugccucacccgcuggaugcugaucgaggccgagcugaagugcuucgggaacaccgccgucgccaagugcaacgagaagcacgacgaggaguucugcgacaugcuccggcuguucgacuucugcaagcaggccauccagcgccugaaggcgccggcccagaugagcauccagcucaucaacaaggccgugaacgcccugaucaacgaccagcugaucaugaagaaccaccuccgggacaucaugggcauccccuacugcaacuacuccaaguacugguaccugaaccacaccacgaccgggaagaccagccugcccaagugcuggcucguguccaacggcagcuaccugaacgagacccacuucuccgacgacaucgagcagcaggccgacaacaugaucacggagaugcugcagaaggaguacauggagcgccagggcaagaccccgcucgggcuggucgaccuguucguguucagcaccuccuucuaccugaucagcaucuuccuccaccuggugaagauccccacccaccggcacaucgucggcaagcccugccccaagccgcaccgccugaaccacauggggaucugcuccugcggccucuacaagcagcccggggugcccgugaaguggaagcggugaggacuagucccuguucccagagcccacuuuuuuuucuuuuuuugaaauaaaauagccugucuuucagaucucaaaggcucuuuucagagccaccaaaaaaaaaaaaaaaaaaaaaaaaaaaaaaaaaaaaaaaaaaaaaaaaaaaaaaaaaaaaaaaaagaauu

SEQ ID NO: 23170 - RNA, 1717 nt, Artificial Sequence
  mRNA product Design a-1 (hSL-A64-N5) comprising derived and/or modified sequence from LASV(LM776-SLE-2012;Clade IV)__AIT17824__GPCmut2 (opt1)
aggagagucccgcagucggcguccagcggcucugcuuguucgugugugugucguugcaggccuuauucaagcuuaccaugggccagaucgugaccuucuuccaggaggucccccacgugaucgaggaggugaugaacaucguccugaucgcccucagcauccuggccgugcugaaggggcucuacaacuucgcgaccugcggccugguggggcuggucacguuccuccugcugugcggccgcuccugcaccaccagcguguacaaggggguguacgagcuccagacccuggagcugaacauggagacgcucaacaugugcaugccgcuguccugcaccaagaacaacagccaccacuacaucauggucggcaacgagaccggccuggagcucacccugacgaacaccuccaucaucaaccacaaguucugcaaccugagcgacgcccacaagaagaaccucuacgaccacgcccugauguccaucaucagcaccuuccaccuguccauccccaacuucaaccaguacgaggccaugagcugcgacuucaacgggggcaagaucuccgugcaguacaaccucagccacuccuacgccggggacgcggccaaccacugcggcaccguggccaacgggguccugcagacguucaugcggauggccuggggcggcagcuacaucgcgcuggacuccgggcacggcaagugggacugcaucaugaccagcuaccaguaccucaucauccagaacaccaccugggaggaccacugccaguucucccgccccagccccaucggguaccugggccugcucucccagcggacgcgcgacaucuacaucagccggcgccggcgcggcaccuucaccuggacccugagcgacuccgaggggaaggacacgccgggcggguacugccugacccgguggaugcucaucgaggccgagcugaagugcuucggcaacaccgccguggccaagugcaacgagaagcacgacgaggaguucugcgacaugcugcgccucuucgacuucugcaagcaggccauccagcggcugaaggcgcccgcccagaugagcauccagcugaucaacaaggccgugaacgcccucaucaacgaccagcugaucaugaagaaccaccuccgcgacaucauggggauccccuacugcaacuacuccaaguacugguaccugaaccacaccacgaccggcaagaccagccugcccaagugcuggcuggucuccaacggcagcuaccucaacgagacccacuucuccgacgacaucgagcagcaggccgacaacaugaucacggagaugcugcagaaggaguacauggagcggcaggggaagaccccgcugggccucguggaccuguucguguucagcaccuccuucuaccugaucagcaucuuccugcaccucgucaagauccccacccaccgccacaucguggggaaguccugccccaagccccaccggcugaaccacaugggcaucugcagcugcgggcuguacaagcagccgggcgugcccguccgcuggaagcggugaggacuagucccuguucccagagcccacuuuuuuuucuuuuuuugaaauaaaauagccugucuuucagaucucaaaggcucuuuucagagccaccaaaaaaaaaaaaaaaaaaaaaaaaaaaaaaaaaaaaaaaaaaaaaaaaaaaaaaaaaaaaaaaaagaauu

SEQ ID NO: 23171 - RNA, 1717 nt, Artificial Sequence
  mRNA product Design a-1 (hSL-A64-N5) comprising derived and/or modified sequence from LASV(Mad39;Clade IV)__ANH09722__GPCmut2 (opt1)
aggagagucccgcagucggcguccagcggcucugcuuguucgugugugugucguugcaggccuuauucaagcuuaccaugggccagaucgugaccuucuuccaggaggucccccacgugaucgaggaggugaugaacaucguccugaucgcccucagcauccuggccgugcugaaggggcucuacaacguggcgaccugcggccugaucgggcuggucacguuccuccugcugugcggccgcuccugcaccaccacccucuacaaggggguguacgagcugcaggcccuggagcucaacauggagacgcugaacaugugcaugccgcugagcugcaccaagaacaacucccaccacuacauccgggugggcaacgagaccggccucgagcugacccugacgaacaccagccucaucaaccacaaguucugcaaccuguccgacgcccacaagaagaaccuguacgaccacgcccucaugagcaucaucuccaccuuccaccugagcauccccaacuucaaccaguacgaggccauguccugcgacuucaacgacgggaagaucagcguccaguacaaccugucccacaccuacgcgggcgacacggccaaccacugcgggaccguggccaacggcgugcuccagaccuucaugcgcauggccuggggcgggagcuacaucgcgcuggacuccggccgcgggggcugggacugcaucaugaccagcuaccaguaccugaucauccagaacacgaccugggaggaccacugccaguucucccggcccagccccaucggguaccucggccugcugucccagcggacccgcgacaucuacaucagccggcgccggcgcggcaccuucacguggacccucuccgacagcgaggggaaggacaccccgggcggguacugccugacccgguggaugcugaucgaggccgagcucaagugcuucggcaacacggccgucgccaagugcaacgagaagcacgacgaggaguucugcgacaugcugcgccuguucgacuucugcaagcaggccauccagcggcucaaggcgcccgcccagaugagcauccagcugaucaacaaggccgugaacgcccugaucaacgaccagcucaucaugaagaaccaccuccgcgacaucauggggauccccuacugcaacuacuccaaguacugguaccugaaccacaccgugaccggcaagaccagccugcccaagugcuggcuggucuccaacggcagcuaccugaacgagacgcacuucuccgacgacaucgagcagcaggccgacaacaugaucaccgagaugcuccagaaggaguacauggagcggcaggggaagaccccgcugggccugguggaccuguucguguucagcaccuccuucuaccucaucagcaucuuccugcaccuggucaagauccccacgcaccgccacgugguggggaagcccugccccaagccgcaccggcucaaccacaugggcaucugcuccugcggguucuacaagcagcccggcguccccgugcgcuggaagcggugaggacuagucccuguucccagagcccacuuuuuuuucuuuuuuugaaauaaaauagccugucuuucagaucucaaaggcucuuuucagagccaccaaaaaaaaaaaaaaaaaaaaaaaaaaaaaaaaaaaaaaaaaaaaaaaaaaaaaaaaaaaaaaaaagaauu

SEQ ID NO: 23172 - RNA, 1717 nt, Artificial Sequence
  mRNA product Design a-1 (hSL-A64-N5) comprising derived and/or modified sequence from LASV(Z0947-SLE-2011;Clade IV)__AIT17840__GPCmut2 (opt1)
aggagagucccgcagucggcguccagcggcucugcuuguucgugugugugucguugcaggccuuauucaagcuuaccaugggccagaucgugaccuucuuccaggaggucccccacgugaucgaggaggugaugaacaucguccugaucgcccucagcauccuggccgugcugaaggggcucuacaacuucgcgaccugcggccugguggggcuggucacguuccuccugcugugcggccgcuccugcaccaucagccucuacaaggggguguacgagcugcagacccuggagcucaacauggagacccugaacaugugcaugccgcuguccugcacgaagaacaacagccaccacuacaucauggugggcaacgagaccggccucgagcugacccugaccaacacguccaucaucaaccacaaguucugcaaccucagcgacgcccacaagaagaaccuguacgaccacgcccugauguccaucaucagcaccuuccaccucuccauccccaacuucaaccaguacgaggccaugagcugcgacuucaacgggggcaagaucuccguccaguacaaccugagccacuccuacgccggggacgcggccaaccacugcggcaccguggccaacggggugcugcagaccuucaugcggauggccuggggcggcagcuacaucgcgcucgacuccgggcgcgaccggugggacugcaucaugacgagcuaccaguaccugaucauccagaacaccaccugggaggaccacugccaguucucccgccccagccccaucggcuaccuggggcuccugucccagcggacccgcgacaucuacaucagccggcgccggcgcggcacguucaccuggacccugagcgacuccgagggcaaggacacccccgggggcuacugccucacgcgguggaugcugaucgaggccgagcugaagugcuucgggaacaccgccgucgccaagugcaacgagaagcacgacgaggaguucugcgacaugcuccgccuguucgacuucugcaagcaggccauccagcggcugaaggcgccggcccagaugagcauccagcucaucaacaaggccgugaacgcccugaucaacgaccagcugaucaugaagaaccaccuccgcgacaucaugggcauccccuacugcaacuacuccaaguacugguaccugaaccacaccaccacggggaagaccagccugcccaagugcuggcucguguccaacggcagcuaccugaacgagacccacuucuccgacgacaucgagcagcaggccgacaacaugaucaccgagaugcugcagaaggaguacauggagcggcagggcaagacgccgcucgggcuggucgaccuguucguguucagcaccuccuucuaccugaucagcaucuuccuccaccuggugaagauccccacccaccgccacaucgucggcaagcccugccccaagccgcaccggcugaaccacauggggaucugcuccugcggccucuacaagcagcccggggugcccgugaaguggaagcgcugaggacuagucccuguucccagagcccacuuuuuuuucuuuuuuugaaauaaaauagccugucuuucagaucucaaaggcucuuuucagagccaccaaaaaaaaaaaaaaaaaaaaaaaaaaaaaaaaaaaaaaaaaaaaaaaaaaaaaaaaaaaaaaaaagaauu

SEQ ID NO: 23173 - RNA, 1717 nt, Artificial Sequence
  mRNA product Design a-1 (hSL-A64-N5) comprising derived and/or modified sequence from LASV(Josiah;Clade IV)__NP_694870__GPCmut2 (opt4)
aggagagucccgcagucggcguccagcggcucugcuuguucgugugugugucguugcaggccuuauucaagcuuaccaugggccagaucgugaccuucuuccaggaggugccccacgugaucgaggaggugaugaacaucgugcugaucgcccugagcgugcuggccgugcugaagggccuguacaacuucgccaccugcggccuggugggccuggugaccuuccugcugcugugcggcagaagcugcaccaccagccuguacaagggcguguacgagcugcagacccuggagcugaacauggagacccugaacaugugcaugccccugagcugcaccaagaacaacagccaccacuacaucauggugggcaacgagaccggccuggagcugacccugaccaacaccagcaucaucaaccacaaguucugcaaccugagcgacgcccacaagaagaaccuguacgaccacgcccugaugagcaucaucagcaccuuccaccugagcauccccaacuucaaccaguacgaggccaugagcugcgacuucaacggcggcaagaucagcgugcaguacaaccugagccacagcuacgccggcgacgccgccaaccacugcggcaccguggccaacggcgugcugcagaccuucaugagaauggccuggggcggcagcuacaucgcccuggacagcggcagaggcaacugggacugcaucaugaccagcuaccaguaccugaucauccagaacaccaccugggaggaccacugccaguucagcagacccagccccaucggcuaccugggccugcugagccagagaaccagagacaucuacaucagcagaagaagaagaggcaccuucaccuggacccugagcgacagcgagggcaaggacacccccggcggcuacugccugaccagauggaugcugaucgaggccgagcugaagugcuucggcaacaccgccguggccaagugcaacgagaagcacgacgaggaguucugcgacaugcugagacuguucgacuucugcaagcaggccauccagagacugaaggcccccgcccagaugagcauccagcugaucaacaaggccgugaacgcccugaucaacgaccagcugaucaugaagaaccaccugagagacaucaugggcauccccuacugcaacuacagcaaguacugguaccugaaccacaccaccaccggcagaaccagccugcccaagugcuggcuggugagcaacggcagcuaccugaacgagacccacuucagcgacgacaucgagcagcaggccgacaacaugaucaccgagaugcugcagaaggaguacauggagagacagggcaagaccccccugggccugguggaccuguucguguucagcaccagcuucuaccugaucagcaucuuccugcaccuggugaagauccccacccacagacacaucgugggcaagagcugccccaagccccacagacugaaccacaugggcaucugcagcugcggccuguacaagcagcccggcgugcccgugaaguggaagagaugaggacuagucccuguucccagagcccacuuuuuuuucuuuuuuugaaauaaaauagccugucuuucagaucucaaaggcucuuuucagagccaccaaaaaaaaaaaaaaaaaaaaaaaaaaaaaaaaaaaaaaaaaaaaaaaaaaaaaaaaaaaaaaaaagaauu

SEQ ID NO: 23174 - RNA, 1714 nt, Artificial Sequence
  mRNA product Design a-1 (hSL-A64-N5) comprising derived and/or modified sequence from LASV(LP;Clade I)__AAF86701__GPCmut2 (opt4)
aggagagucccgcagucggcguccagcggcucugcuuguucgugugugugucguugcaggccuuauucaagcuuaccaugggccagaucaucaccuucuuccaggaggugccccacgugaucgaggaggugaugaacaucgugcugaucgcccugagccugcuggccauccugaagggccuguacaacaucgccaccugcggcaucaucggccugguggccuuccuguuccugugcggcaagagcugcagccugacccugaagggcggcuacgagcugcagacccuggagcugaacauggagacccugaacaugugcaugccccugagcugcaccaagaacagcagccaccacuacaucagagugggcaacgagaccggccuggagcugacccugaccaacaccagcaucaucaaccacaaguucugcaaccugagcgacgcccacaagaagaaccuguacgaccacgcccugaugagcaucaucagcaccuuccaccugagcauccccaacuucaaccaguacgaggccaugagcugcgacuucaacggcggcaagaucagcgugcaguacaaccugagccacagcuacgccggcgacgccgccgagcacugcggcaccguggccaacggcgugcugcagaccuucaugagaauggccuggggcggcagauacaucgcccuggacagcggcaagggcaacugggacugcaucaugaccagcuaccaguaccugaucauccagaacaccaccugggaggaccacugccaguucagcagacccagccccaucggcuaccugggccugcugagccagagaaccagagacaucuacaucagcagaagaagaagaggcaccuucaccuggacccugagcgacagcgagggcaacgagacccccggcggcuacugccugaccagauggaugcugaucgaggccgagcugaagugcuucggcaacaccgccguggccaagugcaacgagaagcacgacgaggaguucugcgacaugcugagacuguucgacuucugcaagcaggccaucagaagacugaaggcccccgcccagaugagcauccagcugaucaacaaggccgugaacgcccugaucaacgaccagcugaucaugaagaaccaccugagagacaucaugggcauccccuacugcaacuacagcaaguacugguaccugaaccacaccagcagcggcagaaccagccugcccaagugcuggcugaucagcaacggcagcuaccugaacgagacccaguucagcgacgacaucgagcagcaggccgacaacaugaucaccgagaugcugcagaaggaguacaucgagagacagggcaagaccccccugggccugguggacaucuucaucuucagcaccagcuucuaccugaucagcaucuuccugcaccugaucaagauccccacccacagacacaucgugggcaagcccugccccaagccccacagacugaaccacaugggcgugugcagcugcggccuguacaagcaccccggcgugcccaccaaguggaagagaugaggacuagucccuguucccagagcccacuuuuuuuucuuuuuuugaaauaaaauagccugucuuucagaucucaaaggcucuuuucagagccaccaaaaaaaaaaaaaaaaaaaaaaaaaaaaaaaaaaaaaaaaaaaaaaaaaaaaaaaaaaaaaaaaagaauu

SEQ ID NO: 23175 - RNA, 1714 nt, Artificial Sequence
  mRNA product Design a-1 (hSL-A64-N5) comprising derived and/or modified sequence from LASV(803213;Clade II)__AAF86703__GPCmut2 (opt4)
aggagagucccgcagucggcguccagcggcucugcuuguucgugugugugucguugcaggccuuauucaagcuuaccaugggccagaucaucaccuucuuccaggaggugccccacgugaucgaggaggugaugaacaucgugcugaucgcccugagccugcuggccauccugaagggcaucuacaacguggccaccugcggccuguucggccugaucagcuuccugcugcugugcggcagaagcugcagcgugaccuacaagggcguguacgagcugcagacccuggagcugaacauggccaaccugaacaugugcaugccccugagcugcaccaagaacaacagccaccacuacaucauggugggcaacgagaccggccuggagcugacccugaccaacaccagcaucaucaaccacaaguucugcaaccugagcgacgcccacaagaagaaccuguacgaccacgcccugaugagcaucaucagcaccuuccaccugagcauccccaacuucaaccaguacgaggccaugagcugcgacuucaacggcggcaagaucagcgugcaguacaaccugagccacagcuucgccguggacgccgccaaccacugcggcaccaucgccaacggcgugcugcagaccuucaugagaauggccuggggcggcagcuacaucgcccuggacagcggcaagggcaacugggacugcaucaugaccagcuaccaguaccugaucauccagaacaccaccugggaggaccacugccaguucagcagacccagccccaucggcuaccugggccugcugagccagagaaccagagacaucuacaucagcagaagaagaagaggcaccuucaccuggacccugagcgacagcgagggcaacgaggcccccggcggcuacugccugaccagauggaugcugaucgaggccgagcugaagugcuucggcaacaccgccguggccaagugcaacgagaagcacgacgaggaguucugcgacaugcugagacuguucgacuucugcaagcaggccaucaagagacugaagacccccgcccagaugagcauccagcugaucaacaaggccgugaacgcccugaucaacgaccagcugaucaugaagaaccaccugagagacaucaugggcauccccuacugcaacuacagcagauacugguaccugaaccacaccgugaccggcaagaccagccugcccagaugcuggcuggugagcaacggcagcuaccugaacgagacccacuucagcgacgacaucgagcagcaggccgacaacaugaucaccgagaugcugcagaaggaguacauggacagacagggcaagaccccccugggccugguggaccuguucguguucagcaccagcuucuaccugaucagcaucuuccugcaccuggugaagauccccacccacagacacaucgugggcaagcccugccccaagccccacagacugaaccacaugggcaucugcagcugcggccuguacaagcaccccggcgugcccgugaaguggaagagaugaggacuagucccuguucccagagcccacuuuuuuuucuuuuuuugaaauaaaauagccugucuuucagaucucaaaggcucuuuucagagccaccaaaaaaaaaaaaaaaaaaaaaaaaaaaaaaaaaaaaaaaaaaaaaaaaaaaaaaaaaaaaaaaaagaauu

SEQ ID NO: 23176 - RNA, 1714 nt, Artificial Sequence
  mRNA product Design a-1 (hSL-A64-N5) comprising derived and/or modified sequence from LASV(GA391;Clade III)__CAA36645__GPCmut2 (opt4)
aggagagucccgcagucggcguccagcggcucugcuuguucgugugugugucguugcaggccuuauucaagcuuaccaugggccagaucgugaccuucuuccaggaggugccccacgugaucgaggaggugaugaacaucgugcugaucgcccugagcauccuggccauccugaagggccuguacaacguggccaccugcggccugaucggccuggugaccuuccugcugcugagcggcagaagcugcagccugaucuacaagggcaccuacgagcugcagacccuggagcugaacauggagacccugaacaugugcaugccccugagcugcaccaagaacaacagccaccacuacaucagagugggcaacgagaccggccuggagcugacccugaccaacaccagcauccugaaccacaaguucugcaaccugagcgacgcccacaagagaaaccuguacgaccacagccugaugagcaucaucagcaccuuccaccugagcauccccaacuucaaccaguacgaggccaugagcugcgacuucaacggcggcaagaucaccgugcaguacaaccugagccacagcuucgccguggacgccgccggccacugcggcacccuggccaacggcgugcugcagaccuucaugagaauggccuggggcggcagcuacaucgcccuggacagcggcagaggcaacugggacugcaucaugaccagcuaccaguaccugaucauccagaacaccaccugggacgaccacugccaguucagcagacccagccccaucggcuaccugggccugcugagccagagaaccagagacaucuacaucagcagaagaagaagaggcaccuucaccuggacccugagcgacagcgagggcaacgagacccccggcggcuacugccugaccagauggaugcugaucgaggccgagcugaagugcuucggcaacaccgccguggccaagugcaacgagaagcacgacgaggaguucugcgacaugcugagacuguucgacuucugcaagcaggccaucagaagacugaagacccccgcccagaugagcauccagcugaucaacaaggccgugaacgcccugaucaacgaccagcugaucaugaagaaccaccugagagacaucaugggcauccccuacugcaacuacagcagauacugguaccugaaccacaccagcaccggcaagaccagccugcccagaugcuggcugaucagcaacggcagcuaccugaacgagaccaaguucagcgacgacaucgagcagcaggccgacaacaugaucaccgagaugcugcagaaggaguacaucgacagacagggcaagaccccccugggccugguggaccuguucguguucagcaccagcuucuaccugaucagcaucuuccugcaccuggugaagauccccacccacagacacaucgugggcaagcccugccccaagccccacagacugaaccacaugggcaucugcagcugcggccuguacaagcagcccggcgugcccgugagauggaagagaugaggacuagucccuguucccagagcccacuuuuuuuucuuuuuuugaaauaaaauagccugucuuucagaucucaaaggcucuuuucagagccaccaaaaaaaaaaaaaaaaaaaaaaaaaaaaaaaaaaaaaaaaaaaaaaaaaaaaaaaaaaaaaaaaagaauu

SEQ ID NO: 23177 - RNA, 1717 nt, Artificial Sequence
  mRNA product Design a-1 (hSL-A64-N5) comprising derived and/or modified sequence from LASV(AV;Clade V)__CCA30314__GPCmut2 (opt4)
aggagagucccgcagucggcguccagcggcucugcuuguucgugugugugucguugcaggccuuauucaagcuuaccaugggccagaucgugaccuucuuccaggaggugccccacgugaucgaggaggugaugaacaucgugcugaucgcccugagcauccuggccgugcugaagggccuguacaacaucgccaccugcggccugaucggccugaucaccuuccugcugcugugcggcagaagcugcagcagcaaccuguacaagggcguguacgagcugcagagccuggaccugaacauggagacccugaacaugugcaugccccugagcugcaccaagaacaacagccaccacuacaucagagugggcaacgacaccggccuggagcugacccugaccaacaccagcauccugaaccacaaguucugcaaccugagcgacgcccacaagaaggaccuguacgaccacgcccugaugagcaucaucagcaccuuccaccugagcauccccaacuucaaccaguacgaggccaugagcugcgacuucaacggcggcaagaucagcgugcaguacaaccugagccacagcuacgccaucgacgccgccaaccacugcggcaccguggccaacggcauccugcagaccuucaugagaauggccuggggcggcagcuacaucgcccuggacagcggcagaggcaacugggacugcaucaugaccagcuaccaguaccugaucauccagaacaccaccugggagaaccacugccaguucagcagacccagccccaucggcuaccugggccugcugagccagagaaccagagacaucuacaucagcagaagaagaagaggcaccuucaccuggacccugagcgacagcgagggcaacgccacccccggcggcuacugccugaccagauggaugcugaucgaggccgagcugaagugcuucggcaacaccgccguggccaagugcaacgagaagcacgacgaggaguucugcgacaugcugagacuguucgacuucugcaagcaggccaucagcagacugaagagccccgcccagaugagcauccagcugaucaacaaggccgugaacgcccugaucaacgaccagcugaucaugaagaaccaccugagagacaucaugggcauccccuacugcaacuacagcaaguacugguaccugaaccacaccaucaccggcaagaccagccugcccaagugcuggcuggugagcaacggcagcuaccugaacgagacccacuucagcgacgacaucgagcagcaggccgacaacaugaucaccgagaugcugcagaaggaguacauggagagacagggcaagaccccccugggccugguggaccuguucguguucagcaccagcuucuaccugaucagcaucuuccugagacuggugaagauccccacccacagacacaucgugggcaagcccugccccaagccccacagacugaaccacaugggcaucugcagcugcggccuguacaagcagcccggcgugcccgugagauggaagagaugaggacuagucccuguucccagagcccacuuuuuuuucuuuuuuugaaauaaaauagccugucuuucagaucucaaaggcucuuuucagagccaccaaaaaaaaaaaaaaaaaaaaaaaaaaaaaaaaaaaaaaaaaaaaaaaaaaaaaaaaaaaaaaaaagaauu

SEQ ID NO: 23178 - RNA, 1714 nt, Artificial Sequence
  mRNA product Design a-1 (hSL-A64-N5) comprising derived and/or modified sequence from LASV(Togo/2016/7082;Clade VI)__AMR44577__GPCmut2 (opt4)
aggagagucccgcagucggcguccagcggcucugcuuguucgugugugugucguugcaggccuuauucaagcuuaccaugggccagaucaucaccuucuuccaggaggugccccacgugaucgaggaggugaugaacaucgugcugaucgcccugagccugcuggccauccugaagggcguguacaacguggccaccugcggcaucaucggccuggugaccuuccuguuccugugcggcagaagcugcagccugaucuacaagggcagcuacgagcugcagacccuggagcugaacauggagacccugaacaugugcaugccccugagcugcaccaagaacagcagccaccacuacaucagagugggcaacgagaccggccuggagcugacccugaccaacaccagcaucaucaaccacaaguucugcaaccugagcgacgcccacaagagaaaccuguacgaccacgcccugaugagcauccugagcaccuuccaccugagcauccccaacuucaaccaguacgaggccaugagcugcgacuucaacggcggcaagaucagcgugcaguacaaccugagccacgccuacgccguggacgccgccgagcacugcggcaccguggccaacggcgugcugcagaccuucaugagaauggccuggggcggcagcuacaucgcccuggacagcggcagaggcaacugggacugcaucaugaccagcuaccaguaccugaucauccagaacaccaccugggaggaccacugccaguucagcagacccagccccaucggcuaccugggccugcugagccagagaaccagagacaucuacaucagcagaagaagaagaggcaccuucaccuggacccugagcgacagcgagggcaacgagacccccggcggcuacugccugaccagauggaugcugaucgaggccgagcugaagugcuucggcaacaccgccguggccaagugcaacgagaagcacgacgaggaguucugcgacaugcugagacuguucgacuucugcaagcaggccauccagagacugaagagccccgcccagaugagcauccagcugaucaacaaggccgugaacgcccugaucaacgaccagcugaucaugaagaaccaccugagagacaugaugggcauccccuacugcaacuacagcaaguacugguaccugaaccacaccagcagcggcagaaccagccugcccaagugcuggcuggugagcaacggcagcuaccugaacgagacccacuucagcgacgacaucgagcagcaggccgacaacaugaucaccgagaugcugcagaaggaguacaucgacagacagggcaagaccccccugggccugguggaccuguucguguucagcaccagcuucuaccugaucagcaucuuccugcaccugaucaagauccccacccacagacacaucgugggcaagcccugccccaagccccacagacugaaccacaugggcaucugcagcugcggccuguacaagcagcccggcgugcccaccagauggaagagaugaggacuagucccuguucccagagcccacuuuuuuuucuuuuuuugaaauaaaauagccugucuuucagaucucaaaggcucuuuucagagccaccaaaaaaaaaaaaaaaaaaaaaaaaaaaaaaaaaaaaaaaaaaaaaaaaaaaaaaaaaaaaaaaaagaauu

SEQ ID NO: 23179 - RNA, 1714 nt, Artificial Sequence
  mRNA product Design a-1 (hSL-A64-N5) comprising derived and/or modified sequence from LASV(KAK-428;Clade n.d. (VII))__ANH09740__GPCmut2 (opt4)
aggagagucccgcagucggcguccagcggcucugcuuguucgugugugugucguugcaggccuuauucaagcuuaccaugggccagaucgugaccuucuuccaggaggugccccacgugaucgaggaggugaugaacaucgugcugaucgcccugagccugcuggccauccugaagggccuguacaacuucgccaccugcggcgugaucggccugaucaccuuccugcugcugugcggcagaagcugcagcgccaccuacaagggccaguacgagcugcagacccuggagcugaacauggagagccugaacaugugcaugccccugagcugcaccaagaacaacagccaccacuacaucagagccggcaacaacaccggccuggagcugacccugaccaacaccagcaucaucagccacaaguucugcaaccugagcgacgcccacaagaagaaccuguacgaccacacccugaugagcaucaucaccaccuuccaccugagcauccccaacuucaaccaguacgaggccaugagcugcgacuucaacggcggcaagaucagcauccaguacaaccugagccacagcuacgccggcgacgccgcccagcacugcggcaccguggccaacggcgugcugcagaccuucaugagaauggccuggggcggcagcuaccuggcccuggacagcggcagaagaggcugggacugcaucaucagcagcuaccaguaccugaucauccagaacaccaccugggacgaccacugccaguucagcagacccagccccaucggcuaccugggcuucgugagccagaagaccagagacaucuacaucagcagaagaagaagaggcaccuucaccuggacccugagcgacagcgagggccacgacaugcccggcggcuacugccugaccagauggaugcugaucgaggccgaccugaagugcuucggcaacaccgccguggccaagugcaacgagaagcacgacgaggaguucugcgacauguggagacuguucgacuucugcaagcaggccauccagagacugaaggcccccgcccagaugaacauccagcugaucaacaaggccgugaacgcccugaucaacgaccagcugaugaugaagaaccaccugagagacaucaugggcauccccuacugcaacuacagcaaguucugguaccugaacaacaccaccaccggcagaaccagccugcccagaugcuggcugaucagcaacggcagcuaccugaacgagacccacuucagcgacgacaucgagcagcaggccgacaacaugaucaccgagaugcugcagaaggaguacauggacagacagggcaagaccccccugggccugguggaccuguucguguucagcaccagcuucuaccugaucaccaucuuccugcaccuggugaagauccccacccacagacacaucgugggcaagcccugccccaagccccacagacugaaccacaugggcaucugcagcugcggccuguacaagcagcccggcgugcccgugagauggaagagaugaggacuagucccuguucccagagcccacuuuuuuuucuuuuuuugaaauaaaauagccugucuuucagaucucaaaggcucuuuucagagccaccaaaaaaaaaaaaaaaaaaaaaaaaaaaaaaaaaaaaaaaaaaaaaaaaaaaaaaaaaaaaaaaaagaauu

SEQ ID NO: 23180 - RNA, 1714 nt, Artificial Sequence; identical to SEQ ID NO: 23174
  mRNA product Design a-1 (hSL-A64-N5) comprising derived and/or modified sequence from LASV(Pinneo-NIG-1969;Clade I)__AIT17836__GPCmut2 (opt4)

SEQ ID NO: 23181 - RNA, 1714 nt, Artificial Sequence
  mRNA product Design a-1 (hSL-A64-N5) comprising derived and/or modified sequence from LASV(ISTH0009-NIG-2011;Clade II)__AIT17404__GPCmut2 (opt4)
aggagagucccgcagucggcguccagcggcucugcuuguucgugugugugucguugcaggccuuauucaagcuuaccaugggccagaucaucaccuucuuccaggaggugccccacgugaucgaggaggugaugaacaucgugcugaucgcccugagccugcuggccauccugaagggcaucuacaacguggccaccugcggccuguucggccuggugagcuuccugcugcugugcggcagaagcugcagcaccaccuacaagggcguguacgagcugcagacccuggagcuggacauggccagccugaacaugugcaugccccugagcugcaccaagaacaacagccaccacuacaucauggugggcaacgagaccggccuggagcugacccugaccaacaccagcaucaucaaccacaaguucugcaaccugagcgacgcccacaagaagaaccuguacgaccacgcccugaugagcaucaucagcaccuuccaccugagcauccccaacuucaaccaguacgaggccaugagcugcgacuucaacggcggcaagaucagcgugcaguacaaccugagccacgccuacgccguggacgccgccaaccacugcggcaccaucgccaacggcgugcugcagaccuucaugagaauggccuggggcggcagcuacaucgcccuggacagcggcaagggcagcugggacugcaucaugaccagcuaccaguaccugaucauccagaacaccaccugggaggaccacugccaguucagcagacccagccccaucggcuaccugggccugcugagccagagaaccagagacaucuacaucagcagaagaagaagaggcaccuucaccuggacccugagcgacagcgagggcaacgagacccccggcggcuacugccugaccagauggaugcugaucgaggccgagcugaagugcuucggcaacaccgccguggccaagugcaacgagaagcacgacgaggaguucugcgacaugcugagacuguucgacuucugcaagcaggccaucagaagacugaagacccccgcccagaugagcauccagcugaucaacaaggccgugaacgcccugaucaacgaccagcugaucaugaagaaccaccugagagacaucaugggcauccccuacugcaacuacagcaaguacugguaccugaaccacaccgugaccggcaagaccagccugcccagaugcuggcuggugagcaacggcagcuaccugaacgagacccacuucagcgacgacaucgagcagcaggccgacaacaugaucaccgagcugcugcagaaggaguacauggacagacagggcaagaccccccugggccugguggaccuguucguguucagcaccagcuucuaccugaucagcaucuuccugcaccugaucaagauccccacccacagacacaucaccggcaagcccugccccaagccccacagacugaaccacaugggcaucugcagcugcggccuguacaagcaccccggcgugcccgugaaguggaagagaugaggacuagucccuguucccagagcccacuuuuuuuucuuuuuuugaaauaaaauagccugucuuucagaucucaaaggcucuuuucagagccaccaaaaaaaaaaaaaaaaaaaaaaaaaaaaaaaaaaaaaaaaaaaaaaaaaaaaaaaaaaaaaaaaagaauu

SEQ ID NO: 23182 - RNA, 1714 nt, Artificial Sequence
  mRNA product Design a-1 (hSL-A64-N5) comprising derived and/or modified sequence from LASV(ISTH2010-NIG-2012;Clade II)__AIT17482__GPCmut2 (opt4)
aggagagucccgcagucggcguccagcggcucugcuuguucgugugugugucguugcaggccuuauucaagcuuaccaugggccagaucaucaccuucuuccaggaggugccccacgugaucgaggaggugaugaacaucgugcugaucgcccugagccugcuggccauccugaagggcaucuacaacguggccaccugcggccuguucggccuggugagcuuccugcugcugugcggcagaagcugcagcaccaccuacaagggcguguacgagcugcagacccuggagcuggacauggccagccugaacaugugcaugccccugagcugcaccaagaacaacagccaccacuacaucauggugggcaacgagaccggccuggagcugacccugaccaacaccagcaucaucaaccacaaguucugcaaccugagcgacgcccacaagaagaaccuguacgaccacgcccugaugagcaucaucagcaccuuccaccugagcauccccaacuucaaccaguacgaggccaugagcugcgacuucaacggcggcaagaucagcgugcaguacaaccugagccacgccuacgccguggacgccgccaaccacugcggcaccaucgccaacggcgugcugcagaccuucaugagaauggccuggggcggcagcuacaucgcccuggacagcggcaagggcagcugggacugcaucaugaccagcuaccaguaccugaucauccagaacaucaccugggaggaccacugccaguucagcagacccagccccaucggcuaccugggccugcugagccagagaaccagagacaucuacaucagcagaagaagaagaggcaccuucaccuggacccugagcgacagcgagggcaacgagacccccggcggcuacugccugaccagauggaugcugaucgaggccgagcugaagugcuucggcaacaccgccguggccaagugcaacgagaagcacgacgaggaguucugcgacaugcugagacuguucgacuucugcaagcaggccaucagaagacugaagacccccgcccagaugagcauccagcugaucaacaaggccgugaacgcccugaucaacgaccagcugaucaugaagaaccaccugagagacaucaugggcauccccuacugcaacuacagcaaguacugguaccugaaccacaccgugaccggcaagaccagccugcccagaugcuggcuggugagcaacggcagcuaccugaacgagacccacuucagcgacgacaucgagcagcaggccgacaacaugaucaccgagcugcugcagaaggaguacaucgacagacagggcaagaccccccugggccugguggaccuguucguguucagcaccagcuucuaccugaucagcaucuuccugcaccuggugaagauccccacccacagacacguggugggcaagcccugccccaagccccacagacugaaccacaugggcaucugcagcugcggccuguacaagcaccccggcgugcccgugaaguggaagagaugaggacuagucccuguucccagagcccacuuuuuuuucuuuuuuugaaauaaaauagccugucuuucagaucucaaaggcucuuuucagagccaccaaaaaaaaaaaaaaaaaaaaaaaaaaaaaaaaaaaaaaaaaaaaaaaaaaaaaaaaaaaaaaaaagaauu

SEQ ID NO: 23183 - RNA, 1714 nt, Artificial Sequence
  mRNA product Design a-1 (hSL-A64-N5) comprising derived and/or modified sequence from LASV(Lassa virus/H.sapiens-wt/NGA/2015/ISTH_0543;Clade II)__AVO03639__GPCmut2 (opt4)
aggagagucccgcagucggcguccagcggcucugcuuguucgugugugugucguugcaggccuuauucaagcuuaccaugggccagaucaucaccuucuuccaggaggugccccacgugaucgaggaggugaugaacaucgugcugaucgcccugagccugcuggccauccugaagggcaucuacaacguggccaccugcggccuguucggccuggugagcuuccugcugcugugcggcagaagcugcagcaccaccuacaagggcguguacgagcugcagacccuggagcuggacauggccaaccugaacaugugcaugccccugagcugcaccaagaacaacagccaccacuacaucauggugggcaacgagaccggccuggagcugacccugaccaacaccagcaucaucaaccacaaguucugcaaccugagcgacgcccacaagaagaaccuguacgaccacgcccugaugagcaucaucagcaccuuccaccugagcauccccaacuucaaccaguacgaggccaugagcugcgacuucaacggcggcaagaucagcgugcaguacaaccugagccacaccuacgccguggacgccgccaaccacugcggcaccaucgccaacggcgugcugcagaccuucaugagaauggccuggggcggcagcuacaucgcccuggacagcggcaagggcagcugggacugcaucaugaccagcuaccaguaccuggugauccagaacaccaccugggaggaccacugccaguucagcagacccagccccaucggcuaccugggccugcugagccagagaaccagagacaucuacaucagcagaagaagaagaggcaccuucaccuggacccugagcgacagcgagggcaacgagacccccggcggcuacugccugaccagauggaugcugaucgaggccgagcugaagugcuucggcaacaccgccguggccaagugcaacgagaagcacgacgaggaguucugcgacaugcugagacuguucgacuucugcaagcaggccaucagaagacugaagacccccgcccagaugagcauccagcugaucaacaaggccgugaacgcccugaucaacgaccagcugaucaugaagaaccaccugagagacaucaugggcauccccuacugcaacuacagcaaguacugguaccugaaccacaccgugaccggcaagaccagccugcccagaugcuggcuggugagcaacggcagcuaccugaacgagacccacuucagcgacgacaucgagcagcaggccgacaacaugaucaccgagcugcugcagaaggaguacaucgacagacagggcaagaccccccugggccugguggaccuguucguguucagcaccagcuucuaccugaucagcaucuuccugcaccuggugaagauccccacccacagacacaucaccggcaagcccugccccaagccccacagacugaaccacaugggcaucugcagcugcggccuguacaagcaccccggcgugcccgugaaguggaagagaugaggacuagucccuguucccagagcccacuuuuuuuucuuuuuuugaaauaaaauagccugucuuucagaucucaaaggcucuuuucagagccaccaaaaaaaaaaaaaaaaaaaaaaaaaaaaaaaaaaaaaaaaaaaaaaaaaaaaaaaaaaaaaaaaagaauu

SEQ ID NO: 23184 - RNA, 1714 nt, Artificial Sequence
  mRNA product Design a-1 (hSL-A64-N5) comprising derived and/or modified sequence from LASV(Lassa virus/H.sapiens-wt/NGA/2016/ISTH_0009;Clade II)__AVO03571__GPCmut2 (opt4)
aggagagucccgcagucggcguccagcggcucugcuuguucgugugugugucguugcaggccuuauucaagcuuaccaugggccagaucaucaccuucuuccaggaggugccccacgugaucgaggaggugaugaacaucgugcugaucgcccugagccugcuggccauccugaagggcaucuacaacguggccaccugcggccugcugggccuggugagcuuccugcugcugugcggcagaagcugcagcaccaccuacaagggcguguacgagcugcagacccuggagcuggacauggccagccugaacaugugcaugccccugagcugcaccaagaacaacagccaccacuacaucauggugggcaacgagaccggccuggagcugacccugaccaacaccagcaucaucaaccacaaguucugcaaccugagcgacgcccacaagaagaaccuguacgaccacgcccugaugagcaucaucagcaccuuccaccugagcauccccaacuucaaccaguacgaggccaugagcugcgacuucaacggcggcagaaucagcgugcaguacaaccugagccacagcuacgccguggacgccgccaaccacugcggcaccaucgccaacggcgugcugcagaccuucaugagaauggccuggggcggcagcuacaucgcccuggacagcggcaagggcagcugggacugcaucaugaccagcuaccaguaccugaucauccagaacaccaccugggaggaccacugccaguucagcagacccagccccaucggcuaccugggccugcugagccagagaaccagagacaucuacaucagcagaagaagaagaggcaccuucaccuggacccugagcgacagcgagggcaacgagacccccggcggcuacugccugaccagauggaugcugaucgaggccgagcugaagugcuucggcaacaccgccguggccaagugcaacgagaagcacgacgaggaguucugcgacaugcugagacuguucgacuucugcaagcaggccaucagaagacugaagacccccgcccagaugagcauccagcugaucaacaaggccgugaacgcccugaucaacgaccagcugaucaugaagaaccaccugagagacaucaugggcauccccuacugcaacuacagcaaguacugguaccugaaccacaccgugaccggcaagaccagccugcccagaugcuggcuggugagcaacggcagcuaccugaacgagacccacuucagcgacgacaucgagcagcaggccgacaacaugaucaccgagcugcugcagaaggaguacaucgacagacagggcaagaccccccugggccugguggaccuguucguguucagcaccagcuucuaccugaucagcaucuuccugcaccuggugaagauccccacccacagacacaucaccggcaagcccugccccaagccccacagacugaaccacaugggcaucugcagcugcggccuguacaaccaccccggcgugcccgugaaguggaagagaugaggacuagucccuguucccagagcccacuuuuuuuucuuuuuuugaaauaaaauagccugucuuucagaucucaaaggcucuuuucagagccaccaaaaaaaaaaaaaaaaaaaaaaaaaaaaaaaaaaaaaaaaaaaaaaaaaaaaaaaaaaaaaaaaagaauu

SEQ ID NO: 23185 - RNA, 1714 nt, Artificial Sequence
  mRNA product Design a-1 (hSL-A64-N5) comprising derived and/or modified sequence from LASV(Lassa virus/H.sapiens-wt/NGA/2016/ISTH_0017;Clade II)__AVO03567__GPCmut2 (opt4)
aggagagucccgcagucggcguccagcggcucugcuuguucgugugugugucguugcaggccuuauucaagcuuaccaugggccagaucaucaccuucuuccaggaggugccccacgugaucgaggaggugaugaacaucgugcugaucgcccugagccugcuggccauccugaagggcaucuacaacguggccaccugcggccuguucggccuggugagcuuccugcugcugugcggcagaagcugcagcaccaccuacaagggcguguacgagcugcagacccuggagcuggacauggccagccugaacaugugcaugccccugagcugcaccaagaacaacagccaccacuacaucauggugggcaacgagaccggccuggagcugacccugaccaacaccagcaucaucaaccacaaguucugcaaccugagcgacgcccacaagaagaaccuguacgaccacgcccugaugagcaucaucagcaccuuccaccugagcauccccaacuucaaccaguacgaggccaugagcugcgacuucaacggcggcaagaucagcgugcaguacaaccugagccacaccuacgccaucgacgccgccaaccacugcggcaccaucgccaacggcgugcugcagaccuucaugagaauggccuggggcggcagcuacaucgcccuggacagcggcaagggcagcugggacugcaucaugaccagcuaccaguaccugaucauccagaacaccaccugggaggaccacugccaguucagcagacccagccccaucggcuaccugggccugcugagccagagaaccagagacaucuacaucagcagaagaagaagaggcaccuucaccuggacccugagcgacagcgagggcaacgagacccccggcggcuacugccugaccagauggaugcugaucgaggccgagcugaagugcuucggcaacaccgccguggccaagugcaacgagaagcacgacgaggaguucugcgacaugcugagacuguucgacuucugcaagcaggccaucagaagacugaagacccccgcccagaugagcauccagcugaucaacaaggccgugaacgcccugaucaacgaccagcugaucaugaagaaccaccugagagacaucaugggcauccccuacugcaacuacagcaaguacugguaccugaaccacaccgugaccggcaagaccagccugcccagaugcuggcuggugagcaacggcagcuaccugaacgagacccacuucagcgacgacaucgagcagcaggccgacaacaugaucaccgagcugcugcagaaggaguacauggacagacagggcaagaccccccugggccugguggaccuguucguguucagcaccagcuucuaccugaucagcaucuuccugcaccuggugagaauccccacccacagacacgugaucggcaagcccugccccaagccccacagacugaaccacaugggcaucugcagcugcggccuguacaagcaccccggcgugcccgugaaguggaagagaugaggacuagucccuguucccagagcccacuuuuuuuucuuuuuuugaaauaaaauagccugucuuucagaucucaaaggcucuuuucagagccaccaaaaaaaaaaaaaaaaaaaaaaaaaaaaaaaaaaaaaaaaaaaaaaaaaaaaaaaaaaaaaaaaagaauu

SEQ ID NO: 23186 - RNA, 1714 nt, Artificial Sequence
  mRNA product Design a-1 (hSL-A64-N5) comprising derived and/or modified sequence from LASV(Lassa virus/H.sapiens-wt/NGA/2018/ISTH_0959;Clade II)__AVV65099__GPCmut2 (opt4)
aggagagucccgcagucggcguccagcggcucugcuuguucgugugugugucguugcaggccuuauucaagcuuaccaugggccagaucaucaccuucuuccaggaggugccccacgugaucgaggaggugaugaacaucgugcugaucgcccugagccugcuggccauccugaagggcaucuacaacguggugaccugcggccuguucggccuggugagcuuccugcugcugugcggcagaagcugcagcaccaccuacaagggcguguacgagcugcagacccuggagcuggacauggccagccugaacaugugcaugccccugagcugcaccaagaacaacagccaccacuacaucauggugggcaacgagaccggccuggagcugacccugaccaacaccagcaucaucaaccacaaguucugcaaccugagcgacgcccacaagaagaaccuguacgaccacgcccugaugagcaucaucagcaccuuccaccugagcauccccaacuucaaccaguacgaggccaugagcugcgacuucaacggcggcaagaucagcgugcaguacaaccugagccacgccuacgccaucgacgccgccaaccacugcggcaccaucgccaacggcgugcugcagaccuucaugagaauggccuggggcggcagcuacaucgcccuggacagcggcaagggcagcugggacugcaucaugaccagcuaccaguaccugaucauccagaacaccaccugggaggaccacugccaguucagcagacccagccccaucggcuaccugggccugcugagccagagaaccagagacaucuacaucagcagaagaagaagaggcaccuucaccuggacccugagcgacagcgagggcaacgagacccccggcggcuacugccugaccagauggaugcugaucgaggccgagcugaagugcuucggcaacaccgccguggccaagugcaacgagaagcacgacgaggaguucugcgacaugcugagacuguucgacuucugcaagcaggccaucagaagacugaagacccccgcccagaugagcauccagcugaucaacaaggccgugaacgcccugaucaacgaccagcugaucaugaagaaccaccugagagacaucaugggcauccccuacugcaacuacagcaaguacugguaccugaaccacaccgugaccggcaagaccagccugcccagaugcuggcuggugagcaacggcagcuaccugaacgagacccacuucagcgacgacaucgagcagcaggccgacaacaugaucaccgagcugcugcagaaggaguacaucgacagacagggcaagaccccccugggccugguggaccuguucguguucagcaccagcuucuaccugaucagcaucuuccugcaccuggugaagauccccacccacagacacgugaucggcaagcccugccccaagccccacagacugaaccacaugggcaucugcagcugcggccuguacaagcaccccggcgugcccgugaaguggaagagaugaggacuagucccuguucccagagcccacuuuuuuuucuuuuuuugaaauaaaauagccugucuuucagaucucaaaggcucuuuucagagccaccaaaaaaaaaaaaaaaaaaaaaaaaaaaaaaaaaaaaaaaaaaaaaaaaaaaaaaaaaaaaaaaaagaauu

SEQ ID NO: 23187 - RNA, 1714 nt, Artificial Sequence
  mRNA product Design a-1 (hSL-A64-N5) comprising derived and/or modified sequence from LASV(LASV003-NIG-2008;Clade II)__AIT17580__GPCmut2 (opt4)
aggagagucccgcagucggcguccagcggcucugcuuguucgugugugugucguugcaggccuuauucaagcuuaccaugggccagaucaucaccuucuuccaggaggugccccacgugaucgaggaggugaugaacaucgugcugaucgcccugagccugcuggccauccugaagggcaucuacaacguggccaccugcggccuguucggccuggugagcuuccugcugcugugcggcagaagcugcagcaccaccuacaagggcguguacgagcugcagacccuggagcuggacauggccagccugaacaugugcaugccccugagcugcaccaagaacaacagccaccacuacaucauggugggcaacgagaccggccuggagcugacccugaccaacaccagcaucaucaaccacaaguucugcaaccugagcgacgcccacaagaagaaccuguacgaccacgcccugaugagcaucaucagcaccuuccaccugagcauccccaacuucaaccaguacgaggccaugagcugcgacuucaacggcggcaagaucagcgugcaguacaaccugagccacaccuacgccguggacgccgccaaccacugcggcaccaucgccaacggcgugcugcagaccuucaugagaauggccuggggcggcagcuacaucgcccuggacagcggcaagggcagcugggacugcaucaugaccagcuaccaguaccugaucauccagaacaccaccugggaggaccacugccaguucagcagacccagccccaucggcuaccugggccugcugagccagagaaccagagacaucuacaucagcagaagaagaagaggcaccuucaccuggacccugagcgacagcgagagcaacgagacccccggcggcuacugccugaccagauggaugcugaucgaggccgagcugaagugcuucggcaacaccgccguggccaagugcaacgagaagcacgacgaggaguucugcgacaugcugagacuguucgacuucugcaagcaggccaucagaagacugaaggcccccgcccagaugagcauccagcugaucaacaaggccgugaacgcccugaucaacgaccagcugaucaugaagaaccaccugagagacaucaugggcauccccuacugcaacuacagcaaguacugguaccugaaccacaccgugaccggcagaaccagccugcccagaugcuggcuggugagcaacggcagcuaccugaacgagacccacuucagcgacgacaucgagcagcaggccgacaacaugaucaccgagcugcugcagaaggaguacauggacagacagggcaagaccccccugggccugguggaccuguucguguucagcaccagcuucuaccugaucagcaucuuccugcaccuggugaagauccccacccacagacacgugaucggcaagcccugccccaagccccacagacugaaccacaugggcaucugcagcugcggccuguacaagcaccccggcgugcccgugaaguggaagagaugaggacuagucccuguucccagagcccacuuuuuuuucuuuuuuugaaauaaaauagccugucuuucagaucucaaaggcucuuuucagagccaccaaaaaaaaaaaaaaaaaaaaaaaaaaaaaaaaaaaaaaaaaaaaaaaaaaaaaaaaaaaaaaaaagaauu

SEQ ID NO: 23188 - RNA, 1714 nt, Artificial Sequence
  mRNA product Design a-1 (hSL-A64-N5) comprising derived and/or modified sequence from LASV(LASV035-NIG-2009;Clade II)__AIT17588__GPCmut2 (opt4)
aggagagucccgcagucggcguccagcggcucugcuuguucgugugugugucguugcaggccuuauucaagcuuaccaugggccagaucaucaccuucuuccaggaggugccccacgugaucgaggaggugaugaacaucgugcugaucgcccugagccugcuggccauccugaagggcaucuacaacguggccaccugcggccuguucggccuggugagcuuccugcugcugugcggcagaagcugcagcaccaccuacaagggcguguacgagcugcagacccuggagcuggacauggccagccugaacaugugcaugccccugagcugcaccaagaacaacagccaccacuacaucauggugggcaacgagaccggccuggagcugacccugaccaacaccagcaucaucaaccacaaguucugcaaccugagcgacgcccacaagaagaaccuguacgaccacgcccugaugagcaucaucagcaccuuccaccugagcauccccaacuucaaccaguacgaggccaugagcugcgacuucaacggcggcaagaucagcgugcaguacaaccugagccacgccuacgccguggacgccgccaaccacugcggcaccaucgccaacggcgugcugcagaccuucaugagaauggccuggggcggcagcuacaucgcccuggacagcggcaagggcagcugggacugcaucaugaccagcuaccaguaccugaucauccagaacaccaccugggaggaccacugccaguucagcagacccagccccaucggcuaccugggccugcugagccagagaaccagagacaucuacaucagcagaagaagaagaggcaccuucaccuggacccugagcgacagcgagggcaacgagacccccggcggcuacugccugaccagauggaugcugaucgaggccgagcugaagugcuucggcaacaccgccguggccaagugcaacgagaagcacgacgaggaguucugcgacaugcugagacuguucgacuucugcaagcaggccaucagaagacugaaggcccccgcccagaugagcauccagcugaucaacaaggccgugaacgcccugaucaacgaccagcugaucaugaagaaccaccugagagacaucaugggcauccccuacugcaacuacagcaaguacugguaccugaaccacaccgugaccggcaagaccagccugcccagaugcuggcuggugagcaacggcagcuaccugaacgagacccacuucagcgacgacaucgagcagcaggccgacaacaugaucaccgagcugcugcagaaggaguacaucgacagacagggcaagaccccccugggccugguggaccuguucguguucagcaccagcuucuaccugaucagcaucuuccugcaccuggugaagauccccacccacagacacgugaucggcaagcccugccccaagccccacagacugaaccacaugggcaucugcagcugcggccuguacaagcaccccggcgugcccgugaaguggaagagaugaggacuagucccuguucccagagcccacuuuuuuuucuuuuuuugaaauaaaauagccugucuuucagaucucaaaggcucuuuucagagccaccaaaaaaaaaaaaaaaaaaaaaaaaaaaaaaaaaaaaaaaaaaaaaaaaaaaaaaaaaaaaaaaaagaauu

SEQ ID NO: 23189 - RNA, 1714 nt, Artificial Sequence
  mRNA product Design a-1 (hSL-A64-N5) comprising derived and/or modified sequence from LASV(LASV1000-NIG-2009;Clade II)__AIT17782__GPCmut2 (opt4)
aggagagucccgcagucggcguccagcggcucugcuuguucgugugugugucguugcaggccuuauucaagcuuaccaugggccagaucaucaccuucuuccaggaggugccccacgugaucgaggaggugaugaacaucgugcugaucgcccugagccugcuggccauccugaagggcaucuacaacguggccaccugcggccuguucggccuggugagcuuccugcugcugugcggcagaagcugcagcaccaccuacaagggcguguacgagcugcagacccuggagcuggacauggccagccugaacaugugcaugccccugagcugcaccaagaacaacagccaccacuacaucauggugggcaacgagaccggccuggagcugacccugaccaacaccagcaucaucaaccacaaguucugcaaccugagcgacgcccacaagaagaaccuguacgaccacgcccugaugagcaucaucagcaccuuccaccugagcauccccaacuucaaccaguacgaggccaugagcugcgacuucaacggcggcaagaucagcgugcaguacaaccugagccacaccuacgccguggacgccgccaaccacugcggcaccaucgccaacggcgugcugcagaccuucaugagaauggccuggggcggcagcuacaucgcccuggacagcggcaagggcagcugggacugcaucaugaccagcuaccaguaccugaucauccagaacaccaccugggaggaccacugccaguucagcagacccagccccaucggcuaccugggccugcugagccagagaaccagagacaucuacaucagcagaagaagaagaggcaccuucaccuggacccugagcgacagcgagggcaacgagacccccggcggcuacugccugaccagauggaugcugaucgaggccgagcugaagugcuucggcaacaccgccguggccaagugcaacgagaagcacgacgaggaguucugcgacaugcugagacuguucgacuucugcaagcaggccaucaagagacugaagacccccgcccagaugagcauccagcugaucaacaaggccgugaacgcccugaucaacgaccagcugaucaugaagaaccaccugagagacaucaugggcauccccuacugcaacuacagcaaguacugguaccugaaccacaccgugaccggcaagaccagccugcccagaugcuggcuggugagcaacggcagcuaccugaacgagacccacuucagcgacgacaucgagcagcaggccgacaacaugaucaccgagcugcugcagaaggaguacaucgacagacagggcaagaccccccugggccugguggaccuguucguguucagcaccagcuucuaccugaucagcaucuuccugcaccuggugaagauccccacccacagacacguggugggcaagcccugccccaagccccacagacugaaccacaugggcaucugcagcugcggccuguacaagcaccccggcgugcccgugaaguggaagagaugaggacuagucccuguucccagagcccacuuuuuuuucuuuuuuugaaauaaaauagccugucuuucagaucucaaaggcucuuuucagagccaccaaaaaaaaaaaaaaaaaaaaaaaaaaaaaaaaaaaaaaaaaaaaaaaaaaaaaaaaaaaaaaaaagaauu

SEQ ID NO: 23190 - RNA, 1714 nt, Artificial Sequence
  mRNA product Design a-1 (hSL-A64-N5) comprising derived and/or modified sequence from LASV(LASV221-NIG-2010;Clade II)__AIT17624__GPCmut2 (opt4)
aggagagucccgcagucggcguccagcggcucugcuuguucgugugugugucguugcaggccuuauucaagcuuaccaugggccagaucaucaccuucuuccaggaggugccccacgugaucgaggaggugaugaacaucgugcugaucgcccugagccugcuggccauccugaagggcaucuacaacguggccaccugcggccuguucggccuggugagcuuccugcugcugugcggcagaagcugcagcaccaccuacaagggcguguacgagcugcagacccuggagcuggacauggccagccugaacaugugcaugccccugagcugcaccaagaacaacagccaccacuacaucauggugggcaacgagaccggccuggagcugacccugaccaacaccagcaucaucaaccacaaguucugcaaccugagcgacgcccacaagaagaaccuguacgaccacgcccugaugagcaucaucagcaccuuccaccugagcauccccaacuucaaccaguacgaggccaugagcugcgacuucaacggcggcaagaucagcgugcaguacaaccugagccacaccuacgccaucgacgccgccaaccacugcggcaccaucgccaacggcgugcugcagaccuucaugagaauggccuggggcggcagcuacaucgcccuggacagcggcaagggcagcugggacugcaucaugaccagcuaccaguaccugaucauccagaacaccaccugggaggaccacugccaguucagcagacccagccccaucggcuaccugggccugcugagccagagaaccagagacaucuacaucagcagaagaagaagaggcaccuucaccuggacccugagcgacagcgagggcaacgagacccccggcggcuacugccugaccagauggaugcugaucgaggccgagcugaagugcuucggcaacaccgccguggccaagugcaacgagaagcacgacgaggaguucugcgacaugcugagacuguucgacuucugcaagcaggccaucagaagacugaagacccccgcccagaugagcauccagcugaucaacaaggccgugaacgcccugaucaacgaccagcugaucaugaagaaccaccugagagacaucaugggcauccccuacugcaacuacagcaaguacugguaccugaaccacaccgugaccggcaagaccagccugcccagaugcuggcuggugagcaacggcagcuaccugaacgagacccacuucagcgacgacaucgagcagcaggccgacaacaugaucaccgagaugcugcagaaggaguacauggacagacagggcaagaccccccugggccugguggaccuguucguguucagcaccagcuucuaccugaucagcaucuuccugcaccuggugaagauccccacccacagacacgugaucggcaagcccugccccaagccccacagacugaaccacaugggcaucugcagcugcggccuguacaagcaccccggcgugcccgugaaguggaagagaugaggacuagucccuguucccagagcccacuuuuuuuucuuuuuuugaaauaaaauagccugucuuucagaucucaaaggcucuuuucagagccaccaaaaaaaaaaaaaaaaaaaaaaaaaaaaaaaaaaaaaaaaaaaaaaaaaaaaaaaaaaaaaaaaagaauu

SEQ ID NO: 23191 - RNA, 1714 nt, Artificial Sequence
  mRNA product Design a-1 (hSL-A64-N5) comprising derived and/or modified sequence from LASV(LASV237-NIG-2010;Clade II)__AIT17638__GPCmut2 (opt4)
aggagagucccgcagucggcguccagcggcucugcuuguucgugugugugucguugcaggccuuauucaagcuuaccaugggccagaucaucaccuucuuccaggaggugccccacgugaucgaggaggugaugaacaucgugcugaucgcccugagccugcuggccauccugaagggcaucuacaacguggccaccugcggccuguucggccuggugagcuuccugcugcugugcggcagaagcugcagcaccaccuacaagggcguguacgagcugcagacccuggagcuggacauggccagccugaacaugugcaugccccugagcugcaccaagaacaacagccaccacuacaucauggugggcaacgagaccggccuggagcugacccugaccaacaccagcaucaucaaccacaaguucugcaaccugagcgacgcccacaagaaggaccuguacgaccacgcccugaugagcaucaucagcaccuuccaccugagcauccccaacuucaaccaguacgaggccaugagcugcgacuucaacggcggcaagaucagcgugcaguacaaccugagccacaccuacgccguggacgccgccaaccacugcggcaccaucgccaacggcgugcugcagaccuucaugagaauggccuggggcggcagcuacaucgcccuggacagcggcaagggcagcugggacugcaucaugaccagcuaccaguaccugaucauccagaacaccaccugggaggaccacugccaguucagcagacccagccccaucggcuaccugggccugcugagccagagaaccagagacaucuacaucagcagaagaagaagaggcaccuucaccuggacccugagcgacagcgagggcaacgagacccccggcggcuacugccugaccagauggaugcugaucgaggccgagcugaagugcuucggcaacaccgccguggccaagugcaacgagaagcacgacgaggaguucugcgacaugcugagacuguucgacuucugcaagcaggccaucagaagacugaagacccccgcccagaugagcauccagcugaucaacaaggccgugaacgcccugaucaacgaccagcugaucaugaagaaccaccugagagacaucaugggcauccccuacugcaacuacagcaaguacugguaccugaaccacaccgugaccggcaagaccagccugcccagaugcuggcuggugagcaacggcagcuaccugaacgagacccacuucagcgacgacaucgagcagcaggccgacaacaugaucaccgagcugcugcagaaggaguacauggacagacagggcaagaccccccugggccugguggaccuguucguguucagcaccagcuucuaccugaucagcaucuuccugcaccugaucaagauccccacccacagacacaucaccggcaagcccugccccaagccccacagacugaaccacaugggcaucugcagcugcggccuguacaagcaccccggcgugcccgugaaguggaagagaugaggacuagucccuguucccagagcccacuuuuuuuucuuuuuuugaaauaaaauagccugucuuucagaucucaaaggcucuuuucagagccaccaaaaaaaaaaaaaaaaaaaaaaaaaaaaaaaaaaaaaaaaaaaaaaaaaaaaaaaaaaaaaaaaagaauu

SEQ ID NO: 23192 - RNA, 1714 nt, Artificial Sequence
  mRNA product Design a-1 (hSL-A64-N5) comprising derived and/or modified sequence from LASV(LASV253-NIG-2011;Clade II)__AIT17670__GPCmut2 (opt4)
aggagagucccgcagucggcguccagcggcucugcuuguucgugugugugucguugcaggccuuauucaagcuuaccaugggccagaucaucaccuucuuccaggaggugccccacgugaucgaggaggugaugaacaucgugcugaucgcccugagccugcuggccauccugaagggcaucuacaacguggccaccugcggccuguucggccuggugagcuuccugcugcugugcggcagaagcugcagcaccaccuacaagggcguguacgagcugcagacccuggagcuggacauggccagccugaacaugugcaugccccugagcugcaccaagaacaacagccaccacuacaucauggugggcaacgagaccggccuggagcugacccugaccaacaccagcaucaucaaccacaaguucugcaaccugagcgacgcccacaagaagaaccuguacgaccacgcccugaugagcaucaucagcaccuuccaccugagcauccccaacuucaaccaguacgaggccaugagcugcgacuucaacggcggcaagaucagcgugcaguacaaccugagccacaccuacgccguggacgccgccaaccacugcggcaccaucgccaacggcgugcugcagaccuucaugagaauggccuggggcggcagcuacaucgcccuggacagcggcaagggcagcugggacugcaucaugaccagcuaccaguaccugaucauccagaacaccaccugggaggaccacugccaguucagcagacccagccccaucggcuaccugggccugcugagccagagaaccagagacaucuacaucagcagaagaagaagaggcaccuucaccuggacccugagcgacagcgagggcaacgagacccccggcggcuacugccugaccagauggaugcugaucgaggccgagcugaagugcuucggcaacaccgccguggccaagugcaacgagaagcacgacgaggaguucugcgacaugcugagacuguucgacuucugcaagcaggccaucagaagacugaaggcccccgcccagaugagcauccagcugaucaacaaggccgugaacgcccugaucaacgaccagcugaucaugaagaaccaccugagagacaucaugggcauccccuacugcaacuacagcaaguacugguaccugaaccacaccgugaccggcagaaccagccugcccagaugcuggcuggugagcaacggcagcuaccugaacgagacccacuucagcgacgacaucgagcagcaggccgacaacaugaucaccgagcugcugcagaaggaguacaucgacagacagggcaagaccccccugggccugguggaccuguucguguucagcaccagcuucuaccugaucagcaucuuccugcaccuggugaagauccccacccacagacacaucaucggcaagcccugccccaagccccacagacugaaccacaugggcaucugcagcugcggccuguacaagcaccccggcgugcccgugaaguggaagagaugaggacuagucccuguucccagagcccacuuuuuuuucuuuuuuugaaauaaaauagccugucuuucagaucucaaaggcucuuuucagagccaccaaaaaaaaaaaaaaaaaaaaaaaaaaaaaaaaaaaaaaaaaaaaaaaaaaaaaaaaaaaaaaaaagaauu

SEQ ID NO: 23193 - RNA, 1714 nt, Artificial Sequence
  mRNA product Design a-1 (hSL-A64-N5) comprising derived and/or modified sequence from LASV(LASV254-NIG-2011;Clade II)__AIT17674__GPCmut2 (opt4)
aggagagucccgcagucggcguccagcggcucugcuuguucgugugugugucguugcaggccuuauucaagcuuaccaugggccagaucaucaccuucuuccaggaggugccccacgugaucgaggaggugaugaacaucgugcugaucgcccugagccugcuggccauccugaagggcaucuacaacguggccaccugcggccuguucggccuggugagcuuccugcugcugugcggcagaagcugcagcaccaccuacaagggcguguacgagcugcagacccuggagcuggacaugaccaaccugaacaugugcaugccccugagcugcaccaagaacaacagccaccacuacaucauggugggcaacgagaccggccuggagcugacccugaccaacaccagcaucaucaaccacaaguucugcaaccugagcgacgcccacaagaagaaccuguacaaccacgcccugaugagcaucaucagcaccuuccaccugagcauccccaacuucaaccaguacgaggccaugagcugcgacuucaacggcggcaagaucagcgugcaguacaaccugagccacagcuacgccguggacgccgccaaccacugcggcaccaucgccaacggcgugcugcagaccuucaugagaauggccuggggcggcagcuacaucgcccuggacagcggcaagggcaacugggacugcaucaugaccagcuaccaguaccugaucauccagaacaccaccugggaggaccacugccaguucagcagacccagccccaucggcuaccugggccugcugagccagagaaccagagacaucuacaucagcagaagaagaagaggcaccuucaccuggacccugagcgacagcgagggcaacgagacccccggcggcuacugccugaccagauggaugcugaucgaggccgagcugaagugcuucggcaacaccgccguggccaagugcaacgagaagcacgacgaggaguucugcgacaugcugagacuguucgacuucugcaagcaggccaucagaagacugaagacccccgcccaggccaacauccagcugaucaacaaggccgugaacgcccugaucaacgaccagcugaucaugaagaaccaccugagagacaucaugggcauccccuacugcaacuacagcaaguacugguaccugaaccacaccgugaccggcaagaccagccugcccagaugcuggcuggugagcaacggcagcuaccugaacgagacccacuucagcgacgacaucgagcagcaggccgacaacaugaucaccgagcugcugcagaaggaguacauggacagacagggcaagaccccccugggccugguggaccuguucguguucagcaccagcuucuaccugaucagcaucuuccugcaccuggugaagauccccacccacagacacgugaucggcaagcccugccccaagccccacagacugaaccacaugggcaucugcagcugcggccuguacaagcaccccggcgugcccgugaaguggaagagaugaggacuagucccuguucccagagcccacuuuuuuuucuuuuuuugaaauaaaauagccugucuuucagaucucaaaggcucuuuucagagccaccaaaaaaaaaaaaaaaaaaaaaaaaaaaaaaaaaaaaaaaaaaaaaaaaaaaaaaaaaaaaaaaaagaauu

SEQ ID NO: 23194 - RNA, 1714 nt, Artificial Sequence
  mRNA product Design a-1 (hSL-A64-N5) comprising derived and/or modified sequence from LASV(Nig08-A19;Clade III)__ADU56618__GPCmut2 (opt4)
aggagagucccgcagucggcguccagcggcucugcuuguucgugugugugucguugcaggccuuauucaagcuuaccaugggccagaucgugaccuucuuccaggaggugccccacgugaucgaggaggugaugaacaucgugcugaucgcccugagcauccuggccauccugaagggccuguacaacaucgccaccugcggccugaucggccuggugaccuuccugcugcugagcggcagaagcugcagcaugaccuacaagggcguguacgagcugcagacccuggagcugaacaugaacacccugaacaugugcaugccccugagcugcaccaagaacaacagccaccacuacaucauggugggcaacgagaccggccuggagcugacccugaccaacaccagccugcugcaccacaaguucugcaaccugagcgacgcccacaagaagaaccuguacgaccacacccugaugagcaucaucagcaccuuccaccugagcauccccaacuucaaccaguacgaggccaugagcugcgacuucaacggcggcaagaucaccgugcaguacaaccugagccacagcuacgccaucgacgccgccaaccacugcggcaccguggccaacggcgugcugcagaccuucaugagaauggccuggggcggcagcuacaucgcccuggacagcggcagaggcaagugggacugcaucaugaccagcuaccaguaccugaucauccagaacaccaccugggaggaccacugccaguucagcagacccagccccaucggcuaccugggccugcugagccagagaaccagagacaucuacaucagcagaagaagaagaggcaccuucaccuggacccugagcgacagcgagggcaacgagacccccggcggcuacugccugaccagauggaugcugaucgaggccgagcugaagugcuucggcaacaccgccguggccaagugcaacgagaagcacgacgaggaguucugcgacaugcugagacuguucgacuucugcaagcaggccaucagaagacugaaggcccccgcccagaugagcauccagcugaucaacaaggccgugaacgcccugaucaacgaccagcugaucaugaagaaccaccugagagacaucaugggcauccccuacugcaacuacagcaaguacugguaccugaaccacaccagcaccggcagaaccagccugcccagaugcuggcuggugagcaacggcagcuaccugaacgagacccacuucagcgacgacaucgagcagcaggccgacaacaugaucaccgagaugcugcagaaggaguaccuggacagacagggcaagaccccccugggccugguggaccuguucguguucagcaccagcuucuaccugaucagcaucuuccugcaccuggugaagauccccacccacagacacaucgugggcaagcccugccccaagccccacagacugaaccacaugggcaucugcagcugcggccuguacaagcagcccggcgugcccgugagauggaagagaugaggacuagucccuguucccagagcccacuuuuuuuucuuuuuuugaaauaaaauagccugucuuucagaucucaaaggcucuuuucagagccaccaaaaaaaaaaaaaaaaaaaaaaaaaaaaaaaaaaaaaaaaaaaaaaaaaaaaaaaaaaaaaaaaagaauu

SEQ ID NO: 23195 - RNA, 1717 nt, Artificial Sequence
  mRNA product Design a-1 (hSL-A64-N5) comprising derived and/or modified sequence from LASV(G1180-SLE-2010;Clade IV)__AIT17168__GPCmut2 (opt4)
aggagagucccgcagucggcguccagcggcucugcuuguucgugugugugucguugcaggccuuauucaagcuuaccaugggccagaucgugaccuucuuccaggaggugccccacgugaucgaggaggugaugaacaucgugcugaucgcccugagcauccuggccgugcugaagggccuguacaacuucgccaccugcggccuggugggccugcugaccuuccugcugcugugcggcagaagcugcaccgccagcagauacaagggcguguacgagcugcagacccuggagcugaacauggagacccugaacaugugcaugccccugagcugcaccaagaacaacagccaccacuacaucauggugggcaacgagaccggccuggagcugacccugaccaacaccagcaucaucaaccacaaguucugcaaccugagcgacgcccacaagaagaaccuguacgaccacgcccugaugagcaucaucagcaccuuccaccugagcauccccaacuucaaccaguacgaggccaugagcugcgacuucaacggcggcaagaucagcgugcaguacaaccugagccacagcuacgccggcgacgccgccaaccacugcggcaccguggccaacggcgugcugcagaccuucaugagaauggccuggggcggcagcuacaucgcccuggacagcggccacggcagcugggacugcaucaugaccagcuaccaguaccugaucauccagaacaccaccugggaggaccacugccaguucagcagacccagccccaucggcuaccugggccugcugagccagagaaccagagacaucuacaucagcagaagaagaagaggcaccuucaccuggacccugagcgacagcgagggcaaggacacccccggcggcuacugccugaccagauggaugcugaucgaggccgagcugaagugcuucggcaacaccgccguggccaagugcaacgagaagcacgacgaggaguucugcgacaugcugagacuguucgacuucugcaagcaggccauccagagacugaaggcccccgcccagaugagcauccagcugaucaacaaggccgugaacgcccugaucaacgaccagcugaucaugaagaaccaccugagagacaucaugggcauccccuacugcaacuacagcaaguacugguaccugaaccacaccaccaccggcaagaccagccugcccaagugcuggcuggugagcaacggcagcuaccugaacgagacccacuucagcgacgacaucgagcagcaggccgacaacaugaucaccgagaugcugcagaaggaguacauggagagacagggcaagaccccccugggccugguggaccuguucguguucagcaccagcuucuaccugaucagcaucuuccugcaccuggugaagauccccacccacagacacaucgugggcaagagcugccccaagccccacagacugaaccacaugggcaucugcagcugcggccuguacaagcagcccggcgugcccgugaaguggaagagaugaggacuagucccuguucccagagcccacuuuuuuuucuuuuuuugaaauaaaauagccugucuuucagaucucaaaggcucuuuucagagccaccaaaaaaaaaaaaaaaaaaaaaaaaaaaaaaaaaaaaaaaaaaaaaaaaaaaaaaaaaaaaaaaaagaauu

SEQ ID NO: 23196 - RNA, 1717 nt, Artificial Sequence
  mRNA product Design a-1 (hSL-A64-N5) comprising derived and/or modified sequence from LASV(G1442-SLE-2011;Clade IV)__AIT17180__GPCmut2 (opt4)
aggagagucccgcagucggcguccagcggcucugcuuguucgugugugugucguugcaggccuuauucaagcuuaccaugggccagaucgugaccuucuuccaggaggugccccacgugaucgaggaggugaugaacaucgugcugaucgcccugagcauccuggccgugcugaagggccuguacaacguggccaccugcggccugaucggccuggugaccuuccugcugcugugcggcagaagcugcaccaccacccuguacaagggcguguacgagcugcagacccuggagcugaacauggagacccugaacaugugcaugccccugagcugcaccaagaacaacagccaccacuacaucagagugggcaacgagaccggccuggagcugacccugaccaacaccagcaucaucaaccacaaguucugcaaccugagcgacgcccacaagaagaaccuguacgaccacgcccugaugagcaucaucagcaccuuccaccugagcauccccaacuucaaccaguacgaggccaugagcugcgacuucaacggcggcaagaucagcgugcaguacaaccugagccacagcuacgccggcgacgccgccaaccacugcggcaccguggccaacggcgugcugcagaccuucaugagaauggccuggggcggcagcuacaucgcccuggacagcggcagaggcaacugggacugcaucaugaccagcuaccaguaccugaucauccagaacaccaccugggacgaccacugccaguucagcagacccagccccaucggcuaccugggccugcugagccagagaaccagagacguguacaucagcagaagaagaagaggcaccuucaccuggacccugagcgacagcgagggcaaggacacccccggcggcuacugccugaccagauggaugcugaucgaggccgagcugaagugcuucggcaacaccgccguggccaagugcaacgagaagcacgacgaggaguucugcgacaugcugagacuguucgacuucugcaagcaggccauccagagacugaaggcccccgcccagaugagcauccagcugaucaacaaggccgugaacgcccugaucaacgaccagcugaucaugaagaaccaccugagagacaucaugggcauccccuacugcaacuacagcaaguacugguaccugaacaacaccgccaccggcaagaccagccugcccaagugcuggcugaucagcaacggcagcuaccugaacgagacccacuucagcgacgacaucgagcaggaggccgacaacaugaucaccgagaugcugcagaaggaguacauggagagacagggcaagaccccccugggccugguggaccuguucguguucagcaccagcuucuaccugaucagcaucuuccugcaccuggugaagauccccacccacagacacaucgugggcaagagcugccccaagccccacagacugaaccacaugggcaucugcagcugcggccuguacaagcagcccggcgugcccgugagauggaagagaugaggacuagucccuguucccagagcccacuuuuuuuucuuuuuuugaaauaaaauagccugucuuucagaucucaaaggcucuuuucagagccaccaaaaaaaaaaaaaaaaaaaaaaaaaaaaaaaaaaaaaaaaaaaaaaaaaaaaaaaaaaaaaaaaagaauu

SEQ ID NO: 23197 - RNA, 1717 nt, Artificial Sequence
  mRNA product Design a-1 (hSL-A64-N5) comprising derived and/or modified sequence from LASV(G3010-SLE-2013;Clade IV)__AIT17344__GPCmut2 (opt4)
aggagagucccgcagucggcguccagcggcucugcuuguucgugugugugucguugcaggccuuauucaagcuuaccaugggccagaucgugaccuucuuccaggaggugccccacgugaucgaggaggugaugaacaucgugcugaucgcccugagcauccuggccgugcugaagggccuguacaacuucgccaccugcggccuggugggccuggugaccuuccugcugcugugcggcagaagcugcaccaccagccuguacaagggcguguacgagcugcagacccuggagcugaacauggagacccugaacaugugcaugccccugagcugcaccaagaacaacagccaccacuacaucauggugggcaacgagaccggccuggagcugacccugaccaacaccagcaucaucaaccacaaguucugcaaccugagcgacgcccacaagaagaaccuguacaaccacgcccugaugagcaucaucagcaccuuccaccugagcauccccaacuucaaccaguacgaggccaugagcugcgacuucaacggcggcaagaucagcgugcaguacaaccugagccacagcuacgccggcgacgccgccagccacugcggcaccguggccaacggcgugcugcagaccuucaugagaauggccuggggcggcagcuacaucgcccuggacagcggcuacggcaagugggacugcaucaugaccagcuaccaguaccugaucauccagaacaccaccugggaggaccacugccaguucagcagacccagccccaucggcuaccugggccugcugagccagagaaccagagacaucuacaucagcagaagaagaagaggcaccuucaccuggacccugagcgacagcgagggcaaggacacccccggcggcuacugccugaccagauggaugcugaucgaggccgagcugaagugcuucggcaacaccgccguggccaagugcaacgagaagcacgacgaggaguucugcgacaugcugagacuguucgacuucugcaagcaggccauccagagacugaagacccccgcccagaugagcauccagcugaucaacaaggccgugaacgcccugaucaacgaccagcugaucaugaagaaccaccugagagacaucaugggcauccccuacugcaacuacagcaaguacugguaccugaaccacaccaccaccggcaagaccagccugcccaagugcuggcuggugagcaacggcagcuaccugaacgagacccacuucagcgacgacaucgagcagcaggccgacaacaugaucaccgagaugcugcagaaggaguacauggagagacagggcaagaccccccugggccugguggaccuguucguguucagcaccagcuucuaccugaucagcaucuuccugcaccuggugaagauccccacccacagacacaucgugggcaagagcugccccaagccccacagacugaaccacaugggcaucugcagcugcggccuguacaagcagcccggcgugcccgugagauggaagagaugaggacuagucccuguucccagagcccacuuuuuuuucuuuuuuugaaauaaaauagccugucuuucagaucucaaaggcucuuuucagagccaccaaaaaaaaaaaaaaaaaaaaaaaaaaaaaaaaaaaaaaaaaaaaaaaaaaaaaaaaaaaaaaaaagaauu

SEQ ID NO: 23198 - RNA, 1717 nt, Artificial Sequence
  mRNA product Design a-1 (hSL-A64-N5) comprising derived and/or modified sequence from LASV(G502-SLE-2009;Clade IV)__AIT17126__GPCmut2 (opt4)
aggagagucccgcagucggcguccagcggcucugcuuguucgugugugugucguugcaggccuuauucaagcuuaccaugggccagaucgugaccuucuuccaggaggugccccacgugaucgaggaggugaugaacaucgugcugaucgcccugagcauccuggccgugcugaagggccuguacaacuucgccaccugcggccuggugggccugcugaccuuccugcugcugugcggcagaagcugcaccaccggccuguacaagggcguguacgagcugcagacccuggagcugaacauggagacccugaacaugugcaugccccugagcugcaccaagaacaacagccaccacuacaucauggugggcaacgagaccggccuggagcugacccugaccaacaccagcaucaucaaccacaaguucugcaaccugagcgacgcccacaagaagaaccuguacgaccacgcccugaugagcaucaucagcaccuuccaccugagcauccccaacuucaaccaguacgaggccaugagcugcgacuucaacggcggcaagaucagcgugcaguacaaccugagccacagcuacgccggcgacgccgccgaccacugcggcaccguggccaacggcgugcugcagaccuucaugagaauggccuggggcggcagcuacaucgcccuggacagcggcagaggcagaugggacugcaucaugaccagcuaccaguaccugaucauccagaacaccaccugggaggaccacugccaguucagcagacccagccccaucggcuaccugggccugcugagccagagaaccagagacaucuacaucagcagaagaagaagaggcaccuucaccuggacccugagcgacagcgagggcaaggacacccccggcggcuacugccugaccagauggaugcugaucgaggccgagcugaagugcuucggcaacaccgccguggccaagugcaacgagaagcacgacgaggaguucugcgacaugcugagacuguucgacuucugcaagcaggccauccagagacugaaggcccccgcccagaugagcauccagcugaucaacaaggccgugaacgcccugaucaacgaccagcuggugaugaagaaccaccugagagacaucaugggcauccccuacugcaacuacagcagauacugguaccugaaccacaccaccaccggcagaaccagccugcccaagugcuggcuggugagcaacggcagcuaccugaacgagacccacuucagcgacgacaucgagcagcaggccgacaacaugaucaccgagaugcugcagaaggaguacauggagagacagggcaagaccccccugggccugguggaccuguucguguucagcaccagcuucuaccugaucagcaucuuccugcaccuggugaagauccccacccacagacacaucgugggcaagagcugccccaagccccacagacugaaccacaugggcaucugcagcugcggccuguacaagcagcccggcgugcccgugaaguggaagagaugaggacuagucccuguucccagagcccacuuuuuuuucuuuuuuugaaauaaaauagccugucuuucagaucucaaaggcucuuuucagagccaccaaaaaaaaaaaaaaaaaaaaaaaaaaaaaaaaaaaaaaaaaaaaaaaaaaaaaaaaaaaaaaaaagaauu

SEQ ID NO: 23199 - RNA, 1717 nt, Artificial Sequence
  mRNA product Design a-1 (hSL-A64-N5) comprising derived and/or modified sequence from LASV(G733-SLE-2010;Clade IV)__AIT17154__GPCmut2 (opt4)
aggagagucccgcagucggcguccagcggcucugcuuguucgugugugugucguugcaggccuuauucaagcuuaccaugggccagaucgugaccuucuuccaggaggugccccacgugaucgaggaggugaugaacaucgugcugaucgcccugagcauccuggccgugcugaagggccuguacaacuucgccaccugcggcaucgugggccuggugagcuuccugcugcugugcggcagaagcugcaccaccagccuguacaagggcguguacgagcugcagacccuggagcugaacauggagacccugaacaugugcaugccccugagcugcaccaagaacaacagccaccacuacaucauggugggcaacgagaccggccuggagcugacccugaccaacaccagcaucaucaaccacaaguucugcaaccugagcgacgcccacaagaagaaccuguacgaccacgcccugaugagcaucaucagcaccuuccaccugagcauccccaacuucaaccaguacgaggccaugagcugcgacuucaacggcggcaagaucagcgugcaguacaaccugagccacagcuacgccggcgacgccgccaaccacugcggcaccaucgccaacggcgugcugcagaccuucaugagaauggccuggggcggcagcuacaucgcccuggacagcggcagagacagaugggacugcaucaugaccagcuaccaguaccugaucauccagaacaccaccugggaggaccacugccaguucagcagacccagccccaucggcuaccugggccugcugagccagagaaccagagacaucuacaucagcagaagaagaagaggcaccuucaccuggacccugagcgacagcgagggcaaggacacccccggcggcuacugccugaccagauggaugcugaucgaggccgagcugaagugcuucggcaacaccgccguggccaagugcaacgagaagcacgacgaggaguucugcgacaugcugagacuguucgacuucugcaagcaggccauccagagacugaaggcccccgcccagaugagcauccagcugaucaacaaggccgugaacgcccugaucaacgaccagcugaucaugaagaaccaccugagagacaucaugggcauccccuacugcaacuacagcaaguacugguaccugaaccacaccaccaccggcaagaccagccugcccaagugcuggcuggugagcaacggcagcuaccugaacgagacccacuucagcgacgacaucgagcagcaggccgacaacaugaucaccgagaugcugcagaaggaguacauggagagacagggcaagaccccccugggccugguggaccuguucguguucagcaccagcuucuaccugaucagcaucuuccugcaccuggugaagauccccacccacagacacguggugggcaagagcugccccaagccccacagacugaaccacaugggcaucugcagcugcggccuguacggccagcccggcgugcccgugaaguggaagagaugaggacuagucccuguucccagagcccacuuuuuuuucuuuuuuugaaauaaaauagccugucuuucagaucucaaaggcucuuuucagagccaccaaaaaaaaaaaaaaaaaaaaaaaaaaaaaaaaaaaaaaaaaaaaaaaaaaaaaaaaaaaaaaaaagaauu

SEQ ID NO: 23200 - RNA, 1717 nt, Artificial Sequence
  mRNA product Design a-1 (hSL-A64-N5) comprising derived and/or modified sequence from MOPV/LASV reassortant(IGS-1;Clade IV)__AFY05576__GPCmut2 (opt4)
aggagagucccgcagucggcguccagcggcucugcuuguucgugugugugucguugcaggccuuauucaagcuuaccaugggccagaucgugaccuucuuccaggaggugccccacgugaucgaggaggugaugaacaucgugcugaucgcccugagcgugcuggccgugcugaagggccuguacaacuucgccaccugcggccuggugggccuggugaccuuccugcugcugugcggcagaagcugcaccaccagccuguacaagggcguguacgagcugcagacccuggagcugaacauggagacccugaacaugugcaugccccugagcugcaccaagaacaacagccaccacuacaucauggugggcaacgagaccggccuggagcugacccugaccaacaccagcaucaucaaccacaaguucugcaaccugagcgacgcccacaagaagaaccuguacgaccacgcccugaugagcaucaucagcaccuuccaccugagcauccccaacuucaaccaguacgaggccaugagcugcgacuucaacggcggcaagaucagcgugcaguacaaccugagccacagcuacgccggcgacgccgccaaccacugcggcaccguggccaacggcgugcugcagaccuucaugagaauggccuggggcggcagcuacaucgcccuggacagcggcagaggcaacugggacugcaucaugaccagcuaccaguaccugaucauccagaacaccaccugggaggaccacugccaguucagcagacccagccccaucggcuaccugggccugcugagccagagaaccagagacaucuacaucagcagaagaagaagaggcaccuucaccuggacccugagcgacagcgagggcgaggacacccccggcggcuacugccugaccagauggaugcugaucgaggccgagcugaagugcuucggcaacaccgccguggccaagugcaacgagaagcacgacgaggaguucugcgacaugcugagacuguucgacuucugcaagcaggccauccagagacugaaggcccccgcccagaugagcauccagcugaucaacaaggccgugaacgcccugaucaacgaccagcugaucaugaagaaccaccugagagacaucaugggcauccccuacugcaacuacagcaaguacugguaccugaaccacaccaccaccggcagaaccagccugcccaagugcuggcuggugagcaacggcagcuaccugaacgagacccacuucagcgacgacaucgagcagcaggccgacaacaugaucaccgagaugcugcagaaggaguacauggagagacagggcaagaccccccugggccugguggaccuguucguguucagcaccagcuucuaccugaucagcaucuuccugcaccuggugaagauccccacccacagacacaucgugggcaagagcugccccaagccccacagacugaaccacaugggcaucugcagcugcggccuguacaagcagcccggcgugcccgugaaguggaagagaugaggacuagucccuguucccagagcccacuuuuuuuucuuuuuuugaaauaaaauagccugucuuucagaucucaaaggcucuuuucagagccaccaaaaaaaaaaaaaaaaaaaaaaaaaaaaaaaaaaaaaaaaaaaaaaaaaaaaaaaaaaaaaaaaagaauu

SEQ ID NO: 23201 - RNA, 1717 nt, Artificial Sequence
  mRNA product Design a-1 (hSL-A64-N5) comprising derived and/or modified sequence from LASV(LM765-SLE-2012;Clade IV)__AIT17814__GPCmut2 (opt4)
aggagagucccgcagucggcguccagcggcucugcuuguucgugugugugucguugcaggccuuauucaagcuuaccaugggccagaucgugaccuucuuccaggaggugccccacgugaucgaggaggugaugaacaucgugcugaucgcccugagcauccuggccgugcugaagggccuguacaacuucgccaccugcggccuggugggccuggugaccuuccugcugcugugcggcagaagcugcaccaccagccuguacaagggcguguacgagcugcagacccuggagcugaacauggagacccugaacaugugcaugccccugagcugcaccaagaacaacagccaccacuacaucauggugggcaacgagaccggccuggagcugacccugaccaacaccagcaucaucgaccacaaguucugcaaccugagcgacgcccacagaaagaaccuguacgaccacgcccugaugagcaucaucagcaccuuccaccugagcauccccaacuucaaccaguacgaggccaugagcugcgacuucaacggcggcaagaucagcgugcaguacaaccugagccacagcuacgccaaggacgccgccgaccacugcggcaccguggccaacggcgugcugcagaccuucaugagaauggccuggggcggcagcuacaucgcccuggacagcggcagaggcagaugggacugcaucaugaccagcuaccaguaccugaucauccagaacaccaccugggaggaccacugccaguucagcagacccagccccaucggcuaccugggccugcugagccagagaaccagagacaucuacaucagcagaagaagaagaggcaccuucaccuggacccugagcgacagcgagggcaaggacacccccggcggcuacugccugaccagauggaugcugaucgaggccgagcugaagugcuucggcaacaccgccguggccaagugcaacgagaagcacgacgaggaguucugcgacaugcugagacuguucgacuucugcaagcaggccauccagagacugaaggcccccgcccagaugagcauccagcugaucaacaaggccgugaacgcccugaucaacgaccagcugaucaugaagaaccaccugagagacaucaugggcauccccuacugcaacuacagcaaguacugguaccugaaccacaccaccaccggcaagaccagccugcccaagugcuggcuggugagcaacggcagcuaccugaacgagacccacuucagcgacgacaucgagcagcaggccgacaacaugaucaccgagaugcugcagaaggaguacauggagagacagggcaagaccccccugggccugguggaccuguucguguucagcaccagcuucuaccugaucagcaucuuccugcaccuggugaagauccccacccacagacacaucgugggcaagcccugccccaagccccacagacugaaccacaugggcaucugcagcugcggccuguacaagcagcccggcgugcccgugaaguggaagagaugaggacuagucccuguucccagagcccacuuuuuuuucuuuuuuugaaauaaaauagccugucuuucagaucucaaaggcucuuuucagagccaccaaaaaaaaaaaaaaaaaaaaaaaaaaaaaaaaaaaaaaaaaaaaaaaaaaaaaaaaaaaaaaaaagaauu

SEQ ID NO: 23202 - RNA, 1717 nt, Artificial Sequence
  mRNA product Design a-1 (hSL-A64-N5) comprising derived and/or modified sequence from LASV(LM776-SLE-2012;Clade IV)__AIT17824__GPCmut2 (opt4)
aggagagucccgcagucggcguccagcggcucugcuuguucgugugugugucguugcaggccuuauucaagcuuaccaugggccagaucgugaccuucuuccaggaggugccccacgugaucgaggaggugaugaacaucgugcugaucgcccugagcauccuggccgugcugaagggccuguacaacuucgccaccugcggccuggugggccuggugaccuuccugcugcugugcggcagaagcugcaccaccagcguguacaagggcguguacgagcugcagacccuggagcugaacauggagacccugaacaugugcaugccccugagcugcaccaagaacaacagccaccacuacaucauggugggcaacgagaccggccuggagcugacccugaccaacaccagcaucaucaaccacaaguucugcaaccugagcgacgcccacaagaagaaccuguacgaccacgcccugaugagcaucaucagcaccuuccaccugagcauccccaacuucaaccaguacgaggccaugagcugcgacuucaacggcggcaagaucagcgugcaguacaaccugagccacagcuacgccggcgacgccgccaaccacugcggcaccguggccaacggcgugcugcagaccuucaugagaauggccuggggcggcagcuacaucgcccuggacagcggccacggcaagugggacugcaucaugaccagcuaccaguaccugaucauccagaacaccaccugggaggaccacugccaguucagcagacccagccccaucggcuaccugggccugcugagccagagaaccagagacaucuacaucagcagaagaagaagaggcaccuucaccuggacccugagcgacagcgagggcaaggacacccccggcggcuacugccugaccagauggaugcugaucgaggccgagcugaagugcuucggcaacaccgccguggccaagugcaacgagaagcacgacgaggaguucugcgacaugcugagacuguucgacuucugcaagcaggccauccagagacugaaggcccccgcccagaugagcauccagcugaucaacaaggccgugaacgcccugaucaacgaccagcugaucaugaagaaccaccugagagacaucaugggcauccccuacugcaacuacagcaaguacugguaccugaaccacaccaccaccggcaagaccagccugcccaagugcuggcuggugagcaacggcagcuaccugaacgagacccacuucagcgacgacaucgagcagcaggccgacaacaugaucaccgagaugcugcagaaggaguacauggagagacagggcaagaccccccugggccugguggaccuguucguguucagcaccagcuucuaccugaucagcaucuuccugcaccuggugaagauccccacccacagacacaucgugggcaagagcugccccaagccccacagacugaaccacaugggcaucugcagcugcggccuguacaagcagcccggcgugcccgugagauggaagagaugaggacuagucccuguucccagagcccacuuuuuuuucuuuuuuugaaauaaaauagccugucuuucagaucucaaaggcucuuuucagagccaccaaaaaaaaaaaaaaaaaaaaaaaaaaaaaaaaaaaaaaaaaaaaaaaaaaaaaaaaaaaaaaaaagaauu

SEQ ID NO: 23203 - RNA, 1717 nt, Artificial Sequence
  mRNA product Design a-1 (hSL-A64-N5) comprising derived and/or modified sequence from LASV(Mad39;Clade IV)__ANH09722__GPCmut2 (opt4)
aggagagucccgcagucggcguccagcggcucugcuuguucgugugugugucguugcaggccuuauucaagcuuaccaugggccagaucgugaccuucuuccaggaggugccccacgugaucgaggaggugaugaacaucgugcugaucgcccugagcauccuggccgugcugaagggccuguacaacguggccaccugcggccugaucggccuggugaccuuccugcugcugugcggcagaagcugcaccaccacccuguacaagggcguguacgagcugcaggcccuggagcugaacauggagacccugaacaugugcaugccccugagcugcaccaagaacaacagccaccacuacaucagagugggcaacgagaccggccuggagcugacccugaccaacaccagccugaucaaccacaaguucugcaaccugagcgacgcccacaagaagaaccuguacgaccacgcccugaugagcaucaucagcaccuuccaccugagcauccccaacuucaaccaguacgaggccaugagcugcgacuucaacgacggcaagaucagcgugcaguacaaccugagccacaccuacgccggcgacaccgccaaccacugcggcaccguggccaacggcgugcugcagaccuucaugagaauggccuggggcggcagcuacaucgcccuggacagcggcagaggcggcugggacugcaucaugaccagcuaccaguaccugaucauccagaacaccaccugggaggaccacugccaguucagcagacccagccccaucggcuaccugggccugcugagccagagaaccagagacaucuacaucagcagaagaagaagaggcaccuucaccuggacccugagcgacagcgagggcaaggacacccccggcggcuacugccugaccagauggaugcugaucgaggccgagcugaagugcuucggcaacaccgccguggccaagugcaacgagaagcacgacgaggaguucugcgacaugcugagacuguucgacuucugcaagcaggccauccagagacugaaggcccccgcccagaugagcauccagcugaucaacaaggccgugaacgcccugaucaacgaccagcugaucaugaagaaccaccugagagacaucaugggcauccccuacugcaacuacagcaaguacugguaccugaaccacaccgugaccggcaagaccagccugcccaagugcuggcuggugagcaacggcagcuaccugaacgagacccacuucagcgacgacaucgagcagcaggccgacaacaugaucaccgagaugcugcagaaggaguacauggagagacagggcaagaccccccugggccugguggaccuguucguguucagcaccagcuucuaccugaucagcaucuuccugcaccuggugaagauccccacccacagacacguggugggcaagcccugccccaagccccacagacugaaccacaugggcaucugcagcugcggcuucuacaagcagcccggcgugcccgugagauggaagagaugaggacuagucccuguucccagagcccacuuuuuuuucuuuuuuugaaauaaaauagccugucuuucagaucucaaaggcucuuuucagagccaccaaaaaaaaaaaaaaaaaaaaaaaaaaaaaaaaaaaaaaaaaaaaaaaaaaaaaaaaaaaaaaaaagaauu

SEQ ID NO: 23204 - RNA, 1717 nt, Artificial Sequence
  mRNA product Design a-1 (hSL-A64-N5) comprising derived and/or modified sequence from LASV(Z0947-SLE-2011;Clade IV)__AIT17840__GPCmut2 (opt4)
aggagagucccgcagucggcguccagcggcucugcuuguucgugugugugucguugcaggccuuauucaagcuuaccaugggccagaucgugaccuucuuccaggaggugccccacgugaucgaggaggugaugaacaucgugcugaucgcccugagcauccuggccgugcugaagggccuguacaacuucgccaccugcggccuggugggccuggugaccuuccugcugcugugcggcagaagcugcaccaucagccuguacaagggcguguacgagcugcagacccuggagcugaacauggagacccugaacaugugcaugccccugagcugcaccaagaacaacagccaccacuacaucauggugggcaacgagaccggccuggagcugacccugaccaacaccagcaucaucaaccacaaguucugcaaccugagcgacgcccacaagaagaaccuguacgaccacgcccugaugagcaucaucagcaccuuccaccugagcauccccaacuucaaccaguacgaggccaugagcugcgacuucaacggcggcaagaucagcgugcaguacaaccugagccacagcuacgccggcgacgccgccaaccacugcggcaccguggccaacggcgugcugcagaccuucaugagaauggccuggggcggcagcuacaucgcccuggacagcggcagagacagaugggacugcaucaugaccagcuaccaguaccugaucauccagaacaccaccugggaggaccacugccaguucagcagacccagccccaucggcuaccugggccugcugagccagagaaccagagacaucuacaucagcagaagaagaagaggcaccuucaccuggacccugagcgacagcgagggcaaggacacccccggcggcuacugccugaccagauggaugcugaucgaggccgagcugaagugcuucggcaacaccgccguggccaagugcaacgagaagcacgacgaggaguucugcgacaugcugagacuguucgacuucugcaagcaggccauccagagacugaaggcccccgcccagaugagcauccagcugaucaacaaggccgugaacgcccugaucaacgaccagcugaucaugaagaaccaccugagagacaucaugggcauccccuacugcaacuacagcaaguacugguaccugaaccacaccaccaccggcaagaccagccugcccaagugcuggcuggugagcaacggcagcuaccugaacgagacccacuucagcgacgacaucgagcagcaggccgacaacaugaucaccgagaugcugcagaaggaguacauggagagacagggcaagaccccccugggccugguggaccuguucguguucagcaccagcuucuaccugaucagcaucuuccugcaccuggugaagauccccacccacagacacaucgugggcaagcccugccccaagccccacagacugaaccacaugggcaucugcagcugcggccuguacaagcagcccggcgugcccgugaaguggaagagaugaggacuagucccuguucccagagcccacuuuuuuuucuuuuuuugaaauaaaauagccugucuuucagaucucaaaggcucuuuucagagccaccaaaaaaaaaaaaaaaaaaaaaaaaaaaaaaaaaaaaaaaaaaaaaaaaaaaaaaaaaaaaaaaaagaauu

SEQ ID NO: 23205 - RNA, 1717 nt, Artificial Sequence
  mRNA product Design a-1 (hSL-A64-N5) comprising derived and/or modified sequence from LASV(Josiah;Clade IV)__NP_694870__GPCmut2 (opt5)
aggagagucccgcagucggcguccagcggcucugcuuguucgugugugugucguugcaggccuuauucaagcuuaccaugggccagaucgugaccuucuuucaagaggucccccacguuauugaagaggugaugaacaucgugcugauugcccucagcguccuggcugugcuuaaggggcuguacaauuucgccacaugcggacucguuggccuggugacguuucuucugcucugugggagauccugcaccacaucucuguauaaaggagucuacgaacugcagacccucgagcugaacauggaaacacuuaauauguguaugccucugagcugcaccaagaacaauucccaucacuauaucauggugggcaacgagacagggcucgagcugacccuuacgaauaccucuauuaucaaccauaaauucuguaaucugagcgacgcgcacaagaaaaaccucuacgaucaugcucugauguccaucauuucuacauuucaccugagcaucccgaauuucaaccaguaugaagccauguccugcgacuuuaauggaggcaagauuagcguucaguacaaccucucucacuccuaugccggcgaugcugccaaucauugugggaccguggcuaacggaguccugcaaacauucaugcggauggccuggggcgggagcuacaucgcgcuugacucuggacgcggcaacugggauugcauuaugaccuccuaccaguaucugaucauucagaauacgacaugggaggaccacugucaguuuagcagacccucuccuaucggguaccucggacugcuuucccaacggacccgcgauaucuauauuagcagacggcgcagaggcacauucaccuggacccuguccgacucugaaggcaaggauacacccgggggauacugccucacgcgguggaugcugaucgaggccgagcugaaauguuuuggcaacaccgcuguggccaagugcaaugaaaaacaugacgaggaguucugcgauaugcuccgccuguuugacuucuguaagcaggcuauucagagacuuaaagccccugcgcagaugagcauccaacugauuaacaaggccgugaaugcucucaucaacgaucagcugaucaugaagaaucaccuucgggacauuauggggauccccuauugcaacuacuccaaauauugguaccugaaucacacaaccacaggacgcaccagccucccuaaguguuggcuggucucuaacggcuccuaccugaaugaaacgcauuucagcgacgauauugaacagcaagccgacaacaugaucacagagaugcuccagaaagaguauauggaaagacaggggaagaccccgcugggacuuguugaucuguuuguguucucuaccagcuuuuaccucauuuccaucuuccugcaccuggugaaaauccccacacaucggcacauugucggcaagucuugcccuaaaccccaucgccuuaaucacaugggcaucuguagcugcgggcucuauaagcagccuggagugcccguuaaguggaaaagaugaggacuagucccuguucccagagcccacuuuuuuuucuuuuuuugaaauaaaauagccugucuuucagaucucaaaggcucuuuucagagccaccaaaaaaaaaaaaaaaaaaaaaaaaaaaaaaaaaaaaaaaaaaaaaaaaaaaaaaaaaaaaaaaaagaauu

SEQ ID NO: 23206 - RNA, 1714 nt, Artificial Sequence
  mRNA product Design a-1 (hSL-A64-N5) comprising derived and/or modified sequence from LASV(LP;Clade I)__AAF86701__GPCmut2 (opt5)
aggagagucccgcagucggcguccagcggcucugcuuguucgugugugugucguugcaggccuuauucaagcuuaccaugggccagaucauuaccuucuuucaagaggugccccacgucaucgaagagguuaugaacauugugcugaucgcccucagccugcuugcuauucugaaggggcucuacaauaucgccacaugcggaaucauuggccugguggcguuccuuuuucugugugggaaauccugcucucucacgcugaagggaggcuaugaacugcagacccucgagcugaacauggaaacacuuaauauguguaugccucugagcugcaccaaaaacuccucucaucacuacaucagagucgggaaugagacaggacucgagcugacccuuacaaacaccagcauuaucaaucauaaguucuguaaccuguccgacgcucacaaaaagaaucucuaugaucaugcccugaugucuauuaucagcacguuucaccuguccauuccgaacuucaaucaguacgaagccaugagcugcgacuuuaacggcggcaagaucucugugcaguauaaucucucccacagcuacgcuggggaugccgcugagcauuguggaaccguugccaacggcgugcugcaaacauucaugcggauggcguggggagggcgcuauaucgcccuugacucuggcaaagggaauugggauugcauuaugaccuccuaccaguaccugaucauucagaacacaaccugggaagaccacugucaguuuagcagacccucuccuaucggauaucucggccugcuuucccaacggacgcgcgauauuuacaucagcagacggcgcagaggcacauucaccuggacacuguccgacucugaggggaacgagacccccggaggcuauugccucacccgguggaugcugaucgaagcugagcugaaguguuuugggaauacagccgucgcuaaaugcaacgaaaagcaugaugaggaguucugcgacaugcuccgccuguuugauuucuguaaacaggccauuagacggcuuaaggcgccugcccagaugagcauccagcugauuaauaaggcugugaacgcccucaucaaugaccaacugauuaugaaaaaccaccuucgcgauaucaugggaauccccuacugcaauuauuccaaguacugguaucugaaccacacgagcucuggcagaaccucccucccuaaauguuggcugauuagcaaugggucuuaccugaacgaaacacaguucagcgacgacaucgagcagcaagcugauaauaugauuaccgaaaugcuccagaaggaguacaucgaacggcagggaaaaacaccgcugggccuuguugacauuuuuaucuucuccaccucuuuuuaucugauuagcaucuuccuccaucugaucaagauucccacgcaccgccauaucgugggcaaaccuugccccaagccucacagacugaaccauaugggggucuguuccugcggacuuuacaagcaccccggcgugccgacaaaauggaagcggugaggacuagucccuguucccagagcccacuuuuuuuucuuuuuuugaaauaaaauagccugucuuucagaucucaaaggcucuuuucagagccaccaaaaaaaaaaaaaaaaaaaaaaaaaaaaaaaaaaaaaaaaaaaaaaaaaaaaaaaaaaaaaaaaagaauu

SEQ ID NO: 23207 - RNA, 1714 nt, Artificial Sequence
  mRNA product Design a-1 (hSL-A64-N5) comprising derived and/or modified sequence from LASV(803213;Clade II)__AAF86703__GPCmut2 (opt5)
aggagagucccgcagucggcguccagcggcucugcuuguucgugugugugucguugcaggccuuauucaagcuuaccaugggccagaucauuaccuucuuucaagaggugccccacgucaucgaagagguuaugaacauugugcugaucgcccucagccugcuugcuauucugaaggggaucuacaauguggccacaugcggacucuucggccugaucuccuuucuucugcucugugggagaucuugcagcgucacguauaaaggaguguacgaacugcagacccuggagcucaacauggcgaaucugaacauguguaugccucuuuccugcacaaagaauaacucucaucacuauauuaugguuggcaaugaaaccgggcuggagcucacacugaccaacacaagcaucauuaaucauaaauucuguaaccuuuccgacgcucacaagaaaaaucuguacgaucaugcccucaugucuaucauuagcaccuuucaccuguccaucccgaacuucaaucaguaugaggccaugagcugcgacuuuaacggaggcaagauuucugugcaguacaaucugucccacagcuucgcugucgaugccgcuaaccauuguggcacgaucgccaacggggugcuccaaaccuuuaugcggauggcguggggaggcucuuauaucgcccuggacuccgggaagggaaauugggauugcauuaugacaagcuaccaguaccuuaucauucagaacaccacaugggaagaccacugucaguucucucgccccuccccuaucggcuaucuggggcuccugagccaaagaacccgggauauuuacaucucccgcagacggcgcggaacguuuacauggacccuuucugacagcgagggcaaugaagcucccggcggguauugccugacaagauggaugcucaucgaggccgagcugaaauguuucggaaacaccgcuguugccaagugcaaugaaaaacaugaugaggaauuuugcgacaugcugcgccucuucgauuucuguaagcaggcgauuaaacggcugaagaccccugcccagauguccauccagcuuauuaacaaggcugugaaugcccugaucaacgaccaacucauuaugaaaaaucaccugagagauaucaugggcauccccuacugcaacuauagccgguacugguaucuuaaucacacagucacggggaagaccucucugccucgcuguuggcucguguccaacggaagcuaccugaaugagacacauuuuucugacgacauugaacagcaggcugauaacaugaucaccgagaugcugcaaaaagaguacauggacagacagggcaagacaccgcucgggcugguggaucuuuucgucuuuagcaccuccuucuaucugauuucuaucuuucuccaccugguuaaaauucccacgcaucggcacaucgugggaaagccuugccccaaaccucaucgccugaaucacaugggcauuuguagcugcggccuuuacaagcaccccggggugccggucaaguggaaaagaugaggacuagucccuguucccagagcccacuuuuuuuucuuuuuuugaaauaaaauagccugucuuucagaucucaaaggcucuuuucagagccaccaaaaaaaaaaaaaaaaaaaaaaaaaaaaaaaaaaaaaaaaaaaaaaaaaaaaaaaaaaaaaaaaagaauu

SEQ ID NO: 23208 - RNA, 1714 nt, Artificial Sequence
  mRNA product Design a-1 (hSL-A64-N5) comprising derived and/or modified sequence from LASV(GA391;Clade III)__CAA36645__GPCmut2 (opt5)
aggagagucccgcagucggcguccagcggcucugcuuguucgugugugugucguugcaggccuuauucaagcuuaccaugggccagaucgugaccuucuuucaagaggucccccacguuauugaagaggugaugaacaucgugcugauugcccucagcauccuggcuauucuuaaggggcuguacaaugucgccacaugcggacucaucggccuggugacguuccuucugcucuccgggagaucuuguagccugaucuauaaaggaaccuacgaacugcagacacucgagcugaacauggaaacccuuaauaugugcaugccucuguccuguacaaagaacaauucucaucacuauauucggguuggcaacgagaccgggcucgagcugacacuuaccaauacgagcauccugaaccauaaauuuugcaaucucuccgacgcgcacaagcgcaaccuguacgaucauucucugaugagcauuaucuccaccuuccaccucagcauuccgaauuuuaaccaguaugaagcuaugucuugugacuucaauggaggcaaaaucacagugcaguacaaccugucccacagcuuugccgucgaugccgcuggccauugcgggacccuugccaauggagugcugcaaacauucaugagaauggcuuggggcgggucuuauauugcccucgacuccggacggggcaacugggauuguaucaugaccagcuaccaguaccugaucauucagaacacgacaugggacgaucacugccaguuuucucgccccuccccuaucggguaucuuggacugcucagccaaagaacccgggacauuuacaucucccgcagacggcgcggcacauucaccuggacccugucugauagcgagggcaaugaaacacccgggggauauugucugacgagauggaugcucauugaggcggagcugaagugcuuuggcaacaccgccguugcuaaguguaaugaaaaacaugacgaggaguucugcgauaugcuucggcuguuugacuucugcaagcaggccauccgcagacucaaaaccccugcucagauguccauccagcugauuaacaaggccgugaaugcgcuuaucaacgaucaacugauuaugaaaaaucaccuccgggacaucauggggauucccuacuguaacuauagccgcuacugguaucugaaucacacaucuacaggaaagaccucccugccuagaugcuggcucaucagcaacggcucuuaccugaaugaaacgaaguucagcgacgauaucgaacagcaggccgacaacaugauuacagagaugcuucaaaaagaguacaucgaucggcaggggaagaccccgcugggacucgucgaccuguuuguguucuccaccucuuuuuaucugauuagcaucuuccuucaucucgugaaaauucccacacacagacauaucgucggcaagccuugucccaaaccucaccgccugaaucauaugggcauuugcuccugugggcuguacaagcagcccggaguuccggugcgguggaaaagaugaggacuagucccuguucccagagcccacuuuuuuuucuuuuuuugaaauaaaauagccugucuuucagaucucaaaggcucuuuucagagccaccaaaaaaaaaaaaaaaaaaaaaaaaaaaaaaaaaaaaaaaaaaaaaaaaaaaaaaaaaaaaaaaaagaauu

SEQ ID NO: 23209 - RNA, 1717 nt, Artificial Sequence
  mRNA product Design a-1 (hSL-A64-N5) comprising derived and/or modified sequence from LASV(AV;Clade V)__CCA30314__GPCmut2 (opt5)
aggagagucccgcagucggcguccagcggcucugcuuguucgugugugugucguugcaggccuuauucaagcuuaccaugggccagaucgugaccuucuuucaagaggucccccacguuauugaagaggugaugaacaucgugcugauugcccucagcauccuggcuguccuuaaggggcuguacaauauugccacaugcggacucaucggccugaucacguuccuucugcucugugggagauccugcucuagcaaccuguauaaaggaguguacgaacugcagucccucgaccugaauauggagacccuuaacauguguaugccucugucuugcacaaagaauaacagccaucacuauauucggguuggcaaugauaccgggcucgaacugacacuuaccaacacauccauccugaaucauaaauuuuguaaccucucugacgcgcacaagaaagaucuguacgaccaugcucugaugagcauuaucuccaccuuccaccucagcauuccgaauuuuaaccaguaugaggccaugucuugcgauuucaauggaggcaagaucuccgugcaguacaaccugagccacucuuaugccauugacgcugccaaucauuguggcacggucgcuaacgggauccuucaaaccuuuaugcgcauggccuggggaggcuccuacaucgcgcuggauagcgggagaggaaacugggacugcauuaugacaucuuaccaguaucucaucauucagaauaccacaugggagaaccacugucaguucucccggcccagcccuaucggcuaccuggggcuucugucccaacgcaccagagauauuuauaucucucggcgcagacggggaacguuuacauggacccucagcgacuccgaaggcaaugccacacccggcggguacugccugacccgcuggaugcugaucgaggcugaacucaaguguuucggaaacaccgccguggcuaaaugcaaugagaagcaugaugaggaauuuugcgacaugcugagacuuuucgauuuuuguaaacaggccauuagccggcugaagucuccugcgcagauguccauccagcucauuaacaaagccguuaaugcucugaucaacgaccaacuuauuaugaagaaucaucugcgcgacaucaugggcauccccuauugcaacuacagcaaguauugguaccucaaucacacaauuacggggaaaaccucucugccuaaguguuggcuggugagcaacggauccuaccucaaugagacacacuucucugaugacaucgaacagcaggccgauaacaugauuaccgagaugcugcaaaaagaauauauggagagacagggcaagacaccgcuugggcuggucgaccucuucguguuuagcaccuccuucuaccugaucagcauuuuucugcggcuugugaaaauccccacgcaccgccauauugucggaaagccuugccccaaaccucacagacucaaucauaugggcaucuguucuugcggccuguauaagcagcccgggguuccggugcgguggaagagaugaggacuagucccuguucccagagcccacuuuuuuuucuuuuuuugaaauaaaauagccugucuuucagaucucaaaggcucuuuucagagccaccaaaaaaaaaaaaaaaaaaaaaaaaaaaaaaaaaaaaaaaaaaaaaaaaaaaaaaaaaaaaaaaaagaauu

SEQ ID NO: 23210 - RNA, 1714 nt, Artificial Sequence
  mRNA product Design a-1 (hSL-A64-N5) comprising derived and/or modified sequence from LASV(Togo/2016/7082;Clade VI)__AMR44577__GPCmut2 (opt5)
aggagagucccgcagucggcguccagcggcucugcuuguucgugugugugucguugcaggccuuauucaagcuuaccaugggccagaucauuaccuucuuucaagaggugccccacgucaucgaagagguuaugaacauugugcugaucgcccucagccugcuugcuauucugaaggggguguacaaugucgccacaugcggaaucaucggccucgugacguuccuguuucuuugugggagauccugcucucugauuuauaaaggaagcuacgaacuccagacccuggagcugaacauggaaacacucaauauguguaugccucuguccugcaccaagaacucuagccaucacuauauccggguuggcaaugagacagggcuugagcugacccucacaaacaccuccauuaucaaucauaaauucuguaaccugucugacgcgcacaagcgcaaucuuuacgaucaugcucugaugagcauucucuccacguuucaccugagcaucccgaacuucaaucaguaugaagccaugucuugcgacuuuaacggaggcaaaauuuccgugcaguacaaucugagccacgccuaugcugucgaugccgcugagcauuguggcaccguggccaacgggguucuccaaacauucaugagaauggcguggggaggcucuuacaucgcccuggacuccgggcggggaaauugggauugcaucaugaccagcuaccaguaucuuauuauccagaacacaaccugggaagaccacugucaguuuucucgccccuccccuauuggcuaccuggggcuccugagccaaagaacgcgggauaucuauauuucccgcagacggcgcggaacauucaccuggacacuuucugacagcgagggcaacgagacccccggcggguacugccugaccagauggaugcucaucgaagcugagcugaaguguuuuggaaauacagccguggcuaagugcaacgaaaaacaugaugaggaguucugcgacaugcugcggcucuuugauuucuguaagcaggccauccagcgccugaaauccccugcgcagaugagcauucaacuuaucaauaaggccgucaacgcucugauuaaugaccagcucaucaugaaaaaccaccugagagauaugaugggcauucccuauugcaauuacucuaaguauugguaccuuaaccacacguccagcgggcggaccucucugccuaaguguuggcucgugagcaauggauccuaccugaacgaaacacauuucucugacgacaucgagcagcaagccgauaauaugaucaccgaaaugcugcagaaagaguauauugaccgccagggcaagacaccgcucgggcugguggaucuuuuugucuucagcaccuccuuuuaccugaucagcauuuuccuccaccugaucaaaauucccacgcauagacacaucguuggaaagccuugccccaaaccucaucggcugaaccacaugggcauuuguucuugcggccuuuauaagcagcccggggugccgacaagauggaaacgcugaggacuagucccuguucccagagcccacuuuuuuuucuuuuuuugaaauaaaauagccugucuuucagaucucaaaggcucuuuucagagccaccaaaaaaaaaaaaaaaaaaaaaaaaaaaaaaaaaaaaaaaaaaaaaaaaaaaaaaaaaaaaaaaaagaauu

SEQ ID NO: 23211 - RNA, 1714 nt, Artificial Sequence
  mRNA product Design a-1 (hSL-A64-N5) comprising derived and/or modified sequence from LASV(KAK-428;Clade n.d. (VII))__ANH09740__GPCmut2 (opt5)
aggagagucccgcagucggcguccagcggcucugcuuguucgugugugugucguugcaggccuuauucaagcuuaccaugggccagaucgugaccuucuuucaagaggucccccacguuauugaagaggugaugaacaucgugcugauugcccucagccugcuugcuauccugaaggggcucuacaauuucgccacaugcggagucauuggccugaucacguuucuucugcucugugggagauccugcucugcgaccuauaaaggacaguacgaacugcagacacuggagcucaacauggaaagccugaauauguguaugccucuuuccugcaccaagaacaauucucaucacuauauccgggcuggcaacaauacagggcuggagcucacccugacaaacaccagcauuaucucccauaaauucuguaaucuuucugacgcccacaagaaaaaccuguacgaucauacgcucaugagcauuaucaccacauuucaccuguccauuccgaauuucaaccaguaugaggccaugagcugcgacuuuaauggaggcaagaucucuauucaauacaaccugucccacagcuaugcuggcgaugccgcucagcauugugggaccguggccaauggaguucuccagacauucaugcgcauggcguggggcgggucuuaccuggcccuugacuccggaagacggggcugggauugcaucaucagcucuuaccaguaucugauuauccaaaacaccacgugggacgaucacugucaguuuucccgccccagcccuauuggguaccucggauucgugucccagaagacaagagacaucuauauuucucggcgcagacggggcaccuuuacauggacccugagcgauuccgaaggccaugacaugcccgggggauacugccuuacccgcuggaugcugaucgaggcugaucucaaauguuucggcaacacagccgucgcuaagugcaaugaaaaacacgacgaggaguuuugcgauauguggagacuguucgacuucuguaagcaggccauccaacggcugaaagcgccugcccagaugaacauucagcucaucaauaaggcugugaacgcccugauuaaugaccaacuuaugaugaagaaccaucugcgcgauaucauggggauucccuauugcaauuacagcaaauuuugguaucucaacaauacgaccacaggaagaaccucucugccucgguguuggcuuaucuccaacggcagcuaccugaaugaaacacacuucucugacgauaucgagcagcaggcugacaacaugauuaccgaaaugcuccagaaggaguacauggaucgccaagggaaaacgccgcugggacugguugaccucuuuguguucagcacauccuuuuaucugaucaccauuuuccuucaccuggucaagauccccacccauagacacauugugggcaaaccuugccccaagccucaucggcucaaucacaugggcaucuguucuugcgggcuguacaaacagcccggagugccggucagauggaagcgcugaggacuagucccuguucccagagcccacuuuuuuuucuuuuuuugaaauaaaauagccugucuuucagaucucaaaggcucuuuucagagccaccaaaaaaaaaaaaaaaaaaaaaaaaaaaaaaaaaaaaaaaaaaaaaaaaaaaaaaaaaaaaaaaaagaauu

SEQ ID NO: 23212 - RNA, 1714 nt, Artificial Sequence; identical to SEQ ID NO: 23206
  mRNA product Design a-1 (hSL-A64-N5) comprising derived and/or modified sequence from LASV(Pinneo-NIG-1969;Clade I)__AIT17836__GPCmut2 (opt5)

SEQ ID NO: 23213 - RNA, 1714 nt, Artificial Sequence
  mRNA product Design a-1 (hSL-A64-N5) comprising derived and/or modified sequence from LASV(ISTH0009-NIG-2011;Clade II)__AIT17404__GPCmut2 (opt5)
aggagagucccgcagucggcguccagcggcucugcuuguucgugugugugucguugcaggccuuauucaagcuuaccaugggccagaucauuaccuucuuucaagaggugccccacgucaucgaagagguuaugaacauugugcugaucgcccucagccugcuugcuauucugaaggggaucuacaauguggccacaugcggacucuucggccuggucuccuuucuucugcucugugggagaucuugcagcacgaccuauaaaggaguguacgaacugcagacacuggagcucgacauggcgucccugaacauguguaugccucuuucuugcaccaagaauaacagccaucacuauaucaugguuggcaaugaaacagggcuggagcucacccugacaaacaccuccauuaucaaucauaaauucuguaaccuuucugaugcucacaagaaaaaucuguacgaccaugcccucaugagcauuaucuccacguuucaccugagcauuccgaacuucaaucaguaugaggccaugucuugcgauuuuaacggaggcaagaucuccgugcaguacaaucugagccacgcuuaugccgucgacgcugccaaccauuguggcaccauugcgaauggggugcuccaaacauucaugcggauggccuggggaggcucuuacaucgcucuggauuccgggaagggaagcugggacugcaucaugaccucuuaccaguaucuuauuauccagaacacaaccugggaagaucacugucaguuuucccgccccagcccuauuggcuaccuggggcuccugucccaaagaacgcgggacaucuauauuucucgcagacggcgcggaacauucaccuggacacuuagcgauuccgagggcaacgaaacccccggcggguacugccugaccagauggaugcucaucgaggccgagcugaaauguuuuggaaauacagcuguugccaagugcaacgaaaaacaugacgaggaguucugcgauaugcugcggcucuuugacuucuguaagcaggcgauccgcagacugaaaacgccugcccagaugagcauucagcuuaucaauaaggcugugaacgcccugauuaaugaucaacucaucaugaagaaccaucugcgggacauuaugggcauccccuauugcaauuacucuaaauauugguaccuuaaccacaccgucacagggaagaccucccugccucgcuguuggcucgugagcaauggaucuuaccugaacgaaacacacuucagcgacgauaucgaacagcaggcugacaauaugauuaccgagcugcuccaaaaagaguauauggauagacagggcaagacgccgcuggggcuuguggaccuguuugucuucuccacaucuuuuuaccucaucagcauuuuccugcaccugaucaaaauucccacccaucggcacaucaccggaaagccuugccccaaaccucaucgccuuaaccacaugggcauuuguuccugcggccucuauaagcaccccgggguuccggugaaguggaaaagaugaggacuagucccuguucccagagcccacuuuuuuuucuuuuuuugaaauaaaauagccugucuuucagaucucaaaggcucuuuucagagccaccaaaaaaaaaaaaaaaaaaaaaaaaaaaaaaaaaaaaaaaaaaaaaaaaaaaaaaaaaaaaaaaaagaauu

SEQ ID NO: 23214 - RNA, 1714 nt, Artificial Sequence
  mRNA product Design a-1 (hSL-A64-N5) comprising derived and/or modified sequence from LASV(ISTH2010-NIG-2012;Clade II)__AIT17482__GPCmut2 (opt5)
aggagagucccgcagucggcguccagcggcucugcuuguucgugugugugucguugcaggccuuauucaagcuuaccaugggccagaucauuaccuucuuucaagaggugccccacgucaucgaagagguuaugaacauugugcugaucgcccucagccugcuugcuauucugaaggggaucuacaauguggccacaugcggacucuucggccuggucuccuuucuucugcucugugggagaucuugcagcacgaccuauaaaggaguguacgaacugcagacacuggagcucgacauggcgucccugaacauguguaugccucuuucuugcaccaagaauaacagccaucacuauaucaugguuggcaaugaaacagggcuggagcucacccugacaaacaccuccauuaucaaucauaaauucuguaaccuuucugaugcucacaagaaaaaucuguacgaccaugcccucaugagcauuaucuccacguuucaccugagcauuccgaacuucaaucaguaugaggccaugucuugcgauuuuaacggaggcaagaucuccgugcaguacaaucugagccacgcuuaugccgucgacgcugccaaccauuguggcaccauugcgaauggggugcuccaaacauucaugcggauggccuggggaggcucuuacaucgcucuggauuccgggaagggaagcugggacugcaucaugaccucuuaccaguaucuuauuauccagaacauuacaugggaagaucacugucaguuuucccgccccagcccuaucggcuaccuggggcuccugucccaaagaacccgggacauuuauaucucucgcagacggcgcggaacguucacauggacccuuagcgauuccgagggcaacgaaacacccggcggguacugccugaccagauggaugcucaucgaggccgagcugaaauguuuuggaaauaccgcuguugccaagugcaacgaaaaacaugacgaggaguucugcgauaugcugcggcucuuugacuucuguaagcaggcgauucgcagacugaaaacgccugcccagaugagcauccagcuuauuaauaaggcugugaacgcccugaucaaugaucaacucauuaugaagaaccaucugcgggacaucaugggcauccccuauugcaauuacucuaaauauugguaccuuaaccacacagucaccgggaagacaucccugccucgcuguuggcucgugagcaauggaucuuaccugaacgaaacccacuucagcgacgauauugaacagcaggcugacaauaugaucacagagcugcuccaaaaagaguauauugauagacagggcaagaccccgcuggggcuuguggaccuguuugucuucuccacgucuuuuuaccucaucagcauuuuccugcaccugguuaaaauccccacacaucggcacguggugggaaagccuugccccaaaccucaucgccuuaaccacaugggcauuuguuccugcggccucuauaagcaccccggggucccggugaaguggaaaagaugaggacuagucccuguucccagagcccacuuuuuuuucuuuuuuugaaauaaaauagccugucuuucagaucucaaaggcucuuuucagagccaccaaaaaaaaaaaaaaaaaaaaaaaaaaaaaaaaaaaaaaaaaaaaaaaaaaaaaaaaaaaaaaaaagaauu

SEQ ID NO: 23215 - RNA, 1714 nt, Artificial Sequence
  mRNA product Design a-1 (hSL-A64-N5) comprising derived and/or modified sequence from LASV(Lassa virus/H.sapiens-wt/NGA/2015/ISTH_0543;Clade II)__AVO03639__GPCmut2 (opt5)
aggagagucccgcagucggcguccagcggcucugcuuguucgugugugugucguugcaggccuuauucaagcuuaccaugggccagaucauuaccuucuuucaagaggugccccacgucaucgaagagguuaugaacauugugcugaucgcccucagccugcuugcuauucugaaggggaucuacaauguggccacaugcggacucuucggccuggucuccuuucuucugcucugugggagaucuugcagcacgaccuauaaaggaguguacgaacugcagacacuggagcucgacauggcgaaccugaauauguguaugccucuuuccugcaccaagaacaauucucaucacuauaucaugguuggcaacgaaacagggcuggagcucacccugacaaauaccagcauuaucaaccauaaauucuguaaucuuuccgaugcucacaagaaaaaccuguacgaccaugcccucaugucuauuaucagcacguuucaccuguccauuccgaauuucaaccaguaugaggccaugagcugcgauuuuaauggaggcaagaucucugugcaguacaaccugucccacaccuaugcugucgacgccgcuaaucauuguggcacaauugccaacggggugcuccaaaccuucaugcggauggcguggggaggcagcuacaucgcccuggauucugggaagggauccugggacugcaucaugacaagcuaccaguaucuuguuauucagaacaccacgugggaagaucacugucaguuuucucgccccuccccuaucggcuaccuggggcuccugagccaaagaacacgggacauuuauaucucccgcagacggcgcggaaccuucacauggacccuuucugauagcgagggcaaugaaacccccggcggguacugccugacaagauggaugcucauugaggcugagcugaaauguuuuggaaacacggccguggcuaagugcaaugaaaaacaugacgaggaguucugcgauaugcugcggcucuuugacuucuguaagcaggccauccgcagacugaaaaccccugcgcagauguccauccagcuuauuaacaaggccgucaaugcucugaucaacgaucaacucauuaugaagaaucaucugcgggacaucaugggcauucccuauugcaacuacagcaaauauugguaccuuaaucacacagugaccgggaagacaucucugccucgcuguuggcucguguccaacggaagcuaccugaaugaaacccacuucucugacgauaucgaacagcaggccgacaacaugaucacggagcugcuccaaaaagaguauauugauagacagggcaagacaccgcuggggcuugucgaccuguuuguuuucagcaccuccuuuuaccucaucucuauuuuccugcaccuggugaaaauccccacccaucggcacauuacaggaaagccuugccccaaaccucaucgccuuaaucacaugggcaucuguagcugcggccucuauaagcaccccggggugccggucaaguggaaaagaugaggacuagucccuguucccagagcccacuuuuuuuucuuuuuuugaaauaaaauagccugucuuucagaucucaaaggcucuuuucagagccaccaaaaaaaaaaaaaaaaaaaaaaaaaaaaaaaaaaaaaaaaaaaaaaaaaaaaaaaaaaaaaaaaagaauu

SEQ ID NO: 23216 - RNA, 1714 nt, Artificial Sequence
  mRNA product Design a-1 (hSL-A64-N5) comprising derived and/or modified sequence from LASV(Lassa virus/H.sapiens-wt/NGA/2016/ISTH_0009;Clade II)__AVO03571__GPCmut2 (opt5)
aggagagucccgcagucggcguccagcggcucugcuuguucgugugugugucguugcaggccuuauucaagcuuaccaugggccagaucauuaccuucuuucaagaggugccccacgucaucgaagagguuaugaacauugugcugaucgcccucagccugcuugcuauucugaaggggaucuacaauguggccacaugcggacuccugggccuugucuccuuccugcuccugugugggagaucuugcagcacgaccuauaaaggaguguacgaacugcagacacucgagcuggacauggcgucccuuaacauguguaugccucugucuugcaccaagaauaacagccaucacuauaucaugguuggcaaugaaacagggcucgagcugacccuuacaaacaccuccauuaucaaucauaaauuuuguaaccugucugaugcucacaagaaaaaucucuacgaccaugcccugaugagcauuaucuccacguuccaccugagcauuccgaacuuuaaucaguaugaggccaugucuugcgauuucaacggaggccggaucuccgugcaguacaaucucagccacucuuaugcugucgacgccgcuaaccauuguggcaccauugccaauggggugcugcaaacauuuaugcgcauggcguggggaggcuccuacaucgcccuugauagcgggaagggaucuugggacugcaucaugaccuccuaccaguaucugauuauccagaacacaaccugggaagaucacugucaguucagcagacccuccccuauuggcuaccucgggcugcuuucucaacggacgcgcgacaucuauauuagcagacggcgcagaggaacauuuaccuggacacuguccgauagcgagggcaacgaaacccccggcggguacugccucacccgguggaugcugaucgaggcugagcugaaguguuucggaaauacagccguugcuaaaugcaacgaaaagcaugacgaggaauuuugcgauaugcuccgccuguucgacuuuuguaaacaggccaucagacggcuuaagacgccugcgcagaugucuauucagcugaucaauaaagccgugaacgcucucauuaaugaucaacugaucaugaagaaccaccuucgcgacauuaugggcauccccuauugcaauuacuccaaguauugguaccugaaccacaccgucacagggaaaaccagccucccuagauguuggcuggugucuaauggaagcuaccugaacgagacacauuucuccgacgauaucgaacagcaggccgacaauaugauuaccgagcuccugcaaaaggaguauaucgaucggcagggcaaaacgccgcuugggcugguggaccucuucgucuuuucuaccagcuucuaccugauuuccaucuuucugcaccuuguuaagauucccacacaucgccacaucaccggaaaaccuugccccaagccucauagacucaaccacaugggcauuuguagcugcggccuguauaaucaccccggggugccggugaaauggaagcggugaggacuagucccuguucccagagcccacuuuuuuuucuuuuuuugaaauaaaauagccugucuuucagaucucaaaggcucuuuucagagccaccaaaaaaaaaaaaaaaaaaaaaaaaaaaaaaaaaaaaaaaaaaaaaaaaaaaaaaaaaaaaaaaaagaauu

SEQ ID NO: 23217 - RNA, 1714 nt, Artificial Sequence
  mRNA product Design a-1 (hSL-A64-N5) comprising derived and/or modified sequence from LASV(Lassa virus/H.sapiens-wt/NGA/2016/ISTH_0017;Clade II)__AVO03567__GPCmut2 (opt5)
aggagagucccgcagucggcguccagcggcucugcuuguucgugugugugucguugcaggccuuauucaagcuuaccaugggccagaucauuaccuucuuucaagaggugccccacgucaucgaagagguuaugaacauugugcugaucgcccucagccugcuugcuauucugaaggggaucuacaauguggccacaugcggacucuucggccuggucuccuuucuucugcucugugggagaucuugcagcacgaccuauaaaggaguguacgaacugcagacacuggagcucgacauggcgucccugaacauguguaugccucuuucuugcaccaagaauaacagccaucacuauaucaugguuggcaaugaaacagggcuggagcucacccugacaaacaccuccauuaucaaucauaaauucuguaaccuuucugaugcucacaagaaaaaucuguacgaccaugcccucaugagcauuaucuccacguuucaccugagcauuccgaacuucaaucaguaugaggccaugucuugcgauuuuaacggaggcaagaucuccgugcaguacaaucugagccacaccuaugcuauugacgccgcuaaccauuguggcacaaucgccaaugggguccuccaaaccuucaugcggauggcguggggaggcucuuacaucgcccuggauuccgggaagggaagcugggacugcauuaugacaucuuaccaguaucuuaucauucagaacaccacgugggaagaucacugucaguuuucccgccccagcccuaucggcuaccuggggcuccugucccaaagaacacgggacauuuauaucucucgcagacggcgcggaaccuucacauggacccuuagcgauuccgagggcaacgaaacccccggcggguacugccugacaagauggaugcucaucgaggcugagcugaaauguuuuggaaauacggccguggcuaagugcaacgaaaaacaugacgaggaguucugcgauaugcugcggcucuuugacuucuguaagcaggccauucgcagacugaaaaccccugcgcagaugagcauccagcuuauuaauaaggccguuaacgcucugaucaaugaucaacucauuaugaagaaccaucugcgggacaucaugggcauccccuauugcaauuacucuaaauauugguaccuuaaccacacagugaccgggaagacaucccugccucgcuguuggcucgucagcaauggaucuuaccugaacgaaacccacuucagcgacgauauugaacagcaggccgacaauaugaucacggagcugcuccaaaaagaguauauggauagacagggcaagacaccgcuggggcuuguggaccuguuuguguucuccaccucuuuuuaccucauuagcaucuuccugcaccugguccggauucccacccaucgccacguuaucggaaaaccuugccccaagccucauagacuuaaccacaugggcauuuguuccugcggccucuauaaacaccccggggugccggugaaguggaagcggugaggacuagucccuguucccagagcccacuuuuuuuucuuuuuuugaaauaaaauagccugucuuucagaucucaaaggcucuuuucagagccaccaaaaaaaaaaaaaaaaaaaaaaaaaaaaaaaaaaaaaaaaaaaaaaaaaaaaaaaaaaaaaaaaagaauu

SEQ ID NO: 23218 - RNA, 1714 nt, Artificial Sequence
  mRNA product Design a-1 (hSL-A64-N5) comprising derived and/or modified sequence from LASV(Lassa virus/H.sapiens-wt/NGA/2018/ISTH_0959;Clade II)__AVV65099__GPCmut2 (opt5)
aggagagucccgcagucggcguccagcggcucugcuuguucgugugugugucguugcaggccuuauucaagcuuaccaugggccagaucauuaccuucuuucaagaggugccccacgucaucgaagagguuaugaacauugugcugaucgcccucagccugcuugcuauucugaaggggaucuacaauguggucacaugcggacucuucggccugguguccuuucuucugcucugugggagaucuugcagcacgaccuauaaaggaguuuacgaacugcagacacuggagcucgacauggccucccugaacauguguaugccucuuucuugcaccaagaauaacagccaucacuauaucauggugggcaaugaaacagggcuggagcucacccugacaaacaccuccauuaucaaucauaaauucuguaaccuuucugaugcgcacaagaaaaaucuguacgaccaugcucucaugagcauuaucuccacguuucaccugagcauuccgaacuucaaucaguaugaggccaugucuugcgauuuuaacggaggcaagaucuccguccaguacaaucugagccacgccuaugcuauugacgccgcuaaccauuguggcaccaucgccaauggggugcuccaaacauucaugcggauggcguggggaggcucuuacaucgcccuggauuccgggaagggaagcugggacugcauuaugaccucuuaccaguaucuuaucauucagaacacaaccugggaagaucacugucaguuuucccgccccagcccuaucggcuaccuggggcuccugucccaaagaacgcgggacauuuauaucucucgcagacggcgcggaacauucaccuggacacuuagcgauuccgagggcaacgaaacccccggcggguacugccugaccagauggaugcucaucgaggcugagcugaaauguuuuggaaauacagccguugcuaagugcaacgaaaaacaugacgaggaguucugcgauaugcugcggcucuuugacuucuguaagcaggccauucgcagacugaaaacgccugcgcagaugagcauccagcuuauuaauaaggccgugaacgcucugaucaaugaucaacucauuaugaagaaccaucugcgggacaucaugggcauccccuauugcaauuacucuaaauauugguaccuuaaccacaccgucacagggaagaccucccugccucgcuguuggcucgugagcaauggaucuuaccugaacgaaacacacuucagcgacgauauugaacagcaggccgacaauaugaucaccgagcugcuccaaaaagaguauauugauagacagggcaagacgccgcuggggcuuguggaccuguuugucuucuccacaucuuuuuaccucaucagcauuuuccugcaccugguuaaaauccccacccaucggcacgugauuggaaagccuugccccaaaccucaucgccuuaaccacaugggcaucuguuccugcggccucuauaagcaccccggggugccggucaaguggaaaagaugaggacuagucccuguucccagagcccacuuuuuuuucuuuuuuugaaauaaaauagccugucuuucagaucucaaaggcucuuuucagagccaccaaaaaaaaaaaaaaaaaaaaaaaaaaaaaaaaaaaaaaaaaaaaaaaaaaaaaaaaaaaaaaaaagaauu

SEQ ID NO: 23219 - RNA, 1714 nt, Artificial Sequence
  mRNA product Design a-1 (hSL-A64-N5) comprising derived and/or modified sequence from LASV(LASV003-NIG-2008;Clade II)__AIT17580__GPCmut2 (opt5)
aggagagucccgcagucggcguccagcggcucugcuuguucgugugugugucguugcaggccuuauucaagcuuaccaugggccagaucauuaccuucuuucaagaggugccccacgucaucgaagagguuaugaacauugugcugaucgcccucagccugcuugcuauucugaaggggaucuacaauguggccacaugcggacucuucggccuggucuccuuucuucugcucugugggagaucuugcagcacgaccuauaaaggaguguacgaacugcagacacuggagcucgacauggcgucccugaacauguguaugccucuuucuugcaccaagaauaacagccaucacuauaucaugguuggcaaugaaacagggcuggagcucacccugacaaacaccuccauuaucaaucauaaauucuguaaccuuucugaugcucacaagaaaaaucuguacgaccaugcccucaugagcauuaucuccacguuucaccugagcauuccgaacuucaaucaguaugaggccaugucuugcgauuuuaacggaggcaagaucuccgugcaguacaaucugagccacaccuaugcugucgacgccgcuaaccauuguggcacaauugccaauggggugcuccaaaccuucaugcggauggcguggggaggcucuuacaucgcccuggauuccgggaagggaagcugggacugcaucaugacaucuuaccaguaucuuauuauccagaacaccacgugggaagaucacugucaguuuucccgccccagcccuauuggcuaccuggggcuccugucccaaagaacacgggacaucuauauuucucgcagacggcgcggaaccuucacauggacccuuagcgauuccgagagcaacgaaacccccggcggcuacugccugacaagauggaugcucaucgaggcugagcugaaauguuuugggaauacggccguugcuaagugcaacgaaaaacaugacgaggaguucugcgauaugcugcggcucuuugacuucuguaagcaggccauccgcagacugaaagcgccugcccagaugucuauucagcuuaucaauaaggcugugaacgcccugauuaaugaucaacucaucaugaagaaccaucugcgggacauuaugggaauccccuauugcaauuacuccaaauauugguaccuuaaccacaccgucacaggccgcaccagccugccuagauguuggcucgugucuaaugggagcuaccugaacgaaacacacuucuccgacgauaucgaacagcaggcugacaauaugauuaccgagcugcuccaaaaggaguauauggaucggcagggaaaaacgccgcugggccuuguggaccuguuugucuucucuaccagcuuuuaccucaucuccauuuuccugcaccugguuaagauccccacacaucgccacgugauugggaaaccuugccccaagccucauagacuuaaccacaugggaaucuguagcugcggccucuauaaacaccccggcgugccggucaaguggaagcggugaggacuagucccuguucccagagcccacuuuuuuuucuuuuuuugaaauaaaauagccugucuuucagaucucaaaggcucuuuucagagccaccaaaaaaaaaaaaaaaaaaaaaaaaaaaaaaaaaaaaaaaaaaaaaaaaaaaaaaaaaaaaaaaaagaauu

SEQ ID NO: 23220 - RNA, 1714 nt, Artificial Sequence
  mRNA product Design a-1 (hSL-A64-N5) comprising derived and/or modified sequence from LASV(LASV035-NIG-2009;Clade II)__AIT17588__GPCmut2 (opt5)
aggagagucccgcagucggcguccagcggcucugcuuguucgugugugugucguugcaggccuuauucaagcuuaccaugggccagaucauuaccuucuuucaagaggugccccacgucaucgaagagguuaugaacauugugcugaucgcccucagccugcuugcuauucugaaggggaucuacaauguggccacaugcggacucuucggccuggucuccuuucuucugcucugugggagaucuugcagcacgaccuauaaaggaguguacgaacugcagacacuggagcucgacauggcgucccugaacauguguaugccucuuucuugcaccaagaauaacagccaucacuauaucaugguuggcaaugaaacagggcuggagcucacccugacaaacaccuccauuaucaaucauaaauucuguaaccuuucugaugcucacaagaaaaaucuguacgaccaugcccucaugagcauuaucuccacguuucaccugagcauuccgaacuucaaucaguaugaggccaugucuugcgauuuuaacggaggcaagaucuccgugcaguacaaucugagccacgcuuaugccgucgacgcugccaaccauuguggcaccauugcgaauggggugcuccaaacauucaugcggauggccuggggaggcucuuacaucgcucuggauuccgggaagggaagcugggacugcaucaugaccucuuaccaguaucuuauuauccagaacacaaccugggaagaucacugucaguuuucccgccccagcccuauuggcuaccuggggcuccugucccaaagaacgcgggacaucuauauuucucgcagacggcgcggaacauucaccuggacacuuagcgauuccgagggcaacgaaacccccggcggguacugccugaccagauggaugcucaucgaggccgagcugaaauguuuuggaaauacagcuguugccaagugcaacgaaaaacaugacgaggaguucugcgauaugcugcggcucuuugacuucuguaagcaggcgauccgcagacugaaagccccugcucagaugagcauucagcuuaucaauaaggccgugaacgcucugauuaaugaucaacucaucaugaagaaccaucugcgggacauuaugggcauccccuauugcaauuacucuaaauauugguaccuuaaccacacggucaccgggaagacaucccugccucgcuguuggcucgugagcaauggaucuuaccugaacgaaacccacuucagcgacgauaucgaacagcaggccgacaauaugauuacagagcugcuccaaaaagaguauaucgauagacagggcaagaccccgcuggggcuuguggaccuguuugucuucuccacgucuuuuuaccucauuagcaucuuccugcaccugguuaaaauucccacacaucggcacgugaucggaaagccuugccccaaaccucaucgccuuaaccacaugggcauuuguuccugcggccucuauaagcaccccggggugccggucaaguggaaaagaugaggacuagucccuguucccagagcccacuuuuuuuucuuuuuuugaaauaaaauagccugucuuucagaucucaaaggcucuuuucagagccaccaaaaaaaaaaaaaaaaaaaaaaaaaaaaaaaaaaaaaaaaaaaaaaaaaaaaaaaaaaaaaaaaagaauu

SEQ ID NO: 23221 - RNA, 1714 nt, Artificial Sequence
  mRNA product Design a-1 (hSL-A64-N5) comprising derived and/or modified sequence from LASV(LASV1000-NIG-2009;Clade II)__AIT17782__GPCmut2 (opt5)
aggagagucccgcagucggcguccagcggcucugcuuguucgugugugugucguugcaggccuuauucaagcuuaccaugggccagaucauuaccuucuuucaagaggugccccacgucaucgaagagguuaugaacauugugcugaucgcccucagccugcuugcuauucugaaggggaucuacaauguggccacaugcggacucuucggccuggucuccuuucuucugcucugugggagaucuugcagcacgaccuauaaaggaguguacgaacugcagacacuggagcucgacauggcgucccugaacauguguaugccucuuucuugcaccaagaauaacagccaucacuauaucaugguuggcaaugaaacagggcuggagcucacccugacaaacaccuccauuaucaaucauaaauucuguaaccuuucugaugcucacaagaaaaaucuguacgaccaugcccucaugagcauuaucuccacguuucaccugagcauuccgaacuucaaucaguaugaggccaugucuugcgauuuuaacggaggcaagaucuccgugcaguacaaucugagccacaccuaugcugucgacgccgcuaaccauuguggcacaauugccaauggggugcuccaaaccuucaugcggauggcguggggaggcucuuacaucgcccuggauuccgggaagggaagcugggacugcaucaugacaucuuaccaguaucuuauuauccagaacaccacgugggaagaucacugucaguuuucccgccccagcccuauuggcuaccuggggcuccugucccaaagaacacgggacaucuauauuucucgcagacggcgcggaaccuucacauggacccuuagcgauuccgagggcaacgaaacccccggcggguacugccugacaagauggaugcucaucgaggcugagcugaaauguuuuggaaauacggccguugcuaagugcaacgaaaaacaugacgaggaguucugcgauaugcugcggcucuuugacuucuguaagcaggccaucaaacgccugaagaccccugcgcagaugagcauucagcuuaucaauaaggccgugaacgcucugauuaaugaucaacucaucaugaaaaaccaccugagagacauuaugggcauccccuauugcaauuacucuaaguauugguaccuuaaccacacagucaccgggaaaacaucccugccucgguguuggcucgugagcaauggaucuuaccugaacgaaacccauuucagcgacgauaucgaacagcaggccgacaauaugauuacggagcugcuccaaaaggaguauaucgaucgccagggcaaaacaccgcuggggcuuguggaccuguuugucuucuccaccucuuuuuaccucauuagcaucuuccugcaccugguuaagauucccacccauagacacguggugggaaaaccuugccccaagccucaucggcuuaaccacaugggcaucuguuccugcggccucuauaagcaccccggggucccggugaaauggaagcgcugaggacuagucccuguucccagagcccacuuuuuuuucuuuuuuugaaauaaaauagccugucuuucagaucucaaaggcucuuuucagagccaccaaaaaaaaaaaaaaaaaaaaaaaaaaaaaaaaaaaaaaaaaaaaaaaaaaaaaaaaaaaaaaaaagaauu

SEQ ID NO: 23222 - RNA, 1714 nt, Artificial Sequence
  mRNA product Design a-1 (hSL-A64-N5) comprising derived and/or modified sequence from LASV(LASV221-NIG-2010;Clade II)__AIT17624__GPCmut2 (opt5)
aggagagucccgcagucggcguccagcggcucugcuuguucgugugugugucguugcaggccuuauucaagcuuaccaugggccagaucauuaccuucuuucaagaggugccccacgucaucgaagagguuaugaacauugugcugaucgcccucagccugcuugcuauucugaaggggaucuacaauguggccacaugcggacucuucggccuggucuccuuucuucugcucugugggagaucuugcagcacgaccuauaaaggaguguacgaacugcagacacuggagcucgacauggcgucccugaacauguguaugccucuuucuugcaccaagaauaacagccaucacuauaucaugguuggcaaugaaacagggcuggagcucacccugacaaacaccuccauuaucaaucauaaauucuguaaccuuucugaugcucacaagaaaaaucuguacgaccaugcccucaugagcauuaucuccacguuucaccugagcauuccgaacuucaaucaguaugaggccaugucuugcgauuuuaacggaggcaagaucuccgugcaguacaaucugagccacaccuaugcuauugacgccgcuaaccauuguggcacaaucgccaaugggguccuccaaaccuucaugcggauggcguggggaggcucuuacaucgcccuggauuccgggaagggaagcugggacugcauuaugacaucuuaccaguaucuuaucauucagaacaccacgugggaagaucacugucaguuuucccgccccagcccuaucggcuaccuggggcuccugucccaaagaacacgggacauuuauaucucucgcagacggcgcggaaccuucacauggacccuuagcgauuccgagggcaacgaaacccccggcggguacugccugacaagauggaugcucaucgaggcugagcugaaauguuuuggaaauacggccguggcuaagugcaacgaaaaacaugacgaggaguucugcgauaugcugcggcucuuugacuucuguaagcaggccauucgcagacugaaaaccccugcgcagaugagcauccagcuuauuaauaaggccguuaacgcucugaucaaugaucaacucauuaugaagaaccaucugcgggacaucaugggcauccccuauugcaauuacucuaaauauugguaccuuaaccacacagugaccgggaagacaucccugccucgcuguuggcucgucagcaauggaucuuaccugaacgaaacccacuucagcgacgauauugaacagcaggccgacaauaugaucacggagaugcugcaaaaagaguauauggauagacagggcaagacaccgcucgggcugguggaccuuuuuguguucuccaccucuuuuuaccugauuagcaucuuccuccaccuggucaaaauucccacccaucggcacguuaucggaaagccuugccccaaaccucaucgccugaaccacaugggcauuuguuccugcggccuuuauaagcaccccggggugccggugaaguggaaaagaugaggacuagucccuguucccagagcccacuuuuuuuucuuuuuuugaaauaaaauagccugucuuucagaucucaaaggcucuuuucagagccaccaaaaaaaaaaaaaaaaaaaaaaaaaaaaaaaaaaaaaaaaaaaaaaaaaaaaaaaaaaaaaaaaagaauu

SEQ ID NO: 23223 - RNA, 1714 nt, Artificial Sequence
  mRNA product Design a-1 (hSL-A64-N5) comprising derived and/or modified sequence from LASV(LASV237-NIG-2010;Clade II)__AIT17638__GPCmut2 (opt5)
aggagagucccgcagucggcguccagcggcucugcuuguucgugugugugucguugcaggccuuauucaagcuuaccaugggccagaucauuaccuucuuucaagaggugccccacgucaucgaagagguuaugaacauugugcugaucgcccucagccugcuugcuauucugaaggggaucuacaauguggccacaugcggacucuucggccuggucuccuuucuucugcucugugggagaucuugcagcacgaccuauaaaggaguguacgaacugcagacacuggagcucgacauggcgucccugaacauguguaugccucuuucuugcaccaagaauaacagccaucacuauaucaugguuggcaaugaaacagggcuggagcucacccugacaaacaccuccauuaucaaucauaaauucuguaaccuuucugaugcucacaagaaagaccuguacgaucaugcccucaugagcauuaucuccacguuucaccugagcauuccgaauuucaaccaguaugaggccaugucuugcgacuuuaauggaggcaagaucuccgugcaguacaaccugagccacaccuaugcugucgaugccgcuaaucauuguggcacaauugccaacggggugcuccaaaccuucaugcggauggcguggggaggcucuuacaucgcccuggacuccgggaagggaagcugggauugcaucaugacaucuuaccaguaucuuauuauccagaauaccacgugggaagaccacugucaguuuucccgccccagcccuauuggcuaccuggggcuccugucccaaagaacacgggauaucuauauuucucgcagacggcgcggaaccuucacauggacccuuagcgacuccgagggcaacgaaacccccggcggguacugccugacaagauggaugcucaucgaggcugagcugaaauguuuuggaaacacggccguugcuaagugcaaugaaaaacaugaugaggaguucugcgacaugcugcggcucuuugauuucuguaagcaggccauccgcagacugaaaaccccugcgcagaugagcauucagcuuaucaacaaggccgugaaugcucugauuaacgaccaacucaucaugaagaaucaucugcgggacauuaugggcauccccuauugcaacuacucuaaauauugguaccuuaaucacacagucaccgggaagacaucccugccucgcuguuggcucgugagcaacggaucuuaccugaaugaaacccacuucagcgaugacaucgaacagcaggccgauaacaugauuacggagcugcuccaaaaagaguauauggacagacagggcaagacaccgcuggggcuuguggaucuguuugucuucuccaccucuuuuuaccucaucagcauuuuccugcaccugaucaaaauucccacccaucggcacaucacaggaaagccuugccccaaaccucaucgccuuaaucacaugggcauuuguuccugcggccucuauaagcaccccgggguuccggugaaguggaaaagaugaggacuagucccuguucccagagcccacuuuuuuuucuuuuuuugaaauaaaauagccugucuuucagaucucaaaggcucuuuucagagccaccaaaaaaaaaaaaaaaaaaaaaaaaaaaaaaaaaaaaaaaaaaaaaaaaaaaaaaaaaaaaaaaaagaauu

SEQ ID NO: 23224 - RNA, 1714 nt, Artificial Sequence
  mRNA product Design a-1 (hSL-A64-N5) comprising derived and/or modified sequence from LASV(LASV253-NIG-2011;Clade II)__AIT17670__GPCmut2 (opt5)
aggagagucccgcagucggcguccagcggcucugcuuguucgugugugugucguugcaggccuuauucaagcuuaccaugggccagaucauuaccuucuuucaagaggugccccacgucaucgaagagguuaugaacauugugcugaucgcccucagccugcuugcuauucugaaggggaucuacaauguggccacaugcggacucuucggccuggucuccuuucuucugcucugugggagaucuugcagcacgaccuauaaaggaguguacgaacugcagacacuggagcucgacauggcgucccugaacauguguaugccucuuucuugcaccaagaauaacagccaucacuauaucaugguuggcaaugaaacagggcuggagcucacccugacaaacaccuccauuaucaaucauaaauucuguaaccuuucugaugcucacaagaaaaaucuguacgaccaugcccucaugagcauuaucuccacguuucaccugagcauuccgaacuucaaucaguaugaggccaugucuugcgauuuuaacggaggcaagaucuccgugcaguacaaucugagccacaccuaugcugucgacgccgcuaaccauuguggcacaauugccaauggggugcuccaaaccuucaugcggauggcguggggaggcucuuacaucgcccuggauuccgggaagggaagcugggacugcaucaugacaucuuaccaguaucuuauuauccagaacaccacgugggaagaucacugucaguuuucccgccccagcccuauuggcuaccuggggcuccugucccaaagaacacgggacaucuauauuucucgcagacggcgcggaaccuucacauggacccuuagcgauuccgagggcaacgaaacccccggcggguacugccugacaagauggaugcucaucgaggcugagcugaaauguuuuggaaauacggccguugcuaagugcaacgaaaaacaugacgaggaguucugcgauaugcugcggcucuuugacuucuguaagcaggccauccgcagacugaaagcgccugcccagaugagcauucagcuuaucaauaaggcugugaacgcccugauuaaugaucaacucaucaugaagaaccaucugcgggacauuaugggcauccccuauugcaauuacucuaaauauugguaccuuaaccacaccgucacagggcgcaccucccugccuagauguuggcucgugagcaauggaucuuaccugaacgaaacacacuucagcgacgauaucgaacagcaggcugacaauaugauuaccgagcugcuccaaaaggaguauaucgaucggcagggcaaaacgccgcuggggcuuguggaccuguuugucuucuccacaucuuuuuaccucauuagcaucuuccugcaccugguuaagauucccacccaucgccacaucauuggaaaaccuugccccaagccucauagacuuaaccacaugggcaucuguuccugcggccucuauaaacaccccggggugccggugaaguggaagcggugaggacuagucccuguucccagagcccacuuuuuuuucuuuuuuugaaauaaaauagccugucuuucagaucucaaaggcucuuuucagagccaccaaaaaaaaaaaaaaaaaaaaaaaaaaaaaaaaaaaaaaaaaaaaaaaaaaaaaaaaaaaaaaaaagaauu

SEQ ID NO: 23225 - RNA, 1714 nt, Artificial Sequence
  mRNA product Design a-1 (hSL-A64-N5) comprising derived and/or modified sequence from LASV(LASV254-NIG-2011;Clade II)__AIT17674__GPCmut2 (opt5)
aggagagucccgcagucggcguccagcggcucugcuuguucgugugugugucguugcaggccuuauucaagcuuaccaugggccagaucauuaccuucuuucaagaggugccccacgucaucgaagagguuaugaacauugugcugaucgcccucagccugcuugcuauucugaaggggaucuacaauguggccacaugcggacucuucggccuggucuccuuucuucugcucugugggagaucuugcagcacgaccuauaaaggaguguacgaacugcagacacuggagcucgacaugaccaaccugaauauguguaugccucuuuccugcacaaagaacaauucucaucacuauaucaugguuggcaacgaaaccgggcuggagcucacacugaccaauacgagcauuaucaaccauaaauucuguaaucuuuccgaugcgcacaagaaaaaccuguacaaucaugcucucaugucuauuaucagcaccuuucaccuguccauuccgaacuucaaucaguaugaggccaugagcugcgacuuuaacggaggcaagaucucugugcaguacaaucugucccacagcuaugccgucgaugcugccaaccauuguggcacaauugcuaacggggugcuccaaaccuucaugcggauggccuggggaggcucuuacaucgcgcuggacuccgggaagggaaauugggauugcaucaugacaagcuaccaguaucuuauuauccagaacaccacgugggaagaccacugucaguuuucucgccccuccccuauuggcuaccuggggcuccugagccaaagaacacgggauaucuauauuucccgcagacggcgcggaaccuucacauggacccuuucugacagcgagggcaaugaaacccccggcggguacugccugacaagauggaugcucaucgaggccgagcugaaauguuuuggaaacacggcuguugccaagugcaaugaaaaacaugaugaggaguucugcgacaugcugcggcucuuugauuucuguaagcaggcuauccgcagacugaaaaccccugcccaggcgaacauucagcuuaucaauaaggccgugaacgcucugauuaaugaccaacucaucaugaagaaccaucugcgggauauuaugggcauccccuauugcaauuacuccaaauauugguaccuuaaccacacagucaccgggaagacaagccugccucgcuguuggcucgugucuaauggauccuaccugaacgaaacccacuucagcgacgacaucgaacagcaggccgauaauaugauuacggagcugcuccaaaaagaguauauggacagacagggcaagacaccgcuggggcuuguggaucuguuugucuucucuaccagcuuuuaccucaucuccauuuuccugcaccugguuaaaauccccacccaucggcacgugauuggaaagccuugccccaaaccucaucgccuuaaccacaugggcaucuguucuugcggccucuauaagcaccccggggugccggucaaguggaaaagaugaggacuagucccuguucccagagcccacuuuuuuuucuuuuuuugaaauaaaauagccugucuuucagaucucaaaggcucuuuucagagccaccaaaaaaaaaaaaaaaaaaaaaaaaaaaaaaaaaaaaaaaaaaaaaaaaaaaaaaaaaaaaaaaaagaauu

SEQ ID NO: 23226 - RNA, 1714 nt, Artificial Sequence
  mRNA product Design a-1 (hSL-A64-N5) comprising derived and/or modified sequence from LASV(Nig08-A19;Clade III)__ADU56618__GPCmut2 (opt5)
aggagagucccgcagucggcguccagcggcucugcuuguucgugugugugucguugcaggccuuauucaagcuuaccaugggccagaucgugaccuucuuucaagaggucccccacguuauugaagaggugaugaacaucgugcugauugcccucagcauccuggcuauucuuaaggggcuguacaauaucgccacaugcggacucaucggccuggucacguuccuucugcucuccgggagaucuuguagcaugaccuauaaaggaguguacgaacugcagacacuggagcucaacaugaauacccugaacaugugcaugccucuuuccuguacaaagaauaacucucaucacuauauuaugguuggcaaugaaaccgggcuggagcucacacugaccaacacgagccuucugcaucacaaauuuugcaaucucuccgacgcgcauaagaaaaaccuguacgaucacacccugaugucuaucauuagcacauuccaccucuccaucccgaauuuuaaccaguaugaggcuaugagcugugacuucaauggaggcaagauuaccgugcaguacaaccugucucauuccuaugccaucgaugccgcuaaucacugcggcacagucgccaacggggugcuucaaaccuuuaugcggauggcuuggggaggcagcuacauugcccuggacucugggcgcggaaagugggauuguaucaugacguccuaccaguaucucaucauucagaacacaaccugggaagaccauugccaguucagcagacccucuccuaucggcuaccuggggcuucugucccaacggacacgcgauauuuauaucagcagacggcgcagaggaaccuuuaccuggacacucuccgacucugagggcaaugaaacgcccggcggguacugucugacccgguggaugcugauugaggcggagcucaaaugcuucggaaacacagccguugcuaaguguaaugaaaaacacgaugaggaauuuugcgacaugcugcgccuuuucgauuuuugcaagcaggccaucagacggcugaaagcuccugcccagaugagcauccagcucauuaacaaggcggugaaugcccugaucaacgaccaacuuauuaugaagaaucaucugcgcgauaucaugggcauucccuauuguaacuacuccaaauauugguaccucaaucacaccagcacagggagaaccucucugccucggugcuggcuggucuccaacggaagcuaccucaaugagacgcacuucucugacgacaucgaacagcaggcugauaacaugaucacagagaugcugcaaaaggaguaucuugaccgccagggcaaaaccccgcuggggcucguggaucuguucguguuuagcaccuccuucuaccugauuucuaucuuucuucaucucgucaagauucccacacacagacauaucguuggaaaaccuugucccaagccucaccggcugaaucacaugggcauuugcagcuguggccuguauaaacagcccggggugccggugagauggaagcgcugaggacuagucccuguucccagagcccacuuuuuuuucuuuuuuugaaauaaaauagccugucuuucagaucucaaaggcucuuuucagagccaccaaaaaaaaaaaaaaaaaaaaaaaaaaaaaaaaaaaaaaaaaaaaaaaaaaaaaaaaaaaaaaaaagaauu

SEQ ID NO: 23227 - RNA, 1717 nt, Artificial Sequence
  mRNA product Design a-1 (hSL-A64-N5) comprising derived and/or modified sequence from LASV(G1180-SLE-2010;Clade IV)__AIT17168__GPCmut2 (opt5)
aggagagucccgcagucggcguccagcggcucugcuuguucgugugugugucguugcaggccuuauucaagcuuaccaugggccagaucgugaccuucuuucaagaggucccccacguuauugaagaggugaugaacaucgugcugauugcccucagcauccuggcuguccuuaaggggcuguacaauuucgccacaugcggacucgugggccugcuuacguuucugcuccugugugggagauccugcaccgcgucucgguauaaaggaguuuacgaacugcagacacucgagcugaacauggaaacccuuaauauguguaugccucugagcugcacaaagaacaauucccaucacuauauuauggugggcaacgagaccgggcucgagcugacacuuaccaauacgucuaucaucaaccauaaauucuguaaucugagcgacgcucacaagaaaaaccucuacgaucaugcccugauguccauuaucucuaccuuucaccugagcauuccgaauuucaaccaguaugaagccauguccugcgacuuuaauggaggcaagaucagcguccaguacaaccucucucacuccuaugcuggcgaugccgcuaaucauugugggacaguggccaacggaguucugcaaaccuucaugcgcauggcguggggcgggagcuacauugcccuugacucuggacacggcuccugggauugcaucaugacaagcuaccaguaucugauuauccagaacaccacgugggaggaccauugucaguuuucuagacccuccccuaucggguaccucggacugcuuagccaacggacacgcgauauuuauaucuccagacggcgcagaggcaccuucacauggacccugucugacagcgaaggcaaggauacccccgggggauacugccucacacgguggaugcugauugaggcugagcugaaauguuuuggcaauacggccguggcuaagugcaacgaaaaacacgacgaggaguucugcgauaugcuccgccuguuugacuucuguaagcaggccauccagagacuuaaagcgccugcccagauguccauucaacugaucaauaaggcugucaacgcccucaucaaugaucagcugauuaugaagaaccaccuucgggacaucauggggauucccuauugcaauuacagcaaauauugguaccugaaccauaccacaaccggaaagacaucucucccuaaauguuggcugguguccaauggcagcuaccugaacgaaacccacuucucugacgauaucgaacagcaagcugacaauaugauuacggagaugcuccagaaggaguauauggaacgccaggggaaaacaccgcugggacuuguggaucuguuugucuucagcaccuccuuuuaccucaucucuaucuuccugcaucugguuaagauucccacccacagacauaucgugggcaaaagcugcccuaagccccaccggcuuaaccacaugggcauuuguuccugcgggcucuauaagcagccuggagugcccgucaaauggaagcgcugaggacuagucccuguucccagagcccacuuuuuuuucuuuuuuugaaauaaaauagccugucuuucagaucucaaaggcucuuuucagagccaccaaaaaaaaaaaaaaaaaaaaaaaaaaaaaaaaaaaaaaaaaaaaaaaaaaaaaaaaaaaaaaaaagaauu

SEQ ID NO: 23228 - RNA, 1717 nt, Artificial Sequence
  mRNA product Design a-1 (hSL-A64-N5) comprising derived and/or modified sequence from LASV(G1442-SLE-2011;Clade IV)__AIT17180__GPCmut2 (opt5)
aggagagucccgcagucggcguccagcggcucugcuuguucgugugugugucguugcaggccuuauucaagcuuaccaugggccagaucgugaccuucuuucaagaggucccccacguuauugaagaggugaugaacaucgugcugauugcccucagcauccuggcuguccuuaaggggcuguacaauguggccacaugcggacucauuggccugguuacguuccuucugcucugugggagauccugcaccacaacccuguauaaaggaguguacgaacugcagacacucgagcugaacauggaaacccuuaauauguguaugccucugucuugcacaaagaacaauagccaucacuauauccgggucggcaacgagaccgggcucgagcugacgcuuaccaauacauccaucauuaaccauaaauuuuguaaucugucugacgcgcacaagaaaaaccucuacgaucaugcucugaugagcaucauuuccaccuuccaccugucuaucccgaauuuuaaccaguaugaagccaugagcugcgacuucaauggaggcaagauuuccgugcaguacaaccucagccacucuuaugccggcgaugcugccaaucauugugggacaguugcuaacggagugcugcaaaccuuuaugcgcauggccuggggcggguccuacaucgcgcuugacagcggaagaggcaacugggauugcauuaugacgucuuaccaguaucugaucauccagaauacaaccugggacgaucacugucaguucucccggcccagcccuauuggguaccucggacugcuuucucaacgcacaagagacgucuauaucucccggcgcagacggggcaccuuuaccuggacacugagcgauuccgagggcaaggacacgcccgggggauacugccucacccgcuggaugcugauugaagccgagcugaaauguuucggcaacacagcuguggccaagugcaaugagaaacaugaugaagaguuuugcgacaugcucagacuguucgauuuuuguaagcaggcuauccagcggcuuaaagccccugcgcagaugucuauucaacugaucaacaaggccgugaaugcucucaucaacgaccagcugauuaugaagaaucaccuucgcgacaucauggggauucccuauugcaacuacagcaaauauugguaccugaauaacaccgccacaggaaagaccucccucccuaaauguuggcugaucagcaauggcucuuaccugaacgaaacgcacuucuccgaugacauugagcaggaagcugauaauaugaucacagagaugcuccaaaaggaguauauggaaagacaggggaaaaccccgcugggacuugucgaccuguucguuuuuagcaccucuuucuaccucaucagcauuuuucugcaucuggugaagauccccacacaccggcauauugugggcaaauccugcccuaagccccaccgccuuaaccauaugggcaucuguucuugcgggcucuauaagcagccuggaguccccgugagauggaaacggugaggacuagucccuguucccagagcccacuuuuuuuucuuuuuuugaaauaaaauagccugucuuucagaucucaaaggcucuuuucagagccaccaaaaaaaaaaaaaaaaaaaaaaaaaaaaaaaaaaaaaaaaaaaaaaaaaaaaaaaaaaaaaaaaagaauu

SEQ ID NO: 23229 - RNA, 1717 nt, Artificial Sequence
  mRNA product Design a-1 (hSL-A64-N5) comprising derived and/or modified sequence from LASV(G3010-SLE-2013;Clade IV)__AIT17344__GPCmut2 (opt5)
aggagagucccgcagucggcguccagcggcucugcuuguucgugugugugucguugcaggccuuauucaagcuuaccaugggccagaucgugaccuucuuucaagaggucccccacguuauugaagaggugaugaacaucgugcugauugcccucagcauccuggcuguccuuaaggggcuguacaauuucgccacaugcggacucgugggccugguuacguuucuucugcucugugggagauccugcaccacaucucuguauaaaggaguguacgaacugcagacccucgagcugaacauggaaacacuuaauauguguaugccucugagcugcaccaagaacaauucccaucacuauauuauggucggcaacgagacagggcucgagcugacccuuacgaauaccucuaucaucaaccauaaauucuguaaucugagcgacgcgcacaagaaaaaccucuacaaucaugcucugauguccauuaucucuacauuucaccugagcauuccgaacuucaaucaguaugaagccauguccugcgauuuuaacggaggcaagaucagcgugcaguacaaucucucucacuccuaugccggcgacgcugccagccauugugggaccguugcuaacggagugcugcaaacauucaugcggauggccuggggcgggucuuacauugcgcuugauuccggauacggcaagugggacugcaucaugaccagcuaucaguaccugauuauccagaacacgacaugggaggaucacugucaguuuucucgccccuccccuaucggguaucucggacugcuuagccaaagaacccgggacauuuacaucucccgcagacggcgcggcacauucaccuggacccugucugauagcgaaggcaaagacacacccgggggauauugccucacgagauggaugcugauugaggccgagcugaaguguuuuggcaauaccgcugucgccaaaugcaacgaaaagcaugaugaggaguucugcgacaugcuccggcuguuugauuucuguaaacaggcuauccagcgccuuaagaccccugcccagauguccauucaacugaucaauaaggcggugaacgcccucaucaaugaccagcugauuaugaaaaaccaccuuagagauaucauggggauucccuacugcaauuauagcaaguacugguaccugaaccacacaacaaccggaaaaacgucucucccuaaguguuggcugguguccaauggcagcuaucugaacgaaacacauuucucugacgacaucgaacagcaagcugauaauaugauuaccgagaugcuccagaaagaguacauggaacggcaggggaagaccccgcugggacuugucgaccuguuuguuuucagcacauccuuuuaucucaucucuaucuuccugcaccuggugaaaauucccacccaucgccacaucgugggcaagagcugcccuaagccccauagacuuaaccacaugggcauuuguuccugcgggcucuacaaacagccuggaguccccgugcgguggaagcgcugaggacuagucccuguucccagagcccacuuuuuuuucuuuuuuugaaauaaaauagccugucuuucagaucucaaaggcucuuuucagagccaccaaaaaaaaaaaaaaaaaaaaaaaaaaaaaaaaaaaaaaaaaaaaaaaaaaaaaaaaaaaaaaaaagaauu

SEQ ID NO: 23230 - RNA, 1717 nt, Artificial Sequence
  mRNA product Design a-1 (hSL-A64-N5) comprising derived and/or modified sequence from LASV(G502-SLE-2009;Clade IV)__AIT17126__GPCmut2 (opt5)
aggagagucccgcagucggcguccagcggcucugcuuguucgugugugugucguugcaggccuuauucaagcuuaccaugggccagaucgugaccuucuuucaagaggucccccacguuauugaagaggugaugaacaucgugcugauugcccucagcauccuggcuguccuuaaggggcuguacaauuucgccacaugcggacucgugggccugcuuacguuucugcuccugugugggagauccugcaccacaggacuguauaaaggcguuuacgaacuccagacccuggagcuuaacauggaaacacugaauauguguaugccucucucuugcaccaagaacaauagccaucacuauauuaugguggggaacgagacaggacuggagcuuacccugacgaauaccuccaucaucaaccauaaauucuguaaucucucugacgcgcacaagaaaaaccuguacgaucaugcucugaugagcauuaucuccacauuucaccucucuauuccgaauuucaaccaguaugaagccaugagcugcgacuuuaauggcggcaagaucuccguccaguacaaccugagccacucuuaugccggggaugcugccgaccauuguggaaccguggcuaauggcguucuucaaacauucaugcggauggccuggggaggguccuacauugcgcuggauagcggccgcgggagaugggacugcaucaugaccucuuaccaguaucucauuauccagaacacgacaugggaggaucacugucaguuuucccggcccagcccuaucggauaccugggccuucugucucaacgcaccagagacauuuauaucucccggcgcagacggggcacauucaccuggacccucagcgauuccgaagggaaggacacacccggaggcuacugccugacgcgcuggaugcugauugaggccgagcucaaauguuuugggaacaccgcuguggccaagugcaaugaaaaacaugaugaggaguucugcgacaugcugagacuuuuugauuucuguaagcaggcuauccagcggcugaaagccccugcgcagaugucuauucaacucaucaacaaggccgucaaugcucugaucaacgaccagcuugugaugaagaaucaucugcgcgacauuaugggaauccccuauugcaacuacagcagauauugguaccucaaucacacaaccacaggccggaccucccugccuaaauguuggcuggugagcaacgggucuuaccucaaugaaacgcacuucuccgaugacauugaacagcaagccgauaacaugaucacagagaugcugcagaaggaguauauggaacgccagggaaaaaccccgcuuggccuggucgaccucuuuguuuucagcaccucuuuuuaccugauuagcaucuuccugcaccuugugaagauccccacacauagacacauugugggcaaauccugcccuaagccccaucggcucaaucacauggggaucuguucuugcggacuguauaaacagccuggcguccccgugaaguggaagagaugaggacuagucccuguucccagagcccacuuuuuuuucuuuuuuugaaauaaaauagccugucuuucagaucucaaaggcucuuuucagagccaccaaaaaaaaaaaaaaaaaaaaaaaaaaaaaaaaaaaaaaaaaaaaaaaaaaaaaaaaaaaaaaaaagaauu

SEQ ID NO: 23231 - RNA, 1717 nt, Artificial Sequence
  mRNA product Design a-1 (hSL-A64-N5) comprising derived and/or modified sequence from LASV(G733-SLE-2010;Clade IV)__AIT17154__GPCmut2 (opt5)
aggagagucccgcagucggcguccagcggcucugcuuguucgugugugugucguugcaggccuuauucaagcuuaccaugggccagaucgugaccuucuuucaagaggucccccacguuauugaagaggugaugaacaucgugcugauugcccucagcauccuggcuguccuuaaggggcuguacaauuucgccacaugcggaauugugggccucguuuccuuucugcuucugugugggagaucuugcacgaccagccucuauaaaggaguguacgaacugcagacacuggagcucaacauggaaacccugaauauguguaugccucuuuccugcacaaagaacaauucucaucacuauaucauggucggcaacgagaccgggcuggagcucacacugaccaauacgagcaucauuaaccauaaauucuguaaucuuuccgacgcgcacaagaaaaaccuguacgaucaugcucucaugucuaucauuagcaccuuucaccuguccaucccgaauuucaaccaguaugaagccaugagcugcgacuuuaauggaggcaagauuucugugcaguacaaccugucccacagcuaugccggcgaugcugccaaucauugugggacaaucgcuaacggaguucuccaaaccuucaugcggauggccuggggcgggucuuacauugcgcuggacuccggacgcgauagaugggacugcaucaugacaagcuaccaguaucuuaucauucagaacaccacgugggaggaucacugucaguuuucucggcccuccccuaucggcuaccuggggcuccugagccaacgcacaagagacauuuauaucucccggcgcagacggggaaccuucacauggacccuuucugauagcgaaggcaaggacacccccggcggguacugccugacacgcuggaugcucauugaggccgagcugaaauguuuuggaaauacggcuguggccaagugcaacgaaaaacaugaugaggaguucugcgacaugcugagacucuuugauuucuguaagcaggcuauccagcggcugaaagccccugcgcagauguccauccaacuuauuaauaaggccgucaacgcucugaucaaugaccagcucauuaugaagaaccaucugcgcgacaucaugggcauucccuauugcaauuacagcaaauauugguaccuuaaccacaccacaaccgggaagacaucucugccuaaauguuggcucguguccaauggaagcuaccugaacgaaacccacuucucugaugacaucgaacagcaagccgauaauaugaucacggagaugcugcagaaggaguauauggaaagacagggcaaaacaccgcucgggcugguggaccuuuuugucuucagcaccuccuuuuaccugauuucuaucuuccuccaccugguuaagauucccacccaucggcacguggugggaaaaagcugcccuaagccccaucgccugaaccacaugggcaucuguuccugcggccuuuaugggcagccuggaguccccgugaaguggaaaagaugaggacuagucccuguucccagagcccacuuuuuuuucuuuuuuugaaauaaaauagccugucuuucagaucucaaaggcucuuuucagagccaccaaaaaaaaaaaaaaaaaaaaaaaaaaaaaaaaaaaaaaaaaaaaaaaaaaaaaaaaaaaaaaaaagaauu

SEQ ID NO: 23232 - RNA, 1717 nt, Artificial Sequence
  mRNA product Design a-1 (hSL-A64-N5) comprising derived and/or modified sequence from MOPV/LASV reassortant(IGS-1;Clade IV)__AFY05576__GPCmut2 (opt5)
aggagagucccgcagucggcguccagcggcucugcuuguucgugugugugucguugcaggccuuauucaagcuuaccaugggccagaucgugaccuucuuucaagaggucccccacguuauugaagaggugaugaacaucgugcugauugcccucagcguccuggcugugcuuaaggggcuguacaauuucgccacaugcggacucguuggccuggugacguuucuucugcucugugggagauccugcaccacaucucuguauaaaggagucuacgaacugcagacccucgagcugaacauggaaacacuuaauauguguaugccucugagcugcaccaagaacaauucccaucacuauaucauggugggcaacgagacagggcucgagcugacccuuacgaauaccucuauuaucaaccauaaauucuguaaucugagcgacgcgcacaagaaaaaccucuacgaucaugcucugauguccaucauuucuacauuucaccugagcaucccgaauuucaaccaguaugaagccauguccugcgacuuuaauggaggcaagauuagcguucaguacaaccucucucacuccuaugccggcgaugcugccaaucauugugggaccguggcuaacggaguccugcaaacauucaugcggauggccuggggcgggagcuacaucgcgcuugacucuggacgcggcaacugggauugcauuaugaccuccuaccaguaucugaucauucagaauacgacaugggaggaccacugucaguuuagcagacccucuccuaucggguaccucggacugcuuucccaacggacccgcgauaucuauauuagcagacggcgcagaggcacauucaccuggacccuguccgacucugaaggcgaggauacacccgggggauacugccucacgcgguggaugcugaucgaggccgaacugaaguguuuuggcaacaccgcuguggccaaaugcaaugagaagcaugacgaagaguucugcgauaugcuccgccuguuugacuucuguaaacaggcuauucagagacuuaaggccccugcgcagaugagcauccaacugauuaacaaagccgugaaugcucucaucaacgaucagcugaucaugaagaaucaccuucgggacauuauggggauccccuauugcaacuacuccaaguauugguaccugaaucacacaaccacaggacgcaccagccucccuaaauguuggcuggucucuaacggcuccuaccugaaugaaacgcauuucagcgacgauauugagcagcaagccgacaacaugaucacagagaugcuccagaaggaauauauggagagacaggggaaaaccccgcugggacuuguugaucuguuuguguucucuaccagcuuuuaccucauuuccaucuuccugcaccuggugaagauccccacacaucggcacauugucggcaaaucuugcccuaagccccaucgccuuaaucacaugggcaucuguagcugcgggcucuauaaacagccuggagugcccguuaaguggaagagaugaggacuagucccuguucccagagcccacuuuuuuuucuuuuuuugaaauaaaauagccugucuuucagaucucaaaggcucuuuucagagccaccaaaaaaaaaaaaaaaaaaaaaaaaaaaaaaaaaaaaaaaaaaaaaaaaaaaaaaaaaaaaaaaaagaauu

SEQ ID NO: 23233 - RNA, 1717 nt, Artificial Sequence
  mRNA product Design a-1 (hSL-A64-N5) comprising derived and/or modified sequence from LASV(LM765-SLE-2012;Clade IV)__AIT17814__GPCmut2 (opt5)
aggagagucccgcagucggcguccagcggcucugcuuguucgugugugugucguugcaggccuuauucaagcuuaccaugggccagaucgugaccuucuuucaagaggucccccacguuauugaagaggugaugaacaucgugcugauugcccucagcauccuggcuguccuuaaggggcuguacaauuucgccacaugcggacucgugggccugguuacguuucuucugcucugugggagauccugcaccacaucucuguauaaaggaguguacgaacugcagacccucgagcugaacauggaaacacuuaauauguguaugccucugagcugcaccaagaacaauucccaucacuauauuauggucggcaacgagacagggcucgagcugacccuuacgaauaccucuaucaucgaccauaaauucuguaaccugagcgaugcgcaccggaagaaucucuacgaccaugcucugauguccauuaucucuacauuucaccugagcauuccgaacuucaaucaguaugaagccauguccugcgauuuuaacggaggcaaaaucagcgugcaguacaaucucucucacuccuaugccaaggacgcugccgaucauuguggcaccguugcuaacggggugcugcaaacauucaugcgcauggccuggggaggcagcuacauugcgcuugacucugggagaggacggugggauugcaucaugaccuccuaccaguaucugauuauccagaauacgacaugggaggaccacugucaguuuagccgccccucuccuaucggcuaccucgggcugcuuucccaaagaacccgggauauuuauaucagccgcagacggcgcggaacauucaccuggacccuguccgacucugaaggcaaggauacacccggcggguacugccucacgagauggaugcugauugaggccgagcugaaauguuuuggaaacaccgcugucgccaagugcaacgaaaaacaugacgaggaguucugcgauaugcuccggcuguuugacuucuguaagcaggcuauccagcgccuuaaagccccugcgcagaugagcauucaacugaucaauaaggccgugaacgcucucaucaaugaccagcugauuaugaagaaccaccuuagagauaucaugggcauucccuauugcaauuacuccaaauauugguaccugaaccacacaaccacagggaagaccagccucccuaaauguuggcuggugucuaauggauccuaccugaacgaaacgcauuucagcgacgauaucgaacagcaagccgacaauaugauuacagagaugcuccagaaggaguauauggaacggcagggcaaaaccccgcuggggcuugucgaucuguuuguuuucucuaccagcuuuuaccucaucuccaucuuccugcaccuggugaagauucccacacaucgccacaucgugggaaaaccuugccccaagccucauagacuuaaccacaugggcauuuguucuugcggccucuauaagcagcccggggucccggugaaauggaagcggugaggacuagucccuguucccagagcccacuuuuuuuucuuuuuuugaaauaaaauagccugucuuucagaucucaaaggcucuuuucagagccaccaaaaaaaaaaaaaaaaaaaaaaaaaaaaaaaaaaaaaaaaaaaaaaaaaaaaaaaaaaaaaaaaagaauu

SEQ ID NO: 23234 - RNA, 1717 nt, Artificial Sequence
  mRNA product Design a-1 (hSL-A64-N5) comprising derived and/or modified sequence from LASV(LM776-SLE-2012;Clade IV)__AIT17824__GPCmut2 (opt5)
aggagagucccgcagucggcguccagcggcucugcuuguucgugugugugucguugcaggccuuauucaagcuuaccaugggccagaucgugaccuucuuucaagaggucccccacguuauugaagaggugaugaacaucgugcugauugcccucagcauccuggcuguccuuaaggggcuguacaauuucgccacaugcggacucgugggccugguuacguuucuucugcucugugggagauccugcaccacaucuguguauaaaggagucuacgaacugcagacccuggagcucaacauggaaacacugaauauguguaugccucuuagcugcaccaagaacaauucccaucacuauauuauggugggcaacgagacagggcuggagcucacccugacgaauaccucuaucaucaaccauaaauucuguaaucuuagcgacgcgcacaagaaaaaccuguacgaucaugcucucauguccauuaucucuacauuucaccugagcauuccgaauuucaaccaguaugaagccauguccugcgacuuuaauggaggcaagaucagcguucaguacaaccugucucacuccuaugccggcgaugcugccaaucauugugggaccguggcuaacggaguccuccaaacauucaugcggauggccuggggcgggagcuacauugcgcuggacucuggacacggcaagugggauugcaucaugaccuccuaccaguaucuuauuauccagaacacgacaugggaggaccauugucaguuuagccgccccucuccuaucggguaccugggacuccugucccaaagaacccgggauauuuauaucagccgcagacggcgcggcacauucaccuggacccuuuccgacucugaaggcaaagauacacccgggggauacugccugacgagauggaugcucauugaggccgagcugaaguguuuuggcaauaccgcuguggccaaaugcaacgaaaagcacgacgaggaguucugcgauaugcugcggcucuuugacuucuguaaacaggcuauccagcgccugaaggccccugcgcagaugagcauucaacuuaucaauaaggccgugaacgcucugaucaaugaucagcucauuaugaaaaaccaccugagagacaucauggggauucccuauugcaauuacuccaaguauugguaccuuaaccauacaaccacaggaaaaaccagccugccuaaguguuggcucgucucuaauggcuccuaccugaacgaaacgcacuucagcgacgauaucgaacagcaagccgacaauaugauuacagagaugcugcagaaagaguauauggaacggcaggggaagaccccgcucggacugguugaucuuuuuguguucucuaccagcuuuuaccugaucuccaucuuccuccaucuggugaaaauucccacacaccgccauaucgucggcaagucuugcccuaagccccacagacugaaccacaugggcauuuguagcugcgggcuuuauaaacagccuggagugcccguucgguggaagcgcugaggacuagucccuguucccagagcccacuuuuuuuucuuuuuuugaaauaaaauagccugucuuucagaucucaaaggcucuuuucagagccaccaaaaaaaaaaaaaaaaaaaaaaaaaaaaaaaaaaaaaaaaaaaaaaaaaaaaaaaaaaaaaaaaagaauu

SEQ ID NO: 23235 - RNA, 1717 nt, Artificial Sequence
  mRNA product Design a-1 (hSL-A64-N5) comprising derived and/or modified sequence from LASV(Mad39;Clade IV)__ANH09722__GPCmut2 (opt5)
aggagagucccgcagucggcguccagcggcucugcuuguucgugugugugucguugcaggccuuauucaagcuuaccaugggccagaucgugaccuucuuucaagaggucccccacguuauugaagaggugaugaacaucgugcugauugcccucagcauccuggcuguccuuaaggggcuguacaauguggccacaugcggacucauuggccugguuacguuccuucugcucugugggagauccugcaccacaacccuguauaaaggaguguacgaacugcaggcgcucgagcugaacauggaaacacuuaauauguguaugccucugucuugcaccaagaacaauagccaucacuauauccgggucggcaacgagacagggcucgagcugacccuuacgaauaccucccugaucaaccauaaauuuuguaaucucucugacgcucacaagaaaaaccuguacgaucaugcccugaugagcauuaucuccacauuccaccucucuauuccgaauuuuaaccaguaugaagccaugagcugcgacuucaaugauggaaagaucuccgugcaguacaaccugagccacaccuaugcuggcgacacagccaaucauuguggcaccguugcuaacggggugcuucaaacguuuaugcgcauggccuggggaggcucuuacauugcgcuggauuccgggagaggaggcugggacugcaucaugacaagcuaccaguaucucauuauccagaacaccacaugggaggaucacugucaguucucucggcccuccccuaucggguaccugggacuucugagccaacgcaccagagacauuuauaucucucggcgcagacggggcaccuuuacauggacgcucuccgauagcgaaggcaaggacacccccgggggauacugccugacacgcuggaugcugauugaggccgagcucaaauguuucggcaauaccgcugucgccaagugcaacgaaaaacaugaugaggaauuuugcgacaugcugagacuuuucgauuuuuguaagcaggcuauccagcggcugaaagccccugcgcagauguccauucaacucaucaauaaggccgugaacgcucugaucaaugaccagcuuauuaugaagaaccaucugcgcgacaucauggggauucccuauugcaauuacucuaaauauugguaccucaaccacacagugaccggaaagacgagccugccuaaauguuggcuggucuccaauggcagcuaccucaacgagacacacuucucugaugacaucgaacagcaagccgauaauaugauuaccgagaugcugcagaaggaguauauggaaagacaggggaaaaccccgcuuggacugguugaccucuucguguuuuccaccagcuucuaccugaucucuaucuuucugcaccuugugaagauucccacacaucggcacgucgugggcaaaccuugccccaagccucaucgccucaaccacaugggcaucuguagcugcggguucuauaagcagcccggaguuccggugagauggaaacggugaggacuagucccuguucccagagcccacuuuuuuuucuuuuuuugaaauaaaauagccugucuuucagaucucaaaggcucuuuucagagccaccaaaaaaaaaaaaaaaaaaaaaaaaaaaaaaaaaaaaaaaaaaaaaaaaaaaaaaaaaaaaaaaaagaauu

SEQ ID NO: 23236 - RNA, 1717 nt, Artificial Sequence
  mRNA product Design a-1 (hSL-A64-N5) comprising derived and/or modified sequence from LASV(Z0947-SLE-2011;Clade IV)__AIT17840__GPCmut2 (opt5)
aggagagucccgcagucggcguccagcggcucugcuuguucgugugugugucguugcaggccuuauucaagcuuaccaugggccagaucgugaccuucuuucaagaggucccccacguuauugaagaggugaugaacaucgugcugauugcccucagcauccuggcuguccuuaaggggcuguacaauuucgccacaugcggacucgugggccugguuacguuucuucugcucugugggagauccugcaccauuucucuguauaaaggaguguacgaacugcagacacucgagcugaacauggaaacccuuaauauguguaugccucugagcugcacaaagaacaauucccaucacuauaucauggucggcaacgagaccgggcucgagcugacacuuaccaauacgucuaucauuaaccauaaauucuguaaucugagcgacgcgcacaagaaaaaccucuacgaucaugcucugauguccaucauuucuaccuuucaccugagcaucccgaauuucaaccaguaugaagccauguccugcgacuuuaauggaggcaagauuagcgugcaguacaaccucucucacuccuaugccggcgaugcugccaaucauugugggacaguugcuaacggagugcugcaaaccuucaugcggauggccuggggcgggagcuacaucgcgcuugacucuggacgcgauagaugggacugcauuaugacauccuaccaguaucugaucauccagaacaccacgugggaggaucacugucaguuuagccggcccucuccuauuggcuaccucgggcugcuuucccaacgcacaagagacaucuauauuagccggcgcagacggggaaccuucacauggacccuguccgauucugaaggcaaggacacccccggcggguacugccucacacgcuggaugcugaucgaggccgagcugaaauguuuuggaaauacggcugucgccaagugcaacgaaaaacaugaugaggaguucugcgacaugcucagacuguuugauuucuguaagcaggcuauucagcggcuuaaagccccugcgcagaugagcauccaacugaucaauaaggccgugaacgcucucauuaaugaccagcugaucaugaagaaccaccuucgcgacauuaugggcauccccuauugcaauuacuccaaauauugguaccugaaccacaccacaaccgggaagacaagccucccuaaauguuggcuggugucuaauggauccuaccugaacgaaacccauuucagcgaugacauugaacagcaagccgauaauaugaucacggagaugcuccagaaggaguauauggaaagacagggcaaaacaccgcuggggcuugucgaccuguuuguuuucucuaccagcuuuuaccucaucuccauuuuccugcaccuggugaagauccccacccaucggcacauugugggaaaaccuugccccaagccucaucgccuuaaccacaugggcaucuguucuugcggccucuauaagcagcccggggucccggugaaauggaagagaugaggacuagucccuguucccagagcccacuuuuuuuucuuuuuuugaaauaaaauagccugucuuucagaucucaaaggcucuuuucagagccaccaaaaaaaaaaaaaaaaaaaaaaaaaaaaaaaaaaaaaaaaaaaaaaaaaaaaaaaaaaaaaaaaagaauu

SEQ ID NO: 23237 - RNA, 1748 nt, Artificial Sequence
  mRNA product Design a-1 (hSL-A100) comprising derived and/or modified sequence from LASV(Josiah;Clade IV)__NP_694870__GPCmut2 (opt1)
aggagagucccgcagucggcguccagcggcucugcuuguucgugugugugucguugcaggccuuauucaagcuuaccaugggccagaucgugaccuucuuccaggaggucccccacgugaucgaggaggugaugaacaucguccugaucgcccucagcgugcuggccgugcugaaggggcucuacaacuucgcgaccugcggccuggucgggcuggugacguuccuccugcugugcggccgcuccugcaccaccagccucuacaaggggguguacgagcugcagacccuggagcucaacauggagacgcugaacaugugcaugccgcuguccugcaccaagaacaacagccaccacuacaucauggucggcaacgagaccggccucgagcugacgcugaccaacaccuccaucaucaaccacaaguucugcaaccucagcgacgcccacaagaagaaccuguacgaccacgcccugauguccaucaucagcaccuuccaccucuccauccccaacuucaaccaguacgaggccaugagcugcgacuucaacgggggcaagaucuccgugcaguacaaccugagccacuccuacgccggggacgcggccaaccacugcggcacgguggccaacgggguccugcagaccuucaugcggauggccuggggcggcagcuacaucgcgcucgacuccgggcgcggcaacugggacugcaucaugaccagcuaccaguaccugaucauccagaacaccacgugggaggaccacugccaguucucccggcccagccccaucggguaccugggccuccugucccagcgcacccgggacaucuacaucagccgccggcgccggggcaccuucaccuggacgcugagcgacuccgaggggaaggacaccccgggcggguacugccugacccgcuggaugcucaucgaggccgagcugaagugcuucggcaacaccgccguggccaagugcaacgagaagcacgacgaggaguucugcgacaugcugcggcuguucgacuucugcaagcaggccauccagcgccugaaggcgcccgcccagaugagcauccagcugaucaacaaggccgugaacgcccucaucaacgaccagcugaucaugaagaaccaccuccgggacaucauggggauccccuacugcaacuacuccaaguacugguaccucaaccacacgaccaccggccgcaccagccugcccaagugcuggcuggucuccaacggcagcuaccucaacgagacgcacuucuccgacgacaucgagcagcaggccgacaacaugaucaccgagaugcugcagaaggaguacauggagcggcaggggaagacgccccugggccucguggaccuguucguguucagcaccuccuucuaccugaucagcaucuuccugcaccucgucaagaucccgacccaccgccacaucguggggaaguccugccccaagccccaccggcugaaccacaugggcaucugcagcugcgggcuguacaagcagcccggcgugccggucaaguggaagcgcugaggacuagucccuguucccagagcccacuuuuuuuucuuuuuuugaaauaaaauagccugucuuucagaucucaaaggcucuuuucagagccaccaaaaaaaaaaaaaaaaaaaaaaaaaaaaaaaaaaaaaaaaaaaaaaaaaaaaaaaaaaaaaaaaaaaaaaaaaaaaaaaaaaaaaaaaaaaaaaaaaaaaa

SEQ ID NO: 23238 - RNA, 1745 nt, Artificial Sequence
  mRNA product Design a-1 (hSL-A100) comprising derived and/or modified sequence from LASV(LP;Clade I)__AAF86701__GPCmut2 (opt1)
aggagagucccgcagucggcguccagcggcucugcuuguucgugugugugucguugcaggccuuauucaagcuuaccaugggccagaucaucaccuucuuccaggaggugccccacgucaucgaggaggugaugaacaucgugcugaucgcccucagccugcuggccauccucaaggggcuguacaacaucgcgaccugcggcaucaucgggcuggucgccuuccucuuccugugcggcaaguccugcagccugacgcucaagggcggguacgagcugcagacccuggagcucaacauggagacccugaacaugugcaugccgcuguccugcacgaagaacagcucccaccacuacauccgcgugggcaacgagaccgggcucgagcugacccugaccaacacgagcaucaucaaccacaaguucugcaaccucuccgacgcccacaagaagaaccuguacgaccacgcccugaugagcaucaucuccaccuuccaccucagcauccccaacuucaaccaguacgaggccauguccugcgacuucaacggcgggaagaucagcgugcaguacaaccugucccacagcuacgcgggcgacgccgccgagcacugcgggaccgucgccaacggcgugcugcagaccuucaugcggauggcguggggcgggcgcuacaucgcccucgacuccggcaaggggaacugggacugcaucaugacgagcuaccaguaccugaucauccagaacaccaccugggaggaccacugccaguucucccggcccagccccaucggcuaccugggccuccugucccagcgcacccgggacaucuacaucagccgccggcgccgggggacguucaccuggacccugagcgacuccgagggcaacgagacccccgggggcuacugccugacgcgcuggaugcucaucgaggccgagcugaagugcuucgggaacaccgccguggccaagugcaacgagaagcacgacgaggaguucugcgacaugcugcggcuguucgacuucugcaagcaggcgauccgccggcugaaggcccccgcccagaugagcauccagcugaucaacaaggccgucaacgcccucaucaacgaccagcugaucaugaagaaccaccuccgcgacaucaugggcauccccuacugcaacuacuccaaguacugguaccucaaccacaccagcuccggccggaccagccugcccaagugcuggcugaucuccaacgggagcuaccucaacgagacgcaguucuccgacgacaucgagcagcaggcggacaacaugaucaccgagaugcugcagaaggaguacaucgagcgccagggcaagaccccgcuggggcucguggacaucuucaucuucagcaccuccuucuaccugaucagcaucuuccugcaccugaucaagaucccgacgcaccggcacaucgugggcaagcccugccccaagccccaccgccucaaccacaugggggucugcuccugcggccuguacaagcacccgggcgugcccaccaaguggaagcggugaggacuagucccuguucccagagcccacuuuuuuuucuuuuuuugaaauaaaauagccugucuuucagaucucaaaggcucuuuucagagccaccaaaaaaaaaaaaaaaaaaaaaaaaaaaaaaaaaaaaaaaaaaaaaaaaaaaaaaaaaaaaaaaaaaaaaaaaaaaaaaaaaaaaaaaaaaaaaaaaaaaaa

SEQ ID NO: 23239 - RNA, 1745 nt, Artificial Sequence
  mRNA product Design a-1 (hSL-A100) comprising derived and/or modified sequence from LASV(803213;Clade II)__AAF86703__GPCmut2 (opt1)
aggagagucccgcagucggcguccagcggcucugcuuguucgugugugugucguugcaggccuuauucaagcuuaccaugggccagaucaucaccuucuuccaggaggugccccacgucaucgaggaggugaugaacaucgugcugaucgcccucagccugcuggccauccucaaggggaucuacaacgucgcgaccugcggccuguucgggcugaucuccuuccuccugcugugcggccgcagcugcuccgugacguacaaggggguguacgagcuccagacccuggagcugaacauggccaaccucaacaugugcaugccgcugagcugcaccaagaacaacucccaccacuacaucauggucggcaacgagacgggccuggagcucacccugaccaacaccagcaucaucaaccacaaguucugcaaccuguccgacgcccacaagaagaaccucuacgaccacgcccugaugagcaucaucuccacguuccaccugagcauccccaacuucaaccaguacgaggccauguccugcgacuucaacgggggcaagaucagcgugcaguacaaccucucccacagcuucgcgguggacgccgccaaccacugcgggaccaucgccaacggcguccugcagaccuucaugcggauggcguggggcggguccuacaucgcccuggacagcggcaaggggaacugggacugcaucaugaccuccuaccaguaccucaucauccagaacacgaccugggaggaccacugccaguucagccgccccucccccaucggcuaccuggggcugcucagccagcggacccgcgacaucuacaucagccggcgccgccggggcaccuucacguggacccucuccgacagcgagggcaacgaggcccccgggggcuacugccugacccgguggaugcugaucgaggccgagcucaagugcuucgggaacaccgccguggcgaagugcaacgagaagcacgacgaggaguucugcgacaugcugcgccuguucgacuucugcaagcaggccaucaagcggcucaagacgcccgcccagauguccauccagcugaucaacaaggccgugaacgcccugaucaacgaccagcucaucaugaagaaccaccuccgcgacaucaugggcauccccuacugcaacuacagccgguacugguaccugaaccacaccgucaccgggaagaccucccugccccgcugcuggcuggugagcaacggcuccuaccugaacgagacgcacuucagcgacgacaucgagcagcaggcggacaacaugaucaccgagaugcuccagaaggaguacauggaccggcagggcaagaccccgcuggggcugguggaccucuucgucuucuccaccagcuucuaccugaucuccaucuuccugcaccuggugaagaucccgacgcaccgccacaucgugggcaagcccugccccaagccccaccggcucaaccacauggggaucugcagcugcggccuguacaagcacccggggguccccgugaaguggaagcgcugaggacuagucccuguucccagagcccacuuuuuuuucuuuuuuugaaauaaaauagccugucuuucagaucucaaaggcucuuuucagagccaccaaaaaaaaaaaaaaaaaaaaaaaaaaaaaaaaaaaaaaaaaaaaaaaaaaaaaaaaaaaaaaaaaaaaaaaaaaaaaaaaaaaaaaaaaaaaaaaaaaaaa

SEQ ID NO: 23240 - RNA, 1745 nt, Artificial Sequence
  mRNA product Design a-1 (hSL-A100) comprising derived and/or modified sequence from LASV(GA391;Clade III)__CAA36645__GPCmut2 (opt1)
aggagagucccgcagucggcguccagcggcucugcuuguucgugugugugucguugcaggccuuauucaagcuuaccaugggccagaucgugaccuucuuccaggaggucccccacgugaucgaggaggugaugaacaucguccugaucgcccucagcauccuggccauccugaaggggcucuacaacguggcgaccugcggccugaucgggcuggugacguuccuccugcuguccggccgcagcugcucccucaucuacaaggggaccuacgagcugcagacccuggagcucaacauggagacccugaacaugugcaugccgcugagcugcaccaagaacaacucccaccacuacauccgggucggcaacgagaccggccucgagcugacccugacgaacaccagcauccucaaccacaaguucugcaaccuguccgacgcccacaagcgcaaccuguacgaccacagccucauguccaucaucagcaccuuccaccuguccauccccaacuucaaccaguacgaggccaugagcugcgacuucaacgggggcaagaucaccgugcaguacaaccugucccacagcuucgccguggacgccgcggggcacugcggcacgcucgccaacgggguccugcagaccuucaugcggauggccuggggcggcuccuacaucgcccuggacagcgggcgcggcaacugggacugcaucaugaccuccuaccaguaccucaucauccagaacaccacgugggacgaccacugccaguucagccggcccucccccaucggguaccugggccugcucagccagcgcacccgggacaucuacaucagccgccggcgccggggcaccuucaccuggacgcucuccgacagcgaggggaacgagaccccgggcggguacugccugacccgcuggaugcugaucgaggcggagcucaagugcuucggcaacaccgccguggccaagugcaacgagaagcacgacgaggaguucugcgacaugcugcggcuguucgacuucugcaagcaggccauccgccggcucaagacgcccgcccagauguccauccagcugaucaacaaggcggugaacgcccugaucaacgaccagcucaucaugaagaaccaccuccgcgacaucauggggauccccuacugcaacuacagccgguacugguaccugaaccacaccuccaccggcaagaccagccugccccgcugcuggcugaucuccaacggcagcuaccugaacgagacgaaguucuccgacgacaucgagcagcaggccgacaacaugaucaccgagaugcuccagaaggaguacaucgaccggcaggggaagacgccccugggccuggucgaccuguucguguucagcaccuccuucuaccucaucagcaucuuccugcaccuggugaagaucccgacccaccgccacaucgucgggaagcccugccccaagccccaccggcucaaccacaugggcaucugcuccugcgggcuguacaagcagccgggcgugcccgugcgcuggaagcggugaggacuagucccuguucccagagcccacuuuuuuuucuuuuuuugaaauaaaauagccugucuuucagaucucaaaggcucuuuucagagccaccaaaaaaaaaaaaaaaaaaaaaaaaaaaaaaaaaaaaaaaaaaaaaaaaaaaaaaaaaaaaaaaaaaaaaaaaaaaaaaaaaaaaaaaaaaaaaaaaaaaaa

SEQ ID NO: 23241 - RNA, 1748 nt, Artificial Sequence
  mRNA product Design a-1 (hSL-A100) comprising derived and/or modified sequence from LASV(AV;Clade V)__CCA30314__GPCmut2 (opt1)
aggagagucccgcagucggcguccagcggcucugcuuguucgugugugugucguugcaggccuuauucaagcuuaccaugggccagaucgugaccuucuuccaggaggucccccacgugaucgaggaggugaugaacaucguccugaucgcccucagcauccuggccgugcugaaggggcucuacaacaucgcgaccugcggccugaucgggcugaucacguuccuccugcugugcggccgcuccugcagcuccaaccucuacaaggggguguacgagcugcagagccuggaccucaacauggagacccugaacaugugcaugccgcuguccugcaccaagaacaacagccaccacuacauccgggucggcaacgacacgggccucgagcugacccugaccaacaccuccauccucaaccacaaguucugcaaccugagcgacgcccacaagaaggaccuguacgaccacgcccucauguccaucaucagcacguuccaccuguccauccccaacuucaaccaguacgaggccaugagcugcgacuucaacgggggcaagaucuccgugcaguacaaccugagccacuccuacgccaucgacgcggccaaccacugcgggaccguggccaacggcauccuccagaccuucaugcgcauggccuggggcgggagcuacaucgcgcuggacuccggccgggggaacugggacugcaucaugaccagcuaccaguaccugaucauccagaacacgaccugggagaaccacugccaguucucccgccccagccccaucggcuaccucgggcugcugagccagcggacccgcgacaucuacaucucccggcgccgccggggcaccuucacguggacccugagcgacuccgagggcaacgccacccccgggggcuacugccucacccgguggaugcugaucgaggccgagcugaagugcuucgggaacacggccgucgccaagugcaacgagaagcacgacgaggaguucugcgacaugcuccgccuguucgacuucugcaagcaggcgaucagccggcugaagucccccgcccagaugagcauccagcucaucaacaaggccgugaacgcccugaucaacgaccagcugaucaugaagaaccaccuccgcgacaucaugggcauccccuacugcaacuacuccaaguacugguaccugaaccacaccaucaccgggaagaccagccugcccaagugcuggcucguguccaacggcagcuaccugaacgagacgcacuucuccgacgacaucgagcagcaggccgacaacaugaucaccgagaugcugcagaaggaguacauggagcggcagggcaagaccccgcucgggcuggucgaccuguucguguucagcaccuccuucuaccugaucagcaucuuccuccgccuggugaagaucccgacgcaccggcacaucgucggcaagcccugccccaagccccaccgccugaaccacauggggaucugcuccugcggccucuacaagcagccgggggugcccgugcgguggaagcgcugaggacuagucccuguucccagagcccacuuuuuuuucuuuuuuugaaauaaaauagccugucuuucagaucucaaaggcucuuuucagagccaccaaaaaaaaaaaaaaaaaaaaaaaaaaaaaaaaaaaaaaaaaaaaaaaaaaaaaaaaaaaaaaaaaaaaaaaaaaaaaaaaaaaaaaaaaaaaaaaaaaaaa

SEQ ID NO: 23242 - RNA, 1745 nt, Artificial Sequence
  mRNA product Design a-1 (hSL-A100) comprising derived and/or modified sequence from LASV(Togo/2016/7082;Clade VI)__AMR44577__GPCmut2 (opt1)
aggagagucccgcagucggcguccagcggcucugcuuguucgugugugugucguugcaggccuuauucaagcuuaccaugggccagaucaucaccuucuuccaggaggugccccacgucaucgaggaggugaugaacaucgugcugaucgcccucagccugcuggccauccucaagggggucuacaacguggcgaccugcggcaucaucgggcuggugacguuccuguuccucugcggccgcuccugcagccugaucuacaagggguccuacgagcugcagacccucgagcugaacauggagacccugaacaugugcaugccgcucagcugcacgaagaacuccagccaccacuacauccgggucggcaacgagaccggccuggagcugacccucaccaacacguccaucaucaaccacaaguucugcaaccugagcgacgcccacaagcgcaaccuguacgaccacgcccucauguccauccugagcaccuuccaccuguccauccccaacuucaaccaguacgaggccaugagcugcgacuucaacgggggcaagaucuccgugcaguacaaccucagccacgccuacgcgguggacgccgccgagcacugcgggaccgucgccaacggcgugcugcagaccuucaugcggauggcguggggcggguccuacaucgcccuggacagcggccgcgggaacugggacugcaucaugacguccuaccaguaccucaucauccagaacaccaccugggaggaccacugccaguucagccggcccucccccaucggcuaccuggggcugcucagccagcgcacccgggacaucuacaucagccgccggcgccggggcacguucaccuggacccucuccgacagcgagggcaacgagacccccgggggcuacugccugacgcgcuggaugcugaucgaggccgagcucaagugcuucgggaacaccgccguggccaagugcaacgagaagcacgacgaggaguucugcgacaugcugcggcuguucgacuucugcaagcaggcgauccagcgccucaagucccccgcccagaugagcauccagcugaucaacaaggccgucaacgcccugaucaacgaccagcucaucaugaagaaccaccuccgggacaugaugggcauccccuacugcaacuacuccaaguacugguaccugaaccacaccagcuccgggcgcaccagccugcccaagugcuggcugguguccaacggcagcuaccugaacgagacgcacuucuccgacgacaucgagcagcaggccgacaacaugaucaccgagaugcuccagaaggaguacaucgaccggcagggcaagaccccgcuggggcugguggaccucuucgucuucagcaccuccuucuaccugaucagcaucuuccugcaccugaucaagaucccgacgcaccgccacaucgugggcaagcccugccccaagccccaccggcucaaccacauggggaucugcuccugcggccuguacaagcagccgggggugcccacccgcuggaagcggugaggacuagucccuguucccagagcccacuuuuuuuucuuuuuuugaaauaaaauagccugucuuucagaucucaaaggcucuuuucagagccaccaaaaaaaaaaaaaaaaaaaaaaaaaaaaaaaaaaaaaaaaaaaaaaaaaaaaaaaaaaaaaaaaaaaaaaaaaaaaaaaaaaaaaaaaaaaaaaaaaaaaa

SEQ ID NO: 23243 - RNA, 1745 nt, Artificial Sequence
  mRNA product Design a-1 (hSL-A100) comprising derived and/or modified sequence from LASV(KAK-428;Clade n.d. (VII))__ANH09740__GPCmut2 (opt1)
aggagagucccgcagucggcguccagcggcucugcuuguucgugugugugucguugcaggccuuauucaagcuuaccaugggccagaucgugaccuucuuccaggaggucccccacgugaucgaggaggugaugaacaucguccugaucgcccucagccugcuggccauccucaaggggcuguacaacuucgcgaccugcggcgugaucgggcugaucacguuccuccugcugugcggccgcuccugcagcgccaccuacaaggggcaguacgagcuccagacccuggagcugaacauggagucccucaacaugugcaugccgcugagcugcacgaagaacaacucccaccacuacauccgggccggcaacaacaccggccuggagcucacccugaccaacacgagcaucaucucccacaaguucugcaaccugagcgacgcccacaagaagaaccucuacgaccacacccugauguccaucaucaccaccuuccaccugagcauccccaacuucaaccaguacgaggccauguccugcgacuucaacgggggcaagaucagcauccaguacaaccucucccacagcuacgcgggggacgccgcccagcacugcggcacgguggccaacgggguccugcagaccuucaugcgcauggcguggggcggcuccuaccuggcccucgacagcgggcggcgcggcugggacugcaucaucuccagcuaccaguaccugaucauccagaacaccaccugggacgaccacugccaguucucccggcccagccccaucggguaccugggcuucgugagccagaagacgcgcgacaucuacaucucccggcgccgccggggcaccuucaccuggacccugagcgacuccgaggggcacgacaugccgggcggguacugccucacgcgguggaugcugaucgaggccgaccugaagugcuucggcaacaccgccguggccaagugcaacgagaagcacgacgaggaguucugcgacauguggcgccucuucgacuucugcaagcaggcgauccagcggcugaaggcccccgcccagaugaacauccagcugaucaacaaggccgucaacgcccucaucaacgaccagcugaugaugaagaaccaccuccgcgacaucauggggauccccuacugcaacuacagcaaguucugguaccugaacaacaccaccacgggccggaccucccugccccgcugcuggcugaucagcaacggcuccuaccucaacgagacccacuucagcgacgacaucgagcagcaggcggacaacaugaucaccgagaugcugcagaaggaguacauggaccggcaggggaagacgccccugggccucguggaccuguucguguucuccaccagcuucuaccugaucaccaucuuccuccaccuggucaagaucccgacccaccgccacaucguggggaagcccugccccaagccccaccggcugaaccacaugggcaucugcuccugcgggcuguacaagcagccgggcgugcccguccgcuggaagcggugaggacuagucccuguucccagagcccacuuuuuuuucuuuuuuugaaauaaaauagccugucuuucagaucucaaaggcucuuuucagagccaccaaaaaaaaaaaaaaaaaaaaaaaaaaaaaaaaaaaaaaaaaaaaaaaaaaaaaaaaaaaaaaaaaaaaaaaaaaaaaaaaaaaaaaaaaaaaaaaaaaaaa

SEQ ID NO: 23244 - RNA, 1745 nt, Artificial Sequence; identical to SEQ ID NO: 23238
  mRNA product Design a-1 (hSL-A100) comprising derived and/or modified sequence from LASV(Pinneo-NIG-1969;Clade I)__AIT17836__GPCmut2 (opt1)

SEQ ID NO: 23245 - RNA, 1745 nt, Artificial Sequence
  mRNA product Design a-1 (hSL-A100) comprising derived and/or modified sequence from LASV(ISTH0009-NIG-2011;Clade II)__AIT17404__GPCmut2 (opt1)
aggagagucccgcagucggcguccagcggcucugcuuguucgugugugugucguugcaggccuuauucaagcuuaccaugggccagaucaucaccuucuuccaggaggugccccacgucaucgaggaggugaugaacaucgugcugaucgcccucagccugcuggccauccucaaggggaucuacaacgucgcgaccugcggccuguucgggcugguguccuuccuccugcugugcggccgcagcugcuccacgaccuacaaggggguguacgagcuccagacccuggagcuggacauggccagccucaacaugugcaugccgcuguccugcacgaagaacaacagccaccacuacaucauggucggcaacgagaccggccuggagcucacccugaccaacacguccaucaucaaccacaaguucugcaaccugagcgacgcccacaagaagaaccucuacgaccacgcccugauguccaucaucagcaccuuccaccuguccauccccaacuucaaccaguacgaggccaugagcugcgacuucaacgggggcaagaucuccgugcaguacaaccucagccacgcguacgccguggacgccgccaaccacugcgggaccaucgcgaacggcguccugcagaccuucaugcggauggccuggggcggguccuacaucgcccuggacagcggcaagggguccugggacugcaucaugacgagcuaccaguaccucaucauccagaacaccaccugggaggaccacugccaguucucccgccccagccccaucggcuaccuggggcugcucagccagcggacccgcgacaucuacaucucccggcgccgccggggcacguucaccuggacccucagcgacuccgagggcaacgagacccccgggggcuacugccugacgcgguggaugcugaucgaggccgagcucaagugcuucgggaacaccgccguggcgaagugcaacgagaagcacgacgaggaguucugcgacaugcugcgccuguucgacuucugcaagcaggccauccggcgccucaagacccccgcccagaugagcauccagcugaucaacaaggccgugaacgcccugaucaacgaccagcucaucaugaagaaccaccuccgggacaucaugggcaucccguacugcaacuacuccaaguacugguaccugaaccacaccgucacggggaagaccagccugccccgcugcuggcugguguccaacggcagcuaccugaacgagacccacuucuccgacgacaucgagcagcaggcggacaacaugaucaccgagcuccugcagaaggaguacauggaccggcagggcaagacgccccuggggcucguggaccuguucgucuucagcaccuccuucuaccugaucagcaucuuccugcaccucaucaagaucccgacccaccgccacaucaccggcaagcccugccccaagccccaccggcugaaccacauggggaucugcuccugcggccuguacaagcacccgggggugcccgugaaguggaagcgcugaggacuagucccuguucccagagcccacuuuuuuuucuuuuuuugaaauaaaauagccugucuuucagaucucaaaggcucuuuucagagccaccaaaaaaaaaaaaaaaaaaaaaaaaaaaaaaaaaaaaaaaaaaaaaaaaaaaaaaaaaaaaaaaaaaaaaaaaaaaaaaaaaaaaaaaaaaaaaaaaaaaaa

SEQ ID NO: 23246 - RNA, 1745 nt, Artificial Sequence
  mRNA product Design a-1 (hSL-A100) comprising derived and/or modified sequence from LASV(ISTH2010-NIG-2012;Clade II)__AIT17482__GPCmut2 (opt1)
aggagagucccgcagucggcguccagcggcucugcuuguucgugugugugucguugcaggccuuauucaagcuuaccaugggccagaucaucaccuucuuccaggaggugccccacgucaucgaggaggugaugaacaucgugcugaucgcccucagccugcuggccauccucaaggggaucuacaacgucgcgaccugcggccuguucgggcugguguccuuccuccugcugugcggccgcagcugcuccacgaccuacaaggggguguacgagcuccagacccuggagcuggacauggccagccucaacaugugcaugccgcuguccugcacgaagaacaacagccaccacuacaucauggucggcaacgagaccggccuggagcucacccugaccaacacguccaucaucaaccacaaguucugcaaccugagcgacgcccacaagaagaaccucuacgaccacgcccugauguccaucaucagcaccuuccaccuguccauccccaacuucaaccaguacgaggccaugagcugcgacuucaacgggggcaagaucuccgugcaguacaaccucagccacgcguacgccguggacgccgccaaccacugcgggaccaucgcgaacggcguccugcagaccuucaugcggauggccuggggcggguccuacaucgcccuggacagcggcaagggguccugggacugcaucaugacgagcuaccaguaccucaucauccagaacaucaccugggaggaccacugccaguucucccgccccagccccaucggcuaccuggggcugcucagccagcggacccgcgacaucuacaucucccggcgccgccggggcaccuucacguggacccucagcgacuccgagggcaacgagacccccgggggcuacugccugacccgguggaugcugaucgaggccgagcucaagugcuucgggaacacggccguggcgaagugcaacgagaagcacgacgaggaguucugcgacaugcugcgccuguucgacuucugcaagcaggccauccggcgccucaagacccccgcccagaugagcauccagcugaucaacaaggccgugaacgcccugaucaacgaccagcucaucaugaagaaccaccuccgggacaucaugggcauccccuacugcaacuacuccaaguacugguaccugaaccacaccgucaccgggaagacgagccugccccgcugcuggcugguguccaacggcagcuaccugaacgagacccacuucuccgacgacaucgagcagcaggcggacaacaugaucaccgagcuccugcagaaggaguacaucgaccggcagggcaagaccccgcuggggcucguggaccuguucgucuucagcacguccuucuaccugaucagcaucuuccugcaccucgugaagaucccgacccaccgccacguggucggcaagcccugccccaagccccaccggcugaaccacauggggaucugcuccugcggccuguacaagcacccgggggugcccgugaaguggaagcgcugaggacuagucccuguucccagagcccacuuuuuuuucuuuuuuugaaauaaaauagccugucuuucagaucucaaaggcucuuuucagagccaccaaaaaaaaaaaaaaaaaaaaaaaaaaaaaaaaaaaaaaaaaaaaaaaaaaaaaaaaaaaaaaaaaaaaaaaaaaaaaaaaaaaaaaaaaaaaaaaaaaaaa

SEQ ID NO: 23247 - RNA, 1745 nt, Artificial Sequence
  mRNA product Design a-1 (hSL-A100) comprising derived and/or modified sequence from LASV(Lassa virus/H.sapiens-wt/NGA/2015/ISTH_0543;Clade II)__AVO03639__GPCmut2 (opt1)
aggagagucccgcagucggcguccagcggcucugcuuguucgugugugugucguugcaggccuuauucaagcuuaccaugggccagaucaucaccuucuuccaggaggugccccacgucaucgaggaggugaugaacaucgugcugaucgcccucagccugcuggccauccucaaggggaucuacaacgucgcgaccugcggccuguucgggcugguguccuuccuccugcugugcggccgcagcugcuccacgaccuacaaggggguguacgagcuccagacccuggagcuggacauggccaaccucaacaugugcaugccgcugagcugcacgaagaacaacucccaccacuacaucauggucggcaacgagaccggccuggagcucacccugaccaacacgagcaucaucaaccacaaguucugcaaccuguccgacgcccacaagaagaaccucuacgaccacgcccugaugagcaucaucuccaccuuccaccugagcauccccaacuucaaccaguacgaggccauguccugcgacuucaacgggggcaagaucagcgugcaguacaaccucucccacaccuacgcgguggacgccgccaaccacugcgggaccaucgccaacggcguccugcagacguucaugcggauggcguggggcgggagcuacaucgcccuggacuccggcaaggggagcugggacugcaucaugaccuccuaccaguaccucgugauccagaacaccaccugggaggaccacugccaguucagccgccccucccccaucggcuaccuggggcugcucagccagcggacgcgcgacaucuacaucagccggcgccgccggggcaccuucaccuggacccucuccgacagcgagggcaacgagacgcccgggggcuacugccugacccgguggaugcugaucgaggccgagcucaagugcuucgggaacaccgccguggccaagugcaacgagaagcacgacgaggaguucugcgacaugcugcgccuguucgacuucugcaagcaggcgauccggcgccucaagacccccgcccagauguccauccagcugaucaacaaggccgucaacgcccugaucaacgaccagcucaucaugaagaaccaccuccgggacaucaugggcauccccuacugcaacuacagcaaguacugguaccugaaccacacggugaccgggaagaccucccugccccgcugcuggcuggugagcaacggcuccuaccugaacgagacccacuucagcgacgacaucgagcagcaggccgacaacaugaucacggagcuccugcagaaggaguacaucgaccggcagggcaagaccccgcuggggcucgucgaccuguucguguucuccaccagcuucuaccugaucuccaucuuccugcaccucgugaagaucccgacccaccgccacaucacgggcaagcccugccccaagccccaccggcugaaccacauggggaucugcagcugcggccuguacaagcacccggggguccccgugaaguggaagcgcugaggacuagucccuguucccagagcccacuuuuuuuucuuuuuuugaaauaaaauagccugucuuucagaucucaaaggcucuuuucagagccaccaaaaaaaaaaaaaaaaaaaaaaaaaaaaaaaaaaaaaaaaaaaaaaaaaaaaaaaaaaaaaaaaaaaaaaaaaaaaaaaaaaaaaaaaaaaaaaaaaaaaa

SEQ ID NO: 23248 - RNA, 1745 nt, Artificial Sequence
  mRNA product Design a-1 (hSL-A100) comprising derived and/or modified sequence from LASV(Lassa virus/H.sapiens-wt/NGA/2016/ISTH_0009;Clade II)__AVO03571__GPCmut2 (opt1)
aggagagucccgcagucggcguccagcggcucugcuuguucgugugugugucguugcaggccuuauucaagcuuaccaugggccagaucaucaccuucuuccaggaggugccccacgucaucgaggaggugaugaacaucgugcugaucgcccucagccugcuggccauccucaaggggaucuacaacgucgcgaccugcggccugcuggggcucguguccuuccugcugcucugcggccgcagcugcuccacgaccuacaaggggguguacgagcugcagacccuggagcucgacauggccagccugaacaugugcaugccgcuguccugcacgaagaacaacagccaccacuacaucauggucggcaacgagaccggccucgagcugacccugaccaacacguccaucaucaaccacaaguucugcaaccucagcgacgcccacaagaagaaccuguacgaccacgcccugauguccaucaucagcaccuuccaccucuccauccccaacuucaaccaguacgaggccaugagcugcgacuucaacgggggccggaucuccgugcaguacaaccugagccacuccuacgcgguggacgccgccaaccacugcgggaccaucgccaacggcguccugcagaccuucaugcgcauggcguggggcgggagcuacaucgcccucgacuccggcaaggggagcugggacugcaucaugacguccuaccaguaccugaucauccagaacaccaccugggaggaccacugccaguucagccggcccagccccaucggcuaccuggggcuccugucccagcgcacccgggacaucuacaucagccgccggcgccggggcacguucaccuggacccuguccgacagcgagggcaacgagacccccgggggcuacugccugacgcgcuggaugcucaucgaggccgagcugaagugcuucgggaacaccgccguggccaagugcaacgagaagcacgacgaggaguucugcgacaugcugcggcuguucgacuucugcaagcaggcgauccgccggcugaagacccccgcccagauguccauccagcugaucaacaaggccgugaacgcccucaucaacgaccagcugaucaugaagaaccaccuccgcgacaucaugggcaucccguacugcaacuacagcaaguacugguaccucaaccacaccgucacggggaagaccucccugccccggugcuggcuggugagcaacggcuccuaccucaacgagacccacuucagcgacgacaucgagcagcaggccgacaacaugaucaccgagcugcugcagaaggaguacaucgaccgccagggcaagacgccccucgggcugguggaccuguucgucuucuccaccagcuucuaccugaucuccaucuuccuccaccuggugaagaucccgacccaccggcacaucaccggcaagcccugccccaagccccaccgccugaaccacauggggaucugcagcugcggccucuacaaccacccgggggugcccgucaaguggaagcggugaggacuagucccuguucccagagcccacuuuuuuuucuuuuuuugaaauaaaauagccugucuuucagaucucaaaggcucuuuucagagccaccaaaaaaaaaaaaaaaaaaaaaaaaaaaaaaaaaaaaaaaaaaaaaaaaaaaaaaaaaaaaaaaaaaaaaaaaaaaaaaaaaaaaaaaaaaaaaaaaaaaaa

SEQ ID NO: 23249 - RNA, 1745 nt, Artificial Sequence
  mRNA product Design a-1 (hSL-A100) comprising derived and/or modified sequence from LASV(Lassa virus/H.sapiens-wt/NGA/2016/ISTH_0017;Clade II)__AVO03567__GPCmut2 (opt1)
aggagagucccgcagucggcguccagcggcucugcuuguucgugugugugucguugcaggccuuauucaagcuuaccaugggccagaucaucaccuucuuccaggaggugccccacgucaucgaggaggugaugaacaucgugcugaucgcccucagccugcuggccauccucaaggggaucuacaacgucgcgaccugcggccuguucgggcugguguccuuccuccugcugugcggccgcagcugcuccacgaccuacaaggggguguacgagcuccagacccuggagcuggacauggccagccucaacaugugcaugccgcuguccugcacgaagaacaacagccaccacuacaucauggucggcaacgagaccggccuggagcucacccugaccaacacguccaucaucaaccacaaguucugcaaccugagcgacgcccacaagaagaaccucuacgaccacgcccugauguccaucaucagcaccuuccaccuguccauccccaacuucaaccaguacgaggccaugagcugcgacuucaacgggggcaagaucuccgugcaguacaaccucagccacaccuacgcgaucgacgccgccaaccacugcgggaccaucgccaacggcgugcugcagacguucaugcggauggcguggggcggguccuacaucgcccuggacagcggcaagggguccugggacugcaucaugaccagcuaccaguaccucaucauccagaacaccaccugggaggaccacugccaguucucccgccccagccccaucggcuaccuggggcugcucagccagcggacgcgcgacaucuacaucucccggcgccgccggggcaccuucaccuggacccucagcgacuccgagggcaacgagacgcccgggggcuacugccugacccgguggaugcugaucgaggccgagcucaagugcuucgggaacaccgccgucgccaagugcaacgagaagcacgacgaggaguucugcgacaugcugcgccuguucgacuucugcaagcaggcgauccggcgccucaagacccccgcccagaugagcauccagcugaucaacaaggccgugaacgcccugaucaacgaccagcucaucaugaagaaccaccuccgggacaucaugggcauccccuacugcaacuacuccaaguacugguaccugaaccacacggugaccgggaagaccagccugccccgcugcuggcuggucuccaacggcagcuaccugaacgagacccacuucuccgacgacaucgagcagcaggccgacaacaugaucacggagcuccugcagaaggaguacauggaccggcagggcaagaccccgcuggggcucguggaccuguucguguucagcaccuccuucuaccugaucagcaucuuccugcaccucguccgcaucccgacccaccggcacgugaucggcaagcccugccccaagccccaccgccugaaccacauggggaucugcuccugcggccuguacaagcacccgggggugcccgucaaguggaagcggugaggacuagucccuguucccagagcccacuuuuuuuucuuuuuuugaaauaaaauagccugucuuucagaucucaaaggcucuuuucagagccaccaaaaaaaaaaaaaaaaaaaaaaaaaaaaaaaaaaaaaaaaaaaaaaaaaaaaaaaaaaaaaaaaaaaaaaaaaaaaaaaaaaaaaaaaaaaaaaaaaaaaa

SEQ ID NO: 23250 - RNA, 1745 nt, Artificial Sequence
  mRNA product Design a-1 (hSL-A100) comprising derived and/or modified sequence from LASV(Lassa virus/H.sapiens-wt/NGA/2018/ISTH_0959;Clade II)__AVV65099__GPCmut2 (opt1)
aggagagucccgcagucggcguccagcggcucugcuuguucgugugugugucguugcaggccuuauucaagcuuaccaugggccagaucaucaccuucuuccaggaggugccccacgucaucgaggaggugaugaacaucgugcugaucgcccucagccugcuggccauccucaaggggaucuacaacgucgugaccugcggccuguucgggcugguguccuuccuccugcugugcggccgcagcugcuccacgaccuacaagggggucuacgagcuccagacccuggagcuggacauggcgagccucaacaugugcaugccgcuguccugcacgaagaacaacagccaccacuacaucauggugggcaacgagaccggccuggagcucacccugaccaacacguccaucaucaaccacaaguucugcaaccugagcgacgcccacaagaagaaccucuacgaccacgcccugauguccaucaucagcaccuuccaccuguccauccccaacuucaaccaguacgaggccaugagcugcgacuucaacgggggcaagaucuccgugcaguacaaccucagccacgccuacgcgaucgacgccgccaaccacugcgggaccaucgccaacggcguccugcagaccuucaugcggauggcguggggcggguccuacaucgcccuggacagcggcaagggguccugggacugcaucaugacgagcuaccaguaccucaucauccagaacaccaccugggaggaccacugccaguucucccgccccagccccaucggcuaccuggggcugcucagccagcggacccgcgacaucuacaucucccggcgccgccggggcacguucaccuggacccucagcgacuccgagggcaacgagacccccgggggcuacugccugacgcgguggaugcugaucgaggccgagcucaagugcuucgggaacaccgccguggccaagugcaacgagaagcacgacgaggaguucugcgacaugcugcgccuguucgacuucugcaagcaggcgauccggcgccucaagacccccgcccagaugagcauccagcugaucaacaaggccgugaacgcccugaucaacgaccagcucaucaugaagaaccaccuccgggacaucaugggcaucccguacugcaacuacuccaaguacugguaccugaaccacaccgucacggggaagaccagccugccccgcugcuggcugguguccaacggcagcuaccugaacgagacccacuucuccgacgacaucgagcagcaggccgacaacaugaucaccgagcuccugcagaaggaguacaucgaccggcagggcaagacgccccuggggcucguggaccuguucgucuucagcaccuccuucuaccugaucagcaucuuccugcaccucgugaagaucccgacccaccgccacgugaucggcaagcccugccccaagccccaccggcugaaccacauggggaucugcuccugcggccuguacaagcacccggggguccccgugaaguggaagcgcugaggacuagucccuguucccagagcccacuuuuuuuucuuuuuuugaaauaaaauagccugucuuucagaucucaaaggcucuuuucagagccaccaaaaaaaaaaaaaaaaaaaaaaaaaaaaaaaaaaaaaaaaaaaaaaaaaaaaaaaaaaaaaaaaaaaaaaaaaaaaaaaaaaaaaaaaaaaaaaaaaaaaa
